United States Patent Application Publication US 2008/0050393 A1 - sequence listing, part 41

SEQ ID NO: 137141 - DNA, 9359 bp, Homo sapiens
  misc_feature (1)...(9359): n = a,t,c or g
taacgtatatcttaactttattgaataagtaagtagccattacatatagattgcaagtcattcttggtcctgcttagagataggtgtttattccaaggtgaaatgacagcacaaatccacagttctactgcaagtgaaatacttcttcagggtggcttggtatggacacaatctccctcaatacccattcaaagcagtctttgctttcacctctccctttaagggaagggattcacggtatgtaaaataagcttgtaaagaaccccttctgtatcagaggtagtttttgtgcctgcactgtgaaccatagaaggcatttggtcaaaggtgtcataaaaggggcagaagaggtacatcagagcacagagttgggatcgattatttttttcaagttaattgcccatagtagcaaaagtatcaaccaaaatttagaatagcctgtccatccatttaacaacagagcatgcagcagcctgtgcagacaatagcttttagagacaaacttcgatctggtttgagcaccaagaatgcatcttaaaaagtgaaaaattcatttgtgtgcaatgaatagtgtagtgagctgcatggtgccccctccccaataaagatattcaatatcctaactccctggaacctgtgatagtaccttatttggaaaaaaggtcctttcagatataattaagaatcttggaataagggaatgatcatgggtaatctggatgggccctaagtcccgtcacaagtgtccttataagagagaggcagaggtagattatatatacagaggggaagtgatgtgaagacagaggagagggagatgcagtcacaaaccaaggaatgatggcagccacaagaaactggaagacacgggaagagtgtttcccttagagtctccagaagacgttcagccctgccaacccctcaattttggacttttggcctccaaaacaacaagataataaatttntattgttttaagccactgggctagagggtaatttgttacagcagccatgggaatctaatgcagattgtggaactgggacggattgggtacttctgtaacaaatgtcttagaatgtgagaaaggctttggaattggataatgggtagagactagaagaattttggtggatgtgatagaaaaaaactagattgcctttaccagatggtagtagtatgaatgttaaaggcatttctagtgatggtttagaaggaaatgaagattttattggaaaatggaagaaagggaatccttgtcatatagtggcaaaaagtttatctatctaaattgtctactacagtagtgtgaaaagttgaataaatgatgaacttggatgtttagctgaggaaattttcaagtctagtgttagagatatagcttagtttcttcttagtgcttatagtaaaataagacagnaaacagatacattgacaaaacaggctgggcatggtggcttacacctgtaatccggcactttaggaggccaagatgggtggattgcttgaggctaggagttcgagagcagcctggacaacatagcaagatcaagtctctacaaaaaaatgcaaaaaattagccaggcatggtggcatgcacctgtagacccagctacttggaaggctgatgcaggaggatcccttgagcctgggagtttgaggttacagtgagctatgtttgcaccactacactgcagcctgggtgacagagtgagacctcatctctaatacattaaaaaaaatttttttttaaagagaaaataactatataagtggacaaaaggaatcagtatctgatgactgggtaaattctgagcctgaattcacaatctggaatgattgtaaaaaaaaaaaaaaagatgctaaaattaggagattcactgttagaaaagtgtgctctgtagataagcccaagggtgtgtcttgacaacctttggctagtgctgaagaggttaggcattaacttgtggatttatttgactgtttcaacagaagccaagaatagagatggggttgttcaggaaaaatctgtgaggaccctcttttctgaatgtgtgaatcaatgtgacatacgtagaagacccacaagatttttgagaatgttctaccatcagaaacanttccaactgggcctaaaagggacagagacagaaaaaaatgaaagaagattgtgagactgccagaattctacaggtaggaaacccgttgataaaacttctcagctgcaaacatgtgccacccttcaagataaaggaagcaccatcccgagagcagagctgcaggtacagaggcagaggcccaagtgtgggaacagaggaagaagtgcaacccataggcacagaggcagaggcccaatccatagtccaagaaagaagagctacaggcccaaagggtggagccctgagaaagaggattactgccaggccttgaaatagaacagaaatttgcctggctagattttgaaaatgattgggacaggagactccattccaatttccattctctcctttttgagacagaaatgtctgtaactgttatcctatgcctgttcccaccattgtaatttgaaagcagattaacttttctgtttcactggttctcagaggaagaggatttggcctcaggaaagaccatacccagagtttcactcatacctgatttagatgatctaaatgatnagctttggaacttttgaaccgatnatatttgaatgaaattttggacttaggattgatataatgggttgagacttttggtaatgttaggatgggatgaatgtcttttacacatgagacagacataaattttgggccaaagggcagactctggtgggctaagagtggcttcctaaaagacatagccacatcctaatccccaaaaccatgaatttatcttatttggagaagggggccttgcagatntaattnagttaagactcatgaggtgaggagattatcctggagtaatctgggtagtccctaaaagtcatcataaggatccttattaaacagaggcagaggcagattaggtatacagaggagggtgatgtgaagacacagcagaaagagaaatgtggccataagccaaaaaatgccaatngccaccaaaaggtggacgtggcaaggaaagattctcctctngagcctctggagggagccatggctttgctgcccttcaaaaatgtaagcaaataagtttctgttgtgttaagccatcatattattggtggtaatttgttacagcagccaaaggagataatggatgcaattagttgttaatattttaaggattctgtaccttttaaaaatattctgaagaaaatctgcataaatggtgcttctcatgtgtggcagtaatatggccaacaaaagaccttagtgtaatttggtttcatactaaaaatgtcactatatactttttttggtgatatactttccaatcatctaaaacaaaactgcaaatggctagagcaggaccattacaaatctgggaaacaaaccttttaactcactcaactattggaacttcatgaaagaccctgaaaggtttttttttttaatgtttgtgaaaagcatgtgggattgctctaaataaaaatatataagtaagttatcaataatagtacttcattcgttcttgttcacnaactagaaaataaggcaagtttgtatctggaaaaggtgatgatacatatcagtatttctaccttgaccagcttgataatatagcaaggcatatgctcccaaattttagtcagggtnaacatttcaagatcattctcctacagactgataagctgtcaaaagaattaaaaaagccataccacgaagatttcagaaaagaaagactttgtaaagtcaaaaatacacatactaggtatttacataaattagaacctaaacttttgttgttgttaaaaaacagtgttactgctatgtccctgaaatgtgtgtgtgcatgtgtgtgcatttgtgtatgtgtgttttcagatcggataggactgtgaaatttcagatactgttaccctttttgatttttctattgtagcagcttcagagctttttaaagaagtataatacctaagtaaggatgcactggaggcaaaggcagcagtttgaatcattatacatctatataaaggaattatctgtgggctgctggtcacttgtttactttatctcagatggggatttgccaagccagccatttgttcttctctctgaatatctacaatgtgctttgaatgagtagaaacagtattttctaacataagaaatatacatgtangaaatttcttacaataatcacaatcaatcatctgcatgaattagacttaaaattgcactccagagaagttataccacattatttcaatgcatattttaaaataatagacagacaagttaagtataacttttactccctaatttatttaagaaaaatgtagaacctgttttccctgctagacttgttttggcagcatcatcttaatttgttaatataaggtaagtaagtatgatgataattgagaagaagttcacttagttggaattattgtagcaagagatagaaatatatacacatatttacacatacatacataaaatttctttttcttcttcagaccaccaaagtgaaattggaaagagagtggaaagggagataaaacaattgacctttcagacagttttctgctgcctcctgtaaaaagaattctttttcctctcaggttttctagaagtctatttccctgccttcaagggactcaagggagaaagaagcaatagaaaaaagaaataaaccacagagcataggaatcaatatttgcctttgaaatctaaataaacgtaatagaattttccaggttcatccctagcataaacattaaaatgtgagggttttctcaaaaatagccatataaagtatttgtataaagtagatatctgtgcataattagaaaatacctctttaaataaagtttaaatcactttccctaactgattcggttaaactttggtttatttatttttagcaatgagaagtgcttgcaatatcatgctgaaatgctagctagactaatgataagtttaatttcagccaaagcagatgaatccatcagctttcacttgagataaaattcctaaataactcaactggggtggagcagtactttcgtgaatttccaaaatggcttctcttacagtgtgcataatattagcctctctccaaatcaagatgcatatttttcttggcccttttctattatatatgtactagggattggaagctgacactggataattctttctattctttttcttctcttttgtttttggggggggtgacttacacatttaagattttaaatttttggactgagtgtttttgaaagccttagaactcttcaatttcttacacttccatcatcacagtcaggtcacacacaattacaaatgatacacatctttacactaaaatggaacacattttgtaatcctgataactgtgttcagattagaataattgtgggaggagtcttgcaatagtattacaaatgcacactacttcatccagcttatcttgatctttgcagaaatgcacttatttcctttccagccgctgagtgcacactttgttccttctcaaaatgcatcattttgtttttacttaaatattttcatattctttggcatcaggaatcacttagatgagatagctccattgtggcgagagcgtgacctttccaaaggtactcgtctgttatctggattccttggaatccgctttcgacggtctctgaatgctgcacctgattgtagggcttctagaagattatccatcacaccagtctcatcaccctctttgtttatatcaatgagttgtttctttttcttctggcgttctaacttttcttgttcagctttctcttttgcaagttttgccctcctggtcttctcttccatttctcttctcttattgttttctctcactgcttccaaaaacaaagttcggaagttgttgagatcaccaaagaactcttctatgctcactgtctttgagtcaaaaatgaagtattctccaagattctcatagagcttcatcatgttgttgtgcatggtggagagtttttaaaacggttataggccattcttagtaaagctggtcatcttttccacaaactaatggtgatgattttcgagtttggggaaatttcttgaggtcacgttccagatgaacaatctgatgttccactgatgcaagagctgctcttgagaatttgagctgaaactttggcttgcactttatacgtgttccagttattcaggaaattttaggatatctcgatatttttcctcacaaatgtcggcaataaaatgcaaaagggttgttatttgatccgctgattttagtatctctgatcttacaaaggaagttgatcttaaatcccaaagactgggcatttcttgagcctgagttcatgtagtttccaacaagaagaactaactctaaaagtctgttaaagctttcacttttcttcagttcttcacaggcaagagttactgctatgatgcttggtttgatgttgtttatgtgttcttcaaatgtgagcttgaacaggatactactgagacgaggctgtaacattttcacagagctcatcacaactccaaattgttcaggctcacagaggtcatcatattcattcttaagctctgctaattcgttgagtatcttctgctcaggaagatgtttcacaaggttctgaattaaagcctcactcagcatgtcttcattaacctccagaataacgtttcttatgtcttcatatggcatgcgatatgatcccagaaagatggacagattctgagctgttttgggatccaaaattctcagttctttcactttcttctttgtaggcccagtcttcttttcttctaatgcttctgcgttcttttgaacttttatctgagtagcaaaattcaatgccaatttggcaaagagatctggattctcaaacttgtcttctttgactcttaaccagaaacagttctcagataattctgtgggttcaatctttgaccaattgattctcttcatggacacttcaggtttatacatttttttctgcttcattccataaggtagattaagtgatattcctgggggaggaggaactcctccaaggggtggtggtggaggaggtcccccaaataaaagtggtggtgggggtggtggtggtatccccatcattccaggtaaaggaggtggtggaggaggaagaggagctcctccgggtagaggtggcgcgggtggtggtggaggcggccctacacctggcaatggaggtgctgcaggaggacctggaattcctgatgaacttgagagtacttgtgcctgggttcgaagttgctggatttctgcttcaagttctttgattttctcatctcttttttgaagctctgcttgagcttcctgtcgagctgtgaattcttcatcgaacttctttgaaaactctgcagctttttgttcactttcttcaactttcgccttgttcacacaagaatctatcagatgagttaaatcgatgtctaatctttgcctgtatttgaagtctggatccataccactgcagtgtagcactatctgtgaaacacattcctcaattattttataatattgtggcctgatataataatcatttctgataagcaaaaaatgttgtagaatagataagaagtaattttcagcagcagtgtccttcagcatattatatagaagatggtagacttcattcatatcatccatttctgctcgaatgtcattgagacggtgtgataattcagttaggtcatcttctttgttttcatcaaatactttcaactgaatatcaagctcatcattctctttttcttttagatctggtaacattgtttttagtcctgaacggaggaattcattccttaaatgtattcgaaaatcaagctcataaggagaagtgacaagggcatttataaactgcatgcaggccacctgtaattgcaaggcttcctgattttctaaaccttccacaattggtgaaaatcgttccctgttatttctttctgctgctgttgttatagcccctaaaagtttatctagaatgttctcttctccaacaatgcaaatagcagaaagtatttttactatttcagtcatcatgttgggttgtttggggtcaattgctcttgccaatagtaaaagacttctttcatctcctagaatcctttgtaatccaaacttattattcataaatgctttgaggcattgaataagtttatactgattcttcttgtcaatattttcttgctgttttttgtccagaagcttttccagctcatccaataagagtccaagaccttcatggccaaagttgttaacccagctgaccggattgctggttaaagaaaccctgagggattctaggcaattaagaagtttctcatctgatatacccgatcgtaattcatgaacatattcttgtgaagacagggtgcattcatgtttgctgtttttcagcccaccagatttggcagtggcagaaatatactggacaaccatctcacgtttggtggtaaagtctttgtttcgtaaaggagcttttttctcttcgttaaggttcatgtcctccatcattttttcaaagagatccaatacttccttttctgacaaattcaaagatcgttcatcatataatggctgagctgcaggaaactcactcatcgcgacttgagaatcaataggatgttgaataagaggtttttcttttttgacagtagattttctaaaacttgtaattcggtcacgcacatcatctgccaaagtttttatttgaatgttcaatttgggtttgtttttcgtttcctcttcattggcggcccggttccccgcgctccgcttgttgctccggcccccaccgggttcctcgctgccgcctcccgctcccgacgccgccgccccgggctgctccatctttctccggccctgtcacctgtgccctgtaaccccacctctcctcaactgagaaagcacctcggggcgctcacactgccccgcgctgactcggcggcacctcttcctgagggagagagtgtctgcccgggaagctgccgatttcaggcccccgggactccaggctcccaggcacccccgacgcaaccacgccgttgccactactcggcgctggggcaagccctgcccctgagcagttgcaattaccacggtcgccgccgccctcagggcggtgtttagggtggagggaaaagtaggtgcctatctctttaagagggcctcaacacacgtgattcttcaaagtgccccgc

SEQ ID NO: 137142 - DNA, 666 bp, Homo sapiens; identical to SEQ ID NO: 117606

SEQ ID NO: 137143 - DNA, 408 bp, Homo sapiens
gaggatacgaagcgttttcggcttcctgcccggagctgtgcagcaaacagtcgacccccatggggctcagccttcccctgagtactagcgtccctgacagcgcggaatctgggtgcagttcctgcagtaccccactctacgatcaggttagtaggtgtccctgccacagggaagaagtaagaactggcaaaggcatggaagagtagtgccagggagaatatagaaagtgacctgcagcattatttataacggaggggacacagggatatgatttattccacagttaagtggtctgacggagccgagtctccagttgtaggctctacggaaatgaacttgctggtcctgcccaggcaaatgggcttagttccctatttatttatcctccagcaacagaactgagttccg

SEQ ID NO: 137144 - DNA, 2963 bp, Homo sapiens
gttaaatggaacctctccatgtgtatatagtatttccttgtataaagcactttactacctaccacttgtgttgtgaacgtttggtgactgctgttgaaagaaggaaaagggtgtgtgagaaagcctactgaagcagcagcactgccactacatgtggacaaaagtgaacatataaaagaagttggtgctatttaactctgaatacttggagaaacttagggtgaagatgcaaccagaaaggagaatatggtatgcgtgaagtctcagctttgagctggaggctagattccaagatgacagccatgatgaaactttttaaaaaactaaaccagaagagactttaaaataagagaaagaaatcataaatgtaagacatatgcttggctaaaggggaaatggactttaaattttaaagaggctcatttgcaatgccacttgtatacacttcaaaaattattgtagacacagaatttgttaatatttttgtgccttagtaatttaaacctgaacattgaaacagttttcctccttgtctttcttaacagtgataggcccttaaaagttcccggttttttaacccaatgtatgtgatagtcaaaaaatcacagtttttcattattattcatcttctgtacccacgcataaccactatacatagtttcttttgtacttgaatatacaaaacatgaacacagtgccatatgaataatttcacatacagaacctttttttctctgaagtcctgtggacttgcaaatatatatatatattgctttgttaatttgtttttatatataatcctatgtaataaaggaatatgatctgacatttgggctgtgtgtgcgacgcggtttcggaagggcaaatcggggggaaaccgcggaaagaagccgaaggaagcccggagccccgcgtcgacgctccctctctcagtcccaaaagcgggcttttggttcggcgcagagagacccgggggtctagcttttcctcgaaaagcgccgccctgcccttggccccgagaacagacaaagagcaccgcagggccgatcgacgctgggggcgctgaggccggccatggtcatggaagtgggcaccctgggacgctggaggcctgcgggcgcttgctgggggagcgagcggcgcaattgcctgcttgcttggactgccgctccttctttcgctttcaacgccggccacatcgccggctctgtcaacgtgcgcttcagcaccatcgtgcggccgccgggccaaagggcgccattggggccttggaagcacatcgtgcccaacgccgagctccgcgcgccgcctgctggccggcgcctaccacgccgtggtgttgctggacgagcgcagcgccgggcctggacggcgccaagcgcgacggcaccctggccctggcggccgggcgcgctcttgccgcgaggcgcgcgccgcgcaagtcttcttccctcaaaaggaggatacgaagccgttttcggcttcctgccccggagctgtgcagcaaacagtcgacccccatggggctcagccctttccctgagtactagcgtccctgacagcgcggaatctgggtgcaagttcctgcagtaccccaactctacgatccagggtggcccggtggaaatcctgccctttctgtacctgggcagtgcgtatcacgcttcccgcaaggacagtgctggatgcgcttgggcatagactgccttggatcaacgtgctcagccagattgtcccaaaccattttggagggtcacttaccagtacaagagcatccctgtggaggacaaccacaaggcagacatcagcttctggttcaacggaggccattgacttcatagactccatcaagaatgctggaggaagggtgtttgtccactgccaggcaggcatttcccggtcagccacacatctgccttgcttaccttatgaggactaatcgagtcaagctggacgaggccctttgagtttgtgaagcagaggcgaagcatcatctctccccaactttcagcttcatggggccagcttgctgcagtttgagttccccaggatgcttggtcccgcactgtttcgggcagaggctgggaagccccggcaaatggctgtgcttcgaccgaggcaccatccaccaccaccgtgttcaacttccccgtctccatccctgtccactccacgaacagtgcgctgagcgtaccgttcagagccccattaacggacctttcccagctggttgaaaggcccacggggaggtgaggctcttcacatccccattgggacttccatgctcccttgagaggagaaatgcaataactctggggaggggttcgagagggctggtccttatttatttaacttcaccccgagttccctctgggtttctaaggcagttatgggtgatgacttaggcgtcaagacattttgctggaacttcagcacatttcggggacccaatatatagtggggtaccatccaagtccattctggacaaaatggggggcaggaagaggaaagggacttcagtgtgttgatccccggtttctttttttgcttcgcccctgtttttttgtagaatctcttccatggcttggacatacctacccagtattattcccggacgacacatatacatatgagaatataccttatttatttttggtgtaggtgtctgccttcacaaatgtcattgtcctactcccctagaagaacccaaataccctcaatttttgtttttgaagtactgtacctatccctgtaaatatatccttaagcaggtttgttttcagcactgatggaaaatacccagtgttgggttttttttttagttgccaacagttgtatgtttgctgattatttatgacctgaaataatatatttcttcttctaagaagacattttgttacataaggatgacttttttatacaatgggaataaattatggcatttctaaaaaaaaaaaaaaaaa

SEQ ID NO: 137145 - DNA, 458 bp, Homo sapiens
  misc_feature (1)...(458): n = a,t,c or g
ggccacgaggcnctctccgcccctccttctgcggcgtctcgagggaccatggccgatcctcgcgtgagacagatcaagatcaagaccggcgtggtgaagcggttggtcaaagaaaaagtgatgtatgaaaaagaggcaaaacaacaagaagaaaagattgaaaaaatgagagctgaagacggtgaaaattatgacattaaaaagcaggaaaatgaaaaagacttggaagaagctgaggaatataaagaagcacgtttagtactggattcagtgaagttagaagcctgaaacttttctcgtatggggtggtttttgcattaaatcctggggtccattttacaatccattatttttgaccactgctatgtgttcaagtagtatgagaatgtgattgtttttatctggttacatatatatttctttgtctaatttaatatgtcaaataaatgagttcatct

SEQ ID NO: 137146 - DNA, 495 bp, Homo sapiens
gcaggatttcctcatgatcccaaggtgtctgacacaagtggcaggtgtcacacacaggtgacaatgtccaggttggtcaaagaaaaagtgatgtatgaaaaagaggcaaaacaacaagaagaaaagattgaaaaaatgagagctgaagacggtgaaaattatgacattaaaaagcagcttaaaccacgtatgccgtcagtgcactggtcgccacctactgtcagagctcgatttaatgcatcgggtaatcgccctagggtcttctcgcctagtcacagacgcgtgtataaactgaccggctcagtgcacaacgacacgacatgcacggcagagatcctacaagaatccaggatgatgatcccagattgccagcgcaggttggaagccgcatatttggatcttcaacggatactagaaaatgaaaaagacttggaagaagctgaggaatataaagaagcacgtttagtactggattcagtgaagttagaagcctga

SEQ ID NO: 137147 - DNA, 639 bp, Homo sapiens
atgtcaccagcatctgcttctggtgagggcctcatggcagaaggtgaagggagagccagcatgtcacatgtttctttcttatggtctggagagaaagctaattttctaaaacatttttggcttttttataggttggtcaaagaaaaagtgatgtatgaaaaagaggcaaaacaacaagaagaaaagattgaaaaaatgagagctgaagacggtgaaaattatgacattaaaaagcaggatcacaactccttaccagcaagggaacaaagctggatggagaatgagtttgacaaattgacagaagtaggcttcataaggtgggtaataacaaactcctctgagctacgggaggacattctaacccatcgaaaggaagctaagaaccttgaaaaaaatttagacgaatggctaactagaataaccagtgtagagaagtgcttaaaggagctgatggagctgaaaaccaaggctcgagaactacgtgaagaatgcagaagcctcaggagccgatgcgatcaactggaagaaagggtatcagcaatggaagatgaaatgaatgaaatgaagcgagaagggaagtttagagaaaaaagaataaaaagaaatgagcaagcctccaagaaatatgggactatgtga

SEQ ID NO: 137148 - DNA, 675 bp, Homo sapiens
cccacgcgtacgtggacgcgtgggcggataccccggctctccgcccaaccttctcgcggcgctcgagggaccatggccgatcctcgcgtgagacagatcaagatcaagaccggcgtgggtgaagcggttggtcagaagaaaaagtgttgtatgaaaaagagccaaaacaaccaagaagaaaagattgaaaaaatgagagctgaagacggtgaaaattatgacattaaaaagcaggcagagatccttacaagaatcccaggatgatgattcccagatttgccagcgcaggtttggaagccgcatatttggatcttcaacggatactagaaaatgaaaaagaccttggaaagaagctgaggaatataaagaagcacgttttagtactggattcagtgaagttagaaagcctgaaacttttctcgtatggggtggtttttgcattaaaaccccgggggcccattttacaatccattatttttgaccatgtgctatgtgttcaagtagtwatgagaatgtgattgttttttatctggttacatatatatttctttgtctaatttaatatgtcaaataaaatgagttcatctaataaaattgtgtattttatactgtaaaaaaaaaaataaaggtgtggcgtatagtgagtcggtcgcgcggccgcaatttagtagtgta

SEQ ID NO: 137149 - DNA, 789 bp, Homo sapiens
atggctatgctactaccttgccagccccatagtgccatgacactgtgcagtcaggcaccgtgtatgaaatctaacaatgcgctcatcgtcatcctcggcaccgtcaccctggatgctgtaggcataggcttggttatgccggtactgccgggcctcttgcgggatatcgtccattccgacagcatcgccagtcactatggcgtgctgctagcgctatatgcgttgatgcaatttctatgcgcacccgttctcggagcactgtccgaccgctttggccgccgcccagtcctgctcgcttcgctacttggagccactatcgactacgcgatcatggcgaccacacccgtcctgtggatctacccactattgactgtcagctgtccttgctccatgatgctgtttttgacaacggatgttttattgcctttggtgttcattaagaagcttggcgcaaatgttggctttttatcctcgaagaagcctctgtttgtcttgtggcttgggataaccacattgtttgcctttggctttgcggctctgtcgaggtgtcagagtgatatcgacgagtgctctggaaacccttgcctgcacggggccctctgtgagaacacgcacggctcctatcactgcaactgcagccacgagtacaggggacgtcactgcgaggatgctgcgcccaaccagtatgtgtccacgccgtggaacattgggttggcggaaggaattggaatcgttgtgtttgttgcagggatatttttactggtggtggtgtttgttctctgccgttag

SEQ ID NO: 137150 - DNA, 1062 bp, Homo sapiens
atgggacatggggtgctctctcgggaagaaggcatgatctcaggtggtgcagctctccttaagctagggcatggcctagaaaaggactcagctaggaagtgtgagctgtggatactcccagaagctaggggaggttgtggtcgtaaacgctgctggcgcatttctccccaaagtgtctgtgagttctgggagccttcatttggcaaggactggatccttccccagagactgccttcactgatcacagagccactgaatggggtacaaacgaccagtccctttgcctcaactccccctgagagtgctccctcagcaaagcacgagtaccaagcctctgtctcaggttctgtttctagcaaacctgaaatagaccttcagctctatgatgaggtacgagatcaagatgtgcctgtaaaacgcaactttgcaaggattgtggtcaatgtcagcgacacgaatgaccacgccccgtggttcaccgcttcctcctacaaagggcgggtttatgaatcggcagccgttggctcagttgtgttgcaggtgacggctctggacaaggacaaagggaaaaatgctgaagtgctgtactcgatcgagtcaggctcgcatcctccctataagactgcagctgatgtgctcttgaaagcaccacctcctggctggaggccaaccaacacaaaaccagtgcactcaacagaagcacaaccaacacaaaaccagcgcactcaacagaaacacaaccaaggagcctcacggagtcctcgtcactcctttgctacctccaccagagcaggtgctggtatctgcggctgcaagacccgaagatggatgacaagatggatggaagagtcacggggctctttgcagacactcccaagtaccagactggagcctggtagctccgctgcgtggctagacccagaagagcaagcacagtccctacagttcagctctcaggaagccccattcctaggggaagggggagaaaaccacatcaagggagtcccccatgggacaaaagaatctcaacagcagcccttgaatcacagatcttccctctga

SEQ ID NO: 137151 - DNA, 1227 bp, Homo sapiens
atggcagcagccaggccttcccccaccggttacccgaccatacgacgaacggcaagaaacaaagaaaacttttcttcagatagttcttacgttcaggcaagaaaaatttcccccgggggaaaactccagggtctcctgttggttcccttggaaatgtatgttggggcacttaaaactgggtatcactgggatacatcagattggatgccaagcgttcctctgccggacatacaagagttccccaactatgaggtgattgatgagcagacacccctgtactcagcagatccaaacgccatcgatacggactattaccttggaggctacgacatccccagtgattttcctccacccccagaagacttcaccgcagctgatgagctaccaccgttaccgcccgaattcagcaatcagtttgaatccatccaccctcctagagacatgcctgccgcgggtagcttgggttcttcatcaagaaaccggcagaggttcaacttgaatcagtatttgcccaatttttatcccctcgatatggggatcctcagaggattttgccgatttcggaaccaccatcaaacaggattttcgcctgctggggcaaaccagcgtggaccgcttgctgcaactctctcagggccaggcggtgaagggcaatcagctgttgcccgtctcactggtgaaaagaaaaaccaccctggcgcccaatacgcaaaccgcctctccccgcgcgttggccgattcattaatgcagctggcacgacaggtttcccgactggaaagcgggcaactgcagctgatgtgctcttgaaagcaccacctcctggctggaggccaaccaacacaaaaccagtgcactcaacagaagcacaaccaacacaaaaccagcgcactcaacagaaacacaaccaaggagcctcacggagtcctcgtcactcctttgctacctccaccagagcaggtgctggtatctgcggctgcaagacccgaagatggatgacaagatggatggaagagtcacggggctctttgcagacactcccaagtaccagactggagcctggtagctccgctgcgtggctagacccagaagagcaagcacagtccctacagttcagctctcaggaagccccattcctaggggaagggggagaaaaccacatcaagggagtcccccatgggacaaaagaatctcaacagcagcccttgaatcccagatcttccctctga

SEQ ID NO: 137152 - DNA, 663 bp, Homo sapiens
atgcacatgatcatcaaaaagattgtaaatcaagccgcagttctggtgtttacgagtgcacttatggcaggaggagcgactcaagccttcgcgaaagaaaataaccaaaaagcatacaaagaaacaccgtattttgattccaagctaaataagaacatttactcagacataccaccccaggtgcctgtccggcctatttcctacaccccgagtattccaagtgactcaagaaacaatctggaccgaaattccttcgaaggatctgctatcccagagcatcccgaattcagcacttttaaccccgagtctgtgcacgggcaccgaaaagcagtggcggtctgcagcgtggcgccaaacctgcctcccccacccccttcaaactccccttctgacagcgactccatccagaagcctagctgggactttgactatgacaatagagcagaaaggctttgttttgaaaataagccagtgggcttcagcgtgctgcagctggtagtaacagatgaggattcttcccataacggtccacccttcttctttactattgtaactggaaatgatgagaaggcttttgaagttaacccgcaaggagtcctcctgacatcatctgccatcaagaggaaggagaaagatcattacttactgcaggtgaaggtatga

SEQ ID NO: 137153 - DNA, 595 bp, Homo sapiens
cgatccacacctgatgctccgactggccattgaaactgttgctcatgactatgatgtcatagttattgacagcgcgcctaacctgggtatcggcacgagtaatgtcgtatgtgctgctgatgtgctgattgttcccacgcctgctgagttgtttgactacacctccgcactgcagtttttcgatatgcttcgtgatctgctcaagaacgttgatcttaaagggttcgagcctgatgtacgtattttgcttaccaaatacagcaatagtaatggctctcagtccccgtggatggaggagcaaattcgggatgccttggcactcgaagcccacctggataatgacactgtagtttcccctggagaagacgggcgcgttgtcattgacatcggacacatcgatgttcacggtcgtcgtgttgactctgggtggactgccattatcagaagcttgaaccgtggcaactacgacagtcacttcgatgtggacaagggaactggaaccatcattgttgccaaacctcttgatgcagaacagaagtcaaactacaacctcacagtcgaggctacagatggaaccaccactatcctcactcaa

SEQ ID NO: 137154 - DNA, 3952 bp, Homo sapiens
atggcagcaaggatagaagttattcatgagctcagcatcagattactcctcatgaaaactgatctggatgcagccactgctgcactgctgaatgtccagcctgccaagagtggagataacaccagcggagcaccattccctgggaaaatcagccagacgctgctgaaagatccccacaacggctatcacgttgtgtttgctcttgcgggaagcccgaaagacgctgatgacacatcaatctacatgttttatcaaaaggtcggcgacaactcaatcgacagctggaaaaacgcgggccgtgtctttaaagacagcgataagttcgacgccaacgatccgatcctgaaagatcagacgcaagaatggtccggttctgcaacctttacatctgacggaaaaatccgtttattctacactgactattccggtaaacattacggcaaacaaagcctgacaacagcgcaggtaaatgtgtcaaaatctgatgacacactcaaaatcaacggagtggaagatcacaaaacgatttttgacggagacggaaaaacatatcagaacgttcagcagtttatcgatgaaggcaattatacatccggcgacaaccatacgctgagagaccctcactacgttgaagacaaaggccataaataccttgtattcgaagccaacacgggaacagaaaacggataccaaggcgaagaatctttatttaacaaagcgtactacggcggcggcacgaacttcttccgtaaagaaagccagaagcttcagcagagcgctaaaaaacgcgatgctgagttagcgaacggcgccctcggtatcatagagttaaataatgattacacatttgaaaaaagtaatgaagccgctgatcacttcaaacacggaggaggggccacaatcaaggggagggtggcagataatggaaagcctcagttgtcatctttgacatacattgacattagggtaattgaggagagcatctatccgcctgcgattttgcccctggagattttcatcaccgcttctggagaagaatactcaggtggcgtcattgggaagatccatgccacagaccaggacgtgtatgatactctaacctacagtctcgaccctcagatggacaacctgttctctgtttccagcacagggggcaagctgatagcacacaaaaagctagacatagggcaataccttctcaatgtcagcgtaacagatgggaagttcacgacggtggccgacatcacagtgcatatcagacaagtcacacaggagatgttgaaccacaccatcgcgatccgctttgccaacctcactccggaagaattcgttggtgactactggcgcaacttccagcgagctttacgagaacatcctgggtgtgaggaggaacgacatacagattgttagtttgcagtcctctgaacctcacccacatctggacgtcttactttttgtagagaaaccaggtagtgctcagatctcaacaaaacaacttctgcacaagattaactcttccgtgactgacattgaggaaatcattggagttaggatactgaatgtattccagaaactctgcgcgggactggactgcccctggaagttctgcgatgaaaaggtgtctgtggatgaaagtgtgatgtcaacacacagcacagccagactgagttttgtgactccccgccaccacagggcagcgagacaacaaacggggcccgccattacacaacccggcggacacgtagacaaccgccagaaaatacaactgcgacaaacgttaaacatcagtaactgcaacgccacccgacaagcggggcccccccccaccaacacgacaccccgcgaaggggtgggcgacaattcatatgaccagctggaaaaacgcggggccgtgtctttaagaccagcgataagtttgacggccaacgatccgatcctgaaagatcagacgcaagaatggtccggttctgcaacctttacatctgacggaaaaatccgtttattctacactgactattccgggaaacattacggcaaacaaagcctgacaacagcgcaggtaaatgtgtcaaaatctgatgacacactcaaaatcaacggagtggaagatcacaaaacgatttttgacggagacggaaaaacatatcagaacgttcagcagtttatcgatgaaggcaattatacatccggcgacaaccatacgctgagagaccctcactacgttgaagacaaaggccataaataccttgtattcgaagccaacacgggaacagaaaacggataccaaggcgaagaatctttatttaacaaagcgtactacggcggcggcacgaacttcttccgtaaagaaagccagaagcttcagcagagcgctaaaaaacgcgatgctgagttagcgaacggcgccctcggtatcatagagttaaataatgattacacattgaaaaaagtaatgaagccgctgatcacttcaaacacggtaactgatgaaatcgagcgcgcgaatgttttcaaaatgaacggcaaatggtacttgttcactgattcacgcggttcaaaaatgacgatcgatgggtgtggtgtggacggtgtgtcccaggaacagggtgtggtgtggacggtgtgtcccacgaacagggtgtggtgtggacggtgtgtcccacgaacagggtgtggtgtggacggtgtgtcccacgaacaggaaagtggcagctttaccaagccgatgcagaaaaatttgctgcaaaattttgcgctgggcgatcgaaaaatatttcacgtaagattattacccgctgaatcaacaccgccaaattgcttaaatcagttgttgctctttatcgtcaccccggtgaactatctgcccggtcaggctttgcagaactttcagcggtataccggcatacagcatgtgcatcgcataggaatggcggaacgtatgtggtgtgaccggaacagagaacgtcacaccgtcagcagcagcggcggcaaccgcctccccaatccaggtcctgaccgttctattcatcatggaaggctgcagtacaagtttgactgtggaagtggccctggaattgtctctgttcagagcattcaggtcaatgatgggcagtggcacgcagtggccctggaagtgaatggaaactatgctcgcttggttctagaccaagttcatactgcatcgggcacagccccagggactctgaaaaccctgaacctggataactatgtgtttttggtggccacatccgtcagcagggaacaaggcatggaagaagtcctcaagttgaacgttcagcagtttatcgatgaaggcaattatacatccggcgacaaccatacgctgagagaccctcactacgttgaagacaaaggccataaataccttgtattcgaagccaacacgggaacagaaaacggataccaaggcgaagaatctttatttaacaaagcgtactacggcggcggcacgaacttcttccgtaaagaaagccagaagcttcagcagagcgctaaaaaacgcgatgctgagttagcgaacggcgccctcggtatcatagagttaaataatgattacacattgaaaaaagtaatgaagccgctgatcacttcaaacacggtaactgatgaaatcgagcgcgcgaatgttttcaaaatgaacggcaaatggtacttgttcactgattcacgcggttcaaaaatgacgatcgatggtattaactcaaacgatatttacatgcttggttatgtatcaaactctttaaccggcccttacaagccgctgaacaaaacagggcttgtgctgcaaatgggtcttgatccaaacgatgtgacattcacttactctcacttcgcagtgccgcaagccaaaggggatcctctagagtcgcaatgcagtatgcaagccaaatacagtgtgtcagggaggaaaactcttattacacccctatag

SEQ ID NO: 137155 - DNA, 13960 bp, Homo sapiens
ctgggcggccgggcgcggggagagggcgcgggagcggctcgtgcggcaggtaccatgcggacgcgcgagcccggcgaggccccggcaggcccgtccctgctcgggggcgcgctgagacggcgggtgagctccacgagagcgccgtcgccacttcgggccaactttgcgattcccgacagttaagcaatggggagacatttggctttgctcctgcttctgctccttctcttccaacattttggagacagtgatggcagccaacgacttgaacagactcctctgcagtttacacacctcgagtacaacgtcaccgtgcaggagaactctgcagctaagacttatgtggggcatcctgtcaagatgggtgtttacattacacatccagcgtgggaagtaaggtacaaaattgtttccggagacagtgaaaacctgttcaaagctgaagagtacattctcggagacttttgctttctaagaataaggaccaaaggaggaaatacagctattcttaatagagaagtgaaggatcactacacattgatagtgaaagcacttgaaaaaaatactaatgtggaggcgcgaacaaaggtcagggtgcaggtgctggatacaaatgacttgagaccgttattctcacccacctcatacagcgtttctttacctgaaaacacagctataaggaccagtatcgcaagagtcagcgccacggatgcagacataggaaccaacggggaattttactacagttttaaagatcgaacagatatgtttgctattcacccaaccagtggtgtgatagtgttaactggtagacttgattacctagagaccaagctctatgagatggaaatcctcgctgcggaccgtggcatgaagttgtatgggagcagtggcatcagcagcatggccaagctaacggtgcacatcgaacaggccaatgaatgtgctccggtgataacagcagtgacattgtcaccatcagaactggacagggacccagcatatgcaattgtgacagtggatgactgcgatcagggtgccaatggtgacatagcatctttaagcatcgtggcaggtgaccttctccagcagtttagaacagtgaggtcctttccagggagtaaggagtataaagtcaaagccatcggtgacattgattgggacagtcatcctttcggctacaatctcacactacaggctaaagataaaggaactccgccccagttctcttctgttaaagtcattcacgtgacttctccacagttcaaagccgggccagtcaagtttgaaaaggatgtttacagagcagaaataagtgaatttgctcctcccaacacacctgtggtcatggtaaaggccattcctgcttattcccatttgaggtatgtttttaaaaggacacctggaaaagctaaattcagtttaaattacaacactggtctcatttctattttagaaccagttaaaagacagcaggcagcccattttgaacttgaagtaacaacaagtgacagaaaagcgtccaccaaggtcttggtgaaagtcttaggtgcaaatagcaatccccctgaatttacccagacagcgtacaaagctgcttttgatgagaacgtgcccattggtactactatcatgagcctgagtgccgtagaccctgatgagggtgagaatgggtacgtgacatacagtatcgcaaatttaaatcatgtgccgtttgcgattgaccatttcactggtgccgtgagtacgtcagaaaacctggactacgaactgatgcctcgggtttatactctgaggattcgtgcatcagactggggcttgccgtaccgccgggaagtcgaagtccttgctacaattactctcaataacttgaatgacaacacacctttgtttgagaaaataaattgtgaagggacaattcccagagatctaggcgtgggagagcaaataaccactgtttctgctattgatgcagatgaacttcagttggtacagtatcagattgaagctggaaatgaactggatttgtttagtttaaaccccaactcgggggtattgtcattaaagcgatcgctaatggatggcttaggtgcaaaggtgtctttccacagtctgagaatcacagctacagatggagaaaattttgccacaccattatatatcaacataacagtggctgccagtcacaagctggtaaacttgcagtgtgaagagactggtgttgccaaaatgctggcagagaagctcctgcaggcaaataaattacacaaccagggagaggtggaggatattttcttcgattctcactctgtcaatgctcacataccgcagtttagaagcactcttccgactggtattcaggtaaaggaaaaccagcctgtgggttccagtgtaattttcatgaactccactgaccttgacactggcttcaatggaaaactggtctatgctgtttctggaggaaatgaggatagttgcttcatgattgatatggaaacaggaatgctgaaaattttatctcctcttgaccgtgaaacaacagacaaatacaccctgaatattaccgtctatgaccttgggataccccagaaggctgcgtggcgtcttctacatgtcgtggttgtcgatgccaatgataatccacccgagtttttacaggagagctattttgtggaagtgagtgaagacaaggaggtacatagtgaaatcatccaggttgaagccacagataaagacctggggcccaacggacacgtgacgtactcaattcttacagacacagacacattttcaattgacagcgtgacgggtgttgttaacatcgcacgccctctggatcgagagctgcagcatgagcactccttaaagattgaggccagggaccaagccagagaagagcctcagctgttctccactgtcgttgtgaaagtatcactagaagatgttaatgacaacccacctacatttattccacctaattatcgtgtgaaagtccgagaggatcttccagaaggaaccgtcatcatgtggttagaagcccacgatcctgatttaggtcagtctggtcaggtgagatacagccttctggaccacggagaaggaaacttcgatgtggataaactcagtggagcagttaggatcgtccagcagttggactttgagaagaagcaagtgtataatctcactgtgagggccaaagacaagggaaagccagtttctctgtcttctacttgctatgttgaagttgaggtggttgatgtgaatgagaacctgcacccacccgtgttttccagctttgtggaaaaggggacagtgaaagaagatgcacctgttggttcattggtaatgacggtgtcggctcatgatgaggacgccggaagagatggggagatccgatactccattagagatggctctggcgttggtgttttcaaaataggtgaagagacaggtgtcatagagacgtcagatcgactggaccgtgaatcgacctcccattattggctaacagtctttgcaaccgatcagggtgtcgtgcctctttcatcgttcatagagatctacatagaggttgaggatgtcaatgacaatgcaccacagacatcagagcctgtttattacccagaaatcatggaaaattctcctaaagatgtatctgtggtccagatcgaggcatttgatccagattcgagctctaatgacaagctcatgtacaaaattacaagtggaaatccacaaggattcttttcaatacatcctaaaacaggtctcatcacaactacgtcaaggaagctagaccgagaacagcaagatgaacacatattagaggttactgtgacagacaatggtagtccccccaaatcaaccattgcaagagtcattgtgaaaatccttgatgaaaatgacaacaaacctcagtttctgcaaaagttctacaaaatcagactccctgagcgggaaaagccagaccgagaaagaaatgccagacgggagccgctctatcgcgtcatagccaccgacaaggatgagggccccaatgcagaaatctcctacagcatcgaagacgggaatgagcatggcaaatttttcatcgaaccgaaaactggagtggtttcgtccaagaggttttcagcagctggagaatatgatattctttcaattaaggcagttgacaatggtcgccctcaaaagtcatcaaccaccagactccatattgaatggatctccaagcccaaacagtccctggagcccatttcatttgaagaatcattttttacctttactgtgatggaaagtgaccccgttgctcacatgattggagtaatatctgtggagcctcctggcatacccctttggtttgacatcactggtggcaactacgacagtcacttcgatgtggacaagggaactggaaccatcattgttgccaaacctcttgatgcagaacagaagtcaaactacaacctcacagtcgaggctacagatggaaccaccactatcctcactcaggtattcatcaaagtaatagacacaaatgaccatcgtcctcagttttctacatcaaagtatgaagttgttattcctgaagatacagcgccagaaacagaaattttgcaaatcagtgctgtggatcaggatgagaaaaacaaactaatctacactctgcagagcagtagagatccactgagtctcaagaaatttcgtcttgatcctgcaaccggctctctctatacttctgagaaactggatcatgaagctgtttcaccagcacacctcacggtcatggtacgagatcaagatgtgcctgtaaaacgcaactttgcaaggattgtggtcaatgtcagcgacacgaatgaccacgccccgtggttcaccgcttcctcctacaaagggcgggtttatgaatcggcagccgttggctcagttgtgttgcaggtgacggctctggacaaggacaaagggaaaaatgctgaagtgctgtactcgatcgagtcaggaaatattggaaatattggaaattcttttatgattgatcctgtcttgggctctattaaaactgccaaagaattagatcgaagtaaccaagcggagtatgatttaatggtaaaagctacagataagggcagtccaccaatgagtgaaataacttctgtgcgtatctttgtcacaattgctgacaacgcctctccgaagtttacatcaaaagaatattctgttgaacttagtgaaactgtcagcattgggagtttcgttgggatggttacagcccatagtcaatcatcagtggtgtatgaaataaaagatggaaatacaggtgatgcttttgatattaatccacattctggaactatcatcactcagaaagccctggactttgaaactttgcccatttacacattgataatacaaggaactaacatggctggtttgtccactaatacaacggttctagttcacttgcaggatgagaatgacaacgcgccagtttttatgcaggcagaatatacaggactcattagtgaatcagcctcaattaacagcgtggtcctaacagacaggaatgtcccactggtgattcgagcagctgatgctgataaagactcaaatgctttgcttgtatatcacattgttgaaccatctgtacacacatattttgctattgattctagcactggtgctattcatacagtactaagtctggactatgaagaaacaagtatttttcactttaccgtccaagtgcatgacatgggaaccccacgtttatttgctgagtatgcagcgaatgtaacagtacatgtaattgacattaatgactgcccccctgtgtttgccaagccattatatgaagcatctcttttgttaccaacatacaaaggagtaaaagtcatcacagtaaatgctacagatgctgattcaagtgcattctcacagttgatttactccatcaccgaaggcaacatcggggagaagttttctatggactacaagactggtgctctcactgtccaaaacacaactcagttaagaagccgctacgagctaaccgttagagcttccgatggcagatttgccggccttacctctgtcaaaattaatgtgaaagaaagcaaagaaagtcacctaaagtttacccaggatgtctactctgcggtagtgaaagagaattccaccgaggccgaaacattagctgtcattactgctattgggagtccaatcaatgagcctttgttttatcacatcctcaacccagatcgcagatttaaaataagccgcacttcaggggttctgtcaaccactggcacgcccttcgatcgtgagcagcaggaggcgtttgatgtggttgtagaagtgatagaggaacataagccttctgcagtggcccacgttgtcgtgaaggtcattgtagaagaccaaaatgataatgcgccggtgtttgtcaaccttccctactacgccgttgttaaagtggacactgaggtgggccatgtcattcgctatgtcactgctgtagacagagacagtggcagaaacggggaagtgcattactacctcaaggaacatcatgaacactttcaaattggacccttgggtgaaatttcactgaaaaagcaatttgagcttgacaccttaaataaagaatatcttgttacagtggttgcaaaagatggagggaacccggccttttcagcggaagttatcgttccgatcactgtcatgaataaagccatgcctgtgtttgaaaaacctttctacagtgcagagattgcagagagcatccaggtgcacagccctgtggtccacgtgcaggctaacagcccggaaggcctgaaagtgttctacagcatcacagacggagaccctttcagccagttcactattaacttcaatactggagttatcaatgtcatagctcctctggactttgaggcccacccggcatataagctgagcatacgcgcaactgactccttgacgggcgctcatgctgaagtatttgtggacatcatagtagacgacatcaatgataaccctcctgtgtttgctcagcagtcttatgcggtgaccctgtctgaggcatctgtaattggaacgtctgttgttcaagttagagccaccgattctgattcagaaccaaatagaggaatctcataccagatgtttgggaatcacagcaagagtcatgatcattttcatgtagacagcagcactggcctcatctcactactcagaaccctggattacgagcagtcccggcagcacacgatttttgtgagggcagttgatggtggtatgcccacgctgagcagtgatgtgattgtcacggtggacgttaccgacctcaatggtaatccaccactctttgaacaacagatttatgaagccagaattagcgagcacgcccctcatgggcatttcgtgacctgtgtaaaagcctatgatgcagacagttcagacatagacaagttgcagtattccattctgtctggcaatgatcataaacattttgtcattgacagtgcaacagggattatcaccctctcaaacctgcaccggcacgccctgaagccattttacagtcttaacctgtcagtgtctgatggagtttttagaagttccacccaggttcatgtaactgtaattggaggcaatttgcacagtcctgctttccttcagaacgaatatgaagtggaactagctgaaaacgctcccctacataccctggtgatggaggtgaaaactacggatggggattctggtatttatggtcacgttacttaccatattgtaaatgactttgccaaagacagattttacataaatgagagaggacagatatttactttggaaaaacttgatcgagaaaccccggcggagaaagtgatctcagtccgtttaatggctaaggatgctggaggaaaagttgctttctgcaccgtgaatgtcatccttacagatgacaatgacaatgcaccacaatttcgagcaaccaaatacgaagtgaatatcgggtccagtgctgctaaagggacttcagtcgtaaagtctgcaagtgatgccgatgagggctccaatgccgacatcacctatgccattgaagcagactctgaaagtgtaaaagagaatttggaaattaacaaactgtccggcgtaatcactacaaaggagagcctcattggcttggaaaatgaattcttcactttctttgttagagctgtggataatgggtctccatcaaaagaatctgttgttcttgtctatgttaaaatccttccaccggaaatgcagcttccaaaattttcagaacctttctatacctttacagtgtcagaggacgtgcctgttggaacagagatagatctcatccgagcagaacatagtgggactgttctttacagcctggtcaaagggaatactccagaaagcaatagggatgagtcctttgtgattgacagacagagcgggagactgaagttggagaagagtcttgatcatgagacaactaagtggtatcagttttccatactggccaggtgcactcaagatgaccatgagatggtggcttctgtagatgttagtatccaagtgaaagatgcaaatgacaacagcccggtctttgaatctagtccatatgaggcattcattgttgaaaacctgccagggggaagtagagtaattcagatcagggcatctgatgctgactcaggaaccaacggccaagttatgtatagcctggatcagtcacaaagtgtggaagtcattgaatcctttgccattaacatggaaacaggctggattacaactttaaaggaacttgaccatgaaaagagagacaattaccagattaaagtggttgcatcagatcatggtgaaaagatccagctatcctccacagccattgtggatgttaccgtcaccgatgtcaacgatagtccaccacgattcacggccgagatctataaagggactgtgagtgaggatgacccccaaggtggggtgattgccatcttaagtaccacggatgctgattctgaagagatcaacagacaagttacatatttcataacaggaggggatcctttaggacagtttgccgttgaaactatacagaatgaatggaaggtatatgtgaagaaacctctagacagggaaaaaagggacaattaccttcttactatcacggcaactgatggcaccttctcatcaaaagcgatagttgaagtgaaagttctggatgcaaatgacaacagtccagtttgtgaaaagactttatattcagacactattcctgaagacgtccttcctggaaaattgatcatgcagatctctgctacagacgcagacatccgctctaacgctgaaattacttacacgttattgggttcaggtgcagaaaaattcaaactaaatccagacacaggtgaactgaaaacgtcaaccccccttgatcgtgaggagcaagctgtttatcatcttctcgtcagggccacagatggaggaggaagattctgccaagccagtattgtcgtcacgctagaagatgtgaacgataacgcccccgaattctctgccgatccttatgccatcaccgtgtttgaaaacacagagccgggaacgctgctgacaagagtgcaggccacagatgccgacgcaggattaaatcggaagattttatactcactgattgactctgctgatgggcagttctccattaacgaattatctggaattattcagttagaaaaacctttggacagagaactccaggcagtatacaccctctctttgaaagctgtggatcaaggcttgccaaggaggctgactgccactggcactgtgattgtatcagttcttgacataaatgacaacccccctgtgtttgagtaccgtgaatatggtgccaccgtgtctgaggacattcttgttggaactgaagttcttcaagtgtatgcagcaagtcgggatattgaagcaaatgcagaaatcacctactcaataataagtggaaatgaacatgggaaattcagcatagattctaaaacaggggccgtatttatcattgagaatctggattatgagagctctcatgagtattacctaacagtagaggccactgatggaggcacgccttcactgagcgacgttgccactgtgaacgttaatgtaacagatatcaacgataatacccctgtgttcagccaagacacctacacgacagtcatcagtgaagatgccgttcttgagcagtctgtcatcacggttatggccgatgatgccgatggaccttccaacagccacatccactactcaattatagatggcaaccaaggaagctcgttcacaattgaccccgtcaggggagaagtcaaagtgaccaaacttctcgaccgagaaacgatttcaggttacacgctcacggttcaagcttctgataatggcagtccacccagagtcaacacgacgaccgtgaacatcgatgtgtccgatgtcaatgacaacgcgcccgtcttctccaggggaaactacagtgtcattatccaggaaaataagccagtgggcttcagcgtgctgcagctggtagtaacagatgaggattcttcccataacggtccacccttcttctttactattgtaactggaaatgatgagaaggcttttgaagttaacccgcaaggagtcctcctgacatcatctgccatcaagaggaaggagaaagatcattacttactgcaggtgaaggtggcagataatggaaagcctcagttgtcatctttgacatacattgacattagggtaattgaggagagcatctatccgcctgcgattttgcccctggagattttcatcacctcttctggagaagaatactcaggtggcgtcattgggaagatccatgccacagaccaggacgtgtatgatactctaacctacagtctcgaccctcagatggacaacctgttctctgtttccagcacagggggcaagctgatagcacacaaaaagctagacatagggcaataccttctcaatgtcagcgtaacagatgggaagttcacgacggtggccgacatcacagtgcatatcagacaagtcacacaggagatgttgaaccacaccatcgcgatccgctttgccaacctcactccggaagaattcgttggtgactactggcgcaacttccagcgagctttacggaacatcctgggtgtgaggaggaacgacatacagattgttagtttgcagtcctctgaacctcacccacatctggacgtcttactttttgtagagaaaccaggtagtgctcagatctcaacaaaacaacttctgcacaagattaactcttccgtgactgacattgaggaaatcattggagttaggatactgaatgtattccagaaactctgcgcgggactggactgcccctggaagttctgcgatgaaaaggtgtctgtggatgaaagtgtgatgtcaacacacagcacagccagactgagttttgtgactccccgccaccacagggcagcggtgtgtctctgcaaagagggaaggtgcccacctgtccaccatggctgtgaagatgatccgtgccctgagggatccgaatgtgtgtctgatccctgggaggagaaacacacctgtgtctgtcccagcggcaggtttggtcagtgcccagggagttcatctatgacactgactggaaacagctacgtgaaataccgtctgacggaaaatgaaaacaaattagagatgaaactgaccatgaggctcagaacatattccacgcatgcggttgtcatgtatgctcgaggaactgactatagcatcttggagattcatcatggaaggctgcagtacaagtttgactgtggaagtggccctggaattgtctctgttcagagcattcaggtcaatgatgggcagtggcacgcagtggccctggaagtgaatggaaactatgctcgcttggttctagaccaagttcatactgcatcgggcacagccccagggactctgaaaaccctgaacctggataactatgtgttttttggtggccacatccgtcagcagggaacaaggcatggaagaagtcctcaagttggtaatggtttcaggggttgtatggactccatttatttgaatgggcaggagctccctttaaacagcaaacccagaagctatgcacacatcgaagagtcggtggatgtatctccaggctgcttcctgacggccacggaagactgcgccagcaacccttgccagaatggaggcgtttgcaatccgtcacctgctggaggttattactgcaaatgcagtgccttgtacatagggacccactgtgagataagcgtcaatccgtgttcctccaacccatgcctctatgggggcacgtgtgttgtcgacaacggaggctttgtttgccagtgtagaggattatatactggtcagaggtgtcagcttagtccatactgcaaagatgaaccctgtaagaatggcggaacatgctttgacagtttggatggcgccgtttgtcagtgtgattcgggttttaggggagaaaggtgtcagagtgatatcgacgagtgctctggaaacccttgcctgcacggggccctctgtgagaacacgcacggctcctatcactgcaactgcagccacgagtacaggggacgtcactgcgaggatgctgcgcccaaccagtatgtgtccacgccgtggaacattgggttggcggaaggaattggaatcgttgtgtttgttgcagggatatttttactggtggtggtgtttgttctctgccgtaagatgattagtcggaaaaagaagcatcaggctgaacctaaagacaagcacctgggacccgctacggctttcttgcaaagaccgtattttgattccaagctaaataagaacatttactcagacataccaccccaggtgcctgtccggcctatttcctacaccccgagtattccaagtgactcaagaaacaatctggaccgaaattccttcgaaggatctgctatcccagagcatcccgaattcagcacttttaaccccgagtctgtgcacgggcaccgaaaagcagtggcggtctgcagcgtggcgccaaacctgcctcccccacccccttcaaactccccttctgacagcgactccatccagaagcctagctgggactttgactatgacacaaaagtggtggatcttgatccctgtctttccaagaagcctctagaggaaaagccttcccagccatacagtgcccgggaaagcctgtctgaagtgcagtccctgagctccttccagtccgaatcgtgcgatgacaatgggtatcactgggatacatcagattggatgccaagcgttcctctgccggacatacaagagttccccaactatgaggtgattgatgagcagacacccctgtactcagcagatccaaacgccatcgatacggactattaccctggaggctacgacatcgaaagtgattttcctccacccccagaagacttccccgcagctgatgagctaccaccgttaccgcccgaattcagcaatgcagtttgaatccatccaccctcctagagacatgcctgccgcgggtagcttgggttcttcatcaagaaaccggcagaggttcaacttgaatcagtatttgcccaatttttatcccctcgatatgtctgaacctcaaacaaaaggcactggtgagaatagtacttgtagagaaccccatgccccttacccgccagggtatcaaagacacttcgaggcgcccgctgtcgagagcatgcccatgtctgtgtacgcctccaccgcctcctgctctgacgtgtcagcctgctgcgaagtggagtccgaggtcatgatgagtgactatgagagcggggacgacggccacttcgaagaggtgacgatcccgcccctggattcccagcagcacacggaagtctga

SEQ ID NO: 137156 - DNA, 435 bp, Homo sapiens
  misc_feature (1)...(435): n = a,t,c or g
gcgaagatgggttccttagctctccaattgccangattttccctccccattcatcatgagggagtttctcaaacccaggagtttatatttattttttagaaaaatacacacttttcaggagaaacctgagcatgattttggantctccacnctccccccagtctctgcacccgggattcagctcaagggattcagtgtcttcatttttacaaaagttcccccaagaaatcagcaaccagcctctgtttcatctgggagcccctcccttggccccctgtgtggattttcaggaagagcctccctttctttgcgtctccctttctttaattaacattttcaaaagtaataaattcttactgacgacttgtaacttagtcatattttatacttgtagcctttaataaagaccatttaaaaaatgaaaaaaaaaaaaaa

SEQ ID NO: 137157 - DNA, 2720 bp, Homo sapiens
  misc_feature (1)...(2720): n = a,t,c or g
tcaatattgccagatttttttcttttttggtagaaccagatatatatgctattttcagtgatttgataacagaagttttccatttggaatttttaaggtctgttaaataattcaggagatcttgtaaataaaacttctgttcccaagctccacccaactttccccctcctcaaagggatgtgtttcaaccatgtcacaaaaatccatataagggatttccatctccttcttccattattccccttcccccctccgctttttaccgtaatgggttccttttggtgggtgattgagggtgatgttatcagccatgacatcagcatgctgggctgtgaccccggaaagactggcccccagcgacgttctcagccagcgctcgcagctgtccggggcttctctgggcagaagccatgtctctcacatcaatgtgcccagcctccaccctcaacgccatttccaggggaacagactgcgggtatgtaggcagtgtagtcttttaacctgctctggattacatatttcagagtatgggattgttgtttaaaaagagttgtatgtttaaaagaagttttgtactaagcttttcaattattttgtatctagattatcaacaatgggggctaccactttccttggttttatatccatttcctcttgggaagttcttgttgcttatgtgacctgttggttggttncccggactgggcacctgcaggagtcagggcagacgggcagatgttggctggaggtcagggctcttctgcttagttgtgttagagtcttccagcatgggactgatgggagcagtgggcattctttatcccaagggctagccaggttgcgtcatgacggaccttccccagccctgaccaccaccagaagtggaagagtggagtttgcggtcaactcagcagtgcccatggagacctgcgtggtgtcagagcagcagcatctcttggagctggtgcagacaccaaggctgcccagtggtacaacgtggtccacctcccctagggaagctgctgcactcagaggctgtcctgcccagtggcccctgagccgtgtgagcctgcaggaggcgtttgagcagagcctcaagcccggtatggcgccatctccatgttgccatcactgcgttctcacctgaagccttaatctttgcgacacctgccagtgagcgctcggtttcaataccaaagtgtgtcttcttctttttttttttttttttaaatgcctgtttcataggaccttctgaaatggatttccagaatattttatctgggctccaaaataaaggcacatagcaactcacctcaacccctcatcatctccagggaaagtttcttgccaaagctgtggcatagccaacttttgatttggttcttgccaattgttttatgtccctaaacctcatttggatccttggggtatagttttatctttctgcttcagtgatttactgtaacttttcaaatattggttctttgcgctaccatttaagtatagttgatatatgtgagggcaaaaaaagggtttcagcatgggtgggtgaggggaaaaagggagcttaggaaatcccagttggggcacagcctgggggcaagcgccagttccccctcagggcttaacgggcactgtttcacacagggatcctcaggaatcagccgggccacctgcctccaccttctgcctgggagggcatgggggctgttgtaggaacctatggtaggcaaatgtatatgtatgagtttgtattctgtagtgttggtgtagcacagaagaaagacctgtgtcctagagagtaggccaaggtgatctgcctcttctattgggagaaattctaatttctttcccactttctcaacaagcccaatattccctccaagttcttcttgggtgctgagggctgtaggaattattgaaagccctctgcctcacttagtatcctctggggcccagcacccagcaataactctaaataatgtttccttaatggtatagccctcctgagattaaaatggtaaaatcaaaaattaggaaatcttggaagggagtcctcaagttgtattgctttggctgtgcttttgggaagaagggacggcctggaggacacaggctcatgtgtgggtcttcatcctgcctgaccgggcagaatcttcctctaacaccttgggcaaaagtctatgcggaagatgggtttcttaagctctcccatttgccatggattttcctcccaattcatccatgaggggagtttctcaaaaccagggagtttagtatttattttttagaaaaatacaccacttttccaggagaaaacctggagcatggattttgggattcttccacctcccccccagtcctcctgcaccctgggattccagcctcaaggattcagtgtcttccatttttacaaaagttccccccaagaaatcagcaaccaagcctctgtttcaatctggggagcccctccccttgggccccctgggttttgggggtgctgccctactggggaacagcggggggtctgtcacccgtctgagccgcacccccctgtggtggatttcaggaagaagcctccctttctttgcgtctccctttctttaattaacattttcaaaagtaataaattcttactgacgacttgtaacttagtcatattttatacttgtagcctttaataaagccgatttaaaaaatgctaaaaaaaaaaaaaaaaa

SEQ ID NO: 137158 - DNA, 2409 bp, Homo sapiens
cccaaggccgcggccccgacgctgggcccgggagcggtccccgcgcacagcgcccggacgcgtaggtcccgaagtaggcccgcgctttgcttcgtaactggggatctctgaggacatcttagttctgaccttgtggaggccgcgtctctgctgcgtgttcgcgggccagtcgggccactttgtagaaatcatagccctctaaatcaagggacgaacgctgctggctggagtttgctggacactttcattccacctcctaacaaagagaattcctattccttgaggtcccttggggcagcagttaaagactacacgatccaggagcacctaggacctggggccaccttcctgcccgctttattggatggagcactgcctccccagtttctgggacaccttggggtgtggccttggtgagtgaaacttggggtgctgcctgctgggaaggaaatccggaaacgcagagaggactctctggtggtgacccaggccttgtcagatctgagattcttggaatctcagattgtgggggtgtggatggtgaatgaatttgggtatgcccccctttaccccagaactgaagaggaagcaaactacttgccacacttgaggctgcatgactattcagagaagggaggagccacttctgaattcagagtaggactgcatcaccaggcaaatacctgttctgagccagaaagactctggcttctgaggagatcctgagagtctgagtagtgccaggaagcagcctcagaatttgggggcccattacacaccccagccatgttcctgcgacggcttggtggctggctacctcgcccttggggccgccggaaaccaatgaggcctgacccgccttacccagaacccagacgggtggacagctcctcggagaattcaggaagtgactgggatagtgccccagaaaccatggaagatgtggggcatcccaagactaaggactcgggggcattgagggtttctagggctgcttccgaaccaagcaaggaggagccccaagttgagcagctagggagcaaaagaatggattccctcaagtgggaccagcctatctctagcactcaagagtctgggagactggaggctggaggggccagtcccaaactcagatgggatcatgtggattcaggtggcaccaggagaccaggggtgtcccctgaagggggactcgagcgtccctgggccaggagccccattggagaaacctggtaggcgtgagaagctgttgggctggctgcggggggaaccaggagctccctcccggtacttggggggcccagaagagtgtctgcagatctccaccaacctgaccctgcatcttctggagctgctggcctctgccctgctggccctgtgctcacgaccactgcgggcagccttggacacactgggcctgcgtggaccgctgggcctctggctacatggcctactgtccttcctggctgccctgcatgggctccatgctgttctgagcctacttactgcccaccctttgcacttcgcctgcctctttggtctcctgcaggccttggtgctggctgtcagcctccgggagcccaatggggatgaggcggccactgactgggagagtgaggggttggagagggaaggtgaggagcagaggggagacccgggaaaggggctgtgaccgtggggtgggggcaaagggtgaagagagtgtgggctttaggagaaaagtgtgaggcatgacccaaattgtaagcatagggacctcagggatggggaagaaacccgagtacgagggtgcagggccccccttcatacacaggagagaacagaactatttagggtggttgtgtttatggacagtgagggcactgctcttggacttcaccagctgttatttttgcttttacttttctcccaccttcagtttttttttttttttccacctccactttttaaaagcaaaaaaaaaaaaaaagtatgatggtggtgaataaagaccaaagggtcctctctacctttgaaaactctcctggggtggaggagaccagggcaggatagacagacctctgcagtaagagagtggttgggaaacccagggtgttccttggatctcaggatctgagccatcgagggaagagtggggctgctaggcaagtggattagggggtctggatagggccccacaggtgacagggagcctgcagggcggatctggtgatcatgggagccagagggagtggggacagtgcaggcagtattggcaggagggccagtgcagaagggctggtagctcaggcagtgtgggggaagcactgaagcctgtagtccccacttgggggctaggggtttgctcactcagcaataaataactgtgtcacatcaaatcctaaatataccactacaaagtgagagtta

SEQ ID NO: 137159 - DNA, 2659 bp, Homo sapiens; identical to SEQ ID NO: 133219

SEQ ID NO: 137160 - DNA, 1880 bp, Homo sapiens
aacaactttgacctttctacaaaacttctaatagtgtgaaatgtctgaattaatgcttttcacactaggtcagcttaaaaaacttacagttcagctagcctaccccctccttcatcttcctacagcttatttgtagcctggaaagactattttggtgatagcattagaaagggtcctggaaacaaaatacaaagcatgatagagcatatgaaatctgtttctcttcattgggaatactgcatggttctgatggtcacacttgacaatgaagctaaaaacagtccagagaagaatagatgaaaatggcaaaggagaaaaagtggcttctctgacagttagattaggttagattagttagattaagattagaattcctaaataaacagaaagctaattagtgatatgagccttctacattctgaaggatttgaacaagatcattagaattcaaaaaacaccagaaatgaaagatctttcctgaagctgtttaggaatattcatgatatacccttaactgttctagaggaacaaaatgcgtctgtgctccttcacaaaagtccctatggaatttgtttctcaatgtgatccttcttaagttctataactttttgttttcattaattttagggaaaatcctgccttgcttcgttggggcctatgcaaggaacaataaatgtctatcctaaatttcagacccactcctaaaaactcactcatgggagctctgtgtggatttgggcccctcatcttcatttattatattatcaaaactgagagggtaagtattcagaccagatgtttagtatttgagtgataggttcactttctagggaccagctgcagctccttctcttgaagattgccaccagtgcccctcccaccttgggggctgtcctctgccttcccttcctctcttcttttatctttattccttttccagcagggagttaaaacaggaaagttttcagtcacctttgtctatttttgttagttcatttgttttttaaaaagatgatgtttattgggttaagtattagcagaatacataaatcatttagtacgtttcctgtttgcgtgaattctatttatgttggtcacattttgcaaattaatgttaaaacctattaatactctacggacagagaagcacaagctgcctgtgtggggaatagctgccgtcagcagcctgggtatatgattggagagaaagtcaagctgatctttgggcaccaaaccattccacatctgggtacttaaaccctgagcttgcagcccccaggtttgtgttgccacttggagcccactcgtctagctttgtctttaactgggcccatcttgcattcccattaggagttcgtgttatttttgattatctgggtgaatgatctacttaacagaaaggtaagtccacattttcccagaaagtgtttgcattttgctttcaatggaatggttttatgggataatatatttctaatgactaaaatgtgagtaagatgtttttgaataggagcattttcttactgtgtctttagttcctcggattactgtttcttcgcacactccctggggctttagacagtgggattgcaattaggtttggagtgtttcattctgtttgtcagttgtacggtgggttgtgcccaaaatgcagtttttccttaccttttttatttatttatttttatctaatatagccaactggcagaatatattgtctttaatgtacttttttttctgtctttacaggataggaaaaaaaaacttatccaggaaggaaaattggatcggacatttcccctctcatattaagtctggcaatgatgacttatatgtattcctgcctaaataaatcatcttattaatcattaaaaaaaaaa

SEQ ID NO: 137161 - DNA, 892 bp, Homo sapiens
atgagtaggtggggagcggcggtggggcagggcgcactgcgagaagagcacttcgcgcatgcgcatatcaccgagcgaacgcgccgtgttcgggaaggtaggagaaagaggcggagctccttgttaacgacatccccaacctctgctaacgcgcaggcgcacttcctgaagctgaaggtcagcatagacaaagggcctcagaatcgcgcaggcgcaattgtgccctggttcgccaagatgtcgttcccaaagtataagccgtgcgagcctgcgcactctgccgtgagaccctcgacccagccgaatacaacatatctccggaaacccggcgggcgcaagccggagcggttggcccataggagcccagctgcaaacgagagtacctgcttcagtacaacgatcccaacacgccgagggctcatcgaaaatccgtgccttgcttcgttgggcctatgcaagaacaataaatgtttattcctaatttcaagccccactcctaaaagctcactcatgggagcttttgtgtgggattttgggcccctcatcttcattttattatattatcaaaactgagaggtgggacccaaatcagagatggctcactgactcaagaattttaaaatatgaagctatcttactagagagagatgacctgacactaaccactgacaattcactcaaccctgctgctttcctaagaggaaatccaaacccggaagaacctgagcataaatgcttagatctaatcagttatcaaactagagtcagactggatctaagcaaaacccccttccaaacagggcgtcacctctttatagacggttcctccctggtcattggaggaaaagggcacaacgggtactctgtagttgatggggaaacccttacaaag

SEQ ID NO: 137162 - DNA, 939 bp, Homo sapiens
atgaaccagttctggaatagacagtgctggtggctgcacaacattgtgaatgtgtataacgccactcaatcatacactcaaaatggttacagtagtaaacattttgttatgaaaatcagagattctaaggacgccatgctcttccgcatcaagcaggaaagagaaagaactggaggctcatctgtaaaagattattacggtccaggcctggaagaggcacacatcacgagttcacatcccactggccagaactcagctgcttgggaagctgagcatacagcaacaaggtgccatcttggaatcaaaaagcagccttcaccaaccaaacctgctggtaccttgatcttcgacttcccagctgtgaaaactgtgagaaataagtttgtgttctttataaattacccagtctcagggtacactgaagaccttaagaagtttctaaaaccatatactttagaagaacagaaaaacctcacagtctgtcctgatggagcactttttgaacagaagggtccagtttatgttgcttgtcaatctcccatttcgttacttcaagcatgccgtggtatgaatgatcttgatttcggctattctcaaagaaacccttgtattcttgtgaaaatgaacagaataattggattaaagtctgaaggagtgccaaggatagattgtgtttcgaagaatgaagatataccaaatgtagcagtttatcctcataatggaattatagacttaaaatatttcccatattatggggaaaaactgcatgtggggtatctacagccattggttgctgttcaggtcagctttgctcctaacgatactgggaaagaagtaacagttgaatgcaagattgatggatcagccaaccttaaaagtcaggatgatcgtgacaagtttttgggacgagttatgttcaaaatcacagcatgtgcatag

SEQ ID NO: 137163 - DNA, 625 bp, Homo sapiens
ggaggagtttgagattagcctgggcagggagaccctgtctctacaaaaaaatttaaaaattagtgggctgtggcggcacgtgcctatagtcccagctacttaggaaactgaggtgggaggattggttgaggcttcaatgagccataattgcaccactgcactgcagcctgggcaacactctcaaaaagaaaatttacagaataagccaattcctggtagagagaagtattaagtttccatagagtttgaattaatatattttccttttattgccaggttgggtatctacagccattggttgctgttcaggtcagctttgctcctaacaacactgggaaagaagtaacagttgagtgcaagattggatggatcagccaacctaaaaagtcagggatgatcgtgacaagtttttggggacgagttatgttccaaaatcacagcaccgtgcatagtatgagtagggtatcttccacagagtaaatgttgtgttgtctggccttcattttgtaacagctggaccttccattctagaattatgagaccaccttggagaaaggtgtgtggtacatgacatctgggttacatcataacgtgcttacagatcatagtggtcagcgtcctctgg

SEQ ID NO: 137164 - DNA, 1424 bp, Homo sapiens
agctcctctcgcccgtccgcgcgcacaccatgacgaagaacgagaagaagtccctcaaccagagcctggccgagtcggaagctcttcatctacaacccgaccaccggagaattcctggggcgcaccgcagcgagctggggtttgatcttgctcttctacctagttttttatgggttccttggctgcactcttctcattcacgatgtgggttatgcttcagactctcaacgatgaggttccaaaataccgtgaccagattcctagcccaggactcatggtttttccaaaaccaagtgaccgcattggaatatacattcagtaggtctgatccaacttcgtatgcagggtacattgaagaccttaagaagtttctaaaaccatatacttttagaagaacagaagaacctcacagtctggtcctgatgggagcactttttgaacagaagggtccagtttatgttgcatgtcagtttccctatttcattacttcaagcatgcagtggtatgaatgatcctgattttggctattctcaaggaaacccttgtattcttgtgaaactgaacagaataattggatttaaagcctgaaggagtgccaaggatagatttgtgtttcaaaagaatgaaggatataccaaatgtagcagtttattcgtcataatggaatgatagacttaaaatatttcccatattatgggaaaaaaactgcaatgtttggggtatctaccagcccattgggttgctggttcaggtcagctttgccccctaacaaccactggggaaagaagtaacagttgaagtgcaaagattgatggatcgagccaacctaaaaaagtccaggatgatccgtgacaaagtttttggggacgagtttatgttccaaatccacagcaccgtgcactagtatgagtaggatatctccacagagtaaaatgttgtgttgtctgtcctccattttgtaaacagctgggaccttccctttctaggattatgagaccaccttgggaggaaaggtgtgtgggtacatggacattggggttacatcataacgttgcttcccagattcatagtggttcagtggtcctctggaagtaactggcctgttgcctctgctgccctttgaaccagtgtacagtcgccagatagggaccggtgaacacctgattccaaacacgtaggatgggggtcttgtcctctttttatgtggtttaattgccaagtgtctaaagcctaataatgccgtgctatgtaaatattttatggatataacaactgtcgatattttgatgtcaacagagttttagggataaaatggtacccggccaacatcaagtgactttatagctgcaagaaatgtggtatgtggagaagttctgtatgtgaggaaggaaaaaaagaaaataaaagtgtgtttgaaaaatatt

SEQ ID NO: 137165 - DNA, 1089 bp, Homo sapiens
ttttttttttttttttttttgtacttcaaattatcttcttggtaatttttaatagattttgctaactccttggtaacttttattacttggtaaaacaaaactgatgaaagtggctgacataccggggacgtgagcagaacggcttggccacttccttaacatggccccgggttcacccgctagtccggaactacagtttctctgccacagtgtctgcgcctgtccacttgcaggcattaattttggtgaatatgaagagagttaatataaccagtgtgtcctcttctccatggcagcgcccagggacagacctgcagtgaccaccacctgcccctctctgccaggcccaaccacgggctttcttctcagagctgagctgatgtggccgtctggctgacttgactggggcgcctgaagaggccgcgtcccgaggcatgctgggacctgtagtccgcgtgtctcctgaagccgcgactcgaggagagggaccccgctggccggagggagagggagagacttcgctgggcagatgggacaccgtgtgcagggccgtcatggtagtaggggccgcctgccctcgggagacgcacgcgtgaatgcggagcgggctgagccagtcggcgccggcgcgggcggtccaggcggaggaagcagcgtgcgcggtttttgtggacgctcctggagcgaggcggggggcggcggcgtgccggtggtggtgtgcacaattgagcccccggtatagacagttccccccagctgacccagatccccaggtgttcccagagcgagttccttcagcggactcatgtggttctggattttcttggcgcttttggcatgaccccaaaagaggtgctgggtcactttcccgtatccctgatccttcccagtggacagatggaagaattaaggtatccctcctgatgattgaagacttgaaggtgttagactcagcctcactctgtaacaagaggccaggtgagaatttcaaggattatcgacttcatattggcacattaaagttacaaattaaagtggcttggtcaagaacaaaaaaaaaaaaaaaaaaaaaaaaaaaagtcgtatcga

SEQ ID NO: 137166 - DNA, 453 bp, Homo sapiens
gttacgattccgacgagcctggctgagttgcaaggtctaccccacattagggttttcctggacaacaatccctgggtctgcgactgccacatggcagacatggtgacctggctcaaggaaacagaggtagtgcagggcaaagaccggctcacctgtgcatatccggaaaaaatgaggaatcgggtcctcttggaactcaacagtgctgacctggactgtgacccgattcttcccccatccctgcaaacctcttatgtcttcctgggtattggttaagccctgataggcgctattttcctccactatagaaacaacggacctttgactataagcagtgaagggggattggcttccttgttatgtaaagattctcggggggttccgttattgtaagaacgacaaacagttgcggatagggatttaccctcttcttttttttggaactgcttcaac

SEQ ID NO: 137167 - DNA, 2338 bp, Homo sapiens
tccctcagaggatccagcgaggggtgccaacaagaggcgaagaggtggcaccagggcggcggcaggaagaggagcgggagcaggagcgcggagcggagcgtcccgacccgccgtgcgtactttctggagggaaggggcgggggaatcggcccctgagggaagcgcccggtggcgagggggttagccaagttccggctgcggcgccactccctcggttccacgagaggaaagttttttttttccagacgcttccgccggctcgcgccctccgggcccagcctcccgagccttcggagcgggcgccgtcccagcccagctccggggaaacgcgagccgcgatgcctggggggtgctcccggggccccgccgccggggacgggcgtctgcggctggcgcgactagcgctggtactcctgggctgggtctcctcgtcttctcccacctcctcggcatcctccttctcctcctcggcgccgttcctggcttccgccgtgtccgcccagcccccgctgccggaccagtgccccgcgctgtggcatgtcgctccgaggcagcgcgcacagtcaagtgcgtctaaccgcaatctgaccgaggtgcccacggacctgcccgcctacgtgcgcaacctcttccttaccggcaaccagctggccgtgctccctgccggcgccttcgcccgccggccgccgctggcggagctggccgcgctcaacctcagcggcagccgcctggacgaggtgcgcgcgggcgccttcgagcatctgcccagcctgcgccagctcgacctcagccacaacccactggccgacctcagtcccttcgctttctcgggcagcaatgccagcgtctcggcccccagtccccttgtggaactgatcctgaaccacatcgtgccccctgaagatgagcggcagaaccggagcttcgagggcatggtggtggcggccctgctggcgggccgtgcactgcaggggctccgccgcttggagctggccagcaaccacttcctttacctgccgcgggatgtgctggcccaactgcccagcctcaggcacctggacttaagtaataattcgctggtgagcctgacctacgtgtccttccgcaacctgacacatctagaaagcctccacctggaggacaatgccctcaaggtccttcacaatggcaccctggctgagttgcaaggtctaccccacattagggttttcctggacaacaatccctgggtctgcgactgccacatggcagacatggtgacctggctcaaggaaacagaggtagtgcagggcaaagaccggctcacctgtgcatatccggaaaaaatgaggaatcgggtcctcttggaactcaacagtgctgacctggactgtgacccgattcttcccccatccctgcaaacctcttatgtcttcctgggtattgttttagccctgataggcgctattttcctcctggttttgtatttgaaccgcaaggggataaaaaagtggatgcataacatcagagatgcctgcagggatcacatggaagggtatcattacagatatgaaatcaatgcggaccccagattaacgaacctcagttctaactcgggatgtctggaggaaatattagaggacagaccaaggacaactctgcatgagatgtagacttaagctttatcccctactaggcttgctccactttcatcctccactatagatacaacggactttgactaaaagcagtgaaggggatttgcttccttgttatgtaaagtttctcggtgtgttctgttaatgtaagacgatgaacagttgtgtatagtgttttaccctcttctttttcttggaactcctcaacacgtatggagggatttttcaggtttcagcatgaacatggggcttcttgctgtctgtctctctctcagtacagttcaaggtgttagcaagtgtacccaccacagataggcatttcaacaaaagctgcctcaacttttttcgagaaaaatacctttattccataaatatccagttttattctcatgtacctaagatgtggagaaaataattgcattccatgaaactgcctgcagacgttagcaggctctttcaaaaataactccatggtgcacaggagcacctgcatccaaagagcatgcttacattttactgttctgcatattacaaaaaataacttgcaacttcataacttctttgacaaagtaaattacttttttgattgcagtttatatgaaaaatgtactgattttttttttaataaactgcatcgagatccaaccgactgaattgttaaaaaaaaaaaaaaataaagattcttaaaagaattaaaaaaa

SEQ ID NO: 137168 - DNA, 994 bp, Homo sapiens
  misc_feature (1)...(994): n = a,t,c or g
ccaggagacccatcggctctaccgcctgaagctggaggagctgaccaaacttcagaacaattgcaccagctccatcacgcggcaaaagaagcggctccaggagctggccctcgccctgaagaaatgcaaaccctccctcccagcagaggccgagggggccgcacaggagctggagaaccagatgaaagagcgccaaggcctcttctttgacatggaggcctatttgcctaaaaagaaaggattgtacctgagcctggttctggggaacgtcaacgtcacgctcctgagcaagcaggctaagtttgcctacaaggacgagtatgagaagttcaagctctacctcaccatcatcctcatcctcatcatcttcactatgccgcttcctgctcaactccagggtgacagatgctgccttcaacttcctgctggtctggtactactgcaccctgaccatccgggagagcatcctcatcaacaacggctcccggtggggcagggcgggccctgagggaggggagcatggaatggggtgccagggaccctccgggaaaggcagggaacagggcgctggggggtgatggtgggtcttttgttccagggttcaaaggctggtgggtgttccatcactacgtgtccaccttcctgtcgggagtcatgctgacgtggcccgacggtctcatgtaccagaaattccggaaccaattcctctccttttccatgtaccagagcttcgtgcagtttctccagtactactaccagagcggctgcctctaccgcctgcgggcgctgggcgagcggcacaccatggacctcactgtgggtgagtcgggagtggccctggcatctggacattcccctttcctcccatcccgggtctgagtggtgagcgcccctctgtccctggccgtcctgtgccctgaccttcctccccgcagagggcttccagtcctggatgtggcggngcctcaccttcctgctgccttttttttcttgg

SEQ ID NO: 137169 - DNA, 1273 bp, Homo sapiens
atggcgccactgcactccatcctgggcaacagagtgggactctgtcaggccagtgtcagggcctgcccgggcgccacagtctccagccagtgccgggcatccctgcggtccaggctggcctggagagggtcagagctgcccgcgaaccggggacgcacgtggcccgggccggggggcctccgcctgcaggccgcccctcgtctggcctacctgggccgagctacgctgctcgttctcacaccctactatgacctaccacccaacgtccgattcactagtatgcctgcatccccacacacgtacttcttggttctcggcgctcccatcttcttactactacgctctacgtggtcgtactatcacgcatgcaggttcgagtatgcaacgccgaatgatcgaaataccacctatctagctatctccggtcctacgaggaggacgtacgacgtagctacgtttgcctacaaggacgagtatgagaagttcaagctctacctcaccatcatcctcatcctcatctccttcacttgccgcttcctgctcaactccagggtgacagatgctgccttcaacttcctgctggtctggtactactgcaccctgaccatccgggagagcatcctcatcaacaacggctcccggcccgacggtctcatgtaccagaaattccggaaccaattcctctccttttccatgtaccagagcttcgtgcagtttctcccagtactactaccagagcggctgcctcctaccgcctgcgggcgctggggcgagcggcacaccatgggacctcactgtggagggcttccagtcctgggatgtggcggggcctcaccttcctgctgccttttctttttctttggacaattctgggcagctttttaacgcgctgacgttgttcaaacctgggcccagggaccctcagttgcaaggagtgggcaggtgcttatgttgcggctttcccttccttctccattttcctcggcaatttcttcaccaccctgagggttgtgcaccacaagtttcacagtcagcggcacgggagcaagaaggatttgaggctggggctttccccttgccggcccagaaggggttttcttgttcctgtgtgtttttgggaaggggattgggaaggcgccccttcgagtgtgcgtgtatcagggggtctcttctattctcccttgggttttatggggcgctgtgggcctggaaaggaagaccctgggcccagttgccctcaattaaagagaaggcccagaggtgaaaaaaaaaa

SEQ ID NO: 137170 - DNA, 398 bp, Homo sapiens
gtgcccagaaggcagaagacagccacacgaagagcaccagagagacggctgagttccaggccagctggctacgggtgcagtagtggtgataacgcccccatgcgatggctgcactgctgcagatgctggccaacgctgtcacaaagccctggaagccgtgagcctggcagccgtccgagccgtagggccagcgccggagaaggctggatgtggctgcaacgagggcattcaggctgatcccactgtccgcaagagccaagctcagcaccagtaggtggcagggagtccgcagctccggggtcttcccccagtagcaccatcccctcagccagcacctcgagctccccgaagccggtgggcaaagcaatggtctctgccatcctcaccggacgcgtggg

SEQ ID NO: 137171 - DNA, 386 bp, Homo sapiens
gaatttattattgctgctcatcttgtagaccctcttaagatgcatgttacttggagtgatatagcaggtttagatgatgtcattacggatctgaaagacacagtcatcttacctatcaaaaagaaacatttgtttgagaattccaggcttctgcagcctccaaaaggtgttcttctctatgggcctccaggctgtggtaaaacgttgattgccaaggccacagccaaagaagcaggctgtcgatttattaaccttcagccttcgacactgaccgataagtggtatggagaatctcagaaattggctgctgctgtcttctcccttgccataaagctacaaccatccatcatctttatagatgaaatagactcctttctacgaaaccg

SEQ ID NO: 137172 - DNA, 580 bp, Homo sapiens
tcaagactatgatgccagcaagatactatagatcttttaaaaagtctgccattgccagaatattgtaatccagaaggaaaattcaatttggcctctcatttgccaggattttttgtacgtcctgatctaggacccaggttgtgcagtgcctatggtgtagttgctgctaaagatcatgatataggaacaacaaatctccatattgaagtttctgatgttgtaaatatactagtttatgttggcatagcaaaaggaaatggcattctctcaaaagcaggaattctcaagaaatttgaggaagaagatttggatgacattttaaggaaaagattgaaggactcaagtgaaatacctggtgctctgtggcatatttatgctgggaaagatgttgacaagataagggaatttcttcaaaagatttcaaaagaacaaggccttgaagttctaccagaacatgatccaatacgtgaccaaagttggtatgtgaacaaaaagctccgtcaaaggctgcttgaagaatatggagtcagaacctgtactcttattcagttccttggggatgctattgttttgccagcgg

SEQ ID NO: 137173 - DNA, 1414 bp, Homo sapiens
agagacagctgggccactggcagtgagggagagtgaggatggcagagaccagtgccctgcccactggcttcggggagctcgaggtgctggctgtggggatggtgctactggtggaagctctctccggtctcagcctcaataccctgaccatcttctctttctgcaagaccccggagctgcggactccctgccacctactggtgctgagcttggctcttgcggacagtgggatcagcctgaatgccctcgttgcagccacatccagccttctccggcgctggccctacggctcggacggctgccaggctcacggcttccagggctttgtgacagcgttggccagcatctgcagcagtgcagccatcgcatgggggcgttatcaccactactgcacccgtagccagctggcctggaactcagccgtctctctggtgctcttcgtgtggctgtcttctgccttctgggcagctctgccccttctgggttggggtcactacgactatgagccactggggacatgctgcaccctggactactccaagggggacagaaacttcaccagcttcctcttcaccatgtccttcttcaacttcgccatgcccctcttcatcacgatcacttcctacagtctcatggagcagaaactggggaagagtggccatctccaggtaaacaccactctgccagcaaggacgctgctgctcggctggggcccctatgccatcctgtatctatacgcagtcatcgcagacgtgacttccatctcccccaaactgcagatggtgcccgccctcattgccaaaatggtgcccacgatcaatgccatcaactatgccctgggcaatgagatggtctgcaggggaatctggcagtgcctctcaccgcagaagagggagaaggaccgaaccaagtgagcctgccaccctggagtgagccccaggccaggaggctgttccaggagtcctgcccagcagcctcagtggccaagcccagacactcacccaccttccccagtggccccgtggatcctggtcctaggctggacacaggattcagaaagacaccaggctgcacagaaagagccagatggacctgagtgtcggtcacagccccctacactcaaggctgagaggcctcaggaaagtcattcctttttaaaaataataataaatgtaagggggtacagtgcagttttgttacatggatagattgcctagtggtgaagtctgggcttttagtgtaaccatcaccctaataatatacgttgtacccattaagttatttctcatccctcaccccctcccaccttgtcacccttctgagtctccaatgtctattattccacactccatgtccacgtgtacacattatttagctcccacttacaagtgagaacatgtggtatttgactttc

SEQ ID NO: 137174 - DNA, 2057 bp, Homo sapiens
cataatgtagaatcagtgggacccctgagctggttttcctgcaactagatggtcccatcccagagcctgtggactggggagggggctggtaccggagaaggctggatgtggctgcaacgagggcattcaggctgatcccactgtccgcaagagccaagctcagcaccagtaggtggcagggagtccgcagctccggggtcttgcagaaagagaagatggtcagggtattgaggtatctggatgatattaattgtacctcaaacttcagcatcatgcaatatacccatgtaacaaacttgcacatgtacccactgaatcgttcccacaactctgagtactgcagacaaataggcaagagggacaggcaagcgtcccattgacctccttcttccaaggctccttctagtaagggaccagccaagattgtctgcatctactgggccctcattctgcaaagcaatgaggtgaccatcacggaggataaattcaataacctcattaaagcagctgctgtaactgtcgagcccttttggcctagcttctttgcaaaagccctggccagtgtcaatatcggcagcctcctttgcaatgcaggggttggtagatggctccagcagcctgcaccgcacaagcaggaggtcctgccacttccaccactgctgcctcagcttctttccgaaaccataacccccggattgcccccaaatttcgaggtgttttggcccacgaacaatatctttccgaaagggccacttgggtttgggcaccaaatccaaaccccaagagcttattttaactctggagcagggaatgcggtccttacccgcttttagaccagggggaaccttggtgccaccccaatcggggcatttttgaaggccctcgccaaaaagaggacccctgtctggctgctgccctgcagaatcctgggaaggaggcagtgccacctgcagcctcgagcggacaaggagagagggtgcatgggagagggctggtccgccggcagcagggtgactgtgcagcacagccagaggggtgcccaatagacactgcgagttaggagaccgcaccgggccagagtgccgctcaccagctgcttttgagagaatgccatttccttttgctatgccaacataaactagtatatttacaacatcagaaacttcaatatggagatttgttgttcctatatcatgatctttagcagcaactacaccttttggaggctgcagaagcctggaattctcaaacaaatgtttctttttgataggtaagatgactgtgtctttcagatccgtaatgacatcatctaaacctgctatatcactccaagtaaccttgcattcttgtttttgagccactggctgactgacactttttgaagatacacattctgatgatgtagaggccaaaatggtatttgataaagaggaaattacttctgaaccaccccagctggaaacactggtagtatcggcagcagatgtgattacatccgttttggtattacacatcgtatttacagcagacatgactgaactgggaacactgccctgtgagacagcctgaaagtttttttcagattttgtgtgaacactgtctgaattcacatttggcaaaatgattcttccagtttctccggcttctgctagtttgaggcaatctgttttatgtgccccagctgaagatctttcactaactcgatctttagaagctaactgcattgctggcatactatcagtttttgtactagaagatggacgcacaatgacagatgccatagcagcctgtaactttccgctgcttttctccacatgccattcagttttctctttgctgaggttattattaggtctccacatctccgtcaaactctgttctgaagaactcttaaaatttgcctgggagtcttttggttcgggtattagagttggaggcttctgtgattcttgaactttaccaccagcatttactggcatcaccggagttaaagttggaggggaaagactactatagctgccttcctttctttccaggctgtgatggattggtgggtg

SEQ ID NO: 137175 - DNA, 963 bp, Homo sapiens
atgaaggctcgtgctcccccacctcctggaaaggctgccactctgcatgtgcacagtgaccagaagcccccccacgatggggccctcgggtcgcagcagaacttggttcgcatgaaggaggcgctgagggccagcaccatggacgtcaccgtggtcctgcctagtgggctggagaagaggagcgtgctcaatgggagccatgcgatgatggacctactggttgaactttgccttcagaaccacctgaatccatcccaccatgcccttgaaattcggtcttcagaaacccaacaacctttgagttttaagccaaatactttgattgggaccctgaatgtgcatactgtgtttctgaaagaaaaagttcctgaagagaaggttaagcctggtccccctaaggtgcctgagaaatctgtgcgtttggtcgtgaattacctgcggacacaaaaagctgttgtgcgtgtgagccctgaggttcctctccagaatattctcccagtcatttgtgcaaagtgtgaggtcagcccagagcacgtggttctcctcagggacaacattgccggagaggagctggagctgtccaagtccctgaacgagctcgggataaaggagctctacgcgtgggacaacagaagagccctgaacatgtcctttatcctttgtctccctgcaaacttccacgacataagtaaaaggggaaaagttcgtctgagcaaaactcagtccgagccttccctgagctgtcaagctctgtacctaatagagggcttgctgcaactaactttacagcgcgtttgcacacatgcattggtgctgctgcaccatgttgcagtgggccctctgatttgggtactgtgcgatgtggagcctgctcagtgcctccactggagcctcctgcatgtaaccaagtgtcctggccctgccctggtggctaggatgtgcacctttgctcctacagcgtga

SEQ ID NO: 137176 - DNA, 5289 bp, Homo sapiens
ccagccccttccgtccgccgcgctccgccgctgtcctccgccggcccgcgtgggaggacgatgggtcagcgcggaaaaagtgaatgagggcggcagcggtggcggcggtagccagcgcctgactcggcgggcccggagcaccgcccgcgtcccggcccccggcaccatggacgcgccgcgcgcctcggcggccaagcccccgaccgggaggaagatgaaggctcgtgctcccccacctcctggaaaggctgccactctgcatgtgcacagtgaccagaagcccccccacgatggggccctcgggtcgcagcagaacttggttcgcatgaaggaggcgctgagggccagcaccatggacgtcaccgtggtcctgcctagcgggctggagaagaggagcgtgctcaatgggagccatgcgatgatggacctactggttgaactttgccttcagaaccacctgaatccatcccaccatgcccttgaaattcggtcttcagaaacccaacaacctttgagttttaagccaaatactttgattgggaccctgaatgtgcatactgtgtttctgaaagaaaaagttcctgaagagaaggttaagcctggtccccctaaggtgcctgagaaatctgtgcgtttggtcgtgaattacctgcggacacaaaaagctgttgtgcgtgtgagccctgaggttcctctccagaatattctcccagtcatttgtgcaaagtgtgaggtcagcccagagcacgtggttctcctcagggacaacattgccggagaggagctggagctgtccaagtccctgaacgagctcgggataaaggagctctacgcgtgggacaacagaagagaaacctttaggaaatcatcacttggcaatgatgagacagataaagagaagaaaaaatttctgggatttttcaaagttaataaaagaagcaatagtaagggctgtttaacgacccccaactccccatccatgcactcacgttctcttacgctgggtccatccctctcgctgggcagcatctcaggggtgtccgtgaagtcggagatgaagaagcgccgagcccctcctcctccaggttcagggccacctgtgcaagacaaggcatcggaaaaggtatctcttgggtcacagattgatttacagaagaagaagcggcgagcgccagctccccctccaccacagccaccaccaccgagtcccctgatccccaaccgcactgaggataaggaggagaacaggaagagcacgatggtaagcctgcccctggggtctggcagccactgcagcccggatggagccccgcaggtgctgtcagaggcggaggagaccgtgtcagttggcagctgttttgcgtcggaggacacgaccgaggactcaggagtgatgagttccccctcagacatcgtctctctggactcgcagcaggacagcatgaaatacaaagacaagtgggccacagaccaggaagactgcagtgaccaggacctcgctggaaccccagacctgggtccccagaagagccccttgtgggagaagaatggctctgagaactcacatctgagaactgaaaaagctgtcacagcctcaaatgatgaagaagacctattaattgctggagagttccgtaaaacccttgcagaacttgatgaagacctggaagaaatggaagacagctatgaaacagacaccagctccctcaccagctccatccatggtgcatccaaccactgcccacaggatgccatgatccctcacggcgacacagatgcaatcccagtaacattcataggggaagtttcagatgatcctgtggattcggggttgttttccaatagaaacaacaatgctgggtctttcgactcggagggtgttgccagcaggagagactccctggcgccacttcaagctgagcacagccagccccatgaaaaggcaagggaggaagtacctgccctgcaccccgcttcccatgacgtcggaaaaggaatccgtgtggccttatctaacatctctaaagatgggaatctaatggaaacggcgcccagggtgacttcttttgcttcgaatcttcacacagacaacctaaatgcaaaagtgaaagacaaagtgtatggctgtgctgacggggagaggactcaagccacagagagagtgaattcccaaccggtgaatgaaaaggacagcaacgataaaaacgctgccttggcaccaacatcatggcaccaacgaggccaaaacccagggaaaagctacagacttaagcacggcctcacaacgtataaaatcattcctccaaagtcagagatgcgatgttacgacagagatgtgtccctctccaccggagccattaagattgacgagctggggaacttggtgagtcctcacgccaccggcatcaggatcatttccctgtcttcgtctgtgcctgaagcagaatctcagcccattgggaaagtcagagagttctggaggtgcaactctgtggaaaaacacctgggccgaccctcagagagctctgccaggggacccccctccacccctgtgcccacgcagacgcagaatccagagagcagactccaagcagaccccaagccaatatcgccccagcagaagtctgcccaccatgagggccggaaccccctaggggaggggagaaaccagccccccaccatgggcatgggtcacgtgagggtgccagcagctcacaccacagaagtcacatttctcaagcctcagagaagaacgtccagccagtatgtggcctctgccattgccaagcgcataggagccccaaaagtccatgctgatgtggtgaggccacacggttatgccgagaagggttatgcaggcaaggcgccagtgctggctgcaccacctgtcactgtgaaagatgacaggacatccagcccacactcagagacacaaggatggaaggatggtgcccagtggccctgtgtcactcctcccaacaaccacggggaagatttggcagtgggagcccctcctaggggggaggtcattggcccacacaggaagttgtctactcaggacagacctgctgctatccacagaagctcctgtttctcactggttcagtcttcccagagggatcgtgtttctgtgggacagagctgtggtttcagtggaaagcaaagcacaagtagccaggaggccagctcagcatctgagcccagacgcgcacctgatggtacagacccaccccctccacacacatctgacactcaggcctgcagcagggagctggtcaatggctctgtgcgcgccccaggccacggcgagccttcccaccctccaggagggtctggcacagaaagccacattctcctagaaagagaggaaaagcccagtgtgttctctacagatggaaatgaaacagacagtatttggccacccagcatttttgggccgaagaaaaaattcaaacctgttgtccagagaccagtcccaaaagacacatccctgcactctgccctgatggaagccatccactctgcgggagggaaggacagactacgcaagacggcagaacacaccggggagggcaggccagcgaaactgtcctacacggaggcagagggcgaacgatctgcactgctggcagctatccgcgggcacagcggcacctgcagcctgaggaaggtggcatcctctgcttctgaggagctccagagcttccgagatgccgcactctctgctcagggctcggaaagtcctctgctagaagaccttggtcttctgtccccaccagccattcccccaccaccccctccaccctcccaggctctctctgcaccaaggacggcctccaggttcagcacgggcaccctcagcaacaccgcagacgcaaggcaagccttgatggacgccatccgctccggcacaggggctgcgagactgagaaaggtgcccttgctcgtgtgaatgaacagaggccagagaattgcagaaacccacctgtaatatgcccacaggcgtcactcaaggagtctgcatagccaggaacatcaagttttggtgttactttcttgtctacaggccaaatgcgcacagttgattttcggtgtgttcctgtataacggcttgaaaggaaaggagaagatgctgtgtcgctgcgcagctcgtgtgccaaggaaatgtgttttgcctctgaatatcttaagttgctaataaacgattcttgttggcaggttaatgggactataaatgctggagcccagcactcacacttaattatatttatgggcaaagtaaaaagaatcatgccttagactgattttggacctttgagacttttaccacatacagatggatgaaactacttactgatttaagatcttttgaattttagaaaaaacatatgaatcagatggaacaatctgaatgtgatatgctccatgatgctgtgtgttttggtagtaagaaaaaaaattgggaggcttttcaaaggtggctttgttaggtagtaaaactgctggattcttcttcctcaaatatttggggctaacacttcacagagggtcacagtccatgatctgaccaactaagcttttaaaaatcaactattaccacccagaaaacagtcctacgtgatcatgtggccagggcatgcccgagtcctgcaagggtggcgggtggctgaggtcacaccaccactggagtggatgggcagtgccccacatggacagccattccccaggctatgaagtgacataggcctcccccacggtgcctgtgtacggagcctgatgacttcactgggagccttctggaatcctgcagagggtcaaggagcagggatgttggatgcccacctgtcaagagttcagatcaaagttgcgctgagagcatcacaattttggttcagccttgacgcgtttgtccaacagctcattggctccctttgtatgatatcgtggtcttctcacatggtgcccagtcaccaatatttataatgaggtctaactacagcagtagtttttcatatatatctctaaaacattttgttatattgaaaaaagtaatagaaatcaagatgtgttgatgaaataaaatgtgtatctgagtgagaaaacaagtatggtgaggtcactttaatgtttcacagcgatctcagatctaggcctcaggtagaatggaagctgttctgcattcactgattaacgttgctaaactcttggtgaggcacgagctaccagccaattgctcttcatcacagctatctgtcttttagtgccacaaataaaagaaaatcaaatctt

SEQ ID NO: 137177 - DNA, 1497 bp, Homo sapiens
atgggtccaaaagcaggaactcgtcttatgatgtttcctgcagggtttgaaacttggtgtgacccttcccagtctcatgtaaaattcagctcgattgactacttttccactacacacttttctggagcacgtctttcacagcaagtaaggcattcgcctagctcagggcagaggatcacctatctgtatgttgccaaacaccatcctgctctcagcaaataccaagatattagaccctttcaaagcaacatctttgaagcaatgcagaatagagtttctccaattgtacaaagaataaaactaagacaatcagaccctctcagaatgtcaaacaaagagtcaggtggccctgaacctggaggaggaggggctcggcgcttcttcatctccgacttcacggacacccctgagatgctgcccagcgagagggatggacccagcgtaagagaacgagcagacatctccagtctttacagactggttttggcaagtaaggatctactcctagctcaccagactgatgttattgcctctggtatctcagtcaagctgagtttggagtcaggcaggcaggatcctgtgacagtggccacagcagaccgcagaagctcatttccagccaagccagggggagggagagatgcagtgcatggtgcaaacttcatcagggcaggtggaggaggaaaagattctagagccaggttggaaccttccaaattccagacaagcacactgaagcccagatgtgtctgtcagctgacaagacagccatgggatgtggttcccaaagcgagatggaacctgcagcatcagcatcgctgggaacttatgagagatgcgaatgttgggcccactccagacccccagaataagaaacgctggccaccagggcagggccaggacacttggttacatgcaggaggctccagtggaggcactgagcaggctccacatcgcacagtacccaaatcagagggcccactgcaacatagtgcagcagcaccaatgcatgtgtgcaaacgcgctgtaaagttagttgcagcaagccctctattagaaatctgtgcgtttggtcgtgaattactgcggacacaaaaagctgttgtgcgtgtgagccctgaggttcctctccagaatattctcccagtcatttgtgcaaagtgtgaggtcagcccagagcacgtggttctcctcagggacaacattgccggagaggagctggagctgtccaagtccctgaacgagctcgggataaaggagctctacgcgtgggacaacagaagagtgccttctgctgtccctatgcagggaccctggcctgcagaacacttcctgcaggttaatgagcaaccccctgctggctccccatcaccatgcccaagcagcagcagcagcagctctggtctgagaggtggcatgcaaactgcaaatgggcctgcttgtgcccttactcctacctgtgcccagacagactgtccctgcccgacctcgcactga

SEQ ID NO: 137178 - DNA, 528 bp, Homo sapiens
atggagagagcagggctctatcagtgcagtctgatgggtaaggggcctaggcccgagacagtctgcgagcaagtgtgcgtgtatgagcccctgagcccgcccaccctgcaagtgcctggagactcactggggaagctagaaccaggggaggacgattttgttcacggctgtcacacccggcaccaagtgactaaacagacagtagttctgcccttcagccccagcaccggggacgacccgcgctgcgccagcgaaccccgcctcggaggagtccccgcccgggctctcaccgccacgcggcgcgagcccggccagcagacggcgcacctgctcggggagtggccttcggcggagacgagcctccgattggcgcggaggcaatgtacagtaagccatgatgggcagaggcaggaaatacttagagaactggaaagaataaaggagccggtgttctcttcgcagggcccggaattcttcctggcgctcagcaatttggcaatcttgaagaaccggctgaaatcaagatga

SEQ ID NO: 137179 - DNA, 421 bp, Homo sapiens
ggcaagcaaaacaaggtcagagttggatggggagatttacaagtttttgaggacttgggctgacaaacttgaagaatggccagagcaaactctcgaggcaggtacacaagttggaaatcagacttctagtcacaagtggcaggcctggaaaccttgacaagtcatctcaagggatgatgtcgaccttggccgtagacaggtctgcattcttgatgtcaaccttggccataggtctgcattcttgtggtctgcccttggccatagacgggtctgcattcttcttgctgtctgccccagtggtgcaaaagtcttagagggggaagaacgtattgaaagctaaaggctttgacaatttatgtgttggtgataagctggtctttgttagcactgtcctagtgaggctgaaggaataagtttctct

SEQ ID NO: 137180 - DNA, 342 bp, Homo sapiens
gaaaaactaaaggaacccgatgaacacagtgacacccgcagtttgtcagcaggactcgctagcgatggagcgtctggggaagaagccccacggcggaggaaaaggtacccgagacaacgacacgttatctgggctccgggggttgaagcaccaggcgacgacgcagagaggcgtcgcacgagaagccagtggacctgcgacacggcactccccattgggaaaatgaggtacgttagtgttcgcgattttaaaggcaaagtgctaattgatattagagaatattggatggatcctgaaggtgaaatgaaaccaggaagaaaaggccctcaacaaattggatga

SEQ ID NO: 137181 - DNA, 1020 bp, Homo sapiens
agtgggtattcattcctagcacgttcaaccccaagcaaaacaaggtcagagttggatggggagatttacaagtttttgaggacttgggctgacaaacttgaagaatggccagagcaaactctcgaggcaggttgtgtccaaaatcttagctcggaagatggagacaggatcaggtaccacatggtcttgagtgtaggagccagtctgaatggtcctgcactgatagcagacagcactcttcatcagtactcagactccaggcgccaggaaattgggaaaatgaggtacgttagtgttcgcgattttaaaggcaaagtgctaattgatattagagaatattggatggatctgaagcgcctacctcgaaagccgagaactggagaagcaggttccgggagccttagcagcccgggcgcagacacccccgtggaggctgcagtaacctggcgactgggacttgggagtgtagatgtgggttccttccgagcgtggcagcgtggcaagtccgcagccgttggacacacggtgagtccgaggtggccaagatggcaaggcggtgacagcagcgcattatcgatggcttctctgtccactctcacctgttcctggggccttcgctacagtgcgctgtcccctacgaccagcgcccagagggaggagggatcggcgctataccggcatctcagtccgccttccctcagattctaccctaccgtaaaatgggccacactggcgattacacgtccgcgtccccccgctccccgaagccatagccaccatcctcagcctcgagctctttgtccagtttgggttttattccaacacccaaagacccatggagaaaacttgggggacaggtggaaagaaggttcagcgctcgtttcttcaaaaggcactcccgcaaagcttagctctgggcgcattagaaatgcgttgcagaacactctgggagaagtgagtgtcgccagaattcagacacacaggggcatttttgtggaaaccacagaagctcgtttataa

SEQ ID NO: 137182 - DNA, 751 bp, Homo sapiens
gcccctattgagtgtggcggaattccgtcacttccggttctctgtcagtcgcgagcgaacgaccaagagggtgttcgactgctagagccgagcgaagcgatgcctaaatcaaaggaacttgtttcttcaagctcttctggcagtgattctgacagtgaggttgacaaaaagttaaagaggaaaaaggcaagtttgcttcagaaaaccctgtaaagaaaccaaaagacaggtgagacttctgagagccctgtcatctttctaaacagagccagccagcagcagagatgataacatgtttcagattgggaaaatggaggtacgttagtgttccgcgattttaaaggcaaaagtgcctaatttgatattagagaatattggatggatcctgaaggtgaaatgaaaccagaaagaaaaggtatttctttaaatccactaacaatgggagcccagcttgaaggaacagatttctggaccattgattgatgccagtaagaaaacttgtaaaatttccgagcccatattaattaaaccctgtactgttccagttgttttaatctgtctggttacagtggctgtgtgtttctgaatgtgtctccaagctattggatgtttggattgcagagggatttgtaaggtggaatacttttttttaatgtgcattattaaaaatattgagtgaagctaattgtcaactttattaaggattactttgtctgcccaccacctagtgtaaaataaaatcaagtaatac

SEQ ID NO: 137183 - DNA, 921 bp, Homo sapiens
ctagagagtatagggcagaaggatggcagatgagtgactccacatccagagctgcctccctttaatccaggatcctgtccttcctgtcctgtaggagtgcctgttgccagtgtggggtgagacaagtttgtcccacagggctgtctgagcagataagattaagggctgggtctgtgctcaattaactcctgtgggcacgggggctgggaagagcaaagtcagcggtgcctacagtcagcaccatgctgggcctgccgtggaagggaggtctgtcctgggcgctgctgctgcttctcttaggctcccagatcctgctgatctatgcctggcatttccacgagcaaagggactgtgatgaacacaatgtcatggctcgttacctccctgccacagtggagtttgctgtccacacattcaaccaacagagcaaggactactatgcctacagactggggcacatctttaattcctggaaggagcaggtggagtccaagactgtaattctcaatggagctactgctggggagaactagggtgtgggaatatttgaagacgaccattgacaactgccatttccaagaaagcacagagctgaacaatactttcacctgcttcttcaccatcagcaccaggccctggatgactcagttcagcctcctgaacaagacctgcttggagggattccactgagtgaaacccactcacaggcttgtccatgtgctgctcccacattccgtggacatcagcactactctcctgaggactcttcagtggctgagcagctttggacttgtttgttatcctattttgcatgtgtttgagatctcagatcagtgttttagaaaatccacacatcttgagcctaatcatgtagtgtagatcattaaacatcagcattttaagaaaaaaaaaaaaaaaaaa

SEQ ID NO: 137184 - DNA, 455 bp, Homo sapiens
tgaaaaagaaacaaatcttataatgaagcacagaagaggctttaagaattactgataccatcttgccttttctcctttgttgggaggaaattagtaaataagccaggtttgatggctaaagagtgatttctggagttttttaaaagttaaaatcttttcttattaggcatccacctaccccaggtttgggaaatggtattgaatgttgggctttcccttgtgttttagtgattatttaaagcttgggagtgtttttttcttatttttctgcaggtggttatcactaggctaaaactggacaaagaccgcaaaaagatcctcgaacggaaagccaaatctcgccaagtaggaaaggaaaagggcaaatacaaggaagaaaccatttgagaagatgcaggaataaagtaatcttatatacaagctttgattaaaacttgaaacaaaaaaaaaaaaaa

SEQ ID NO: 137185 - DNA, 758 bp, Homo sapiens
atcgagaccctagaccagcgcggtggaattccaccgaagcgggagcggccaaaatgaaagtttaaatccctttgtgacttcccgaccgaaagcaagaattcgcaaaaggcattttcaaatgcaccccttccccccacattccgaagggaagattattgtccttcccccctctttccccaaagagcctgagaccagaaggtaccaaccgtgccgattcccatgcccccatcccgaaaaggatgaatagaagttcaggggtttttttttggttgtacgtgggacacctataaagggtcagccaaattggccaaagtagtccccaggtttacagggaagaaatatgttatctacattgaaccgggttgcagcgggaaaaaggcttaatggccacaactgtccaccgtagggcatttcaccccagcaagcttgggagtgtttttttcttatttttctgcaggtggttatcacctaggctaaaacttggacaaagacccgcaaaaagatccgtcgaacggaaagccaaaatctcgccaaagtaggaaaggaaaaagggcaaatacaattaagaaaccattgcagcaagatgcagggaataaaagtaatacttatataacaagcaaagaaataaaactttgaaacgtcgaggaaaaaaacagaaaaaagatactagaacggaaagccaaatcttgccaaataagaaaaggaaaagggcgaatacaaggaagaaaccatcgggacgatgcgggagtgcggtcttc

SEQ ID NO: 137186 - DNA, 1326 bp, Homo sapiens
atcgtctttttactttatttagaaacctgtttggaggttatggatgataaacccaatcctgaagccctaagtgacagttcagagcgtcttttctcctttggcgtcatcgcagatgttcaatttgcagacttagaagatggctttaatttccaaggaaccaggcggcgatactacagacatagtcttcttcacttacagggtgccattgaagactggaataatgaaagcagcatgccctgttgtgtccttcagcttggagatatcatcgatggatataatgcacagtataatgcatccaaaaagtccctagaacttgtgttgtggcatgttcaagaggcgtaaaggtccagttcatcatacatggggaaaccatgaattctataacttcagtagagagtatttaacacactctaaacttaacactaagtttctagaagatcagattgtacatcatcctgagaccatgccttcagaagattattatgcttatcattttgtaccattccctaaattctggttcattttacttgatgcatatgacttgagtgtcttggggcgtgggatcagtcttctccaaaatacggaggcagtgtatggaagatattggaggggagccacaatcccaaatacggggaactggaatagttcctcaagggacttttctgaggccccagtttgttccagtttaatgggagggtttcagcccaggaacagctaaactggttgaatgaagtgctaacattctctgacacaaaccaagaaaaggtggtgattgtgagccatcttccccatttaccccggaccgccttttgacaatgtgtgcctggcctggaactacagagatgccctggcagtcatttggtctcatgagtgtgtggtgtgtttctttgcttggtcacacccatgatggtggctactctgaggatccttttggtgtataccacggtcaacctagaaggagttattgaaacagctccagacagccaacgctttggcacagttcatgtctatcctgacaaaatgatgttgaaagggagaggcagagttccagataggatttatgaattacaaggaaaggaagagccttcccattgttaagtctaatttattttaacttgatagaaaatgagctttgtgtttgtccctcctaaacaaaaaaataaaaatcctctgtctcattgtttagtattcagcttgcataacaaaatgtatttatagtttcagtgtgtgatggttgataaaatactcagaaatgttattttggatcatgtatccattgtaagttagaaacaaaccagggaggaaactgaggcaggggtgtatagt

SEQ ID NO: 137187 - DNA, 382 bp, Homo sapiens
aaacaatgggagcggccagtcctacgggcttgtcctgtatgagaagtccatctgctccggaggccgcctccgtgcccacgctcatgacatggcacaggtgtttttggatgagacaatgatagggattctgaatgagaataataaggacctgcacattcctgaactcagggaataactggatctgtcagcatcaataactcttccctggagggctttaccatctattccctggagatgaaaatgagcttctttgagaggctccgctctgccacctggaagcctgtcccagacagccaccagggcccggccttctactgtgggaccttgaaggctggcccttctcccaaggacaccttcctgagcctgctgaactggaattatg

SEQ ID NO: 137188 - DNA, 488 bp, Homo sapiens
cccacgcgtccgggaggtcgaaggcgttcagactcttagctgaacgcggagctgcggcggctatgctgcggagcggctgccggcgtttcggagcgcgcctcggctgcctgcccggcggtctccgggacctcgtccagaccggccaccggagcttgacctcctgcatcgacccttccatgggacttaatgaagagcagaaagaatttcaaaaagtggcctttgactttgctgcccgagagatggctccaaatatggcagagtgggaccagaagcatgtgtgcctggatgattgatagcttcggaaatgaggaacagaggcacaaattttgcccaccgctctgtaccatggagaagattgcttcctactgcctcactgaaccaggaagtgggagtgatgctgcctctcttctgacctccgctaagaaacagggagatcattacatcctcaatggctccaggccttcatcaggggtgctggggagtcagac

SEQ ID NO: 137189 - DNA, 477 bp, Homo sapiens
ggcttccaggtggcagagcggagcctctcaaagaagctcattttcatctccagggaatagatggtaaagccctccagggaagagttattgatgctgacagatccagttattcctttctgctcattctgtatttgccatgaaaaattgactcgtccttgattctccaccaggatcctcaggtatcggcagtcctgctgggacaggccaggtcatggagaccacgcagccatggagggcgtctacccgacaacccgttttttcactgagtcccacatggagagacacatgggagaacaggaggctccagggcccagcagtcttcccttcacctaaggactgccttgtgttcctatagtcaatcttccctttcccctctgctgatcctacctgagttcaggaatgtgcaggtccttattattctcattcagaatccctatcattgtctcatccaaagaattccaccgctctggacgagta

SEQ ID NO: 137190 - DNA, 906 bp, Homo sapiens
atgcccacgggaatggcccatctgtgtcctctgcccctgaggcctcctgggcagctgcaagactgtgagctccatgggagcagggaccgtaccatcctcgtctttgttcctctgcggtgcttcacgcagagcttcgtgaacactccagcagcatctgttgcaacagctatgtctgggcacctgcgcctcagagttgatccaggtcttgatttccacctggctgaccatcagagctccctcttggcctttgtcgagtgtgacctgtggagcaggacctctgacggacagggtgccttatcggagagactgcggagcttcagcatgcaggacctcaccaccatcaggggagacggcgcccctgctccctcgggccccccaccaccggggtctgggcgggccagcggcaaacacggccagcctaagatgtccaggagtgcttctgagagcgctagcagctcagggctgcagggtgcaaggactgactttgtgtgccagtgtgtacctgctgctccacctgcaggacctggaaagggccataataatcctgggaaggatgatgaggatgatgatgatgatgatggtggtggtggtggtggtgatgatggtggtggtggtggtggtggtggtggtggtggtggtggtgatagcctggagcatccaggagaccccagggagagtggaggtctcccggttctggacagagactcctgttgctgccctcccagcgttggagaacatgcacaaagccattttggtttcagtcctgagattatagtgatgatggtgattttggaaatcgatgattgtctggtccaagcaaaagaccgaagttacgatgcccttgtgcacttcgggaagcggggcttgaacgtggccgccacagcggctgtgatggctgcttccaag

SEQ ID NO: 137191 - DNA, 1015 bp, Homo sapiens
aaggatttccacctccacgctctgcccgaagccgaagaagctcatcgcaccgccgggccgggcgggtctcgcttccatgggacttaatgaagagcagaaagaatttcaaaaagtggcctttgactttgctgcccgagagatggctccaaatatggcagagtgggaccagaaggacaggaaggctgatggaaaagggggagcagtgacccaggaagttcaggcccagctgctggtgaagcacgggcagaagctagtctcccgattccagctcagcagcttttcctacgtggattccgtaaggaccacacagtccaaacaagagcatctccagacagacaagggactatcaggaaaacgcaccaaaactgagaactcaggtgaggcattagctaaagtggaggactccaaccctcagaagacttcagccactaaaaactgtttgaagaatctaagcagccactggctgatgaagtcagagccagagagccgcctagagaaaggtgtagatgtgaagttcagcattgaggatctcaaagcacagcccaaacagacaacatgctgggatggtgttcgtaactaccaggctcggaacttccttagagccatgaagctgggagaagaagccttcttctaccatagcaactgcaaagagccaggcatcgcaggactcatgaagatcgtgaaagaggcttacccagaccacacacagtttgagaaaaacaatccccattatgacccatctagcaaagaggacaaccctaagtggtccatggtggatgtacagtttgttcggatgatgaaacgtttcattcccctggctgagctcaaatcctatcatcaagctcacaaagctactggtggccccttaaaaaatatggttctcttcactcgccagagattatcaatccagcccctgacccagggccttcagatcccagctgtcaacagcctgctgtgtgacgtcactgaaagcctctgtgctctagtttcctcactgataaaggagggatactaa

SEQ ID NO: 137192 - DNA, 1552 bp, Homo sapiens
atgtgtgcctggatgattgatagcttcggaaatgaggaacagaggcacaaattttgcccaccgctctgtaccatggagaagtttgcttcctactgcctcactgaaccaggaagtgggagtgatgctgcctctcttctgacctccgctaagaaacagggagatcattacatcctcaatggctccaaggccttcatcagtggtgctggtgagtcagacatctatgtggtcatgtgccgaacaggaggaccaggccccaagggcatctcatgcatagttgttgagaaggggacccctggcctcagctttggcaagaaggagaaaaaggaagagacgcttagagaagacctggtgttggccacaagtctcagtaatggaaggcgtgtggtcccttttgcttctttgattaaaaataaagtaaaactcattggagatgattgtgggtatttcagcaacccaagaaggacacttaggtactggaaggccgccctacctgctggattgttgggcaaccacgcagtccctgatttttgccaggtggggtggaactcccagccaacacgagctgtgatcttcgaagactgtgctgtccctgtggccaacagaattgggagcgaggggcagggcttcctcattgccgtgagaggactgaacggagggaggatcaatattgcttcctgctccctgggggctgcccacgcctctgtcatcctcacccgagaccacctcaatgtccggaagcagtttggagagcctctggccagtaaccagtacttgcaattcacactggctgatatggcaacaaggctggtggccgcgcggctgatggtccgcaatgcagcagtggctctgcaggaggagaggaaggatgcagtggccttgtgctccatggccaagctctttgctacagatgaatgctttgccatctgcaaccaggccttgcagatgcacgggggctacggctacctgaaggattacgctgttcagcagtacgtgcgggactccagggtccaccagattctagaagagctgttctggcaggggcctggagtccagagccgcagcttcgtccctttcggggggcctcagatcgctctgctgctgcccttttcctctggagatctgcgagaaggcctgtgctggaatcgcctggagggcatgggagcgcagattgcgggcctcaaccccagagcttctgctccagagggtctagtgtgggcctgggaatttgtatctgcaacaagtcttcaataccgccaggcaggccctgtcatcgcggtgcaagtggagaatgagtatggctcattcaataaggataaaacatacatgccgtatctccacaaggccctgctgagaagagggattgtggagcttctcttgacctctgatggtgagaaacatgtgctgagtggccacaccaaaggagtgttggccgccatcaatttgcaaaaacttcaccaggatactttcaatcagcttcataaagtccagaactggaattatggatttgtgttcatcaatggacgtaaccttgggcgatattggaatattgggc

SEQ ID NO: 137193 - DNA, 1034 bp, Homo sapiens
ggggagatacgcaccatgttaacgatgcaaaggaggttgaacatgctgtttctgttttcatcaaatatgagatctccttcaatgtatatatgttccatggtggaaccaactttggtttcatgaacggggccacatatttcgggaagcactcgggcattgtcaccagctatgactatgatgcagtgctcacggaggctggagattacacagaaaaatatctgaagcttcaaaaactctttcaatctgtctcagcaactcccctgccccgagtacccaaacttcctcccaaggctgtgtatccccccgagagaccgacgctgtacctcccgctgtgggacgccctatcctacttaaatgagccagtcaggtcgcgtcagcccgtcaacatggagaaccttcccataaacaatgggagcggccagtcctacgggcttgtcctgtatgagaagtccatctgctccggaggccgcctccgtgcccacgctcatgacatggcacaggtgtttttggatgagacaatgatagggattctgaatgagaataataaggacctgcacattcctgaactcagggactgccgatacctgaggatcctggtggagaatcaaggacgagtcaatttttcatggcaaatacagaatgagcagaaaggaataactggatctgtcagcatcaataactcttccctggagggctttaccatctattccctggagatgaaaatgagcttctttgagaggctccgctctgccacctggaagcctgtcccagacagccaccagggcccggccttctactgtgggaccttgaaggctggcccttctcccaaggacaccttcctgagcctgctgaactggaattatggattcgtgttcatcaatggacgtaaccttgggcgatattggaatattgggcctcagaaaacactgtaccttcctggagtttggcttcatccagaagacaatgaggtcatcttgtttgagaagatgatgagtggctcagatatcaaatctacagacaagcccacgctgtaa

SEQ ID NO: 137194 - DNA, 1773 bp, Homo sapiens
cggacgcgtgggcggaggtctttggcgttcttactcttagctgaacgcggagctgcggcggctgtgctgtggagcggctgccggcgtttcagggcgcgcctcggatgcctgcccggcggtctccgggtcctcgtccagaccggccaccggagcttgacctcctgcatcgacccttccatgggacttaatgaagagcagaaagaatttcaaaacgcggcctttgactttgctgcccgagagatggctccaaatatggcagagtgggaccagaaggagctgttcccagtggatgtgatgcggaaggcagcccagctaggcttcggaggggtctacatacaaacagatgtgggcgggtctgggcatgtacgacttgatacctctgtcatttttgaagccttggctaacaggctgcaccagcaccacagcctatatgaaggcatccacaatgccctcagagccagcattcttttgtccaagagggaggaacgcactataaagctggccatttatgctgtaggcagtggggaccccgggcctgcttaccgccaggcaggccctgtcatcgcggtgcaagtggagaatgagtatggctcattcaataaggataaaacatacatgccgtatctccacaaggccctgctgagaagagggattgtggagcttctcttgacctctgatggtgagaaacatgtgctgagtggccacaccaaaggagtgttggccgccatcaatttgcaaaaacttcaccaggatactttcaatcagcttcataaagtccagaaaaaaagtcaaaagaaaaatgccactattaccaccaataacaccaacaataataccaccaccaccaccaacaataatgccagcaacaataccaccaccatcacatcaccaccaccaccaccaccaccaccaccaccaccaccaccaccaccaacaccaccaccaccactaccaaataaaacttttctggtctcttcaactcccctgccccgagtacccaaacttcctcccaaggctgtgtatccccccgtgagaccgtcgctgtacctcccgctgtgggacgccctatcctacttaaatgagccagtcaggtcgcgtcagcccgtcaacatggagaaccttcccataaacaatgggagcggccagtcctacgggcttgtcctgtatgagaagtccatctgctccggaggccgcctccgtgcccacgctcatgacatggcacaggtgtttttggatgagacaatgatagggattctgaatgagaataataaggacctgcacattcctgaactcagggactgccgatacctgaggatcctggtggagaatcaaggacgagtcaatttttcatggcaaatacagaatgagcagaaaggaataactggatctgtcagcatcaataactcttccctggagggctttaccatctattccctggagatgaaaatgagcttctttgagaggctccgctctgccacctggaagcctgtcccagacagccaccagggcccggccttctactgtgggaccttgaaggctggcccttctcccaaggacaccttcctgagcctgctgaactggaattatggattcgtgttcatcaatggacgtaaccttgggcgatattggaatattgggcctcagaaaacactgtaccttcctggagtttggcttcatccagaagacaatgaggtcatcttgtttgagaagatgatgagtggctcagatatcaaatctacagacaagcccacgctgtaaaactgtgtctgaaca

SEQ ID NO: 137195 - DNA, 492 bp, Homo sapiens
  misc_feature (1)...(492): n = a,t,c or g
ggaccggccacctcgtagctgtttcactcgcatccagagggccacctgctgcgttctcctcatctgcctcttcctgggcgccaacgccgtgtggtacggagctgttggtgactctgcctacagcacggggcatgtgtccaggctgagcccgctgagcgtcgacacagtcgctgttggcctggtgtccagcgtggttgtctatcccgtctacctggccatcctctttctcttccggatgtcccggagcaaggttatcaatactctggctgaccatcgtcatcgtgggactgactttggtggaagtccttggttacttatcattactgtgtttctgagaagctataaatttgccatctccctctgcacaagttacctttgtgagtctttcctgaagactatcttcccgtctcanaatggacatgatggatccacggatgtacagcagagagccaggaggtccaactgccgtagacaggaaggaattaaaattgt

SEQ ID NO: 137196 - DNA, 487 bp, Homo sapiens
  misc_feature (1)...(487): n = a,t,c or g
ggcggatccggggnattgannaatcggagaccctagtcagngngcnggaattctcaccgccttcggcgccagcctcttcatgcccccaagccatgagccgacagcggatgtaaactacatcgtcatgctgacatgtgctgtgtgcctggtgacctacatggtcatggccgccatcctgcagaagctggaccagttggatgccagccggggccgcgccatccccttctgtgggcagcggggccgcttcaagtacgagatcctcgtcaagacaggctggggccggggctcaggtaccacggcccacgtgggcatcatgctgtatggggtggacagccggagtggccaccggcacctggacggcgacagagccttccactgcaacagtctggacatcttccggatcgccaccccgcacagcctgggtagcgtgtggaagatccgagtgtggcacgacaacaaagggctcagccctgcctggttcctgcag

SEQ ID NO: 137197 - DNA, 459 bp, Homo sapiens
ccgctgagggtagagctgagggtggaaggggagtgagcagacactcgggaggtgtcttgagattatcatccgctgagggtggaaggggatagagcacacactcggaaggtgtcttgaggctcagggagttatcaattatagaatgttgttgagttggaggaggtggctggtggcccatcctgttttttaaagtttcagctgtgaggtagggccagtagggcaatcctgaagaatgacgatgctccactgccgccattctgacccggttgcaaagaggctttcttgcagaaggggtgattttgcatctgtagtagtcctctgcccgccgccgcaacgcttgcgcacgttgaaacatttcctgttctttggcggtcttcctctttccattgattttgtcatgacggttgacttttgttgtcaccttcatcttacggattttagctcgaactttggtttcca

SEQ ID NO: 137198 - DNA, 341 bp, Homo sapiens
  misc_feature (1)...(341): n = a,t,c or g
aaggtggctgggagcccgagccccacacctgccgggcagcaggtgctggacgtcaacagctgcctggactcatccgtgctggacagctccttcctcacgttctcaggcctccacgctgaggtgagggctctactgggggtcctgccgccttggcgcanttgggactcaagaccctgtgcacctntcagcaggcctttgctggacagatgaagagtgacttgtttctggatgattctaagagtgaccttgaggaaccctgggagctcaggaaggaaggagcacccagaagcagggacagggagctngtttggggaggaccagaaatcaggttatcaatactt

SEQ ID NO: 137199 - DNA, 210 bp, Homo sapiens
agggaggctggcgggtgtgcgctgaactttgggccccgcgggagcagcacggtcaccattccacgggagcggctggcggctggcgtggagtacaccttcagcctgaccgtgtggaaggccggccgcaaggaggaggccaccaaccagacgttccacgtacagtcttcaagccacatatgctctagtggcaaaagctacacagtcccctag

SEQ ID NO: 137200 - DNA, 3012 bp, Homo sapiens; identical to SEQ ID NO: 131208

SEQ ID NO: 137201 - DNA, 298 bp, Homo sapiens
gagacctcatccacctggccagctcagacgtgcgggcaccacagcgctcacagctgggagccgagtcaccatcgcggatggtggcgtcccaggcctacaacctgacctctgccctcacgcccatcgtcacgcgctcccgcgtgctcaacgaggagcccctgacgctggcgggcagtcaggctttgttaaatcatctttgctgtcgatatctgcggattccagcagcagcgttgccggacgatccccacacaactggtgaaaaagcgcggtgggattgtcgcgataagcgccttcgcag

SEQ ID NO: 137202 - DNA, 639 bp, Homo sapiens
  misc_feature (1)...(639): n = a,t,c or g
atgaccgtcaccctccacagccaggatgtcctcatgctccctggtgacctcgttggcttgcagcacgacgctggccctggcgccctcctgcactgctcgccggctcccggccaccctggtccccaggccccgtacctctccgccaacgcctcgtcatggctgccccacttgccagcccagctggagggcacttgggcctgccctgcctgtgccctgcggctgcttgcagccacggaacagctcaccgtgctgctgggcctgaggcccaaccctgggctgcggctgcctgggcgctatgaggtccgggcagaggtgggcaatggcgtgtccaggcacaacctgtcctgcagctntgacgtggtctccccagtggctgggctgggggtcatctaccctgccccccgcgacagccgcctctacgtgcccaccaacggctcagcctcggtgctccaggtggactctggtgccgcgccccagtatcacggggtaccgaaccgcttacagggctgggctggtgaatcacattcaggcctctgttgcctggaaacgcatcccaggcttcacactgattttacttgggagggaagggagatgagatatgagggcaaaggagttttgactgctgcccttctctcctag

SEQ ID NO: 137203 - DNA, 798 bp, Homo sapiens
atgcgcctggggtcccaagtactcgggaggaccagagacccagtggggagttaccgtctgaacctctccagccacttccgctggtcggcgctggaggtgtccgtgggcttgtacacgtccctgtgccagtacttcagcgaggaggacgtggtgtggcggacagaggggctgctgcccctggaggagacctcgccccgccaggccgtctgcctcacccgccacctcaccgccttcggcaccagcctcttcgtgcccccaagccatatccgctttgtgtttccttcttcacaggagccaacagcggatgtaaactacatcgtcatgctgacatgtgctgtgtgcctggtgacctacatggtcatggccgccatcctgcacaagctggaccagttggatgccagccggggctgcgccatccccttctgtgggcagcggggccgcttcaagtacgagatcctcgtcaagacaggctggggccggggctcagggaacccacctcttagaatcatccagaaacaagtcactcttcatctgtccagcaaaggcctgctgagaggtgcacagggtcttgagtccaagctgcgccaaggcggcaggacccccagtagagccctcacctcagcgtggaggcctgagaacgtgaggaaggagctgtccagcacggatgagtccaggcagctgtcaacgtccagcacctgctgcccggcaggtgcctctccacttgtggctccctggctgctgaagctcagcagggacagctgtgtccagttccaggtggaggacagccggggcttctga

SEQ ID NO: 137204 - DNA, 1530 bp, Homo sapiens
atggtcatactcatcacgagaccttcctcacaaagcaatatcgtcatcgctatggctctatcacggccatgtcaaataggccacacctcctcctcctcatggacccggaaacgcacgagcgtagagcagtcccagacaacagacccagttggcccgtgtgcatccagtggacgtgcacagctgctccttcctgtctgccaggtcttggcctgtgtcctctccccgtgtgtcccccggtctgcaactgtcctgcctgtccttgtcacgagcactgtggggaggctccttgaggtgtggctgacgaagcggggagccctgcgtgtccaccctcatccgtcgtgcgggggtccacgggccatgaccgtcaccctccacggccaggatgtcctcatgctccctggtgacctcgttggcttgcagcacgacgctggccctggcgccctcttgcactgctcgccggctcccggccaccctggtccccaggccccgtacctctccgccaacgcctcgtcatggctgccccacttgccagcccagttgaagggcacttgggcctgccctgcctgtgccctgcggctgcttgcagccacggaacagctcaccgtgctgctgggcttgaggcccaaccttggactgcggctgcctgggcgctatgaggtccgggcagaggtggccaatggcgtgtccaggcacaacctctcctgcagctttgacgtggtctccccagtggctgggctgcgggtcatctaccctgccccccgcgacggccgcctctacgtgcccaccaacggctcagccttggtgctccaggtggactctggtgccaacgccacggccacggctcgctggcctgggggcagtgtcagcgcccgctttgagaatgtctgccctgccctggtggccaccttcgtgcccggctgcccctgggagaccaacgataccctgttctcagtggtagcactgccgtggctcagtgagggggagcacgtggtggacgtggtggtggaaaacagcgccagccgggccaacctcagcctgcgggtgacggcggaggagcccatctgtggcctccgcgccacgcccagccccgaggcccgtgtactgcagggagtcctagtggtcctgctggctggctcctcgggctacctggtgggctttaaattcctggaaagtcacggctctgacagtggctccgctaactcattccactgtctcatttcacaaaatgaatttaaaactctgctccctgacctcacacgagcccccaggtacagccccgtggtggaggccggctcggacatggtcttccggtggaccatcaacgacaagcagtccctgaccttccagaacgtggtcttcaatgtcatttatcagagcgcggcggtcttcaagctctcactgagcgcggactccgcgccccgcccccgctggcgtctgcagagcccccgggtgggacgtctgtctccagacccggggtttttcggctccccggggccgtgccaaccgcggctccaggcgttccttatttaa

SEQ ID NO: 137205 - DNA, 1388 bp, Homo sapiens
  misc_feature (1)...(1388): n = a,t,c or g
atggcctctggcctactaggggctctggccctgacccacggccactcactcctcagagacgtctcccacaacctgctccgggcgctggacgttgggctcctggcgaacctctcggcgctggcagagctggatataagcaacaacaagatttctacgttagaagaaggaatatttgctaatttatttaatttaagtgaaataaacctgagtgggaacccgtttgagtgtgactgtggcctggcgtggctgccgcgatgggcggaggagcagcaggtgcgggtggtgcagcccaaggcatccacgtgtgctgggcatggctccgtggctggccagcatccgtttggcatccccccgctggacagtggcggtgctcagtgccggtgggtggggcagctctgtccttcccagccagccntgttgcgcttccggcgcctgctggtggctgagctgcagcgtggcttctttgacaagcacatctggctctccatatgggaccggccgcctcgtagctgtttcactacgcatccagagagccacctgctgcgttctcctcatctgtctcttcctgggcgccaacgccgtgtggtacggggctgttggagactctgcctacagcacggggcgtgtgtccaggctgaacccgctgagcgtcgacacagtcgctgttggcctggtgtccagcgtggttgtctatcccgtctacctggccatcctctttctcttccggatgtcccggagcaaggcacagcccgtgtacgaagtgagccgcagctcctacgtgtacctggagggccgctgcctcaattgcagcagcggctccaagcgagggggatacaccttcacgctgacgggtgctgggccgctctggcgaggaggagggctgcgcctccatccccctgtcccccaaccgcccgccgctggggggctcttgccgcctcttcccactgggcgctgtgcacgctctcaccaccaaggtgcacttcgaatgcatgggctggcatgacgcggaggatgctggcgccccgctggtgtacgccctgctgctgcagcgctgtcgccagggccactgcgaggagttctgtgtctacaagggcagcctctccggctacggagccgtgctgcccccgggtttcaggccacaattcgaggtgggcctggccgtggtggtgcaggaccagctgggagccgctgtggtcgccctcaacaggtctctggccatcaccctcccagagcccaacggcagcgcaatggggctcacagtctggctgcacgggctcaccgctagtgtgctcccagggctgctgcggcaggccgatccccagctcgtcatcgagtactcgctggccctggtcactgtgctgaacgagacttatacagaatcactttag

SEQ ID NO: 137206 - DNA, 1143 bp, Homo sapiens
  misc_feature (1)...(1143): n = a,t,c or g
tgacaagcacatctggctctccatatgggaccggccacctcgtagctgtttcactcgcatccagagggccacctgctgcgttctcctcatctgcctcttcctgggcgccaacgccgtgtggtacggggctgttggtgactctgcctacagcacggggcatgtgtccaggctgagcccgctgagcgtcgacacagtctgctgttggcctggtgtccagcgtggttgtctatcccgtctacctggccatcctctttctcttctggatgtcccggagcaaggtgggctgggagcccgagccccacacctgccgggcagcaggtgctggacatcgacagctgcctggactcgtccgtgctggacagctccttcctcacgttctcaggcctccacgctgaggttatcaatactctggctgaccatcagcatcgcgggactgactttggtggaagtccttcggtacttatcattactgtgtcactgagaagctataaatttgccatctccctctgcacaacttacctttgggttatcaatactctggctgaccatcgtcatcgtgggactgactttggtggaagtccttggttacttatcattactgtgtttctgagaagttataaatttgccatctccctctgcacaacttacctttgtgstgtctttcctgaagactatcttcccgtctcaaaatggacatgatggatccacggatgtacagcagagagccaggaggtccaactgccgtagacaggaaggaattaaaattgtcctgggaagacatctttactttatggagacaggtggaaaccaaagttcgagctaaaatccgtaagatgaaggtgacaacaaaagtcaaccgtcatgacaaaatcaatggaaagaggaagaccgccaaagaacatctgaggaaactaagcatgaaagaacgtgagcacagagaagaggagaggcaggtgtcagaggcagaggaaaatgggaaattggatatgaaagaaatacacacctacatggaaatgtttcaacgtgcgcaagcgttgcggccggcgggcagaggacttactacagatgcaaatcaccccttctgcaagaaagctctttgcancggtgcacttacaattngtattcctgggagttaaagaaatt

SEQ ID NO: 137207 - DNA, 4073 bp, Homo sapiens
gagcagagacccagcggggagttaccatctgaacctctccagccacttccgctggtcggcgctgcaggtgtccgtgggcctgtacacgtccctgtgccagtacttcagcgaggaggacatggtgtggcggacagaggggctgctgcccctggaggagacctcgccccgccaggccgtctgcctcacccgccacctcaccgccttcggcgccagcctcttcgtgcccccaagccatgtccgctttgtgtttcctgagccgacagcggatgtaaactacatcgtcatgctgacatgtgctgtgtgcctggtgacctacatggtcatggccgccatcctgcacaagctggaccagttggatgccagccggggccgcgccatccctttctgtgggcagcggggccgcttcaagtacgagatcctcgtcaagacaggctggggccggggctcaggtaccacggcccacgtgggcatcatgctgtatggggtggacagccggagcggccaccggcacctggacggcgacagagccttccaccgcaacagcctggacatcttccggatcgccaccccgcacaagcctgggtagcgtgtggaagatccgagtgttggcacgacaacaaagggctcagcctggccctgggtttcctgcagcaacgtcatcgtcagggacctgcagacggcacacaagcaccttcttcctggtcaatgactggctttcggtggagacggaggccaacgggggcctggtggagaaggaggtgctggccgcgagcgacgcagcccttttgcgcttccggcgcctgctggtggctgagctgcagcgtggcttctttgacaagcacatctggctctccatatgggaccggccgcctcgtagccgtttcactcgcatccagagggccacctgctgcgttctcctcatctgcctcttcctgggcgccaacgccgtgtggtacggggctgttggcgactctgcctacagcacggggcatgtgtccaggctgagcccgctgagcgtcgacacagtcgctgttggcctggtgtccagcgtggttgtctatcccgtctacctggccatcctctttctcttccggatgtcccggagcaaggtggctgggagcccgagccccacacctgccgggcagcaggtgctggacgtcgacagctgcctggactcatccgtgctggacagctccttcctcacgttctcaggcctccacgctgaggtgaggactctactgggggtcctgggctgggctgggggtcctgccgccttggcgcagcttggactcaagacactgtgcacctctcagcaggcctttgttggacagatgaagagtgacttgtttctggatgattctaagagtctggtgtgctggccctccggcgagggaacgctcagttggccggacctgctcagtgacccgtccattgtgggtagcaatctgcggcagctggcacggggccaggcgggccatgggctgggcccagaggaggacggcttctccctggccagcccctactcgcctgccaaatccttctcagcatcagatgaagacctgatccagcaggtccttgccgagggggtcagcagcccagcccctacccaagacacccacatggaaacggacctgctcagcagcctgtccagcactcctggggagaagacagagacgctggcgctgcagaggctgggggagctggggccacccagcccaggcctgaactgggaacagccccaggcagcgaggctgtccaggacaggactggtggagggtctgcggaagcgcctgctgccggcctggtgtgcctccctggcccacgggctcagcctgctcctggtggctgtggctgtggctgtctcagggtgggtcttgctggaagccctgtacttctcactggtggccaagcggctgcacccggatgaagatgacaccctggtagagagcccggctgtgacgcctgtgagcgcacgtgtgccccgcgtacggccaccccacggctttgcactcttcctggccaaggaagaagcccgcaaggtcaagaggctacatggcatgctgcggagcctcctggtgtacatgctttttctgctggtgaccctgctggccagctatggggatgcctcatgccatgggcacgcctaccgtctgcaaagcgccatcaagcaggagctgcacagccgggccttcctggccatcacgcggtacgggcatccggtgcactggtctgaggagctctggccatggatggcccacgtgctgctgccctacgtccacgggaaccagtccagcccagagctggggcccccacggctgcggcaggtgcggctgcaggaagcactctacccagaccctcccggccccagggtccacacgtgctcggccgcaggaggcttcagcaccagcgattacgacgttggctgggagagtcctcacaatggctcggggacgtgggcctattcagcgccggatctgctgggggcatggtcctggggctcctgtgccgtgtatgacagcgggggctacgtgcaggagctgggcctgagcctggaggagagccgcgaccggctgcgcttcctgcagctgcacaactggctggacaacaggagccgcgctgtgttcctggagctcacgcgctacagcccggccgtggggctgcacgccgccgtcacgctgcgcctcgagttcccggcggccggccgcgccctggccgccctcagcgtccgcccctttgcgctgcgccgcctcagcgcgggcctctcgctgcctctgctcacctcggtgtgcctgctgctgttcgccgtgcacttcgccgtggccgaggcccgtacttggcacagggaagggcgctggcgcgtgctgcggctcggagcctgggcgcggtggctgctggtggcgctgacggcggccacggcactggtacgcctcgcccagctgggtgccgctgaccgccagtggacccgtttcgtgcgcggccgcccgcgccgcttcactagcttcgaccaggtggcgcagctgagctccgcagcccgtggcctggcggcctcgctgctcttcctgcttttggtcaaggctgcccagcagctacgcttcgtgcgccagtggtccgtctttggcaagacattatgccgagctctgccagagctcctgggggtcaccttgggcctggtggtgctcggggtagcctacgcccagctggccatcctgctcgtgtcttcctgtgtggactccctctggagcgtggcccaggccctgttggtgctgtgccctgggactgggctctctaccctgtgtcctgccgagtcctggcacctgtcacccctgctgtgtgtggggctctgggcactgcggctgtggggcgccctacggctgggggctgttattctccgctggcgctaccacgccttgcgtggagagctgtaccggccggcctgggagccccaggactacgagatggtggagttgttcctgcgcaggctgcgcctctggatgggcctcagcaaggtcaaggaggtgggtacggcccagtgggggggagagggacacgccctgggctctgcccagggtgcagccggactgactgagcccctgtgccgcccccagttccgccacaaagtccgctttgaagggatggagccgctgccctctcgctcctccaggggctccaaggtatccccggatgtgcccccacccagcgctggctccgatgcctcgcacccctccacctcctccagccagctggatgggctgagcgtgagcctgggccggctggggacaaggtgtgagcctgagccctcccgcctccaagccgtgttcgaggccctgctcacccagtttgaccgactcaaccaggccacagaggacgtctaccagctggagcagcagctgcacagcctgcaaggccgcaggagcagccgggcgcccgccggatcttcccgtggcccatccccgggcctgcggccagcactgcccagccgccttgcccgggccagtcggggtgtggacctggccactggccccagcaggacaccccttcgggccaagaacaaggtccaccccagcagcacttag

SEQ ID NO: 137208 - DNA, 10922 bp, Homo sapiens
atgccgcccgccgcgcccgcccgcctggcgctggccctgggcctgggcctgtggctcggggcgctggcggggggccccgggcgcggctgcgggccctgcgagcccccctgcctctgcggcccagcgcccggcgccgcctgccgcgtcaactgctcgggccgcgggctgcggacgctcggtcccgcgctgcgcatccccgcggacgccacagcgctaacggcgatggcaaaagcagatggagacgtgaaaaagtacgggagcaagcgaggggctctggccctgacccacggccactcactcctcagagacgtctcccacaacctgctccgggcgctggacgttgggctcctggcgaacctctcggcgctggcagagctggatataagcaacaacaagatttctacgttagaagaaggaatatttgctaatttatttaatttaagtgaaataaacctgagtgggaacccgtttgagtgtgactgtggcctggcgtggctgccgcgatgggcggaggagcagcaggtgcgggtggtgcagcccgaggcagccacgtgtgctgggcctggctccctggctggccagcctctgcttggcatccccttgctggacagtggctgtggggccaccctggtggggccccacggacctctggcctctggccagctagcagccttccacatcgctgccccgctccctgtcactgccacacgctgggacttcggagacggctccgccgaggtggatgccgctgggccggctgcctcgcatcgctatgtgctgcctgggcgctatcacgtgacggccgtgctggccctgggggccggctcagccctgctggggacagacgtgcaggtggaagcggcacctgccgccctggagctcgtgtgcccgtcctcggtgcagagtgacgagagcctcgacctcagcatccagaaccgcggtggttcaggcctggaggccgcctacagcatcgtggccctgggcgaggagccggcccgagcggtgcacccgctctgcccctcggacacggagatcttccctggcaacgggcactgctaccgcctggtggtggagaaggcggcctggctgcaggcgcaggagcagtgtcaggcctgggccggggccgccctggcaatggtggacagtcccgccgtgcagcgcttcctggtctcccgggtcaccaggagcctagacgtgtggatcggcttctcgactgtgcagggggtggaggtgggcccagcgcccgcagggcgaggccttcagcctggagagctgccagaactggctgcccggggagccacacccagccacagccgagcactgcgtccggctcgggcccaccgggtggtgtaacaccgacctgtgctcagcgccgcacagctacgtctgcgagctgcagcccggaggcccagtgcaggatgccgagaacctcctggtgggagcgcccagtggggacctgcagggacccctgacgcctctggcacagcaggacggcctctcagccccgcacgagcccgtggaggctgggatggggtctgtggagctgaggcggccccctgcccaccaggtcatggtattcccgggcctgcgtctgagccgtgaagccttcctacaccacggccgaatttggaatccaggagctccggcggcccgcccagctgcggctgcaggtgtaccggctcctcagcacagcagggaccccggagaacggcagcgagcctgagagcaggtccccggacaacaggacccagctggcccccgcgtgcatgccagggggacgctggtgccctggagccaacatctgcttgccgctggacgcctcctgccacccccaggcctgcgccaatggctgcacggagggggagcacgtggtggacgtggtggtggaaaacagcgccagccgggccaacctcagcctgcgggtgacggcggaggagcccatctgtggcctccgcgccacgcccagccccgaggcccgtgtactgcagggagtcctagtgaggtacagccccgtggtggaggccggctcggacatggtcttccggtggaccatcaacgacaagcagtccctgaccttccagaacgtggtcttcaatgtcatttatcagagcgcggcggtcttcaagctctcactgacggcctccaaccacgtgagcaacgtcaccgtgaactacaacgtaaccgtggagcggatgaacaggatgcagggtctgcaggtctccacagtgccggccgtgctgtcccccaatgccacgctagcactgacggcgggcgtgctggtggactcggccgtggaggtggccttcctgtggacctttggggatggggagcaggccctccaccagttccagcctccgtacaacgagtccttcccggttccagacccctcggtggcccaggtgctggtggagcacaatgtcatgcacacctacgctgccccaggtgagtacctcctgaccgtgctggcatctaatgccttcgagaaccggacgcagcaggtgcctgtgagcgtgcgcgcctccctgccctccgtggctgtgggtgtgagtgacggcgtcctgagccagccggctgccaaccacacctatgcctcgaggggcacctaccacgtgcgcctggaggtcaacaacacggtgagcggtgcggcggcccaggcggatgtgcgcgtctttgaggagctccgcggactcagcgtggacatgagcctggccgtggagcagggcgcccccgtggtggtcagcgccgcggtgcagacgggcgacaacatcacgtggaccttcgacatgggggacggcaccgtgctgtcgggcccggaggcaacagtggagcatgtgtacctgcgggcacagaactgcacagtgaccgtgggtgcggccagccccgccggccacctggcccggagcctgcacgtgctggtcttcgtcctggaggtgctgcgcgttgaacccgccgcctgcatccccacgcagcctgacgcgcggctcacggcctacgtcaccgggaacccggcccactacctcttcgactggaccttcggggatggctcctccaacacgaccgtgcgggggtgcccgacggtgacacacaacttcacgcggagcggcacgttccccctggcgctggtgctgtccagccgcgtgaacagggcgcattacttcaccagcatctgcgtggagccagaggtgggcaacgtcaccctgcagccagagaggcagtttgtgcagctcggggacgaggcctggctggtggcatgtgcctggcccccgttcccctaccgctacacctgggactttggcaccgaggaagccgcccccacccgtgccaggggccctgaggtgacgttcatctaccgagacccaggctcctatcttgtgacagtcaccgcgtccaacaacatctctgctgccaatgactcagccctggtggaggtgcaggagcccgtgctggtcaccagcatcaaggtcaatggctcccttgggctggagctgcagcagccgtacctgttctctgctgtgggccgtgggcgccccgccagctacctgtgggatctgggggacggtgggtggctcgagggtccggaggtcacccacgcttacaacagcacaggtgacttcaccgggcccggccctggccggcagcggcaaaggcttctcgctcaccgtctcgaggccggcacctaccatgtgcagctgcgggccaccaacatgctgggcagcgcctgggccgactgcaccatggacttcgtggagcctgtggggtggctgatggtggccgcctccccgaacccagctgccgtcaacaaaagcgtcaccctcagtgccgagctggctggtggcagtggtgtcgtatacacttggtccttggaggaggggctgagctgggagacctccgagccatttaccacccatagcttccccacacccggcctgcacttggtcaccatgacggcagggaacccgctgggctcagccaacgccaccgtggaagtggatgtgcaggtgcctgtgagtggcctcagcatcagggccagcgagcccggaggcagcttcgtggcggccgggtcctctgtgcccttttgggggcagctggccacgggcaccaatgtgagctggtgctgggctgtgcccggcggcagcagcaagcgtggccctcatgtcaccatggtcttcccggatgctggcaccttctccatccggctcaatgcctccaacgcagtcagctgggtctcagccacgtacaacctcacggcggaggagcccatcgtgggcctggtgctgtgggccagcagcaaggtggtggcgcccgggcagctggtccattttcagatcctgctggctgccggctcagctgtcaccttccgcctgcaggacacagatgagcccagggccgagcactcctacctgaggcctggggactaccgcgtgcaggtgaacgcctccaacctggtgagcttcttcgtggcgcaggccacggtgaccgtccaggtgctggcctgccgggagccggaggtggacgtggtcctgcccctgcaggtgctgatgcggcgatcacagcgcaactacttggaggcccacgttgacctgcgcgactgcgtcacctaccagactgagtaccgctgggaggtgtatcgcaccgccagctgccagcggccggggcgcccagcgcgtgtggccctgcccggcgtggacgtgagccggcctcggctggtgctgccgcggctggcgctgcctgtggggcactactgctttgtgtttgtcgtgtcatttggggacacgccactgacacagagcatccaggccaatgtgacggtggcccccgagcgcctggtgcccatcattgagggtggctcataccgcgtgtggtcagacacacgggacctggtgctggatgggagcgagtcctacgaccccaacctggaggacggcgaccagacgccgctcagtttccactgggcctgtgtggcttcgacacagagggaggctggcgggtgtgcgctgaactttgggccccgcgggagcagcacggtcaccattccacgggagcggctggcggctggcgtggagtacaccttcagcctgaccgtgtggaaggccggccgcaaggaggaggccaccaaccagacggtgctgatccggagtggccgggtgcccattgtgtccttggagtgtgtgtcctgcaaggcacaggccgtgtacgaagtgagccgcagctcctacgtgtacttggagggccgctgcctcaattgcagcagcggctccaagcgagggcggtgggctgcacgtacgttcagcaacaagacgctggtgctggatgagaccaccacatccacgggcagtgcaggcatgcgactggtgctgcggcggggcgtgctgcgggacggcgagggatacaccttcacgctcacggtgctgggccgctctggcgaggaggagggctgcgcctccatccgcctgtcccccaaccgcccgccgctggggggctcttgccgcctcttcccactgggcgctgtgcacgccctcaccaccaaggtgcacttcgaatgcacgggttggcatgacgcggaggatgctggcgccccgctggtgtacgccctgctgctgcggcgctgtcgccagggccactgcgaggagttctgtgtctacaagggcagcctctccagctacggagccgtgctgcccccgggtttcaggccacacttcgaggtgggcctggccgtggtggtgcaggaccagctgggagccgctgtggtcgccctcaacaggtctttggccatcaccctcccagagcccaacggcagcgcaacggggctcacagtctggctgcacgggctcaccgctagtgtgctcccagggctgctgcggcaggccgatccccagcacgtcatcgagtactcgttggccctggtcaccgtgctgaacgagcaccgagcccagatacgcaagaacatcacggagactctggtgtccctgagggtccacactgtggatgacatccagcagatcgctgctgcgctggcccagtgcatggggcccagcagggagctcgtatgccgctcgtgcctgaagcagacgctgcacaagctggaggccatgatgctcatcctgcaggcagagaccaccgcgggcaccgtgacgcccaccgccatcggagacagcatcctcaacatcacaggagacctcatccacctggccagctcggacgtgcgggcaccacagccctcagagctgggagccgagtcaccatctcggatggtggcgtcccaggcctacaacctgacctctgccctcatgcgcatcctcatgcgctcccgcgtgctcaacgaggagcccctgacgctggcgggcgaggagatcgtggcccagggcaagcgctcggacccgcggagcctgctgtgctatggcggcgccccagggcctggctgccacttctccatccccgaggctttcagcggggccctggccaacctcagtgacgtggtgcagctcatctttctggtggactccaatccctttccctttggctatatcagcaactacaccgtctccaccaaggtggcctcgatggcattccagacacaggccggcgcccagatccccatcgagcggctggcctcagagcgcgccatcaccgtgaaggtgcccaacaactcggactgggctgcccggggccaccgcagctccgccaactccgccaactccgttgtggtccagccccaggcctccgtcggtgctgtggtcaccctggacagcagcaaccctgcggccgggctgcatctgcagctcaactatacgctgctggacggtcactacctgtctgaggaacctgagccctacctggcagtctacctacactcggagccccggcccaatgagcacaactgctcggctagcaggaggatccgcccagagtcactccagggtgctgaccaccggccctacaccttcttcatttccccggggagcagagacccagcggggagttaccatctgaacctctccagccacttccgctggtcggcgctgcaggtgtccgtgggcctgtacacgtccctgtgccagtacttcagcgaggaggacatggtgtggcggacagaggggctgctgcccctggaggagacctcgccccgccaggccgtctgcctcacccgccacctcaccgccttcggcgccagcctcttcgtgcccccaagccatgtccgctttgtgtttcctgagccgacagcggatgtaaactacatcgtcatgctgacatgtgctgtgtgcctggtgacctacatggtcatggccgccatcctgcacaagctggaccagttggatgccagccggggccgcgccatccctttctgtgggcagcggggccgcttcaagtacgagatcctcgtcaagacaggctggggccggggctcaggtaccacggcccacgtgggcatcatgctgtatggggtggacagccggagcggccaccggcacctggacggcgacagagccttccaccgcaacagcctggacatcttccggatcgccaccccgcacagcctgggtagcgtgtggaagatccgagtgtggcacgacaacaaaggtttgagccctgcctggttcctgcagcacgtcatcgtcagggacctgcagacggcacgcagcgccttcttcctggtcaatgactggctttcggtggagacggaggccaacgggggcctggtggagaaggaggtgctggccgcgagtgacgcagcccttttgcgcttccggcgcctgctggtggctgagctgcagcgtggcttctttgacaagcacatctggctctccatatgggaccggccgcctcgtagccgtttcactcgcatccagagggccacctgctgcgttctcctcatctgcctcttcctgggcgccaacgccgtgtggtacggggctgttggcgactctgcctacagcacggggcatgtgtccaggctgagcccgctgagcgtcgacacagtcgctgttggcctggtgtccagcgtggttgtctatcccgtctacctggccatcctttttctcttccggatgtcccggagcaaggtggctgggagcccgagccccacacctgccgggcagcaggtgctggacatcgacagctgcctggactcgtccgtgctggacagctccttcctcacgttctcaggcctccacgctgagcaggcctttgttggacagatgaagagtgacttgtttctggatgattctaagagtctggtgtgctggccctccggcgagggaacgctcagttggccggacctgctcagtgacccgtccattgtgggtagcaatctgcggcagctggcacggggccaggcgggccatgggctgtgcccagaggaggacggcttcttcctggccagcccctactcgcctgccaaatccttctcagcatcagatgaagacctgatccagcaggtccttgccgagggggtcagcagcccagcccctacccaagacacccacatggaaacggacctgctcagcagcctgtccagcactcctggggagaagacagagacgctggcgctgcagaggctgggggagctggggccacccagcccaggcctgaactgggaacagccccaggcagcgaggctgtccaggacaggactggtggagggtctgcggaagcgcctgctgccggcctggtgtgcctccctggcccacgggctcagcctgctcctggtggctgtggctgtggctgtctcagggtgggtgggtgcgagcttccccccgggcgtgagtgttgcgtggctcctgtccagcagcgccagcttcctggcctcattcctcggctgggagccactgaaggtgttgctggaagccctgtacttctcactggtggccaagcggctgcacccggatgaagatgacaccctggtagagagcccggctgtgacgcctgtgagcgcacgtgtgccccgcgtacggccaccccacggctttgcactcttcctggccaaggaagaagcccgcaaggtcaagaggctacatggcatgctgcggagcctcctggtgtacatgctttttctgctggtgaccctgctggccagctatggggatgcctcatgccatgggcacgcctaccgtctgcaaagcgccatcaagcaggagctgcacagccgggccttcctggccatcacgcggtctgaggagctctggccatggatggcccacgtgctgctgccctacgtccacgggaaccagtccagcccagagctggggcccccacggctgcggcaggtgcggctgcaggaagcactctacccagaccctcccggccccagggtccacacgtgctcggccgcaggaggcttcagcaccagcgattacgacgttggctgggagagtcctcacaatggctcggggacgtgggcctattcagcgccggatctgctgggggcatggtcctggggctcctgtgccgtgtatgacagcgggggctacgtgcaggagctgggcctgagcctggaggagagccgcgaccggctgcgcttcctgcagctgcacaactggctggacaacaggagccgcgctgtgttcctggagctcacgcgctacagcccggccgtggggctgcacgccgccgtcacgctgcgcctcgagttcccggcggccggccgcgccctggccgccctcagcgtccgcccctttgcgctgcgccgcctcagcgcgggcctctcgctgcctctgctcacctcggtgtgcctgctgctgttcgccgtgcacttcgccgtggccgaggcccgtacttggcacagggaagggcgctggcgcgtgctgcggctcggagcctgggcgcggtggctgctggtggcgctgacggcggccacggcactggtacgcctcgcccagctgggtgccgctgaccgccagtggacccgtttcgtgcgcggccgcccgcgccgcttcactagcttcgaccaggtggcgcagctgagctccgcagcccgtggcctggcggcctcgctgctcttcctgcttttggtcaaggctgcccagcagctacgcttcgtgcgccagtggtccgtctttggcaagacattatgccgagctctgccagagctcctgggggtcaccttgggcctggtggtgctcggggtagcctacgcccagctggccatcctgctcgtgtcttcctgtgtggactccctctggagcgtggcccaggccctgttggtgctgtgccctgggactgggctctctaccctgtgtcctgccgagtcctggcacctgtcacccctgctgtgtgtggggctctgggcactgcggctgtggggcgccctacggctgggggctgttattctccgctggcgctaccacgccttgcgtggagagctgtaccggccggcctgggagccccaggactacgagatggtggagttgttcctgcgcaggctgcgcctctggatgggcctcagcaaggtcaaggagttccgccacaaagtccgctttgaagggatggagccgctgccctctcgctcctccaggggctccaaggtatccccggatgtgcccccacccagcgctggctccgatgcctcgcacccctccacctcctccagccagctggatgggctgagcgtgagcctgggccggctggggacaaggtgtgagcctgagccctcccgcctccaagccgtgttcgaggccctgctcacccagtttgaccgactcaaccaggccacagaggacgtctaccagctggagcagcagctgcacagcctgcaaggccgcaggagcagccgggcgcccgccggatcttcccgtggcccatccccgggcctgcggccagcactgcccagccgccttgcccgggccagtcggggtgtggacctggccactggccccagcaggacaccccttcgggccaagaacaaggtccaccccagcagcacttag

SEQ ID NO: 137209 - DNA, 14948 bp, Homo sapiens
atggggtctgtggagctgaggcggccccctgcccaccaggtcatggtattcccgggcctgcgtctgagccgtgaagccttcctcaccacggccgaatttgggacccaggagctccggcggcccgcccagctgcggctgcaggtgtaccggctcctcagcacagcagggaccccggagaacggcagcgagcctgagagcaggtccccggacaacaggacccagctggcccccgcgtgcatgccagggggacgctggtgccctggagccaacatctgcttgccgctggacacctcctgccaccccaggcctgcgccaatggctgcacgtcaggggccagggctactcggggccccctatgcgctatggagagagttcctcttctccgttcccgcggggccccccgcgcagtactcggtcaccctccacagccaggatgtcctcatgctccctggtgacctcgttggcttgcagcacgacgctggccctggcgccctcctgcactgctcgccggctcccggccaccctggtccccaggccccgtacctctccgccaacgcctcgtcatggctgccccacttgccagcccagctggagggcacttgggcctgccctgcctgtgccctgcggctgcttgcagccacggaacagctcaccgtgctgctgggcctgaggcccaaccctgggctgcggctgcctgggcgctatgaggtccgggcagaggtgggcaatggcgtgtccaggcacaacctgtcctgcagctttgacgtggtctccccagtggctgggctgcgggtcatctaccctgccccccgcgacggccgcctctacgtgcccaccaacggctcagcctcggtgctccaggtggactctggtgccagcgccacggccacggctcgctggcctgggggcagtgtcagcgcccgctttgagaatgcctgccctgccctggtggccaccttcgtgcccagctgcccctgggagaccaatgataccctgttctcagtggtagcactgccgtggctcggtgagggggagcacgtgatggacgttgtggtggaaaacagcgccagccgggccaacctcagcctgcgggtgacggcggaggagcccatctgtggcctccgcgccacgcccagccccgaggcccgtgtactgcagggagtcccagtcctgctggctggctcctcaggctacctggtgggctttaaattcctggaaagtcacggctctgacagcggctccgctaactcattccaccgtctcatttcacgaaatgaatttaaaactccgctccctgacctcacacgagtccccaggtacagccccgtggtggaggccggctcggacatggtcttccggtggaccatcaacgacaagcagtccctgaccttccagaacgtggtcttcaatgtcatttatcagagcgcggcggtcttcaagctctcactgacggcctccaaccacgtgagcaacgtcaccgtgaactacaacatcaccgtggagcggatgaacaggatgcagggcctgcgggtctctacagtgccagccgtgctgtcccccaatgccacgctggcactgacggcgggcgtgctggtggactcggccgtggaggtggccttcctgtggacctttggggatggggagcaggccctccaccagttccagcctccgtacaacgagtccttcccggttccagacccctcggtggcccaggtgctggtggagcacaatgtcacccacacctacgctgccccaggtgagtacgtcctgaccgtgctggcatctaatgccttcgagaaccggacgcagcaggtgcctgtgagcgtgtgcgcctccctgccctctgtgagcgtgtgcgcctccctgactggggcctgctgggtccagctgggtccagtacaccagaacgcacaccccagtgtcctctgccctgtgtatgcccttccgccgcccaggttggaaggtggcaaaccggatgagtatcctgggaggggaccttccagcaggccaaatagacctgtgttggaggtaaccccactcccacgccaggtgctgatccgcagtggccgggtgcccattgtgtccttggagtgtgtgtcctgcaaggcacaggccgtgtacgaagtgagccgcagctcctacgtgtacctggagggccgctgcctcaattgcagcagcggctccaagcgagggggatacaccttcacgctgacggtgctgggccgctctggcgaggaggagggctgcgcctccatccccctgtcccccaaccgcccgccgctggggggctcttgccgcctcttcccactgggcgctgtgcacgccctcaccaccaaggtgcacttcgaatgcatgggctggcatgacgcggaggatgctggcgccccgctggtgtacgccctgctgctgcagcgctgtcgccagggccactgcgaggagttctgtgtctacaagggcagcctctccggctacggagccgtgctgcccccgggtttcaggccacacttcgaggtgggcctggccgtggtggtgcaggaccagctgggagccgctgtggtcgccctcaacaggtctctggccatcaccctcccagagcccaacggcagcgcaatggggctcacagtctggctgcacgggctcaccgctagtgtgctcccggggctgctgcggcaggccgatccccagctcgtcatcgagtactcgctggccctggtcactgtgctgaacgagtacgagcgggccctggacgtggcggcagagcccaagcacgagcggcagcgccgagcccagatacgcaagaacatcacggagactctggtgtccctgagggtccacactgtggatgacatccagcagatcgctgctgcgctggcccagtgcatggggcccagcagggagctcgtatgccgctcgtgcctgaagcagacgctgcacaagctggaggccatgatgcgcatcctgcaggcagagaccaccgcgggcaccgtgacgcccaccgccatcggagacagcatcctcaacatcacaggagacctcatccacctggccagctcagacgtgcgggcaccacagcgctcagagctgggagccgagtcaccatcgcggatggtggcgtcccaggcctacaacctgacctctgccctcacgcccatcgtcacgcgctcccgcgtgctcaacgaggagcccctgacgctggcgggtggcctcgatggcgttccagacacaggccggcgcccagatccccatcgagcggctggcctcagagcgcgcctcaccgtgaaggtgcccaacaactcggactgggctgcccggggccaccgcagctccgccaactccgttgtggtccagccccaggcctccgtcggtgctgtggtcaccctggacagcagcaaccctgcggccgtgctgcatctgcagctcaactatacgctgctggacggccgctacctgtctgaggaacccgagccctacctggcagtctacctgcactcggagccccggcccaatgagcgcaactgctcggctagcaggaggatccgcccagagtccctccagggtgccgaccaccggccctacaccttcttcatttccccggggaccagagacccagtggggagttaccgtctgaacctctccagccacttccgctggtcggcgctggaggtgtccgtgggcttgtacacgtccctgtgccagtacttcagcgaggaggacgtggtgtggcggacagaggggctgctgcccctggaggagacctcgccccgccaggccgtctgcctcacccgccacctcaccgccttcggcaccagcctcttcgtgcccccaagccatatccgctttgtgtttcctgagccaacagcggatgtaaactacatcgtcatgctgacatgtgctgtgtgcctgggtgacctacatggtcatggccgccatcctgcacaagctggaccagttggatgccagccggggctgcgccatccccttctgtgggcagcggggccgcttcaagtacgagatcctcgtcaagacaggctggggccggggctcaggtaccacggcccacgtgggcattcatgctgtatggggtggacagccggagcggccaccggcacctgggacggcgacagagccttccaccgcaacagtctgggacatcttccagattcgccaccccgcacagcctggggtagcgtgttggaagatccgagtttttggcacgacaacaaagggctcagccctgccccggtttccttgcagcacatcatcgtcagggacctgcagacggcacgcagcaccttcttcctggtcaatgactggctttcggtggagacggaggccaacgggggcctggtggagaaggaggtgctggccgcgagtaaggcctcgttccgtgttcccactccgtcacgcagccctgttgcgcttccggcgcctgctgggggctgagctgcagcgtggcttctttgacaagcacatctggctctccatatgggaccggccgcctcgtagctatttcactcacatccagagggccacctgctgcgttctcctcatctgtctcttcctgggcgccaacgccgtgtggtacggggctgttggagactctgcctacagcacggggcgtgtgtccaggctgaacccgctgagcgtctacacagtcgctgttggcctggagtccagcggggttgtctatcccgtctacctggccatcctctttctcttccggatgtcccggagcaaggtggctgggagcccgagccccacacctgccgggcagcaggtgctggacgtcgacagctgcctggactcatccgtgctggacagctccttcctcacgttctcaggcctccacgctgagcttggactcaagaccctgtgcacctctcagcaggcctttgctggacagatgaagagtgacttgtttctggatgattctaagagatcgggcccggtccccgtccccttccctcccccctgccctaagccacctccacctctgtcctggctgcctcagggcgccctgaaaggaccaggacatgcgggaattaaaattgtcctggaagacatctttactttatggagacaggtggaaaccaaagttcgagctaaaatccgtaagatgaaggtgacaacaaaagtcaaccgtcatgacaaaatcaatggaaagaggaagaccgccaaagaacaatcaccccttctgcaagaaagcctctttgcaaccggagacgtctcccacaacctgctccgggcgctggacgttgggctcctggcgaacctctcggcgctggcagagctggatataagcaacaacaagatttctacgttagaagaaggaatatttgctaatttatttaatttaagtgaaataaacctgagtgggaacccgtttgagtgtgactgtggcctggcgtggctgccgcgatgggcggaggagcagcaggtgcgggtggtgcagcccgaggcagccacgtgtgctgggcctggctccctggctggccagcctctgcttggcatccccttgctggacagtggctgtggtgaggagtatgtcgcctgcctccctgacaacagctcaggcaccgtggcagcagtgtccttttcagctgcccacgaaggcctgcttcagccagaggcctgcagcgccttctgcttctccaccggccagggcctcgcagccctctccgagcagggctggtgcctgtgtgggtcagcccagccctccagtgcctccttcgcctgcctgtccctctgctccggccccccgccgcctcctgcccccacctgtaggggccccaccctcctccagcacgtcttccctgcctccccaggggccaccctgctagcagccttccacatcgctgccccgctccctgtcactgccacacgctgggacttcggagacggctcccccgaggtggatgccgctgggccggctgcctcgcatcgctatgtgctgcctgggcgctatcacgtgatggccgtgctggccctgggggccggctcagccctgctggggacagacgtgcaggtggaagcggcacctgccgccctggagctcgtgtgcccgtcctcggtgcagagtgacgagagcctcgacctcagcatccagaaccgtgttggttcaggcctggaggctgcctacagcatcgtggccctgggcgaggagccggcccgagcggtgcacccgctctgcccctcggacacggagatcttctctggcaacgggcactgctaccgcctggtggtggagaaggcggcctggctgcaggcgcaggagcagtgtcgggcctgggccggggccaccctggcaatggtggacagtcccgccgtgcagcgcttcctggtctcccgggtcaccaggagcctagacatgtggatcggcttctcgactgtgcagggggtggaggtgggcccagcgccgcagggcgaggcctttagcctggagagctgccagaactggctgcccggggagccacacccagccacagccgagcactgcgtccggctcgggcccaccgggtggtgtaacaccgacctgtgctcagcgctgcacagctacgtctgcgagctgcggcctggaggcccagtgcaggatgccgagaacctcctcgtgggagcgcccagtggggacctgcagggacccctgatgcctctggcacggcagtacggcctctcagccccgcatgagcccgtggaggtcatggtattcccgggcctgcgtctgagccgtgaagccttcctcaccacggccgaatttgggacccaggagctccggcggcccgcccagctgcggctgcaggtgtaccggctcctcagcacagcagggaccccggagaacggcagcgagcctgagagcaggtccccggacaacaggacccagctggcccccgcgtgcatgccagggggacgctggtgccctggagccaacatctgcttgccgctggacgcctcctgccaccccaggcctgcgccaatggctgcacgtcaggggccagggctactcggggccccctatgcgctatggagagagttcctcttctccgttcccgcggggccccccgcgcagtactcggtcaccctccacggccaggatgtcctcatgctccctggtgacctcgttggcttgcagcacgacgctggccctggcgccctcccgcactgctcgccggctcccggccaccctggtccccaggccccgtacctctccgccaacgcctcgtcatggctgccccacttgccagcccagctggagggcacttgggcctgccctgcctgtgccctgcggctgcttgcagccacggaacagctcaccgtgctgctgggcctgaggcccaaccctgggctgcggctgcctgggcgctatgaggtccgggcagaggtgggcaatggcgtgtccaggcacaacctgtcctgcagctttgacgtggtctccccagtggctgggctgcgggtcatctaccctgccccccgcgacggccgcctctacgtgcccaccaacggctcagcctcggtgctccaggtggactctggtgccagcgccacggccacggctcgctggcctgggggcagtgtcagcgcccgctttgagaatgcctgccctgccctggtggccaccttcgtgcccggctgcccctgggagaccaatgataccctgttctcagtggtagcactgccgtggctcggtgagggggagcacgtgatggacgttgtggtggaaaacagcgccagccgggccaacctcagcctgcgggtgacggcggaggagcccatctgtggcctccgcgccacgcccagccccgaggcccgtgtactgcagggagtcccagtgaggtacagccccgtggtggaggccggctcggacatggtcttccggtggaccatcaacgacaagcagtccctgaccttccagaacgtggtcttcaatgtcatttatcagagcgcggcggtcttcaagctctcactgacggcctccaaccacgtgagcaacgtcaccgtgaactacaacatcaccgtggagcggatgaacaggatgcagggcctgcgggtctccacagtgccggccgtgctgtcccccaatgccacgctggcactgacggcaggcgtgctggtggactcggccgtggaggtggccttcctgtggacctttggggatggggagcaggccctccaccagttccagcctccgtacaacgagtccttcccggttccagacccctcggtggcccaggtgctggtggagcacaatgtcacgcacacctacgctgccccaggtgagtacgtcctgaccgtgctggcatctaatgccttcgagaaccggacgcagcaggtgcctgtgagcgtgcgcgcctccctgccctccgaggctgtgggtgtgagtgacggcgtcctggtggccggccggcccgtcaccttctacccgcatctgctgccctcgcctgggggtgttctttacacgtgggacttcggggacggctcccctgtcctgacccagagccagccggctgccaaccacacctatccctcgaggggcatctaccacgtgcgcctggaggtcaacaacacggtgagcggtgcggcggcccaggcggatgtgcgcgtctttgaggagctccgcgggctcagcgtggacatgagcctggccgtggagcagggcgcccccgtggtggtcagtgccgcggtgcagacgggcgacaacatcacgtggaccttcgacatgggggacggcaccgtgctgtcgggcccagaggccacagtggagcatgtgtacctgcgggcacagaactgcacagtgaccgtgggtgcggccagccccgccggccacctggcccggagcctgcacgtgctggtcttcgtcctggaggtgctgcgcgtcgagcccgccgcctgcatccccactcagcctgacgcgcggctcacggcctacgtcaccgggaacccggcccgctacctcttcgactggacctttggggatggctcctccaacacgaccatgcgggggtgcccgacggtgacacacaacttcacgcgtagcggcacgttccccctggcgctggtgctgtccagccgcgtgaacagggcgcgttacttcaccagcatctgcgtggagccagaggtgggcaacgtcaccctgcagccagagaggcagtttgtgcagctcggggacgaggcccggctggtggcatgtgcctggcccccgttcccctaccgctacacctgggactttggcaccgaagaagccgtccccgcccgtgtcgggggccctgaggtgacgttcatctaccgagacccaggctcctatcttgtgacagtcaccgcgtccaacaacatctccgctgccaatgactcagccctggtggaggtgcaggagcccatgctggtcaccagcatcaaggtcaatggctcccttgggctggagctgcactacctgtgggatctgggggacggtgggcggctcgagggtccggaggtcacccacgcttacaacagcacaggtgacttcaccgttagggtggccggctgcaatgaggtgagccgcagcgaggcctggctcaatgtgacggtgaagcggcgcgtgcgggggctcatcgtcaatgccagctgcacggtggtgcccctgaatgggagcatgagcttcagcacctcgctggaggccggcagtgatgtgcgctattcctgggtgctctgtgaccgctgcacgcccatctctggggctgagaacgaggtgggctccgcccaggacagcatcttcgtctatgtcctgcagctcatagaggggctgcaggtggtgggcggtggccgctacttccccaccaaccacacggtacagctgcaggccgtggtcagggatggcaccaacatctacagctggactgcctggagggacaggggcccggccctggccggcagcggcaaaggcttctcgctcactgcgctcgaggccggcacctaccatgtgcagctgcgggccaccaacatgctgggcagcgcctgggctgactgcaccgtggacttcgtggagcctgtggggtggctgatggtggccgcctccccgaacccagctgccgtcaacacaagtgtcaccctcagtgccgagctggctggtggcagtggtgtcgtatacacttggtccttggaggaggggctgagctgggagacccccgagccatttaccacccacagcttccccacacccggcctgcacttggtcaccatgacggcagggaacccgctgggctcagccaacgccaccgtggaagtggatgtgcaggtgcctgtgagtggcctcagcatcagggccagcgagccgggaggcagcttcgtggcggccgggtcctctgtgcccttttgggggcagctggccacgggcaccaatgtgagctggtgctgggctgtgcccggcggcagcagcaagcgtggccctcatgtcaccatggtcttcccggatgctggcaccttcaacatccggctcaatgcctccaacgcagtcagctgggtctcagccacgtacaacctcacggtggaggagcccatcgtgggcctggtgctgtgggccagcagcaaggtggtggcgcccgggcagcttgtccattttcagatcctgctggctgccggctcagctgtcaccttccgccggcaggtcggcggggccagccccgaagtgctccctgggccccgtttctcccacagcttcccccgcatcggagaccacgtggtgagcgtgcagagcaaaaaccacgtgagctgggcccaggcgcaggtgcgcatcgtggtgctggaggccgtgagcgggctgcaggtgcccaactgctgtgagcctggcatcgccatgggcactgagaggaacttcacagcccgcgtgcagcgcggctctcgggtcgcctacgcctggtatttctcgctgcagaaggtccggggcgactctctgttcatcctgtcgggccgcgacgtcacctacacgccgtggccgcggggctgttggagatccagtgagaaccgcacgctggtgctggaggttcaggacgccgtccagtatgtggccctgcggagcggcccctgcttcaccaaccgcttggcgcagtttgaggccgccaccagccccagcccccggcgcgtggcctaccactgggactttggggatgggtccccagggcaggacacagataagcccagggccgagcactcctacctgaggcctggggactaccgcgtgcaggtgaacgcctccaacctggtgagctttttcgtggcgcaggccacggtgaccgtccaggtgctggcctgccgggagccggaggtggacgtggtcctgcccctgcaggtgctgatgcgacgatcacagcgcaactgcctggatgcctacgttgacctgcgcgactgtgtcacctaccagactgagtaccgctgggaggtgtaccgcaccgccagctgccagcggccggggtgcccggcgcgtgtggccctgcccggcgtggacgtgagccggcctcagctggtgctgccgcggctggcgctgcctgtggggcactactgctttgtgtttgtcgtgtcatttggggacacgccactggcacggagcatccaggccaatgtgacggtggcccccgagcgcctggtgcccatcactgagggtggctcctaccgcgtgtggtcagacacacaggacctggtgctggatgggagcgagtcctacgaccccaacctggaggacggcgaccagacgccgctcagtttccagtgggcctgtgtggcttcgacacagagggaggctggcgggtgtgcgctgaactttgggccccgcgggagcagcacggtcaccattccacgggaacggctggcagctggcgtggagtacaccttcagcctcaccgtgtggaaggccggccgcaaggaggaggccaccaaccagacgtgctggtggaggccgcgcgctctcccctctctgtttctgatgcaaattctatgtaacacgacagcctgcttcagctttgcttccttccaaacctgccacagttccacatacagtcttcaagccacatatgctctagtgacaaaagctacacagtcccccagcaataccaacaggtccagctggctccagtacaccagaacacacaccccagtgtcctctgccctgtgtatgcccttccgccgcccaggttggaaggtggcaaaccggatgagtatcctgggagggggctggcatgacgcggaggatgctggcgccccgctggtgtatgccctgctgctgcagcgctgttgccagggccactgcaaagagttctgtgtctacaagagcagcctctccggctacggagccgtgctgcccccgggtttcaggccacacttcgaggtgggcctggccgtggtggtgcaggaccagctgggagccgctgtggtcgccctcaacaggtctctggccatcaccctcccagagcccaacggcagcgcaatggggctcacagtctggctgcaccggctcaccgctagtgtgctcccggggctgctgcggcaggccgatccccagcacgtcatcgagtactcgctggccctggtcactgtgctgaacgaggggcccagcagggagctcgtatgccgctcgtgcctgaagcagacgctgcacaagctggaggccatgatgcgcatcctgcaggcagagaccaccgcgggcaccgtgacgcccaccgccatcggagacagcatcctcaacatcacaggagacctcatccacctggccagctcagacgtgcgggcaccgcagcgctcagagctgggagccgagtcaccattgcggatggtggcgtcccaggcctacaacctgacctctgccctcatgcgcatcctcacgcgctcccgcgtgctcaacgaggagcccgctttcagcagggccccggccaacctcagtgacgtggtgcagctcgtctttctggtggactccaatccctttctctttggctatatcagcaactacaccgtctccaccaaggtggcctcgatggcgttccagacacaggccggcgcccagatccccatcgagcggctggcctcagagcgcgccatcaccgtgaaggtgcccaacaactcggactgggctgcccggggccaccgcagctccgccaactccgttgtggtccagccccaggcctccgtcggtgctgtggtcaccctggacagcagcaaccctgtggccgtgctgcatctgcagctcaactatacgctgctggacggccgctacctgtctgaggaacccgagccctacctggcagtctacctgcactcggagccccggcccaatgagcgcaactgctcggctagcaggaggatccgcccagagtccctccagggtgccgaccaccggccctacaccttcttcatttccccggggaccagagacccagtggggagttaccgtctgaacctctccagccacttccgctggtcggcgctggaggtgtccgtgggcttgtacacgtccctgtgccagtacttcagcgaggaggatgtggtgtggcggacagaggggctgctgcccctggaggagacctcgccccgccaggccgtctgcctcacccgccacctcaccgccttcggcgccagcctcttcatgcccccaagccatgtacgctttgtgtttcctgagccgacagcggatgtaaactacatcgtcatgctgacatgtgctgtgtgcctggtgacctacatggtcatggccgccatcctgcacaagctggaccagttggatgccagccggggctgcgccatccccttctgtgggcagcggggccgcttcaagtacgagatcctcgtcaagacaggctggggccggggctcaggtaccacggcccacgtgggcatcatgctgtatggggtggacagccggagcggccaccggcacctggacggcgacagagccttccaccgcaacagtctggacatcttccagatcgccaccccgcacagcctgggtagcgtgtggaagatccgagtgtggcacgacaacaaagggctcagccctgcctggttcctgcagcacatcatcgtcagggacctgcagacggcacgcagcaccttcttcctggtcaatgactggctttcggtggagacggaggccaacgggggcctggtggagaaggaggtgctggctgcgagtcacgcaggccgtgttgcgcttccggcgcctgctggtggctgagctgcagcgtggcttctttgacaagcacatctggctctccatatgggaccggccacctcgtagctgtttcactcgcatccagagggccacctgctgcgttctcctcatctgcctcttcctgggcgccaacgccgtgtggtacggggctgttggtgactctgcctacagcacggggcatgtgtccaggctgagcccgctgagcgtcgacacagtcgctgttggcctggtgtccagcgtggttgtctatcccgtctacctggccatcctctttctcttccggatgtcccggagcaaggtgctggacatcgacagctgcctggactcgtccgtgctggacagctccttcctcacgttctcaggcctccacgctgaggtgagggctctactgggggtcctgggctgggctgggggtcctgccgccttggcgcagcttggactccagacactgtgcacctctcagcaggcctttgctggacaggtgaagagtgacttgtttctggatgattctaagagatcgggcccggtccccgtccccttccctcccccctgccctaagccacctccacctctgtcctggctgcctcagggcgccctgaaaggaccaggacatgcgggaattaaaattgtcctggaagacatctttactttatggagacaggtggaaaccaaagttcgagctaaaatccgtaagatgaaggtgacaacaaaagtcaaccgtcatgacaaaatcaatggaaagaggaagaccgccaaagaacagtaa

SEQ ID NO: 137210 - DNA, 442 bp, Homo sapiens; identical to SEQ ID NO: 134908
  misc_feature (1)...(442): n = a,t,c or g

SEQ ID NO: 137211 - DNA, 569 bp, Homo sapiens
  misc_feature (1)...(569): n = a,t,c or g
gtctccggaattcccgggtcgagcttctcccgagtgggcagcagcaactttcgcggtggcctgggcggcggctatggtggggccagcggcatgggaggcatcaccgcagttgcggtcaaccagagcctgctgagcccccttgtcctggaggtggaccccaacatccaggccgtgcgcacccaggagaaggagcagatcaagaccctcaacaacaagtttgcctccttcatagacaaggtacggttcctggagcagcagaacaagatgctggagaccaagtggagcctcctgcagcagcagaagacggctcgaagcaacatggacaacatgttcgagagctacatcaacaaccttaggcggcagctggagactctgggccaggagaaggagcagatcaagaccctcaacaacaagtttgcctccttcatagacaaagtacggttcctggagcagcagaacaagatgctggagaccaagtggagcctctgcagcagcagngaacggtcgaagcacatggacacatgttcagagctcatcacaaccttagcgggcgtctagaggatcagcta

SEQ ID NO: 137212 - DNA, 422 bp, Homo sapiens
tgtcgtagaaatgtaaggcagtgcttcctggcgctgatggcaaaatgggacccatctccagttattcctcgggcaccccagctttgcaaatctgggaaagaacctacataaacatattggtgatgtagccagcttaaaaggccgagagaatccttatggattcaggagactgtttttttatttagatttttattttttatttggaagatgaaatgcttctctcgttacctgccttacatcttcagacctccgaacaccatcctttcttccagctgccacacagaagctgacattatctctacggtagaattcaaccacacgggagaattactggcgacaggggacaaggggggtcgggttgtaatatttcaacgagagcaggagagtaaaaatcaggttcatcgtaggggtgaatacaatgt

SEQ ID NO: 137213 - DNA, 1530 bp, Homo sapiens
ctggcctagccactcaggtacgaggcctttcccccccatcccccggggctgggatctcttttataaaaggccattcctgagagctctcctcaccaagaagcagcttctccgctccttctaggatctccgcctggttcggcccgcctgcctccactccagcctctaccatgtccatcagggggacccaaaagtcctacaaggggtccacctctggcccccgggctttcaagcaagccgcttcctaacaacgaagtgggcccggtttccgcatcagctcctcgagcttctcccgagtgggcagcagcaactttcgcggtggcctgggctggcggctatggtggggccagcggagatgggaggcatcaccgcagttacggtcaatcaaccagagccctgctgagcccccttgtccttgaggtggaccccaacatccaggccgtgcgcacccaggagaaggagcagatcaagaccctcaacaacaagtttgcctccattcataggacgaggtagggttcctggagcagcagaacaagatgctgggaaccaagtggagcctcctggaccagcagaagaccgcctcgaagcaacatgggacaacatgttcagagagctacatcaacaaccttaggcggcagctggagactctggcccaggagaagctgaagctggaggcggagcttggcaacatgcaggggctggtggaggacttcaagaacaactatgaggatgatgatcaataagagtacagagacggagaatgaatttgtcctcatcaagaaggatgtggatgaagcttacattaacgagctgtatgaagaggagatccgggagctgcagtcccagatctcggacacgtctgtggtgctgtccattgacaacagccgctccctggacacggacagcatcatcgctgaggtcaagactgagatctctgagatgaaccggaacatcagctggctccaggctgagactgagggcctcaaaggcgggaggatttccctggaggccggcatcgcagatgcggagcagcgcagggagctggtcattaaggatgccaacgctaagctgtccgagctggaggccgcccttcagcagaccaagaagctgctggaagatggagaacatgagtatccatacgaagaccaccagcggctatgcaggtggtgtgagcttggcctatgggggcctcacaggctctggcctcagctacggcctgagctccagctctcgctctggcgcaggttccagctccttcagccgcaccagctccaccagggccatggttgtgaagaagatcaagacccgagatgggaagctgctgacattatctctacggtagaattcaaccacacgggagaattactagcgacaggggacaaggggggtcgggttgtaatatttcaacgagagcaggaggtgtgccagaatatgcaggaggaaaaaaacatagtttatttgccaacagatgtgaagaggacaacttgggacagcagagaagaaaatgatagcttacctcacctaagggggtaa

SEQ ID NO: 137214 - DNA, 654 bp, Homo sapiens; identical to SEQ ID NO: 115110

SEQ ID NO: 137215 - DNA, 509 bp, Homo sapiens
atgactgcttttaactctggtaaagtggatattgttgccatcaatgaccccttcattgacctcaactacatggtctacatgttcctgtatgattctacacatggcaaattccatggcaccgtcaaggctgagaacgggacgcttgtcatcaatggaaaccccatcacccattttccaggaccaagatccctccaaaatcaaatgggcgccccagccaaggtcatccatgacaactttggtatcatagaaggattcatgaccacagttcacaccatcactgccacccagactataaatggcccctccgggaaactgtcacgtgatggctgcagggctctccaggacatcatccctgtctctactggcgctgccaagcctgtgggtaaggtcatccctgagctgaacgggaagctcactggcatggccttccatgtccccactgccaatgtgtcagtggcggacctgacctgtcgtctggaaaaacctgccaatatgatgacatcaagaag

SEQ ID NO: 137216 - DNA, 1330 bp, Homo sapiens
  misc_feature (1)...(1330): n = a,t,c or g
acgcgtccgcccacgcgtccgctgttcgacagtcagccgcaatcttcttttgcgtcgccagccgagcgcacatcgctgagacaccactggggaaggtgaaggtcggagtcaacggatttggtcgtattgggcgcctggtcaccagggctgcttttaactctggtaaagtggatattgttgccatcaatgaccccttcattgacctcaactacatggtttacatgttccaatatgattccacccatggcaaattccatggcacccgtcaaggctgagaacgggaagcttgtcatcaatggaaatcccatcaccattcttccaggaagcgagatccctccaaaatcaagtggggcgaatgctggcgctgagtaccgtcgtggaagtccacttggcgtcttcaaccaaccatggagaaaggctgggggctcaatttgcaagggggggagccaaaaggggtcatcaatctctgccccctctgctgaatgccccccatgtttcgtcatggggtgtgaacccatgaagaagtatgacaaacaagncttcaagattcatcagcaatggcctcctgcaccaaccaactgctttagcaccccttggccaaaggttaattccatgacaactttggtaattcgttggaaggacttcatgaccacaagtccatggcaatcactgccaaccccagaaagactgtggattggcccctcccggggaaaactgtggccgttaatgggccgcggggctcttccagaacatcatccctgcctctactgggcgctgccaaggctgtgggcaaggtcatccctgagctgaacgggaagctcactggcatggccttccgtgtccccactgccaacgtgtcagtggtggacctgacctgccgtctagaaaaacctgccaaatatgatgacatcaagaaggtggtgaagcaggcgtcggagggccccctcaagggcatcctgggctacactgagcaccaggtggtctcctctgacttcaacagcgacacccactcctccacctttgacgctggggcttggcattgcccttcaacgaccactttgtcaagctcatttcctggtatggacaacgaatttggctacagcaacagggtggtgggacctcatgggcccacatgggcttccaagggagttaagacccctgggaaccaccagccccagcaagagcacaagaagggaagagagagaccctcaactgctggggagtccctgccacactcagtcccccaccacactgaattctcccctccttaaagttgcaatgttaacccctttaaaaagggaaggggcctagggagccgcaccttgtcatg

SEQ ID NO: 137217 - DNA, 350 bp, Homo sapiens
cgacgctcaagcgtcgcatcaggcataaagcagattactttttgatttcatacagcggggtttgacccgccacaatatggccctgagctttaatgatcaagccactgaaatcgtcgatattgctgcaaaccaccgggctaatcatcgagcgggcgttagcgttcaggtaatccagatccatttccagaatcggttgccctgcgcttacctgcgcaccctcttccaccagacgtttaaagcctttaccttccagcgctacggtgtcgatacccatatggacgacgatctccgcgcctttttcggtttccaggcagaacgcgtggttggtgttgaaaattttcacgattgtc

SEQ ID NO: 137218 - DNA, 2327 bp, Homo sapiens
ttttttttttttttttacattttttaaaagttttttatttttcagtttttgtagagatgaggtctcaccatgttgccctggctggtcttgaactcctggcctcaagccttccttccgcctcggcctcccaaagtgctgagattacaggcctgagctgctgtatggctatgattttgttaaaggccgacacagaggtgaagtcaactgctagaaatcacggcttttaagaggtggagtcacatttgaactctggcctctgatgccagatctgcaggtcacatgttcaccatggtccaggtgaccctgactgcggtccccacctcttctgtgaggcacagggcaggattccacctgaggcgcgaggagcctgggacgactcctttggtctcttctggggttcgcaaaaacctgggggtcccgggtgtgaagaagggtgtctgcgctctcagcggtcaggctccaggcgctgcgacaggacgccgaggacgcgctggaacttctcaaagcgttcagcgcgcggagctcccgcgccccggctaccccagagcagcctccgcacgaagccggtggtcagggcctccctcagctccgggttaggccggaatcctcgcaggcgctgggctgccaccttgcggaatttgggtgcgtcccggaccatgtgacgcgccccgtgcagggtgcgcaacagccgctcacagctctcgtccagcggccccgcgacttcctcgccctccagtaggcgaaccatgggtgccacgtgcggcagcgccacctcgccggggtcgcagggtccagcgccctcatccagagcccgcatcagcggcttcagctcctgctcaaaggccagcgcagcctccgtgtggctccttcggagctggcgccacgtgtgctccaaccgggacacctggggcatgagcagggcgcccatgactgcagccagcccgggcaggtcccccgccgcccctggccgcagcgccagcgccagctctaccagtcccctcagtgcggctgcgcgctcctccagcggccccgagcagcccagcaccgccagcgccccggccagcgccagtgtctgatgcctctccagcagttccaacctcaagtggtgtccatggggaagagtgagcagctccaggccagatgagactcccatgttgccccgctgatctctggtcactcccaggaggcctgtggcctggcagtctaccaatagcaggtgaagggcggtgctcccaggatggtgctccaggaacaggccacggagggtatgcaggacttggggttccaggggccgattctgggggcccagcaggcaggagggggcatcatgggggcagaaagagatctcagcctgtggtcttgtaaaacatctattctcttcctcctcatcctcctcggcctcccaccatggggcctctggctctgggcagctttggctcggggatgttccctggacactgggcactcggggcaccagctcgcagtacgtcgggggacgttcagaggcatcaggcagttcgaaggagggtgtccgggggggcttcgttggtgccttggcttgaagctgcccatcggaggccctgagactgtcggcaacagttcccaggggagcaggggccttcagcaacaccgggtcactgctcgttcggggcaaggcagatatgggcatggtggaggcttccatcccagcggggtcttctcttgaccgccccatatgtgccaaatctgcaggctgactgttgctccacttccttgccctgagaggctctatccgagctgggccatccatcagggtgtcctcgctaaagctgcgtcgcagaggcccctgccaagtcacaggcctggagaccacagcccctgtggcctgggacagtgggcgcctgcctgtcatataactgtgaaccagagccggtatgctggggaattgctcatcctccagttgaaagagggctgtgggtcggcctggccggggacgcagggccacacggaacacctcaaaatggagggctgagccccgccagcggcaggagatcacggggttgcccccacgggacccagaggcgcgaaccaggaagtcgccatcttgctgaagaagagcttcagccttctggcgggacaggaggccgtggtaccagggttggccagcaaggtcttctccatcctgtggcacctgcatggagctcttgggaacagagggtgccagggctgagctctgcactttcaacaggcctcagtcttccacatctgggcaggacccgcggggctcccacgaggctgggtccaggcggaagctgaggctccgcggctccgggctgctgtcacccccg

SEQ ID NO: 137219 - DNA, 303 bp, Homo sapiens
ttagcgcaagcgaagctcttgatcgaagccccggtaaacggcggccgtaactataacggtcctaaggtagcgaaattccttgtcgggtaagttccgacccttatcgaattcaaaagcgccaacgtccttgatgtataaccgtccacggaacaggatctttacgtacttcgccacctgaagtgggttgtaccgttggaaaattttcattgttatctcctgctgagtattacgcctgcctgctgttgccgatgatggcttccgcacatcagttcgaaaccggtcagcgagtgccgcgattggcat

SEQ ID NO: 137220 - DNA, 605 bp, Homo sapiens
tcctgaccggtgtgactgagccgctggaattcctgttcatgttccttgctccgctgctgtacctcctgcacgcactgctgaccggtatcagcctgtttgtggcaacgctgctgggtatccacgcgggcttctctttctctgcgggggctatcgactacgcgttgatgtataacctgccggccgccagccagaacgtctggatgctgctggtgatgggcgttatcttcttcgctatctacttcgtggtgttcagtctggttatccgcatgttcaacctgaaaacgccgggtcgtgaagataaagaagacgagctcgttactgaagaagccaacagcaacactgaagaaggtctgactcaactggcaaccaactatattgctgcggctcggatcgttggcgtcgagcttatcgccgtccttagagacacgggccgcgtttctccagctgtcggaagtctcaccagcgtcgcttcgggcttcccgccagagctgacgcaccgggataacggtggtccccagcgactgtaccgtgagcgtactgcagcggcccgctgtcccgcaccacaagtccttaccgcagctccaaaagcctacagcgatgagtga

SEQ ID NO: 137221 - DNA, 1536 bp, Homo sapiens
atgcgacgcgtagcatccatctttcgatacggatattcctgctgcgacgctcgcggagggaatatcagcgtcgatacgctggttgtcggcgcgggtgactacacctggaaggccgtaactatcagggcacgaggtggaagcggacaaaacgttacacattgcgcaaaacggaacggtgtcgccgagggtgattatggattccgcctcacgaccgcaccagctgacgttagccgaacatggcggagcctatggcgcaacggccgatattcggcaaaaatcggtggtgaaggggatctggcaatcaatacggtgcgacggtttcgctttccaacggtcagaacgactatcagggggcaacctacgttagatggggacattacgtaccgatgcggatggtgcacttggcaacaaccggaactgaacatcagcaacgcggacatcgtcgatcttaatggatcgacgcgacgggcatacctttgggtttcgaacaccacagagtggcatcgttcgatgactcgtcctaaggtagaggtgggatggggactattgtccgcgttcaatgcccacctttgggctaagagcatcggtccctcatacagcgtacaacattggcatggttctcacaagagggatcgctatatgatagttgggcatcacccggctgacaataccgtctctggcatcacgcttgatgccggacaaatagccgaaccgctgcgctgtttggtgaggatgatgacatggatccccgtccatcacgcagcttcaggtggcaaatggtatcgcggtcttgccggtttccggcacgctggtcgtaaaacccccttattccgggatgacgggttacaacggatcattgctcgcctgcagcaggcaatcagtgaccccggcgttgacggcatcttctggatatggatacgccgggtggaatggtgtccggggcgtttgacgcgccgacattattgcccgtatgcgcgatatcaaacccatctgggcgctgccaatgacatgaactgcagtgcagcttattgccagttcggcatgcgacggctggtcacacaaacggccagaaccggctccattggggtcatgtggcgcacagtaactatggcgctgcgctcaaaactaacggcgttgaggtacgctgatttacagcggcgatcgcaaggtgcgacggcaacccttacgaaagcttccgtaaagatgtgcgtgctgatttccagacgcgtatcgatgccatcgtcagatgtttgccgaaataggtttccgcttataccggcatgtctgtcaggacgtgctgacaccgaagcggcagtattctccggccaagaatcttggataacgggctggcggagtaactggtacacaccgattggctggggtatgggagacctgagagcgaaaaaatcttgtggaattccaccttggatgcgacaacacctgactggcaccaacggttttgaagcgacgcaaaaagtttatgacgcaaagtggcgtgtggggagaaatgcgttgagaaggaaggacgacgactaa

SEQ ID NO: 137222 - DNA, 1680 bp, Homo sapiens
atggtgaaaaaggaattatgttctcataaaaactggacagaagctttggagaaacttctttgtaatgcgtgtattcatctcacagagttgaaacttattttgattgagcagtttggaaaccgtctttttgtagaatcagcaaatgatatttatgagggccttgaggtctcaggaaaagcctctaagcatcaggtaacatcaatcgtaccccaaaccgacacaggtggtcaggtgaagcgacttgctcgtggagctgaaatagtcgaagataccagctggctgcaactgtttattaaaaacacagcactggcaaacacgaaagtggacgtatacggtgtgacgcctgcccggtgccggaggttaattgatggggttagcgcaagcgaagctcttgatcgaagccccggaaacggtggccgtaactataacggtcctaagtgtagcgaaattccttgtggtgtctggtgggtagtttgctggggcggtctcctcctaaagagtaacggaggagcacgaaggttggctatcctggtcggacatcaggagacagttcggtccctatctgccgtgggcgctggagaactgaggggggcgctcctagtacgagaggaccggagtggacgcatcactggtgttcgggtttcatgccaatggcactgcccgcaaatctatggggcacagccccttaaaaagaaagccaaagagaatagcaggacaatggctccccttagaggtgtcatgaaaaaggcagaaaagggcaccaagctccaaccggcagcaccagacctgacgggacactatcagcatgcagaagttgccaacaagggcaagggatgccagcaagtgcaggggtgccggcaagacagatgggatctacaggaaacctgcctcacttggtctgaccatactttctgggcttgtcctcaaaggcccaacacacagggtaactacacggtgggatctcaactaaatggaccggatcgcgggaagccacgaagagatttgggtgtcatcagtaatacatgggacctgaaagccccgattcctattaagttcccctgtgaagattacggatataacaatttcaaaccaagtcccaataacgctcggacagtgcggaagcctatggtgaaaaaggaaatatcttcacaaaaaacgataatagggagagcaagctacctaaaggatttagaaaaacagaggccagagagtataccagaacagtgcatcaccagaaagagggagcacagagcaggcagcaagggaaggaccccaccagcactcccacaagcacccccctaccaccccaccctgccccgacataatggtgtcaagccaccaaaatgcagggaagaaggcggctggaggccgcagcatctacaacatcttagcattttaactcacacatcctacgggttacttggcaaagtggggccacagaacactttgaagtatggcaatcaaatggcccagttgataacaatcccacaaagacaaacaatgatctgggagacgggacccgaaaaggggaccacagcggacacgggtggcatcagaaaaaaaatcgcacataatggaaacccaacaaacaaccgtatggggatcaagtttgcaaagagaaacaggaaccgggaccccaatggagaggcccaacaaacaccccacggagcaagacagtaa

SEQ ID NO: 137223 - DNA, 1914 bp, Homo sapiens
tcactcttcctgcttctgtgtctgttcgtggctgtcgtggcggcttcgttgcgctgcatcttctcctttccttagcgtcttgtgttgtcgttgtcgtctggtctttgtcgtctgttctggtcgtgttcgctgtcgctgtccttcgtgggtttcacttctctcttctgcttctctctgccgtctttcgtcgctctctcgttttccctctcctctcgtctccctcctctcttctctcttccttcttccttctcttctcttgctttcttctcttcctctctcttcttcttggtttttcgctcctctctgctctcgctctcttcttcgagctctgattcgatcctcgccccccccctcagtttcttcttttgttgtgtcttgttctgttggtgtcgcgtctcttggtttgattagtgtctttgttgttgctgctagtgctggttcctttattgttgtgctcgagctgtcccgtttggaggcgattgtgtacgtgtgttctcggctcatcattgtttgggcgcttccttgtggatctgctgctgggcgttttttttgccttgtgacttgtcggtgtttgttgccatactttggttttttttgtgtctttccggtgttgattctgtctgtgtgctggggtccatgggccccatggtgtgttggtgtccttgtgtgtgggcgcgtgccgttgcggtcacgcggccccgagtcgctaatgttaatttcgtctgtatccacccaaggtcgcacaacttgcaggctctggcagcaaaccgtttgttggggaaagggggccagaattcggggtcgctgggcctctttcttttctgctttttttggacttctcctatttctgggtctagttatatgggggcgtaatgttgttcctctggccaaaggggcagacgttaaaagctttttgggggtaaatccggccacatggggtgttgtttcacccacggtgccaccagtacctttttggttgttattaccggttcggtgcaccaaggtggccaccaaaagctttgttgcaattggccctgggccaacggtgcttgacctgtccgacaagaatttcgctaccttaggaccgttatagttacggccgccgtttaccggggttcgatcaagagcttcgcttgcgctaaccccatcaattaaccttccggcccgggcaggcgtcacaccgtatacgtccactttcgtgtttgcacagtgcgtgtttttaataaacagttgcagccagctggtatcttcgactgatttcactccacgagcaagtcgcttcacctgaccacctgtgtcggtttggggtacgatttgatgtacctgatgcttagaggcttttcctggaagcagggcatttgttgcttcacaccgtagtgcctcgtcatcacgcctcagccttgattttccggatttgctggaaaaccagcctacacgcttaaaccgggacaaccgtcgcccggccaaatagccttctccgtccccccttcgcagtaacaccaagtacaggaatattacctgtttcccatcgactacgcctttcggcctcgcctgtggggaagtgagtgggcgtgtccacaggttatgtcgtgccagtggcaagggatgtccactccgcgttgggacataatggtagatccagttaacgcgtggtaggttaggtgttgtggggttggtcaacgtgtttcgtggtaagttgggttcgtgtgttacgtcttgtgggggtccagagtggtcggtggcaatcagaagcaccaacgaaagtgcagtaggtgggctccccgtctgtgagggtccccccaggtattcgtttgtggttggtgccaggtgcaattgggggcagttggggacttttttgattgtgtgttctgtatattgattattgttttgttcatttggatatttgccttccat

SEQ ID NO: 137224 - DNA, 1446 bp, Homo sapiens
tcactggcgctggcggcggcggttgctgcggcagaactgaaggtccggttgaacgtgtagaagcctgggtttcgccaaatctgatgaaaacggtctgggcgtcaccgttcccggcacgggaatggtggggctgccgatgcggcggcgcggcagcgaacgcccggatagcggtgatactggattggcgagacgcgactggaaggtgacgaagctacgctgactcgcgtgccgctgaagggcgggctcggtgaaatggcgtctattactcagctgcgcctgttcgccgcacgcgcaagtgctaacgagtcctgggcgtactttatggggcgcgcaagtttgtggcatcccgacaggcctgtcagatgtttctttgctggctgaagaggcgattgtccgccgcgtggtcacgcttccttcgaaagcccggtcagtttccaggaggcgagaacagcctgggggaatgccaactggattggtctggtcgaatggcaattgacggggcgtcagcgtgtcataaaacggtggcagcaaattctcttcatactgacagctgcggattccagctccagccactgctgctcgttgccgttgattaccgcgtaacgcccgcaggtaattcaacagcatgttcggaatacaaaaacaccgtagatgaaaaccggtgcgcttaagcaacgcaagaatgccactgcgacttccgcagcggtaatgacgacttgaaaaccaccctttaatgtttgatgttctaacgttgacccgtaatccgggttgggacagtgtctggtgggtagtttgactggggcggtctcctcctaaagagaacggaggagcacgaaggttggctaatcctggtcggacatcaggaggttgtgcaatggcataagccagcttgacgatcgcatgtctagctgggtaaacgatgttcacgaaaattcgtgcaaggaatgcgatacgatgagcggaaatctttggggagttgcaaactggggaaacatcatccttggtgtatcgattgatgatggcgaagcggctcgacactgacgtctgcaatgggtcctggaaaatgactacgacccaaggcttatcagtgccctgagcgaagtgcgaaatctggtggaaaccggcggacttccgttgggcagagagcgcgcgacttccagcgatctggcgcagattgaatcggcgctgaacagatgattgccaacaatccaggaccccgaagcgtttaacgaagcggatatcgctaccacgaggcggtgctgcagtcggtgcataacccggtgttacagaacttagcattgcgatcagttcgctgcagcgggcggtttttgaacgaactggatgggcgatgaggccaacatgccgcaaacgctccaggaacataagggctgttcgatgcgatacgacatcaggacggcgatgcggcagagcaggcgcgcttaccat

SEQ ID NO: 137225 - DNA, 3084 bp, Homo sapiens
  misc_feature (1)...(3084): n = a,t,c or g
atgaatttagttagcaggaaaatggttattgaggagcttaaggataaatttctgttccctactctcgcatggggagaccccacactaccatcggcgctacggcgtttcacttctgagttcggcatggggtcaggagcagcccccctcagttctccagcgcccacggcagatagggaccgaactgtctcacgacgttctaaacccagctcgcgtaccactttaaatggcgaacagccatacccttgggacctacttcagccccaggatgtgatgagccgacatcgaggtgccaaacaccgccgtcgatatgaactcttgggcggtatcagcctgttatccccggagtaccttttatccgttgagcgatggcccttccattcagaaccaccggatcactatgacctgctttcgcacctgctcgcgccgaggagaccgccccagtcaaactacccaccagacactgtccgcaacccggattacgggtcaacgttagaacatcaaacattaaagggtggtatttcaaggtcggctccatgcagactggcgtccacacttcaaagcctcccacctatcctacacatcaaggctcaatgttcagtgtcaagctatagtaaaggttcacggggtctttccgtcttgccgcgggaccgttatagttacggccgccgtttaccggggcttcgatcaagagcttcgcttgcgctaaccccatcaattaaccttccggcaccgggcaggcgtctacaccgtatacgtccactttcgtgtttgcacagtgctgtgtttttcaataaacagttgcatgcatcgtcggtccatcgggcactggcgactgatgagcatttttaccgtcaggtgattggcgaagcataccggcataagatgctgtttgttatcagccagtcagacaaagctgaacccaccagcggtggaaatatcctttccacagagcagaaacaaaatatcagccgcaaaatctgcctgctgcatgagctattccagcccgtgcatccggtgtgtgccgtgtcggttcgcctgcagtggggactaagggtgatggcagagcggatgattaagtgtctgccgcgtgaggccagcagcccggtagtagcgctactgcaacatccctttcgaacaacggtagcccgggagcaggcacgtgacgatttcggtgaaaccgtaggtgccatactcgatacgtggcccgcgctgtctgggatttcttcttctgagtgtttaattctgccctattattctccgagccctgtcgcaagtgcggcagggctttctttatttgttttacccatactgaggagtctgcttatgacccgtctggcttcgcgctttggcgctgcaaatcttattcgccgtgaccgtccgttaacccgtgaagagttatttcgcgtggtgcccagcgtattcagtgaggataaacacgaatcccgcagtgaacgctacacgtatatacccacaatttccctgctggacagcctgcagcgggaaggcttccagccattctttgcctgtcagacacgggtacgtgacccccgtcgtcgtgagcatactaagcatatgctgcgcctacgtcgggaggggcaaattaccggtaaacaggttccggaaattatcctgcttaactctcacgatggcaccagttcgtaccagatgctgccgggcatgttcagggcggtgtgccagaacggtctggtctgcggcgagtcgtttggcgaggtgcgggtgccacacaagggggatgtgnaccctcgcctcgacctggtactgtggctgattaaggccgatgaccgggcgctgacggtggatgaacatttttatcatcaggtgattggagaggtataccggcataaggtgctgtttgttatcagccagtcggataaggccgaacctaccagcggtgggggacagttgtccacggcgcagaagcagaatatcagccgcaaaatctgcctgctgcatgagctgttccagcccgtccatccggtgtgtgctgtgtcggtccgtctacaatgggggcttaaggtgatggccgagcggatgattaagtgcctgccacgtgaggccaccagcccggtggtgtcgcaactccatccttcctttcgcacgacggtagtccgggaacaggctcgtagcgattttggtgaaaccgtcggggccgtactcgatagcatcagtgcctttcccctgatacccgccccggtgcgggccgtcattcaggccgtgcgcaccacggtggtgagtctgcttatgacccgtctggcttcgcgctttggcgcagcaaaccttatccgtcgcgaccgtccgttaacccgtgaagagctgtttcgcgtagtgcccagtgtattcagtgaggacaaacacgagtcccgtagtgagcgttatacctatatacccaccatctccctgctcgacagcctacagcgagaaggcttccagccattctttgcctgtcagacccgcgtgcgtgacccgggtcgtcgtgaacatacaaagcatatgctgcgtctgcggcgggaagggcagatcaccggtaaacaggtgccggaaattattctactcaactctcacgatggaaccagttcgtatcagatgttgccgggactatttcgtgcggtttgtcagaacgggctcgtctgcggtgagtcgtttggcgaggtgcgggtgccacacaagggggacgtggtgagtcaggtgattgaaggcgcgtatgaggtgctggggatttttgaccgggtggaggagaaacgggatgccatgcagtcgttgctgttgccacccccggcacagcaggcactggcaaaagccgccctcacataccgctttggtgaagaccaccagccggtgactgaatcgcagatcctctcccctcgccgctggcaggatgagagcaatgacctgtggaccacgtaccagcgtattcaggagaacctgattaagggcgggctcagtggccgtaatgccaaaggaggacggtcacatacccgtgccgttcgcggtatcgacggggacgtgaaacttaaccgggcactgtgggtgatggcggaagccctgctcacgcaactgcagtga

SEQ ID NO: 137226 - DNA, 1755 bp, Homo sapiens
ttaaccccatctcgccggtccaacccgtattctggcggcctccggatccaagacttccgcaaaatgctggctcattgcgaagccgttaccccgattcgccgtaccgttactattgaagatgtgggtaactctgcggcattcctgtgctccgatctctctgccggtatctccggtgaagtggtccacgttgacggcggtttcagcattgctgcaatgaacgaactcgaactgaaataatcgttgggttttactgaccagcgtgccggaaaccggcaagaccgcgataccatttgccacctgatagctgcgtgatggacggggatccatgtcatcatcctcaccaaacagcgccagcggttcggctatttgtccggcatcaagcgtgatgccagagacggtatctgtcagccgggtgatgcccaacgtcacaaaacctgccagactgccaaacaaacgcggatcaggaaccagatggtcgcgatcacgtatatcgagagtgatgcatggaaccgatcgtaccagtaagcgaatatccataatggtgtaagtcatgccccagaggatgtaggtcacgcaaacaaagacaatctgagtagtacctggcagcatgacagtccacggggcgacataaatcagttccagcgcatcaccgagcatcgctccccattcaggcgaggggagttgtgcgccgagatcgagaaagcccagcgcggcgatatcgagaattgccatcgacagtgcgcgggtgatctcggtgaccagcccggcggtgatgtttggcatcacagcaaaccagagaatattcagcgttgatgcgccatccagacgggcggcgataacgtactctttttccagttcgtcatgcaccatgctgtaaatcgaacgtaccatacgcggcagcatgccagccagacagcaaacatagcgtgggacaactcggtccggcaacgctacacgataattgccacagcagcgaagggatcgccagtaagtatcctctgcggcctttttcgtttgcgggtaaggcacccagtcgccgccgttcaggcgaacgtacggtttatcctggtattgaataactactgcatttgagttctcggagaccggtgctgtttgtggcaacccactggtgagttttttccagtcaacattgtcttcggtgaaaatcttgccatcgagaacgcgaaccaccagatcggagatagccaggaagctgctcggttgttcgatgacaatcggtgccccctgatgcggtgccttcatgccgaagaatttcaccccaacggggacgtcggtgatagacgggctagggatatcacgtaggccagatacctgcattctgtcgcccttcagcgcgccgccgtgttccggcaccacgaccaccatcactttacgacccgatttctcaagttcagtaaagaaggcgtccagttcatcaaagaatttctgcgcccgcgctttgtaatccgctgttttgctgacccccggataatggttgccgtcatgccagtggaagcgtgttgtagaaccgtggcagggcagtcccttcaacaacgaagcggaaagagggaaatacccgttttcgatccagcgttgattctcccggatccggtgcatatcggcatcgttgaacagccgatgaccgccgtctgtccgttgcggtttcagcaatccgtaacgcctctgccacgcgcgtaacgtgacaggattaatatcacaaagcaacgccacttcaccaattgtgtaaagcgccat

SEQ ID NO: 137227 - DNA, 600 bp, Homo sapiens
atggcttttcagcataccttgggacctacttcagcccaggatgtgatgagccgacatcgaggtgccaaacaccgccgtcgatatgaactcttgggcggtatcagcctgttatccccggagtaccttttatccgttgagcgatggcccttccattcagaaccaccggatcactatgacctgctttcgcacctgctcgcgccgaggagaccgccccagtcaaactacccaccagacactgtccgcaacccggattacgggtcaacgttagaacatcaaacattaaagggtggtatttcaaggtcggctccatgcagactggcgtccacacttcaaagcctcccacctatcctacacatcaaggctcaatgttcagtgtcaagctatagtaaaggttcacggggtctttccgtcttgccgcgggtacactgcatcttcacagcgagttcaatttcactgagtctcgggtggagacagcctggccatcattacgccattcgtgcaggtcggaacttacccgacaaggaatttcgctaccttaggaccgttatagttacggccgccgtttaccggggcttcgatcaagagcttcgcttgcgctaa

SEQ ID NO: 137228 - DNA, 1368 bp, Homo sapiens
atggagctgtggcgccaatgcacccactggctcatccagtgccgggtgctgccgcccagccaccgcctgcttaacaacctgctaccccatgccatcaacctgcgtgaggtcaacctgcgcccccagatgtcccaggtgagccctccgcgggcagaagcctccaccatgcccatatctgccttgccccgaacgagcagtgacccggtgttgctgaaggcccctgctcccctgggaactgttgccgacagtctcagggcctccgatgggcagcttcaagccaaggcaccaacgaagcccccccggacaccctccttcgaactgcctgatgcctctgaacgtcccccgacgtactgcgagctggtgccccgagtgcccagtgtccagggaacatccccgcagccaaagctgcccagagccagaggccccatgaatcggcccctggaaccccaagtcctgcataccctccgtggcctgttcctggagcaccatcctgggagcaccgcccttcacctgctattggtagactgccaggccacaggcctcctgggagtgaccagagatcagcggggcaacatgggagtctcatctggcctggagctgctcactcttccccatggacaccacttgaggttggaactgctggagaggcatcagacactggcgctggccggggcgctggcggtgctgggctgctcggggccgctggaggagcgcgcagccgcactgaggggactggtagagctggcgctggcgctgcggccaggggcggcgggggacctgcccgggctggctgcagtcatgggcgccctgctcatgccccaggttcgtggggagcagggactggaggaagctggagtgcgggtgactgggaagactggagaggaggcgtgctcagatctcttctcccaggtgtcccggttggagcacacgtggcgccagctccgaaggagccacacggaggctgcgctggcctttgagcaggagctgaagccgctgatgcgggctctggatgagggcgctggaccctgcgaccccggcgaggtggcgctgccgcacgtggcacccatggttcgcctactggagggcgaggaagtcgcggggccgctggacgagagctgtgagcggctgttgcgcaccctgcacggggcgcgtcacatggtccgggacgcacccaaattccgcaaggtggcagcccagcgcctgcgaggattccggcctaacccggagctgagggaggccctgaccaccggcttcgtgcggaggctgctctggggtagccggggcgcgggagctccgcgcgctgaacgctttgagaagttccagcgcgtcctcggcgtcctgtcgcagcgcctggagcctgaccgctga

SEQ ID NO: 137229 - DNA, 535 bp, Homo sapiens
cgtggctacatctctcctgcgtggcgaatatatcgaagcggcagttaatctgcgccgtgccattgccgaagccaccgaaagcgggtctgcttggcaaaaacattatgggaacaggtttcgatttcgaactgttcgtccataccggggcagggcgcttgatctgccgatagaattcgaaagtatcggtaaagcgggcagccgtctgggtacggcgctggcgatggcggttgaccatgagatcaacatggtgtcgctggtgcgtaacctggaagagtttttcatggaattggggccgggaatcaaatttcaccgccggaaacactgtattgcccactggattccgaaatcggagacccggaccccctcccaagctggaactttcaaggcccaatggttcaaataaccggccaataaaatttaaggcaattccttgggttaggtccccggatctatctccacatactgtgctatacacaaactcatcttcaccatctaggttatctgacatcttctctggcgatacacacgagcgcat

SEQ ID NO: 137230 - DNA, 762 bp, Homo sapiens
cgctgcgactgtttattaaaaacacagcactctgcaaacacgaaagtggacgtatagggtgtgacgcctgcccggtgccggaagcgttaattgatggggttagcgcaagcgaagctcttgatcgaagccccggtaaacggcggccgtaactataacggtcctaaggtagcgaaattccttgtcgggtaagttccgactgaccgtataagaacgcgtcttacgtctgtgtgcaaacgtagatgcgaggtccatcaactcgaagatcgaccctttgaggtataccaggtcgctcgaggcgagactagtcatttgaaacatcggtttggaaccacatgaggaagcagctcccttggacgtgcggcaactagcttcgtaaaatgtgctacataggcaactggacatcatggatagtgctgtggcttcaatgtactcaatacatctttcaataaaaatggggatcggcttctctggagtcacgacagttgttaagggcaccccaaaatagttactctcccaggttgcctctgtgatggatggccggggtttgggctttggtttcttgatgaaggtggctactatagacaaaacagccttatgttggaaaaagatgccatctaggacttctatagctagagagaagtcaatggctggcttcaaagctccacaggacaggctgaccctacagtagtagtcgcacggcaggtagcacggctccagcacaggcactctgttatccatcactattcgcgccacgtcactcat

SEQ ID NO: 137231 - DNA, 1275 bp, Homo sapiens
aggaggatcatctctatctgggcctgaccttcttagagaaagagatacttgacactgtcgtggactcagcgactttatctggtagagtaacatatttagatccatcgccgaataattacctggagcagtatccccgaaaaattgcctgttacctcgccagcatcagtaaactggataactttcttggccagcttgatggtatccttcgccggtactcacgtcatttcgccatgctttacttttctggccttgggctgtcggtcagcgacagtgccaatcctgttcatcattatggtcatgtgcagggaggctacagtgtgccactgattattaccgccagtgacataacgtctcatcagcccgtcagtagaaaaatcagtgcccgtcatttcgcaggatggacagacccgtggggccaatgcgttttacagcgtgatggagcagatgaaaatgctcgataccctgcaaaatacccagctccagagcgcgatagtgaaggctatgtatgccgctaccatcgagagtgaactggatacccaatcggcgatggactttattctcggcgcggataataaagagcagcagagcaaacttacgggctggctcggtgaaatggcgtcctattactcagctgcgcctgttcgcctgggtggggcaagggttccacacctgttgccgggtgattctctcaaccttcagtcggcgcaggataccgataacggctactcgacttttgaacagtccctgctgcgttatattgccgctgggcttggtgtgtcgtatgagcagctttcgcgaaactattcgcagatgagctactcgaccgcacgcgcaagtgctaacgagtcctgggcgtactttatggggcgtcgcaagtttgtggcatcccgacaggcctgtcagatgtttctttgctggcttgaagaggcgattgtccgccgcgtggtcacgcttccttcgaaagcccggttcagtttccaggaggcgagaacagcctgggggaatgccaactggattggctctggtcgaatggcaattgacgggctgaaagaggtacaggaggccgtcatgctcattgaggcaggtctcagcacgtatgaaaaagagtgcgccaaacgcggtgatgattatcaggagatttttgcccagcaggtccgggaaaccatggagcgtcgtgctgcgggtctgaaaccaccggcatgggccgctgcagcttttgaggccggagtgaaaaaatcaaacgaggaggagcaagatggcgcacgagctgcgtaa

SEQ ID NO: 137232 - DNA, 1466 bp, Homo sapiens
cagcctggtgtctgacctgattgtttatctgggcagtatcgattttgttatgtcagatgtggaccgctaattatgcacgagaatcaccaaccccaaaccgaggcttttgagctgagtgcggcagagcgtgaagcgatcgagcacgagatgcaccactacgaagacccgcgtgcggcgtccattgaagcgctgaaaatcgttcagaagcagcgtggctgggtgccggatggtgcgatccacgcgatcgccgatgtgctgggtattccggcaagcgacgtcgaaggtgtggcaacgttctacagtcagatcttccgccagccggttggtcgccatgtgatccgttattgtgacagcgtggtctgtcatatcaacggttatcagggtattcaggcggcgctcgagaaaaagctgaacatcaaaccagggcaaacgacatttgatggccgctttacgctgctgccaacttgctgcctggggaactgtgataaagggccaaacatgatgatcgatgaggacactcacgcgcatctgaccccggaagcgatccctgaactgctggagcggtataaatgaaaaacattatccgtactcccgaaacgcatccgcttgacttggcgtctgcgcgatgacaacagccaagtgtggctggacgaataccgcagcaaaaacggttacgaaggccgcgcgtaaggcgctgaccgggctgtctccggacgaaatcgttaatcaggtaaaagacgctggtctgaaagggcgcggcggcgcgggcttctcgactggcctgaaatggagcctgatgccgaaagacgaatccatgaacatccgttacctgctgtgtaatgccgatgaaatggagccgggcacctataaagaccgcctgttgatggagcaactgccgcacctgctggtggaaggtatgctcatctccgcgtttgcgctgaaagcttaccgtggctacatcttcctgcgtggcgaatatatcgaagcggcagttaatctgcgccgtgccattgccgaagccaccgaagcgggtctgcttggcaaaaacattatgggaacaggtttcgatttcgaactgttcgtccataccggggcagggcgctacatctgcggggaagaaacagcgttaatcaactccctggaaggacgtcgtgctaacccacgctcgaagccacccttccccggaaccttccggcgcatggggtaaaccgacctgtgtcaacaacgtcgaaaccctgtgtaacgttccggcgatcctcgctaacggcgtggagtggtatcagaacatctcgaaaagtaaagatgctggcaccaagctgatgggcttctccggtcgggtgaaaaatccgggactgtgggaactgccgttcggcaccaccgcacgcgagatcctcgaagattacgccggtggtatgcgtgatggtctgacatttaaagcctggcagccaggcggcgcggtggactga

SEQ ID NO: 137233 - DNA, 2991 bp, Homo sapiens
atggacggggtccatgtcatcatcctcaccaaacagcgccagcggttcggctatttgtcggcatcaagcgtgatgccagagacggtatctgtcagccggctgcagcggcccatgccggtggtttcagacccgcagcacgacgctcatggtttcccggacctgctgggcaaaaatctcctgataatcatcaccggtttggcgcactctttttcatacgtgctgagacctgcctcaatgagcatacggcctcctgtacctctttcagcccgtcaattgccattcgaccagagcaatccagttggcattcccccaggctgttctcgcctcctggaaactgaacgggctttcgaaggaagcgtgaccacgcggcggacaatcgcctcttcaagcagcaaagaaacatctgacagggctgtcggggtgccacaaacttgtgaaccccctaatttggttatccgcatgttcaacctgaaaacgccgggtcgtgagataaagaagacgagatcgttactgaagaagccaacagcaacactgaagaggtctgactcaactggcaaccaactatattgctgcggttggcggcactacaacctgaaagcgattgacgcctgtatcacccgtctgcgccttacagtgctgactctgcccgcgttaacgatacgatgtgtaaacgtctgggtgctttggggtagtgaaactgaacaaacagactattcaggtgattgttggcgcgaagcagaatccatcggcgatgcgatgaagaaagtcgttgcccgtggctgtaccaaacgcggtatctatcgcggagctggtatcgcgattaccggtgatgtcgtggcactggatcaggttcctgacgaagcattgccagcaaagcggtgggtgacgataaaacgtcgtatcaccagccgcagggacaatcgtgaaaatcttcaacaccaacacgcgttctgcctggaaaccgaaaaaggcgcggagatcgtcgtccatatgatcatcgatgaagatctggcagtggtaagcacaccacagtacacacccgtttcccgccggagccgaatgctatctgcatattggccatgcgaaatctatctgcctgaacttcgggatgcccaggactataaaggccagtgcaacctgcgtttcgacgacactaaccggcctggcgtcgttgatgaactgacgccggaacagatccgcgaataccgcggcaccctgcgcaaccgggtaaaaacagcccgtaccgcgaccgcagcgttgaagagaactggcgctgttcgaaaaaatgcgtgtggtcactctagaggatccccgtcgagtcggcctgcgcggaagatgtaacggggctaaaccatgcaccgaagctgcggcagccacgcttatgcgttgtttggtaggggagcgtttctgtaacctgtgaaggtgtactgtgagcactgtgcaaacacgaaagtggacgtatacggtgtgacgcctgccggtgccggaaggttaattgatggggttagcgcaagcgaagctcttgacgaagccccggtaaacggcggccgtaactataacggtcctaaggttacgcaccagcgacaccatgttgatctcatggtcaaccgcatcgccagcgccgtacccagacggctgcccgctttaccgatactttcgattccatcggcagatcaagatgtacgccctgccccggtatggacgaacagttcgaaatcgaaacctgttcccaaatgtttttgccaagcagacccgcttcggtggcttcggcaatggcacgggcagattaactgccgcttcgatatattcgccacgcaggaagatgtagcccggtgcccggctcctttcatcggcattacacagcagccacactggctgtttgtcatcgcgcagacgccaggtcagcggatcgtttcgggagtacggataatgtttttcatttataccgctccagcagttagggatcgcttccggggtcagatgcgcgtgagtgtcctcatcgatcatctgtttggccctttatcacagttccccaggcagcaagttggcagcagcttcaggacacctgataaacccgagctgcgtgaatattatggtctgccaacacatccactaagcggcagaacgcctacccggttatgcgtcggtggccttaatgaacctgggaagtcacattctgctgaatgccgtgacccaccttaccggcagagcgaaactgtgctggcccactccatgctcgccacatcccggaggggggcccagaggtggagcagcacgtcagccctcgactgtcagccccggggaggacccccgtctccaaccctcagcacaccgcccgcggagggctcacctgggacatctgggggcgcagcttcaagccaaggcaccaacgaagcccccccggacaccctcctcgaactgcctgatgcctctgaacgtcccccgacgtactgcgagctggtccccgagtgcccagtgtccagggaacatccccgagccaaagctgcccaggccagaggccccatggaccgaacagcaaagcgtatggtcgataagcgtcatggcgcaatactattgcaatgtgatcccggtactggaagtccgccgtcagcctttacaccaccacccaaagtggattccgccgtcgtgccctggttcctcatgcaacgatgcctcacccggttaaagatgttcgtgtgttgagccgcatcaccaccgaagcctttaaccagcgtcgtaaaaccattcgtaacagcctcggcaacctgtttagcgtcgaggtgttaacgggaatggggatcgacccggcgatgcgagcggaaaatatctctgtcgcgcaatattgccagatggcgaactatctggcggagaacgcgcctttgcaggagagttaacgatgatcaattcgccccgagtgtgtattcaggttcaaagcgtctacattgaggctcaatcttcacctgataatgaacgttacgtttttgcttatag

SEQ ID NO: 137234 - DNA, 2557 bp, Homo sapiens
  misc_feature (1)...(2557): n = a,t,c or g
atgggttctgggtggttttgccccttttccttttagattcaagaaatccatggtgaaaggtttggattcctatgaagaaaaggaggataaagtgatcaaggagatggcagctcagatccgtgaggtggagcagagccgacaggaggtggttcggtctgtcttagaggttggtttccctcggaggatccagaccacctcaggcagtgccagacccagaagagggctcttcagcacctaggaagctggaaagggatgaacagccaagtagcttcccagcttacagcagccctcaaatttggacctgccaccagctccagagcttgactggatggagacaggaccatctctgacattcattggccatcaggatatacccaggagttggtaacatccactcaggtgccacacctccctggatgatccaagatgaagaatacattggctgggggaccccaagaaatngggccccatccctatgaagaatttccttaaagaaatttcccctatcattgtacagaggaaaaacagaagttgaaaaaactcccccccccagacccgagttgggggccaactttggatcacagctcccaggacccagtgcaggctggctgccctcttttggccgcgtctggaataatcggacgccgctggcagtcccagacatcaattcaaaactgaagctgcagcaatgaagaagcagtcacatacagaaaaaagctaatcatgctctctaccaactaccatgaggctaaaagcaaagtcaacaaacccctattataccttccaccaaattctttatcattgtctttcttaggaaacagacatactcattcatttgatttaataaaggttttaattttcccaaaatgtacagctaggttggacctatttcatgcaatcttcacccagcaagctgggagcatctcccacccttgggtatttccggtgtaaaattacttggagctctgtgctttgaaaccagtttgataagtcctagggggagagaatagcacgatgagatgctttacttaaggaagctcctgaaagggcttgccctggcccagggagcctcgaatcttcaggtctctcaagagaccacagctgggggttataaagtttaataagttggggaacttccttacgagatgttagcataggggtggctgttggtccaaacaagcattaggttattgaggcttgtcccggaactttggcctttgggacccacttcttcttttgtggcctttgcccccgggattttgtttcactggggtcctttggtctttcttggggccgacttttccaggggtccttccttccttcctggtccgtccttaaggcggcatttggcgaacctccgggagaataagcagcagacacccgcagccctcgtctcaagatgtcggacaaaaaggaagcgctgatcagaaacgggcccaaaaaccaccgtccgctgtgagtacttccggggcaagaggcggagccaggcagaagaagtcccacggcgaagcgctcgccctctagcctgaggcggaagacaggaagtggattctagttcccaagccgcaccgcctaaatactgccggagtctgcgctagttgtgacgcagtactatagcgctgttttcctgcactgataaacgaaaagcaatccaccaggtctcggcagctaactttccggcactacttatgcccgagcgtgtcgctcccagtgcgcaagtgcagcaggtggctgcacggggggcgcgggaggaggaggaggagaatgaggaggaggatggctgggtggggccggcggcaagtgctgtgatgcggttccggggaggggccgtcgggtagaggctgaataccagtttccgagcggcaaggcagcgattggcgattttttagtgtgtatgtggtgaacaaagctggcggcttgatttaccagttggacagctacgcgcccacgggcttgaggcttgagaaaactttcaagttatccgctggatctgctgctcaagctacacgatgagcgtgtgttggttgctttcggccagcggggacggcatcccgagtggggtcatgcagtgctgggccatcaatggcatggacgtgaatggcaggtacacggccgaccggaaaaaaggtgctggagtatctggggtaacccctgctaattacccggtgatcgtatctatttgctcaacctagactctacttctaatgacaagcttatgctagccttgatgttccactcgctctttgccatcgggtcccaagcttgtcttcctggaacaagggaagcctcaaggcattgagaatgcctggaagacagacacattcaaattgcactggctaccagacactgacaagggatcaagtttgtggttctagcagatcctaggcaagctggaatagattctcttctccgaaagatttatgagatttactcagactttgccctcaagaatccattctattccttagaaatgcctatcaggtgtgagctctttgaccagaacctgaagctagctctggaggtggcagagaaggctggaacttttggacctgggtca

SEQ ID NO: 137235 - DNA, 501 bp, Homo sapiens
  misc_feature (1)...(501): n = a,t,c or g
tttttctcctgctccttgttttcccagcagcacatggggttcctcggaggagcagaggtggccgccgtgggggngcgtttgggctgcggtgctgcgtcatttttcctttgctttctctttactttagacactggcccaactccaggcgtttcctttcattccctcagtgcttctcttctgacctgcatgttgcctgtgtgttgtgtggatctgttcctagtataggcaacataatgagatactgtgcttcccacctccccttcagttcagagccaaaatgggtctagaatctggcactttactcatttcctttgataaattgtactatgcagagctgtcaggaaccttcagatagcagtagaggactgcagctgtctaggtctgcggccacatcttggggacacactggactgttcccatgtgcagggttcagcagttatgtgggagtgctaggggttaggcttttgagcttnaacgcctgcgtgtgaacagatgaaaaat

SEQ ID NO: 137236 - DNA, 414 bp, Homo sapiens
cccgcggcagtgctggtggccatggttcccgtagccagaaggagttgcccacagagcccccctacacagcatacgtaggaaatctacctttcaatacggttcagggcgacatagatgctatctttaaggatctcagcataaggagtgtacggctagtcagagacaaagacacagataaatttaaaggattctgctatgtagaattcgatgaagtggattcccttaaggaagccttgacatacgatggtgcactgttgggcgatcggtcacttcgtgtggacattgcagaaggcagaaaacaagataaaggtggctttggattcagaaaaggtggaccagatgacagaggcttcagggatgacttcttatggggcaggggaggtaggccgccatggcaaccgcggaacaggccct

SEQ ID NO: 137237 - DNA, 840 bp, Homo sapiens
atgggccgcgtaggccgggcaggcgtccagctgggacgccgccgcaccacgtgggctgcagagcgcacggggcaggcagctgccggtggcccagggcgggcgctgcgcggccagcgtccggatttgcgatcaggcggcgcggcggacagcccggcggcggggcggggggagttatattgcggggtccttcctcgctcaccctggttcctctcggagcggagacggcaaatggcggacttcgacacctacgacgatcgggcctacagcagcttcggcggcggcagagggtcccgcggcagtgctggtggccatggttcccgtagccagaaggagttgcccacagagcccccctacacagcatacgtaggaaatctacctttcaatacggttcagggcgacatagatgctatctttaaggatctcagcataaggagtgtacggctagtcagagacaaagacacagataaatttaaagggtgcgggagcaaagagcaggaagaagaagggatccgagcagcattctcctgcctgcagggcttcctgaaggaagtgtgcctgctgtgcttcagggatgacttcttagggggcaggggaggtagtcgcccaggcgaccggcgaacaggcccccccatgggcagccgcttcagagatggccctcccctccgtggatccaacatggatttcagagaacccacagaagaggaaagagcacagagaccacgactccagcttaaacctcgaacagtcgcgacgcccctcaatcaagtagccaatcccaactctgctatcttcgggggtgccaggcctagagaggaagtcgttcaaaaggagcaagaatga

SEQ ID NO: 137238 - DNA, 2828 bp, Homo sapiens
  misc_feature (1)...(2828): n = a,t,c or g
ggcacgaggcctcgtgccgctcggagcggagacggcaaatggcggacttcgacacctacgacgatcgggcctacagcagcttcggcggcggcagagggtcccgcggcagtcgctggtggccatggttcccgtagccagaaggagttgcccacagagcccccctacacagcatacgtaggaaatctaccgtttcaatacggttcagggcgacatagatgctatctttaaggatctcagcataaggagtgtacggtctagtcagagacaaagtcacaggtaaatttaaaaggattctgctatgtagaattcgatgaagtgggattcccttaaaggaagccttgacatacgataggtgcactgttgggcgatcggtcacttccgtgtggactttgcaaaagggcgaaaaacaaaaataagggtggcttttggattccagaaaaggtggaccagatgacagaaggcttcagggatgacttctttagggggcaggggaggtagtcgcccaggcgacccggcgaacaggcccccccatgggcagccgccttcagagattggccctcccctccgtggattccaacattggatttcagagaacccacagaagaggaaagagcacagagaccacgaattcaggttaaaacctcgaacagtctggaggcccctcaatcaagtagccaatcccaactctgctatcttcgggggtgccaggcctagagaggaagtcgttcaaaaggagcaagaatgagcctgcggttgggagggaatggggcgtggggggttagagcaaggaccacagccgtggtgagtccccgggcagccgtcctgcagccgccactcctgcgcctgccattggccttcctcacagcggaaacacagcttgtgagtgcatgtcagctgttaacaagtgggtttttagtacattctggggctttttctgtatctatcttagtggcctgtttgttgcgtttttttctttcttccgcttgcttccccattttccttctgtcctttttctcctgctccttgttttcccagcaagcacatggggttcctcggaggaagcaagaggtggcccgcccgtggggggggcgtttggggctgcggtgctgcgtcatttttcctttgctttctctttactttagacactgggcccaactccaggcgttttcctttcaattccctcagtgcttctcttgttgacctgcatgttgaagttctgtaattgctgggggnttccaacaaaaaccagagtcactgacagaggggaacagcagagaccttgttgggtattcagcttgtgatggatattagagaatcaagaggcaccttgttttcacaacttaggattaaaaatatctgcagggtcctttccattccgtatttagagggagtcctgggctccatgaccccctccccgagtgggactgttccaagcagatagggttcacacggagaaacaggtggaggctgaaaaggggggggctaatggaagagccggtaggggagtccaacggagaagaatgcagtgaatgctttgcatggcatttcacacgtgtgtgtgttcccagcttagtttcactcctttccgccgtgcgtggtggaggctggcctctcttggctgggtgcagtgaatggccagcgggtttcttttctgctgggccaaggcgctttggggggtggaagggggtggtgctggttgcttgcactgggctgactgcggcgctgacgccacgttaccccccatccctgtggcctgtgtgttgtgtggatctggtcctactataggcaacataatcgagatactgtgcttccacacctccccttcagttcagagccaaaatggggtctagaatctgggcacttttactcatttcctttggataaaattgtactaatgcaagaactggtcaaggaaccttcagatagcagtaagaggactgcagctgtctaaggtctgcggccacatcttgggggacacactgggactgttccccangtgcaggggttcaagcagttatgttgggaagttgctaggggttagggcttttggagcttggaacgcctggcgtgttggaacaggatggaaaaatccttcagggtaccccaagttccccagtctgttcctatggggggaggcagtttgggggcggcccggccagccaggaaccctgggaaatatggccctccgccaggttgatggccagggcccaggcgtngccctggggccaccccagcggaaatgtgcttaagtatttgggtcaccaagcccgtcatcccctgggctttttccctactgtggtccttggttaacaaggccctcaggcaatcccacagaactcctcctcctcccttcccttcccaccctgtccagccttcctctgccttcctgagataaagaaccattttgtgtaaccacccaacactttaactttcagaaagacatggcatttatgtgggtgtaatccaaacccgaatgcttttcagatgaccctacttacattcttcaaatgtggaataagataaagaacgaaaacacatgcgatctaaaactgctggggcaatccagtttgactttctaaaatgtaagaatgggaattcccaaacactttaacacatttcagcttatatggacaggaaagtaaatctatggatatggtattttgtgaatgcatcttttaaataaaagaaaacccttacgtagtcactaaaaatgaaaaaaaatacaacaaacattaaaatgaaaagaatggagatctcaactacttacaaaactgggtcatgaaaagaaatggaacacgatgggcgtgggtttctgtgaacgatcattt

SEQ ID NO: 137239 - DNA, 1038 bp, Homo sapiens
atggaagactttaccaccccactgtcaacattagccagctcaatgagacagaaggttaacaaggatatccaggacctggactcagctctgcaacaagcagacgtaatagacatctacagaactctccaccccaaatcaacagaatatacattcttctcagcactgcattgcacttattctaaatctgaccacgtaattggaagtaaagcactcctcagcaaatgcaaaagaacagaaatcacaacaaactgtgtatcagaccacagtgcaatcaaattagaattcaggattaagaaactcactcaaaaccgcacaactacatggaaactgaacaacttgctcctgaatgactactgggtagataacgaaatgaaggcagaaataaaggtgttctttgaaaccactcagcatgatcaaaacttcactaaagccaggtgcattcaagaacacaggactccctattcccagagcttcaagttgaaagctgagacccgggatccttccagtttcacgaagaacgtgcagaagatgaaaagagtgagggacgcggacctagctgtagctgcactcagccgcctccgtggtaaagtctgggtgaaggcctggcctccgctccggggctgcaggtgcgtcctgggctgctgcttcctggcattctgcataaggagcctaatggacgtgaagcactcgtgtcccgtgtgtcagcgcgagctcttctactaccaccgcctcccacggcccagccccaggtctgcctatttggcagtccgggacataggcccaaaaatggccagagacacagtgaatctctggcctcaggcaagagatccatctgagaacgcgtccccagccttgctccagactcacgccgagaaggtcctcgtccggcgagtgggcagtgggcttgggaccacgttgccccgcagaggggatgatcccactccagaaagacaaatttctttcttaaaatgcttgttgaagaagctatctcatggttttggttcagaaggggctatgcccgaggaaatctcccactga

SEQ ID NO: 137240 - DNA, 2331 bp, Homo sapiens
  misc_feature (1)...(2331): n = a,t,c or g
atggggagaaaccagagcagaaaagctgaaaattctaaacacgaaagcacctattctcctccaaaggatcacagctcctcacaagcaatggaacaaagctggacagagaatggctttgagaagctaggcttcagaaggaaagaagccctgtattacttagatttgactgcttcatgccagtctcaggagcttttccagctgtatgccggcatgtccgtggtggggacgtccatgccggtgcaggccgtgtgtccctactgtggaaaccgcatcatcacggtgacgacctttgtcccgggtgccctcacctggctgctgtgtaccaccctcttcctgttcgggtacgtcctgggctgctgcttcctggcattctgcataaggagcctaatggacgtgaagcactcgtgtcccgtgtgtcagcgcgagctcttctactaccaccgcctgcggcagatggagctcgcgtcctccgcacgcaccgtcgtcgcccccagccggccctgtgctggcagagaggggagaggggacgccaatgggaagaacagctcccccactgctgggtcagccatgtcatctgagcctcccccaccaccacagccccccacccatcaagcttggagtcgggctgctggacacccctcggagccgtgagcgctcaccatccccctctgcggggcaacgtggtcccaaggcccactgcccactcgccggacgaggaccttctcgggngacggtgcggggcttcacagggccccgtctacaaaggagtcttgcaaatgcttctgccggtccaaagggccattggcttcaattaccccccagctggatgggcgggccccgacatctttcctggcacatctcttgatgtgggaagggggagttattgttcccagtgggaagggcgacgaggtcaccttattaaaatgtgctcccatccccaccccaaagaatgaagaagctggcaggcccgtgggaggtcgttcatcactcaccctggcacccaggcacccaagcatgagaccctggtctggaacatgtcatcagcttcctaggaggattggtggaaagcacccctttgtccctgtgctttgtgggagactttgcggggaggaggcagcagacactggaggatgacattcttccacacgagacggggcttcagcggggcaatggtccctctcaagtatctcctggaggaaaggggtatgggggggcaggtgtggggtgtggggtgttcccggccatcagcacagcctatggaccattgcaacaacctctccaccatctgaagagcattaaaagccatttaaaaaggagaggtgcccactggtggctgagtggaggttccaaccccatcccagggagtggatcaagggttggtatttcttcccagcttgctcagacacatgggctcaacccacagaatccctcttcctcctggagctggaggccccagattcccagatctggccccctggcagcctgacagggaccttgcgtgacttctccaaggcaaatttccacctaagtgccccttgcgcctctcctggggcctgggcaaagcagttttctaattcttggcttggttggttctaggggagctggcttgaagtgggtggggaaaggcgggggtggcggtctttggattggacggatgttgccttttggtgcctttgcagtgggaggcggcatagctgcctgtctggggaagacagttctcccagcactcccacccctgggcacagcaggctggtactgggaggctgaacccctcttagagcctgaccttttcatctgccttctggttgtgtgaccatcactcaacagccatttcacagcccctgtaattatggcggcggcgggctggggtggtggtggtgggaagggcttgtggagaggacacaggctttgtttaaaaactttgtcccgatccatccagaaaagagtaggtagcttgcatcctgacagcctggcaaagtcaagaaagttgaaggagaaacatacctttggagagggggttttctttaaaactagtgttaagaaatgcttagggattttttttttttcttatttttcataactaaagctttcacccagagccggctctgtttgcactttgctgccgacattgcaaactttttggcagggtgggagactgagtctcattctgtcacccagggctgggagtgcagtggcccgatctcagctttactgcaacctcttgccctccagggttctgggcaattccgcctcagtctcctggagtaggctggggattacagggcatgcgccaccacacccggttaatttttgtatttttagtaggagaca

SEQ ID NO: 137241 - DNA, 619 bp, Homo sapiens
gtcatgccctgcgctgcccagactagtgaacaatacagtcaggatggctaaaggtgaccccaagaaaccaaatggcaagatgtctgcctatgccttctttgtgcagacgtgcagagaagaacgtaagaagaaataccaagaggtccctgtcaattttgcagaattttccaagaagtgctccaggaggtggaagacaatgtccaggaaagaaaagtctaaatttgataaactggcaaaggtggataaagtacgctatgatcgggaaatgaaggattatggaccagctaaaggaggcaagaagaagaaggattctaataccttcaaaaggccaccatctgaattcttcctgttctgttcagaattccaccccaagataaaatcgaataacttaaatgacagtgaaaagcagccttacatcactaaggcggcaaaactgaaggaggagtatgagaaggatgttgctgagtataagtcgaaaggaaagtttgatggcgcaaagagtcctgctgaagttgcccagataaaggtggaagaggaagatgaagaagatgaggaggaagaagaggaggaggaggacgaggaggatgaatttaaaaactgtttatctgtctccttgtga

SEQ ID NO: 137242 - DNA, 996 bp, Homo sapiens
atgccgtctggttggagtggcagtcccatcgactggctggcttgggacaacctggagcaaccacccctgtatcctaagaagctggtgcagacatactcagtgtttcccaaccaggacgagatgagcgatgtggtggtccagccttacaattcactcctcacactcaagaggctgacgcagaatgcagactgtgtggaaattaaggattatggaccagctaaaggaggcaagaagaaggatcctaatgcccccaaaaggccaccgtctggattcttcctgttctgttcagaattctgccccaagagcaaatccacaaaccccggcatccctattggagacgtggcaaaaaagctgggtgagatgtggaagaacttaaatgacagtgaaaagcagccttacatcactcaggcggcaaagctgaaggaaaagtatgagaaggatgttgctgtctataagtcgaaaggaaagtctgatggcgcaaagggtcctgctaaagttgcccagaaaaaggtggaagaggaagatgaagacgaggagttctgtattctacactcggctgcagagctgggaggagacttggagcctcatcccgagaaagggctgccggaggacgacccggacatcgttgtgaaaggttggctgtaccgggagccccgcggaggaggggcgcggccctggctgcccccgcgccgagcctggtttgtgctcacgcgggactccctggatcagttcagcagcagcgggaaaggggcgcggcgtctcgggagcctcgtgctcaccagcctgtgctcggtgaccggcccagagcgcaggcgtaaggagacaggtctgtggtcagtgactgtgtctggtcggaaacacagtgtccgcctctgctccccacgccaggcagaggctgagcgctggggggtggcattgcgggaagtgatcgcctccaaggcacccctggagacccccacccagctactgctcagggacatacagcctcccgagtag

SEQ ID NO: 137243 - DNA, 2179 bp, Homo sapiens
cacacaccctcacacacgcacacacagatgcacacccggcgcacacacgcacgcgcgcgcacaccgagcagccgctcgcacggatccacgggcacacgcgcgctcacacctaacacacacccagagactggagccccgacacacaaacccgcgacagtccccacacacacgaaccgaagcccgcggctcctggagccggcccgccggcctgtcagtgcccaaagatcgggaatcgagcccgccgccctcggcggccaccccacacgcacacgcgggacccgacgcggcggggtccccgggacgcggagggggacggcgggtgcggctaacctggcggcggcggcgcggcttccgggagctgtctggctcgcggtcctggtgtccggcggctgccccggcgggctccgaggcgcgctagagctgcgcagaaatgccccgctctctcgcgcgctcgctcctgctctccctcccacggcgctcagccccctcctcgcccgccccccacaccccctctcgccgctccgccccgccccggccggctcccccggaggaggcggcggcgatcccggccccccaagcagcagcgggcgggcgaacgagcaagcagcggcggcgagcagccaacaccaggggagcgccggagccgccggagccgccggagctggggccgcgcgccggtcccggggaggggagcagaggaaggggctgagccccgcgaaccctcccggcgctggggacccgccgccggcttccccacgtgggcccggcgtcaacctgagctgcggcgggctcagaggccgggcgaagaagaggagcagaccccacccggggcccccacgtcctcccgggttcccgccagcgccgacctcgattttccctagcttagacttgtctggattcttcctgttctgttcagaattctgccccgagatcaaatccacaaaccctggcatctctattggagacgtggcaaaagaaaaaaaaaagttgggtgaaatgtggaatagcttaaatgacagtgaaaagcagccttacttcactaaggcggcaaagctgaaggagaagtatgagaaggatgttgctgactataagtcgaaaggaaagtttgatggtgcaaagggtcctgctaaagttgcccggaaaaaggtggaagaggaagatgaacaagaggaggaggaagaagaggaggaggaggaggaggaggatgaataaagaaactgtttatctgtctaccttgtgaatacttagagtaggggagcgccgtaattgacacatctcttatttgagaagtgtctgttgccctcattaggtttaattacaaaatttgatcacgatcatattgtaagtctctcaaagtgctctagaaattgtcagtggtttacatgaagtggccatgggtgtctggagcaccctgaaactgtatcaaagttgtacatatttccaaacatttttaaaatgaaaaggcactctcgtgttctcctcactctgtgcactttgctgttggtgtgacaaggcatttaaagatggtttctggcattttcttttgatttgtaaggtggtggtaactatggttattggctagaaatcctgagttttcaactgtatatatctatagtttgtaaaaagaacaaaacaaccgagacaaacccttgatgctccttgctcggcgttgaggctgtggggaagatgtccttttgggagaggctgtagctccagggcgtgcactgtgaggctggacctgttgactctgcaggggggcattccatttagccctcagggttggtcctggtttcctgtatataagtgaccatagcattcctgcctgcccatccttagctgtggacaaaggggggtcagctggcatgagaatatttttttttttttaagtgcggtagttttttaaactgtttgtttttaaacaaactatagaactcttcattgtcagcaaagcaaagagtcactgcatcaatgaaagttcaagaacctcctgtacttaaacacgattcgcaacgttctgttattttttttgtatgtttagaatgctgaaatgtttttgaagttaaataaacagtattacatttttagaactcttctctactataacagtcaatttctgactcacagcagtgaacaaacccccactccgttgtatttggagactggcctccctataaatgtg

SEQ ID NO: 137244 - DNA, 685 bp, Homo sapiens
atgcaagaaaaagttgatatattggacttcactaaaattaaaaacctctgctctgcaaaagacactgaaaataatgacttagatgtcctggcaacaccttcaattcaacatatgaaaagcaccttactctacaaacagcctttccctcccaccattcccaattctattcatgggatctggttacagaaaaggaccgactttccaagagccgaagcccctgcccggagcggcggctcgcgggcctgggtgcgaccccacccagcctccccggcattcagcgccgcgggaccacggcccgccgctcacccaggtgctccccgcggcctgcgcgcccgcgcgcttctccggcatggctcccgcctcgggctccgacgccgccttctcctccagctccggcggcggctccacgctcatgccgcggccatgcccgcgccagctcggggcgctccgggacgacggcgacgccgcggaggcggcgcggggggttgtggaaccaatcccccatggatatcaagggatgactgtatgtgtgatggggcatgaggaggccctgaaggcacagcccacacctatgtcctcagagttccctatcatcaactggcctattcaatgtgaagacaacagcgataaagacctttatgatgatctactttcacttagtaaatataatttatcttccttgtga

SEQ ID NO: 137245 - DNA, 206 bp, Homo sapiens
gtcacgggtgagcagtatggaagccccatccgtgggcagcatgaggtccacggcatgcccagtgccaacacgcacaatacgtggatgggtggatggagggtggcaggtggggcgtctgcagggccactcttggcagagactttgggtttgtaggggtcctcaagtgcctttgtgattaaagaatgttggtctataaaaaaaaaaaa

SEQ ID NO: 137246 - DNA, 895 bp, Homo sapiens
atgtggagcgcgggccgcggcggggctgcctggccggtgctgttggggctgctgctggcgctgttagtgccgggcggtggtgccgccaagaccggtgcggagctcgtgacctgcgggtcggtgctgaagctgctcaatacgcaccaccgcgtgcgcttgcactcagcacgacatcatcatacggatccggcagcggccagcaagtcggtgaccggcgtagaggcgtcggacgacgccaatagctactggcggatccgcggcggctcggagggcgggtgcccgcgcgggtccccggtgcgctgcgggcaggcggtgaggctcacgcatgtgcttacgggcaagaacctgcacacgcaccacttcccgtcgccgctgtccaacaaccaggaggtgaagtgcctttggggaagacgggcgagggcgacgaccctggaaccttatggacagtgcgctgctctggaacagcacctgggagcgtgaggctgctgtgcgcttccagcatgtgggcaccttttgtgttcctgtcagtcacgggtgagcagtatggaagccccatccgtgggcagcatgaggtccacggcatgccccagtgccaacacgcacaatacgtggaaggccatggaaggcatcttcatcaagcctagtgtggagccctctgcaggtcacgatgaactctgagtgtgtggatggatgggtggatggagggtgggcaggtggggcgtctgcagggccactcttggcagagactttgggtttgtaggggtcctcaagcgcctttgtgattaaagaatgttggtctatgattgcgtttcactgtgagcctgaggatgaccaggaggtgccagcccaggcccagttgatcatttcttccccaagccgtctttcccgcagtact

SEQ ID NO: 137247 - DNA, 1047 bp, Homo sapiens
atgattatctcaacagatgcagaaaaggcctttgacaacattcaacaatgcttcatgctaaaaactctcaataaattaggtattgatgggacgtatctcaaaataataagagctatctatgacaaaaccacagccaatatcatactgaatgggcaaaaactggaagcattccctttgaaaactggcacaagacagggatgccctctctcaccactcctattcaacatagtgttggaagttctggccagggcaatcaggcaggagaaagaaataaagggtattcaattaggaaaagaggaagtcaaattgtccctgtttgcagatgacatgactgtatatctagaaaaccccatcgtctcagcccaaaatctccttaagctgataggcaacttcagcaaagtctcaggttacaaaatcaatgtggaaaaatcacaagcattcttatacaccaataacagacaaacagagagccaaatcttgagtgaactcccattcacaattgcttcaaagagaataaaatacctaggaatccaacttacaggggacgtgaaggacctctttaagaagaactacaaaccactgctcaatgaaataaaagaggatacaaacaaatggaagaacattccatgctcatgggtaggaagaatcaatattgtgaaaatggccatactgcccaagggcacctttcacagccagcaggcattggaatatggcaccaaactcgttggaggaaccactccagggaaaggaggccagacacatctgggcttacctgtctttaatactgtgaaggagtatgttagtagtacaaatgtcagcaaccaccccttaattcttcctgagtggggactatgcagtaggcactgtgctaggtgtttcattcaaattgccctgttcaggcctcactacaaccctcggagtgctatatacatgaacccttctaagaaggcaatggaaacaggtttgctcagtttctcagagaataaagctaaagacagattgttacaaggatttgaacaaaatgtcaagaaccttagaaatacctga

SEQ ID NO: 137248 - DNA, 1332 bp, Homo sapiens
atgaccgcaacccttgccgctgccgctgacatcgctaccatggtctccggcagcagcggcctcgccgccgcccgtctcctgtcgcgcatgtttcctcctgccgcacaatggaattcggcattgtgcctacacagcattctgcggcaacatctctatgttgataaaaatacaaagattatttgccagggtttcactggcaaacaagggcaccttttcacagccagcaggcattggaatatggcaccaaactcgttggaggaaccactccagggaaaggaggccagacacatctgggcttacctgtctttaatactgtgaaggaggccaaagaacagaccggagcaacgggtttctgtcatttatgttcctccgccttttgctgctgctgccattaatgaagctattgagggcagaaattcccttggttgtttgttcaccctagaggaattccccagccaggccttggtcacagttcaagccacaaaacctgtggcccgggaaaagacaaggcttattggggcccaaactgccctggagttcatcaatcctggagaatgtaaaattggcatcatgcctgggccatatttcacaaaaaaggaaggattggcattgtgtccacatctggcaccctgacttatgaagcaggtcaccaaccacgcagaagttgggattggggcagtctttgtgcgttggcattggaggtgatccttcttaatggaacagattttattgacctgcctcgaaattctttttgaacgatttctgccacaggaaggcatcatattgattgggtgaaattggtggtaatgcgagaagagaatgctgcagaaattttggagccactttattcagggtccaaatttccaggcctgtagtgtcccttcattgctggtttaactgctcctcctgggagaaggaatggggtcatgccgggggcaattatttctgggagggaaaaggttggagctaaaagagaaagatcttctgcccttcagagtgcaggagttgtggtccagtatgtctccctgcacagctggggaaccacgattctacaaggaatttgaaaagagggaagatcgcctatgaaagcaaaaaaaaaaaattcctaaaactgtggaatggatcacgtagacatgtaacccagcagcagtttgcttctgttgtccactgattaatcagcctatgtgcctgacactggtcttgcagtacaactggaagccaaaacaaggtggaagatgtccttgaattaagacgttttcaccacattgtattacagagacagccaattaaatctactatttgatttcaaaaaaaaaaaaaaaaaaaagtttt

SEQ ID NO: 137249 - DNA, 2111 bp, Homo sapiens
ttgaactctcctgaagagatgctatgttacctttgaatcagaccctgatggacactgagaagcaggttgctctgcaagcagcagagagatttggggatgagctttgtatcacacatagtgccagggaagggggtgaatattatccaaccagaagagaagcagtatcaatggatgaccctaaatggcctgccatgcccctatcctgggcctatataaacctgagaccctagtgggcagacacacgagcagctggatgtcatgaggaacacatcggcagaagaagatgtaagtggctggtcatagagaggacgtcgagaggagcactccagccatggggttagagccccatagcctgcccatctctatgctcccctagaggttttgagcagcaggacactgaagaagcgagctacacccccatcgcatgttctgcgaggtggatgtgtcacatctccccacctaactccaaccttcttgcctctcttataaggacgcttctgataacatttcactcatctggacaatccagtcttgcaaatgagggcatcaggggttatccgctgtggtgacagttggcctaaagtggactggttcttggtgccccaggtggtgcacatggtgccaatggtagcagtcacagctctgggtggacaagtctttgggtgcccagatgccatgtgcaggcaccagaagtggcagtggaaggctgggaaggctggtatttgggtccccagacaacacacacaggccgtggtagtggcaatggcagtcgcagacattcagaggccttcatggtggtggcagtggggcctaagagaaccaatccctggattcccaagcagctagggcagcctcctaatgtgctggactgcctgttttctgagttgtagggcactcaggtgccagggatgtgcccgtcttctgaattcaactggtgtattagaacatgctgggattgggctggcagtgggtcctctctcgtcacagggctggagtgggaagagagctgctggagccatggtttctctcgggtggtgagatttgcagccaggtctagcttggcaacctggggaatactttgcagccataaaaaaggattacttcatgtcctttgtaggacatggatgaagctggataaattcaatgcaattcccatcaaaatatcaccataattcttcacagaactagaagaaacaatcctcaaatttatatggaatcaaaaaagagcctgcatatccaaagcaagagtgaatacaaacgataaatctggaggcatcacattacctgacttcaaactatacaacgaggctatagttgccaaaacaacatggtactggtataaaagcaggcacatagaccaagagaagagaagagaagagaagaaagagtagaagaaggatccttctgtgccagaaacccttaagaaaaagcaaaggaatttcacagagctaaagatccagtgcctgagtaagaagtttgcccagaagatgcttcaaacagcaaggaggaagcttatctatgaaaaagtgaagcactgtcataaggaatataggaaaatgtacagaactgaaattcgaatggcaaggatggcaacaaaagctggcaacttctatgtacctgcagaacccaaattggcatttgtcatcaggatcagaggtatcaatggtgtgagcccaaaggtccgaaaggtgttgcagctttttctcctttatcaaatcttcaatggagcttttgtgaagctgaacaaggcttcaattaatatgctgaggattgtagagccatatattgcatgaggtacccaaatctgaagtcagtaaatgaactaatctacaagtgtggttatggcaaaatcaataagaagtgaattgctttgacagataatgctttgacagctcgatctcttggtaaatatgggatcatctgcagggaggatctgattcatgagatctatactgttggaaaatgcttcaaagaagcaaataactttctgtggcccttcagtatcttctccacgaggtgggatgaagaaaaagaccacccattttgtagaaggtggagatgctggcaaaagggaggtccagatcaacaggcttattagaagaatgaactaa

SEQ ID NO: 137250 - DNA, 781 bp, Homo sapiens
ctggaaccatggagggtgtagaagagaagaagaaggaggttcctgctgtgccagaaacccttaagaaaaagcgaaggaatttcgcagagctgaagatcaagcgcctgagaaagaagtttgcccaaaagatgcttcgaaaggcaaggaggaagcttatctatgaaaaagcaaagcactatcacaaggaatataggcagatgtacagaacctgaaattcgaatggccgaggatggcaagaaaaagctggcaacttcttatgtacctgcaagaacccaaatttggcgttttgtcatcaggaatcagaggtatcaatgggagtgagccccaaaggttccgaaaggtgttgcagcttcttcggcctttcgtcaaaatcttcaatgggaaccttttgtgaagctccaacaaggctttcgatttaacatgctgagggattgtaggagccatatattggcatggggggtacccaaattctgaagtcagtaaatgaactaatctacaaggcgtggttatgggcaaaatcaatttgacttgcactttcctacagagaaaagaagtcacccaggttcacaatgagcagcccaacttggacaatttaccaaagcacagaagaattcaaaatctagatcttctcaccaggactctctccagtggctgtcctacttgcaaatgtaatcatcctcccagaggagagtcaggcacaaaccagggagaactgaaggagctctttagcccctcaaaatacatcaaaggaagactcaatgcagccaaaattcaagcctaa

SEQ ID NO: 137251 - DNA, 619 bp, Homo sapiens
cccacgcgtccgcccacgcgtccgggactccaaaatggcgtcagttggtgaagtgtccggcccccagtacccagtgaaggacaagaaacttcttggaggtccaaactgggggaagcttcccaagctggtatcttgatgcggggaccttcaagtcctagtggcattttcgggagcgtttcaaagagggttactacggggtacctacaacaagtacatcatatgtgaagaaggggagcgatctcgggggatttaccatggtgctgggcatgctaccgtgctctttagctactccttttcctacaagcatctcaagcacggagcgggctccgcaaataccactgaagagggacacactctggcacccccccaccccacgacccttgggcccgagcccctccgtgaggaaacaacaatctcaagcacgagcggtccgcaaataccactgaagaggacacactctgcacccccccaccccacgaccttggcccgagcccctccgtgaggaacacaatctcaatcgttgctgaatcctttcatatcctaataggaattaacctccaaataaaacatgactggtacgtgaaaaaaaaaaaaaaaaaaaaaaaaaaaaaaaaaaaaa

SEQ ID NO: 137252 - DNA, 414 bp, Homo sapiens
  misc_feature (1)...(414): n = a,t,c or g
cccacgcgtccggttgagatgttaaatggtggacgagtactgtggatgtgaatgggggaagtaattgtaatcatatgtaattggtcacaaggcctaatttgcagtaactattgctgttttatttaacaatgccttgttgctttgcatgcattaatgtttggatgtaaagattgtgtgtctatccaacagggagccacagtatttaaattgaccaacctaatgttacaactactttgagggggccaaatgtaaactaaaagccttaattaaagcggcgcaattttgtataacttatcatcagtagttcaataaatttggattgccatgccagggcttgcattatnnnnnnnnnnnnnnngggcggccgatttaaaaaaaccttgggggggcccaaattaaccgggtaatgcaaag

SEQ ID NO: 137253 - DNA, 2118 bp, Homo sapiens
gcggcgcggcagcggcaggaccgccgtggcgcctagagtagcgacccggggggagcgcggggcgacgctggctgcagggacccggtgacagcgtgagaggttcgcagagtactaggttttgacaagcttgcatcatgcgtgagtataagctagtcgttcttggctcaggaggcgttggaaagtctgctttgactgtacaatttgttcaaggaatttttgtagaaaaatacgatcctacgatagaagattcttatagaaagcaagttgaagtagatgcacaacagtgtatgcttgaaatcttggatacctgcaggaacggagcaatttacagcaatgagggatttatacatgaaaaatggacaaggatttgcattagtttattccatcacagcacagtccacatttaaccgatttacaagacctgagagaacagattcttcgagttaaagacactgatgatgttccaatgattcttgttggtaataagtgtgacttggaagatgaaagagttgtagggaaggaacaaggtcaaaatctagcaagacaatggaacaactgtgcattcttagaatcttctgcaaaatcaaaaatatatgttaatgagatcttttatgacctagtgcggcaaattaacagaaaaactccgagtgcctggggaaggctccgcaaaaaagtccatcatgtcagctgctttaatatacctaaatggcattggtaggctctggagccagggtctgaaggaactgttgccccaatttcaacaggtgcccagcattcccaactttgtttaaacctaccaacatcttaaaatgggactttcctgtggttggtaacactttaagaggcggatggaaagctagctatatcgagtttgcacattcttaatcactttccagtatgagaagagagatttttacaattatataatagtcctagagtttgcagctggtaaaaccagaggctacatccagtattactgctaagagacattcttcatccaccaatgttgtacatgtatgaaaaatggtgtactgtatactttaacatggccccatactttgtattgggagagtacaataatgtaaatcctaaaagcaccactattttagcataataaaagaaagtccaaagagctcctatatagactactccagataacttcgcttctttgatacttgtagcttattgtaatttttttttaagaaattcaaggtcattattattgtacaaaataagcgctttgattaacacagctatatagtttttttaatttttaaaaaacctgtgggagacggtgatcttgtctttaaaacatgatagtccttttcagtataatgtcttacgattaaagacgttgcctttaatatctgttgggaaggaaatgtccagacttttcaaatctcttattatatggttccccttttttgtttacatagggaacaatgtttatagtcgtgtgtacagtgggggtctacaacaagaagtgtatattttcaaacaatttttttaatgatttaacaatttttggtaaatcattttccaggcttcctgcagcttgtagattctcactgtgaatccccttgctttgctcatgccataagtgtatttgcaatccccaaatataccaggtttagtatttttgccctgttagtggattgtttccaccatgtgtaacgttttggttgagatgttaaatggtgggacgagtactgtggatgtgaatgtgggaaagaatttttaatcaaaatgtaattggtcacaaggccctaatttgcagtaactattgcctgttttattaaacaatgccctgttgccttgtatgccattaatgtttggatgtaaagattgtgtgtcctatcccaacagggagcccacagtatttataattgacccaaccctaatgttacaactactttgaggtggcccaaatgtaaactaaaaagccttaattaaagtggtgcaattttgtataacttagcatcagtagttcaataaatttggattgccatgcaagggcttgcattataattacttgccacttgaatgtgttttgtgtaatgttttaacagtgctagtaaataaatacgggtttaccctggttttaaaaaaaaaaaaaaa

SEQ ID NO: 137254 - DNA, 1580 bp, Homo sapiens
ttagttacttcctagatataatgggggtacgggcattggataaacacactcattccagatgggagaaattggccaaaacaaaggggctacaggccccatgcaactcctaaatccagtggggcagccaaatcttaaaactccaaaatgatctcctttgactccaggtctcacatccaggacacgctgatgtaagaggtgggtttctacagccttgggaagctctgcccctgtggctttgcagggtacagctcccctcctggctgctttcacaggatggcattgagtgtttgtggcttttccaggtacacgatccaagctgtcagttggtctatcattctggggtctggaggatggtggccctcttctcacagctccactagtcccagtggggactctgtgtggaggctccaaccccacatttcccttctgcattgccctagcagaggttctccatgagggctctacccctgcagcacacctctgcctggatatccaggtgtttccatacatcctctgaaatctaggcagaggttcccaaacctcagttcttgacttctgtgtacccacaggtccaacaccacatgtaagcctccaatgcttggggcttacaccctctgaagcaatggtttcagctgtatattggccccttttagccacagatgggatgcagggcaccaagtcctgagactgcacaaagcagcaaggtcctgggcccagcccacaaaaccatattttcctcctaggcctctgggcctgcgatgggaggggctggcataagggtctctgacgtgccctgaaaacatttttcccgttgtcttggtgattaacatttggctccttgttatttatgcaaatttctgcaaccagcttgaatttctccccagaaaatgggtttttcttttctattgcactgtcatgctgcagatttccaatttttttatgctctgcttcccttttaaatataagttccaattccaaaccacatctgttattgctcaatctcaggtggctgaatgccacttgtccctctaagaagttgggggatgctgactgctcggggttcacgtaactagttagcatgccacagtcttgttcgttatcggaattaaacagacaaattactccatcaactaagaactgccatgcaggggaactgccctcttggcagcgctgcctgtcatggctaaagttaagtgaattccaatccccgtttatgcatctgctctcccagactgcaaggtccttgcctgcaggacatgtcttgttcagtgttgtaacttggagcacctgcacaatgccaggctccttgtttgaattaacccaaaatgtactttctgccttgttttgacctttcttttgccgagacatgatccccccatctccctgtcctctgatcattactaaactgctattgtattcaatatttagcccatttttttttctgttctccactgtttttgttaagctctggtggacaaactcttacatcatatgactatttttctttttagtgtactcgatcctacttccttcttttatatttaaaggcattagaaagacaccttttatgaaattcagtt

SEQ ID NO: 137255 - DNA, 550 bp, Homo sapiens
ctgcggcttaatttgacccaacacgggaaacctcacccggcccggacacggacaggattgacagattgatagctctttctcgattccgtgggtggtggtgcatggccgttcttagttggtggagcgatttgtctggttaattccgataacgaacgagactctggcatgctaactagttacgcgacccccgagcggtcggcgtcccccaacttcttagagggacaagtggcgttcagccacccgagattgagcaataacaggtctgtgatgcccttaaatgtccggggctgcacgcgcgctacactgactggctcagcgtgtgcctaccctacgccggcaggcgcgggtaacccgttgaaccccattcgtgatggggatcggggattgcaattattcccgtttgaggcgtcactactgtcactgccatcaccccacggagccacttctagaggggagtagacccgcccttcgcgggcagagaagatgtgcccctgccatcaagacgatgatacaaacacccccagtcattgttcgcagactcggctgttaa

SEQ ID NO: 137256 - DNA, 2201 bp, Homo sapiens
ttagggcctggacagtggccccgagtccggcctgagagcgcagcctgggctgctggcagggaagaggaagatgtctgtgctcaggcggatgatgcgggtttccaatcgctctctcctcgccttcatcttctttttctccctctcttcgtcctgtctgtacttcatctatgtggccccaggcatcgccaacacatatctctttatggtacaagctcgaggtataatgttgagagaaaatgtgaaaacaataggtcatatgatcaggctgtacacaaataaaaacagtacgctcaacggtacagattatcccgaaggcaataattcaagtgattatcttgttcaaacaacaacgtatctcccggaaaacttcacatactcaccatacctcccctgtccagaaaagctgccttatatgcgaggattcctcaatgtcaatgtaagcgaagtcagttttgatgaaattcatcaactcttctccaaggatttagatattgagccagggggtcattggaggccaaaagactgtaaacccagatggaaggtggcagttctcattcctttccgtaatcgccatgaacatcttccaatttttttcttacatctgattccaatgctccagaagcagcggctggaatttgcgttttatgtcgttgaacagactggcacacaaccttttaaccgtgcgatgcttttcaatgtgggcttcaaagaggccatgaaagacagtgtctgggactgtgtaatcttccacgatgtggatcatctacctgaaaatgaccggaactattacggatgtggagaaatgccacgtcattttgctgcaaagctggataaatacatgtatattcttccatataaagaattttttggtggtgtaagtgggctgacagtggaacaatttagaaagatcaatggttttcctaatgccttctgggggatggggaggagaagatgatgacctttgggaacagagttccactatgctggatattaatgttaaccagaccagagggagacttaggaaaatacaagtcaattcctcatcaccatagaggtgaagtccagtttttaggacggtataaattactaaggtattccaaggagcgtcagtacatcgatggactgaacaatttaatatataggccaaaaatactggttgataggttgtatacaaacatatctgtaaacctcatgccagagttagctccaatcgaagactattaaaagaagtggctgtcgtggcaaggtagaccacaatgctggatcataaacttggagcgcgctcttagtggaggtcagtgattggctgtgtcacagtgcccttttctctgagaagagccagcagtccacagtgtttacagagtgggactatatacagtcacccttctctcaccccgtcctccctgctttgagacacacccctgtggcgagcaccgcagaaaatgggaagccactacttaagatcggaagttaagagagctccctccgaagagaaaatttttatactaaaatctataatttaattcaagagaatgcttttatttccgtttaaacatattttgtatatatgtgatataaattaatgtgtgcaaattgtttaaaaattagatgtgttgcagttttgcatgtaatcggttatacctttattggacttttatagacattttttatttgcatgaaaaaaactcactaaatttacatcactaaacaaaggttaacccttgtgtgaaatgaaggaactgtcaataattgacagccaactaatacagtaaactgttatactagttttgagctttagacctcagccttttgtgtggaagaagtcacagccttcctaggccttaaaaggaaaaagaaggaaggaccttaaatagcttttcttcctaccgggattaccctatgtttttcccttgccttgccaatcctcatcctgattttgcctagaaatccacaacccatattgtttatgcatattgcatgagtattaccaagaaaaaaatctttaaaagttgtgatgtgacatgatataaaggatctctttatgttaaatgtctttccatgtacctctggtgtgtcagggattttgtgcctcaaaaaatgtttccaaggttgtgtgtttatactgtgtattttttttaaattcacggtgaacagcacttttattatttccagttcagaagagccaaaaaaaaaaaaaaaaa

SEQ ID NO: 137257 - DNA, 498 bp, Homo sapiens
atggggttacagagtgagttctccaaccaggtggccagagcttggggaggtataagagaacctcagggtggtggtagtgtacatttgaaaaagccccgcctttccaacttggacgcggcagaatggttcccgcaaagaagggtggcgagaagaaaacgggccgttgccatcaacgaagtggtaacccgagaatataccatcaacattcacaagcgcatccatggagtgggcttcaagaaacgtgcaccttgggcactcaaagagattcggaaatttgccatgaaggagatgggaactccagatgtgcgcattgacaccaggctcaacaaagctgtctgggccaaaggaataaggaatgtcctataccgaatccatgtgaggctgtccagaaaacgtaatgaggatgaagattcaccaaataagctatatactttggttacctatgtaactgttaccactttcaaaaatctacagacagtcaatgtggatgagaactaa

SEQ ID NO: 137258 - DNA, 363 bp, Homo sapiens
atgagacattacctcacacctgttaggatggctggtatcaaaaagtcaaaagagattaagcattggagaagatgtggagaaaggcgagcccttagacattgctggtgggaatggaaaacagtacagaggctccttgaaaaaatcaaaagcgacaactcagtggtggccactgcgcagaccagacttctctcgttctcgcacgcctcgctccgcttttcctccacaaccatgtctgacaaacccgatatggctgagatcgagaaattcgataagtcgaaactgaagaagacagagactcaagagaaaaatccactgccttccaaagaaacgactgaacaggagaagcaagcaggcaaatcgtag

SEQ ID NO: 137259 - DNA, 1602 bp, Homo sapiens
ctgtggagatccgcggaggccgacaggattcgttggctgccgtccccgctgctgtgcattggggatggaggttagggaatggagatttcctctaatgattcaaggctgtgcacgttgctccttaggaactcaaattgaggttaaaaacgacaaccaacatcagccatgaaagatccaagtcgcagcagtactagcccaagcatcatcaatgaagatgtgattattaacggtcattctcatgaagatgacaatccatttgcatgagtacatgtgggatgggaaaatggaaggaaggaatttcaacaggacaaataggaaggagggagttatggggaaggaaggatttatttgaaccgctgttttcccaaggaaattgcttggggaggaggggaaggaaggagccttgaattgggttttatttcccagcttcgagattcttccccaccaaactatgggaccaaatccaaggaccagttttaatgacccttgtttatccagtgatggctccttctcctgggaagatcttgtggtcaagagccaatctgaatccaaatgcaaaggagtttgttcctgggggtgaagtacggaaatatttgagtagacggggccctcttttggtggatgtagcacaatttccacactgtgaaggcagtattagaagacttaattgtaaaagctctcttggtcactgtgttacactttatgccattgcccaaagtttttgttagtccttgccatgccttaataaaagtgcctggagactggttacctaagtaaaaagctgccacacatttactgaaaataaaattggccccatggcttgatgtgaacaccgcagggatagaagccccaggctagttgtgaaccaccacccgaattatgagaaccttaaccttaccaaattgtctttttttgaggctaatctatcacttgttaatgtctaaactttaaaatcagtacatttaatttgagttccaactgttaaggcatatttctcaggacttaaattggattatgtcccccatcaaaaaggaatctcccattttctgaagggtctgttagttaatttgaggataatttgttaaaggccaaggtatgtccatattacctgaggctacaaggttaggtccagccagatggagtgcccagtcccagcctttttctgggtatgttaatggttagaaatattgagttcctaatgttaccatcctgaggaagtatggtaattttggaggaattggtaacctccctaagggggattccacctgccatccataggctatgccctgtatgggagtcctaaccatatgacccaatacccaaccccataatcccagctggaccaagatacttgtaacattatgatttgagtggtgccttttcccttgctttgtttacccatcacgagagtctgcagctacaacttttaacaaagctagaagggtttgtggcttcttaaacttcatatttgggtaggtataagctgccatacgtgttcagtgtgaatagtgtttaagttgaaaatattgtaaaaaaattatattttttcaaaaatatttaaaaaaataaataatagtagaactgaaaaaaaaaaaaaaaaaa

SEQ ID NO: 137260 - DNA, 707 bp, Homo sapiens
ccctaacactacttgaagtttcaacgacattcaatggaacaggtgcaacttgatcatcttctactgccaaagcatctgataatttaaagtctcgaggtacactctcagagtcggattcatggaggtttccattctggatttctttctttttattctttttcttttctgctttctttttatctgttttggtaggaataagcttttgttctcttttctgttttgcaagaacttcatcatataatgtttctttcatgaaaagccagaagaagaggaaaattactgtaataactattgaaggaataagaacaataaaatatgctgactcataaaactccatggtacttttgtcaatgtgatcctataaaactaagttttacatataatctccaggtttctggattccctgaagaatatgcacgggccccaggtttaaaatcctgctctatattgagagttttcattcctgccctatcttaaaagaactgtaatcccagctacttaggaggctgaggcaatgagaatcacttgaacccaggaggcaaagggttgcagcaagccaaggtcacaccactgcactccagcctgggtgacggaacgaaaatctaccctgtgcggccgggaaaggagaccgggaagacgcggcggcgccggcactacagcccgggccgcccgctccgaggcgccgccgccgccgccgccgccgccgc

SEQ ID NO: 137261 - DNA, 1227 bp, Homo sapiens
atggatttttccaaagtcccccctcatgctgctttccgtgcccaaccgcctcccgccctgacctggggactcgcaaagggcagcgggaggggcgccggggaagggggcgagcgcccagaccgccggaggcagcggcgaggactggaactccagcatggcgacccgcgggccggcgccgcctccccccgcgctccccgccgccggcgcccgtcccggtgcggcctgctctccctcaccctgtgcggccgggaaaggagaccgggaagacgcggcggcgccggcactacagcccgggccgcccgctccgaggcgccgccgccgccgccgccgccgccgcagtcgctcagaccgcgtcccccagctgggccgaaggtggacgctcaggggctggaggctcagcggaatcccctgcgttcagtagccccgctctcccctgtcccgaaggattactctgcccctcagcggttccagtgccctcaaagcaatctgtctctgaagtactggctatcttctgagcgtgtgccagaagatccagctttgttgaaaagcgaagccgttagtcccttaatacaaaggatcagggatagcagaaatgaaagtataatggaagcagctggaggattccaggtccactttcacccaagtaatggagacggaaggttcatcgaaacttcttcagctgcagatctagaagtcattagctattctagcaaagtatctgtcacagaaaggtgcttcataaaggctgccagtgaattggaaattaatggattaaatgaggacagagaaactagtatttgtgcatatgcactgtgccagcctactcaatatgaagaaggaggaaggactatgtcagtttctgaggctccaactacatacgtactcctgaagccagtgatggggtcagctcccttctgtgtcatatggactaaaagtgggaaagaggttattgcccaaaggaaaactggagtaatgttaccagagaaagagagaacagacaccaggccgccatcaagtacagacgagcactgtagcaagcagctgagtgaaatgcatctcatcttcataacagagcctgggctctcctttactggaatcagccaggtgctgtataaaatgcacaggaatctgacctaccagggctcaaaaccaagctctgagcccaattgttgtacaaccttgggccgctttgctgacatctctggaactcaagttcctcatatgtaa

SEQ ID NO: 137262 - DNA, 810 bp, Homo sapiens
ccagcatggccggcttccctctcctcctcaccctcctcactcactgtgcagggtcctgggcccagtctgtactgacgcagccaccctcagcgtctgggacccccgggcagagggtcacaatctcttgttctggagccagctccaacatcggcactaatgatgtatactggtaccagcaactcacaggaacggcccccaaactcctcatctataggaataatcagcggccctcaggggtccctgaccgattctctggctccaagtctggctcctcagcctccctggccatcagtggcctccagtccgaggatgaggctgattattactgtgcagcatgggatgacagcctcagtggtccggtgttcggcggagggaccaagctgaccgtcctaggtcagcccaaggctgccccctcggtcactctgttcccgccctcctctgaggagcttcaagccaacaaggccacactggtgtgtctcataagtgacttctacccgggagccgtgacagtggcctggaaggcagatagcagccccgtcaaggcgggagtggagaccaccacaccctccaaacaaagcaacaacaagtacgcggccagcagctatctgagcctgacgcctgagcagtggaagtcccacagaagctacagctgccaggtcacgcatgaagggagcaccgtggagaagacagtggcccctacagaatgttcataggttctaaaccctcacccccccacgggagactagagctgcaggatcccaggggaggggtctctcctcccaccccaaggcatcaagcccttctccctgc

SEQ ID NO: 137263 - DNA, 791 bp, Homo sapiens
gcctcagccatggcatggatccctctcttcctcggcgtccttgcttactgcacaggatccgtggcctcctatgagttgactcagccaccctcagtgtccgtgtccccaggacagacagccagcatcacctgctttggagataaattgggtgataaatattcttcgtggtatcagcagaagccgggccagtcccctctactggtcctgtatcaagataccaaccggccctcagggatccctgagcgattctctggctccaactctgggaacacagccactctgaccatcagcgagacccaggctatggatgagggtgactattactgtcaggcgtgggacagtaacactgtggtcttcggcggagggaccaagctgaccgtcctaagtcagcccaaggctgccccctcggtcactctgttcccgccctcctctgaggagcttcaagccaacaaggccacactggtgtgtctcataagtgacttctacccgggagccgtgacagtggcctggaaggcagatagcagccccgtcaaggcgggagtggagaccaccacaccctccaaacaaagcaacaacaagtacgcggccagcagctatctgagcctgacgcctgagcagtggaagtcccacagaagctacagctgccaggtcacgcatgaagggagcaccgtggagaagacagtggcccctacagaatgttcataggttctcaaccctcaccccccaccacgggagactagagctgcaggatcccaggggaggggtctctcctcccaccccaaggcatcaag

SEQ ID NO: 137264 - DNA, 2027 bp, Homo sapiens
cggcctcccgcgtcgacccacgcggccgcccacgcgttctggggtgtctccaccatggcctggaccccactcgggggtcctcttccctctcctcctccactgcacaggttccctctcgcaggctgtgctgactcagccgtcttccctctctgcatctcctgggagcctcggtcaagctcacctgcaccttgcgcagtgacatcaatgtaggttcccccttcatatactggtaccagcagaagccagggagtcctccccagtttctcctgaggtacaaatcagactcagataaccaacagggctctggagtccccagccgcttctctggatccaaagacgcttcggccaatgcagggattttactcatctctggcctccagtctgaggatgagggatgactattactgtcaggcgtgggacagcagcactgcacacagtgacacaggcagatgcggaatagtgggaagaccccctgtcaggcagtgctggcccctgctgctgctgggtctggccatggtcgcccatggcctgctgcgcccaatggttgcaccgcaaagcggggacccagaccctggagcctcagttggaagcagccgatccagcctgcggagcctgtggggcaggctcctgctccagcccagcccccagagagcagaccccaggtgctggccccgggggttttggtctgagcctcagtcactgtgttatgtcttcggaactgggaccaaggtcaccgtcctaggtcagcccaaggccaaccccactgtcactctgttcccgccctcctctgaggagctccaagccaacaaggccacactagtgtgtctgatcagtgacttctacccgggagctgtgacagtggcctggaaggcagatggcagccccgtcaaggcgggagtggagaccaccaaaccctccaaacagagcaacaacaagtacgcggccagcagctacctgagcctgacgcccgagcagtggaagtcccacagaagctacagctgccagctgcagtgggggctggggctaggggcatcccagggagggtttttgtatgagcctgtgtcacagtgtgtggtattcggcggagggaccaagctgaccgtcctaggtcagcccaaggctgccccctcggtcactctgttcccgccctcctctgaggagcttcaagccaacaaggccacactggtgtgtctcataagtgacttctacccgggagccgtgacagtggcctggaaggcagatagcagccccgtcaaggcgggagtggagaccaccacaccctccaaacaaagcaacaacaagtacgcggccagcagctacctgagcctgacgcctgagcagtggaagtcccacagaagctacagctgccagaaacctaaccacgcatcacacggcacttctcgcatgccttctgtgtctgctccagtctctgggctaaagagttgctggtccgggacaggggataggtccgctcttggtcagatgccaggtccctgccatggcatccctgaccctatgcaacaagccagtgactctggtcagcccaaggctgctcccctcgggtcactctgttccaaaccctcctctgaggagctttcaggccaacaagggccacactggtgtgtgtcataagtgacttcttacccgggaagccgtgacagtggcctggaaggcagatggcagcccggtcaagcggggagtggagaccaccacaccctcccaaacaaagcaacaacaagtacgcggccagcagctatctgagcctgacgcctgagcagtggaagtcccacagaagctacagctgccaggtcacgcatgaagggagcaccgtggagaagacagtggcccctacagaatgttcataggttctaaaccctcacccccccaccacggggagactagagctgcaggaatcccaggggaggggtctctcctcccaccccaaggcatcaagcccttctccctgcactcaataaaccctcaataaatattctcattgtacgatcagaaaaaaaaaaaaaaaaaaa

SEQ ID NO: 137265 - DNA, 959 bp, Homo sapiens
gtattcttactcctttatcttgttgcaatgcctgatccagctaagtccgctcccgccccgaagaagggctccaagaaggcggtgaccaaggcgcagaagaaggatggcaagaagcgtaaacgcagccgcaaggagagctactccgtatacgtttacaaggtgctgaagcaagtccaccccgacaccggcatctcctcccaaagccatggggatcatgaattcctttgtcaacgatatcttcgagcgtattcgccggcgaggcttcccgcctggctcattacaacaagcgttcgaccatcacctccagggagatccagacagccgtgcgcctgctgctgcctggggaactggccaagcacgccgtatttattgagaacctattaaattacagaaaatacttagtaaagagcagtgagaaagatagaaactatccctgtcctttacctggattgaaatctaaagtggatatttgtacaccttactgcctcctcctcctccctcagccccgccattacccgggtaaagataccaaagaggagacggaggattttcctaattcccctcccccaataaatcgggaagaagacaagagatatactacagttatgggaccctgtcttaggcaagcagcattagaaggggagctcctggcttgtcctgtgatggaagatcaacaggccaattgggtacatgagcctattactttcaacacttttaaggaaatcaggaaaagcattagagaaaatggacctgctagcccattcacaagaggattaattgaggtcatagcagattcatccgatcttgtggcctccacccagaaactgactcagcccaaggagacaccttcagctccctataatgacatctctgacctgaccaatcaggactcctggttcatcggcttcccccccatctggaatgctggggagactgatttgagtaacaataaaactacg

SEQ ID NO: 137266 - DNA, 674 bp, Homo sapiens; identical to SEQ ID NO: 137082

SEQ ID NO: 137267 - DNA, 502 bp, Homo sapiens
cgcgcccctcgagatcgtcgacattagtccgtgcggtggaattctcgatctgctgctcgtctcaggctcgtagttcgccttcaacatgccggaaccagcgaagtccgctcccgcgcccaagaagggctcgaagaaagccgtgactaaggcgcagaagaaggacggcaagaagcgcaagcgcagccgcaaggagagctactccgtatacgtgtacaaggtgctgaagcaggtccaccccgacaccggcatctcctctaaggccatgggaatcatgaactccttcgtcaacgacatcttcgaacgcatcgcgggtgaggcttcccgcctggcgcattacaacaagcgctcgaccatcacctccagggagatccagacggccgtgcgcctgctgctgcccggggagttggccaagcacgccgtgtccgagggcaccaaggccgtcaccaagtacaccagcgctaagtaaactttgccagggaggactttctctggaatttcctga

SEQ ID NO: 137268 - DNA, 490 bp, Homo sapiens
  misc_feature (1)...(490): n = a,t,c or g
gcagctacgggttttgagactttttgaagngcgttgnnattcggcacaactgagtgctgagctgctgcccgtcttcctgagcgaggctgtgggcgcctgtgcagtgcgggggctgctggcaggcagagtgccgccccaggggccctgggagctgcagggcatattgctgctgagccagaatgagctgtaccgccagatcctgctgctgatgcacctgctgccgcaagacctgctgctgctaaagccctgccagtcttcctactgctactgtcaggaggtgctggaccggctcatccaatgcgggctcctggttgctgaggagaccccaggctcccggccagcctgtgacacagggcgacagcgattgagcagaaagctgctgtggaaaccgagtggggactttactgatagtgacagtgatgacttcggagaggctgacggccggtacttcaggagttgggctacacagagcagctgttccagttcctgc

SEQ ID NO: 137269 - DNA, 500 bp, Homo sapiens
gccagatcctgctgctaatgcacctgctgccgcaaaacctgctgctgctaaagccctgccagtcttcctactgctactgtcaggaggtgctggaccggctcatccaatgcgggctcctggttgctgaggagagttgggctacacagagcagctgttccagttcctgcaggccaccgcccaggaagaagggatcttcgagtatacggacccaaagctcgccatcagtgctgtctggaccttcagagacctaggggttctgcagcagacgccgagccctgcaggccccaggctccacctgtcccctacttttgccagcctggacaatcaggaaaaactagaacagttcatccggcagttcatttgtagctagaactgtgaggaggagcctgtgctgagacttctcagccccagaacacagctgtgtcctagagccagaagatggagaggaggctgcaaacccttagctgctctataaatataatcattgaggcttgattgtc

SEQ ID NO: 137270 - DNA, 577 bp, Homo sapiens
  misc_feature (1)...(577): n = a,t,c or g
tttttttttttttttttgctgtggaaaccgagtggggactttactgatagtgacagtgatgacttcggagagggctgacggccggtacttcagggtgtgtttcaaaaagctgccccctgcanggaggtggtagggaggcggtggggagctgcactcaccccggcctgtcccctccagctcagccagcagtcacactgcccagatttctttcttttcctctgccgcctgctcagcccgctgctcaaggcctttgcacaggctgccgccttcctccgccagggccagctgcccgatactgggtgaagcccttgttcccttgcagtcctcgaggcaggctgtgtctgtggctggggtgccaggtctaaggtcttctctcttcagcagagttgggctacacagagcagctgttccaagttcctgcaggccaccgcccagggaagaagggatttttcggtgagtccccaaccagtcagcccaggctcctagagccttcacttctctcttctttccagagtgtgcggacccaaagctcgccatcagatgctgtctggaccttcagagaccttgagaaagacag

SEQ ID NO: 137271 - DNA, 2640 bp, Homo sapiens
gcccaggtgttctgagcacagccaccttcagagaatctggcctgagtccctgctcgaagctcaagcacccggggcctcgcggccgcctgcagtactcccctcccaccgcgggccagggccgactggaaaacggagcaggccatccccagagcacgggtcccgtggccacgttgagtgtcgcagagtacgggacgcagggcggggcttctggaccagcgcgcatcccaattggctctcggggctgccttttagccggacgcgcggaggctagcctgtggtcgtcaggctttgggatgaagctggaggctgtcactccattcctgggcaagtatcgcccctttgtgggtcgctgttgccagacctgcacccccaagagctgggagtccctcttccacagaagcataacggacctaggcttctgcaatgtgatcctggtgaaggaggagaacacaaggctgttcagctgggcgctgctgagggttctgaaactgctgttcctgaatgtgcagctccacaagggtcagatgaagatggtccagaaggccgcccagcaggtggggcaggttggcacttccctctggctctccccggagcagggcttgccgcttgtcctcctctctactcacaaaaccctcctggatgggatcctgctgccctttatgctgctctcccagggcctgggtgtgcttcgtgtggcctgggactcccgcgcctgctcccctgccctcagagctctgctgaggaagcttggggggcttttcctgcccccagaggccagcctctccctggacagctctgaggggctccttgccagggctgtggtccaggcggtcatagagcagctgctggttagtgggcagcccctgctcatcttcctggaggaacctcctggggctctggggccacggctgtcagccctgggccaggcttgggtggggtttgtggtgcaggcagtccaggtgggcatcgtcccagatgctctgctggtaccagtggccgtcacctatgacctggttccggatgcaccgtgtgacatagaccatgcctcggcccccctggggctgtggacaggagctctggctgtcctacgtagcttgtggagccgctggggctgcagccaccggatctgctcccgggtgcacctagctcagcccttttccctgcaggaatacatcgtcagtgccagaagctgctggggcggcagacagaccctggagcagctactgcagcccatcgtgctgggccaatgtactgctgtcccagacactgagaaggagcaggagtggacccccataactgggcctctcctggccctcaaggaagaggaccagctcctggtcaggagactgagctgtcatgtcctgagtgccagtgtagggagctctgcggtgatgagcacggccattatggcaacgctgctgctcttcaagcatcagaagggtgtgttcctgtcgcagctcctgggggagttctcctggctgacggaggagatactagtgcgtggctttgatgtaggcttctctgggcagctgcggagcctgctgcagcactcactgagcctgctgcgggcgcacgtggccctgctgcgcatccgtcagggtgacttgctggtggtgccgcagcctggcccaggcctcacacacctggcacaactgagtgctgagctgctgcccgtcttcctgagcgaggctgtgggcgcctgtgcagtgcgggggctgctggcaggcagagtgccgccccaggggccctgggagctgcagggcatattgctgctgagccagaatgagctgtaccgccagatcctgctgctgatgcacctgctgccgcaagacctgctgctgctaaagccctgccagtcttcctactgctactgtcaggaggtgctggaccggctcatccaatgcgggctcctggttgctgaggagaccccaggctcccggccagcctgtgacacagggcgacagcgattgagcagaaagctgctgtggaaaccgagtggggactttactgatagtgacagtgatgacttcggagaggctgacggccggtacttcaggctcagccagcagtcacactgcccagatttctttcttttcctctgccgcctgctcagcccgctgctcaaggcctttgcacaggctgccgccttcctccgccagggccagctgcccgatactgagttgggctacacagagcagctgttccagttcctgcaggccaccgcccaggaagaagggatcttcgagtgtgcggacccaaagcttcgccatcaagtgctgtctggaccttcagagacctaggggttctgcagcagacgccggagccctgcaggccccaggctccacctgggtcccctacttttgccagccttggacaatcaggaaaaacttagaacagttcatccggcaggttccttggtaggctagaacctgtgaggaggagcctgtgctgagacttctcagcccgcagaacacagctgtgtcctagagccagaagatggagaggaggctgcaaacccttagctgctctataaatataatcattgaggcttgattgtcccttgccatctcttgctttttcccttctttgatgtgataaacaaggggacgagacgagttgtcttttccccagcccagcagc

SEQ ID NO: 137272 - DNA, 1000 bp, Homo sapiens
  misc_feature (1)...(1000): n = a,t,c or g
tgagaatgggagggccnaannttttngagnacattcgtagatcactagtcagtgcggtggaattccgcggagccgacatgtgtctgcgcctcggaggcctgagtgtgggcgacttccggaaggtgctgatgaagacaggcctggtgctggtggtgctgggccatgtgagcttcatcacagctgccctgttccatggcacagtgctgcgctacgtgggcacccctcaagatgcggtggctctgcagtactgcgtggtcaacatcctctctgtcacttccgccatcgtggtcatcacttcaggcatcgcagccatcgtgttgtcacgctacctccctagcacccccctgcgctggacagtgtttagctcgagcgtggcctgtgctctcctttctctgcacctgtgccctcggcctcttggcctccatcgccatgacctttgccacccagggcaaggcactgctggctgcctgcacttttgggagctctgaactactggccctcgcaccttactgtcccttcgaccccacacgcatttatagctccagcctgtgcctctggggcatcgccctaaggtgctctgcgtgggcggagaacgtgtttgctgtacgctgtgctcagctcacccaccagctgctggagctgaggcccctggtgggggaaaaagcagcccacccacatgatgcgggagaacccagagctggtggagggcccgtgacctgctgagctgcacccagctctgaggcctctgaccctctgcagagatgatgtcctgcccaggccccgatggccaacttaggaccctgcaagcaactctgctctgtgacccaggcccaggattcctgggagctggcctgagagggctcaaatggaccctcgggggacccaagtggggcttttcaaccctcttcccccaccaccccagcccacttgcacttgaaaattgagactttattctgaaattattaaaaagaacagagatgcaaaaaaaaaaaaaaaaaaa

SEQ ID NO: 137273 - DNA, 437 bp, Homo sapiens
tttcgtcggggataccgctacgtgattctggatatccccctgctgtttgagaccaagaagttgctcaagtacatgaagcacaccgtggtagtatactgcgaccgggacacacagctggcacggctgatgcggcggaacagcctgaaccgcaaggcccgcatggcccgccatgtcctagacaactcgggcgagtggagtgtcaccaaacgccaggtcatcctcttgcacactgagctggagcgctccctggagtacctgccgctgaggtttggggtcctcacagggctcgctgccattgccagcctcctctacctgctcacccactaccttctgccttacgcctagtggggcactcaaggcagggagccccaggcctccatctatctccttggaggctgaagccaggtaacacatcctgtttcctctcagccccctcc

SEQ ID NO: 137274 - DNA, 1357 bp, Homo sapiens
tggcatgatgggagttgtagttcgatgctggtttagggtttcaggcgtggaggttccaaaatccgaggtttgctttcagcctgcccttgccagtgcctgggccgctgggagccgttattggctgccgttaaggaccgttacgtttcccgggtccttctggcactcctctggtggaccgcccccatcggccacacttgccctgctctccagtgattctgtagctcctggctccgtagtctcgcggacagctctctttcctggaagatgtttctggtgggcctgacagggggcattgcctcaggcaagagctcagtgatccaggtgttccagcagctgggctgtgcggtgattgacgtggacgtgacggcccggcacgtcgtgcagccaggataccctgcccaccggcgcatcgtagaggtcttcggcactgaggtcttgctggagaacggcgacataaatcgcaaggtcctgggggacctgatctttaaccagcctgaccggcgggagtctgctcaacgccatcacccaccccgagattcgcaaggagatgatgaaggagacgttcaagtacttcctccggggataccgctacgtgattctggatatccccctgctgtttgagaccaagaagttgctcaagtacatgaagcacaccgtggtagtatactgcgaccgggacacacagctggcacggctgatgcggcggaacagcctgaaccgcaaggacgcagaggcccgcatcaatgcccagctgtccctgacagacaaggcccgcatggcccgccatgtcctagacaactcgggcgagtggagtgtcaccaaacgccaggtcatcctcttgcacactgagctggagcgctccctggagtacctgccgctgaggtttggggtcctcacagggctcgctgccattgccagcctcctctacctgctcacccactaccttctgccttacgcctacaccgcctccgccatcccaccctcgggcgctgcctcccgcgggccgggcgcccggtgctcggcgatccggaagagggcgcccgcccggcccacgtccgccgtgtccccgcccggcgcgccgcgctcgccagcccgcgggctccgcgccatcgatcgggccgcagggacccggaatctcaatgccacgctgcccccgcccgggccgcccgcgccgccctcgccgccctcgccgccctcctccattacactgcacgtttttcatcagctccagccagacatcacccgtggccgcgagggaacagattttcaatgggaaaagttccccgggagggtccttgttgctgattcccgccgcgccctgcgctgtctggcccctgcccccacctggcttgtctga

SEQ ID NO: 137275 - DNA, 2047 bp, Homo sapiens
gacgcccttgttcctgagaaagggcactgctgatggttctgccaggacaacagtcatacacttgggttttaccaaaggaaaacaaagatgtgtggaaacccaagcggctgcagtagcgggagatgttggcagaacagcagctggaggacgtgtggggaaggagagtggagtcattagcagtgatgaccgaccagggctccctgttggccagagccaaccagaaggaggagagcaagaagccacggacactgtcagcgtccatgccacaacctcacaggcatggccagggggagcggacagcaaagagctgagctctaaggcggaagaaagggagactggaaaggatcagcagacagagctgcccctgtgcttgcccctgagggacttcccggactccgctccggtcatgtcctcagactcgggacatgcgacggagtctctccaccttgcatccagcgattccaagcccccaatgcccacacccaacgagggccctggaagcaccgtgggacatgcgggccctccgaggacagtgaaggctgacctatgtacagaaccccagctggctttgagagggctccaggtgtctttgccgcgtctacacctggttggtgttatctatgcagaacaccaggcctctggactggaaggctgtggtcatgctggttcttgcagccctgatggctcccctcgggctcctggtgccacgttgtgcctgtccaagccactcagcttcaggacgaagaggtgtttgccctgctggctccctgcaagtgctcctgtgggcatccccggtgctcctgttcacatccctggtgctcctgtgtgcatccccggtgctcctgcatgcatctctaatgctcctgttcacatccctggtgctcctgtgggcatccccggtgctcctgtgtgcatccctggtgctgctgtgtgcgtccccaatactcctatgtgcatccccagtgctcctatgtgcatccccaatactcctgtgtgcatccccaatactcctgtgtgcatccccaatactcctgtgtgcatccccggtgctgctgtgtgcattcttggtgctcccgtgctcatccttggtgctcctcctgtgtgcatcctggtgctcccgagtgctatttggggtgtggtctcactcaggcagaccgcctggagcctgcagtcctggatgctggccttcaagagccactctttgctttatgtggccaggctttgcctagctgatggttcctgggacttgagcttagcaaggtggctgtggacagggacctgggccgtctccctggtctggggtcatccccgtgccagaagccagctcatggagattggggccaaacaggaacagtggcccacgctggctcctgcatcctccacctcagtcaccctgggccccttcctgcaggcacatcatgtgcttatgtctctcccacttaaacagcacattaaaaaattctctcgagttggcaccaagtcagacaaggggagacagcccaggggcccacgggctggaggaggccccagtccagctgctgaaaccctggtgctccaggacgtctggtggccaacgtgggctgacattgaccccgcctggcttgcttactgtggcctgagcttcctgggcatgcgacagaatgacctgacattccctgatgtctatgcccaagaaggggctggatggacccctgggtcccttcccagtgacagaaagaggcaccaaaccccagagcacagccagcctctagcatggggcacagagcatctggcgcagacacagcggctggtgggcatccggggctggcaagtcaggactcagcctcttacggccaaagtgcctcctccgccagaagccaagctgttcagttgctgtgtattgcccacatggcagagaggcactgaggcatggcgtccacattgtgacactgtgtgctccaggaacgtcagtgatgagctcaaggtcaccaagcccagcaagagactgcaagacctggacctggtgctgtcttcaagctctccttatgtcatagttgttgactggtga

SEQ ID NO: 137276 - DNA, 408 bp, Homo sapiens
cttgtgtcgcatctgtcagatagccgggggttccccaagcaaccccctcctggagccttgcggctgtgtgggaagcctgcagtttgttcatcaagagtgcctgaaaaagtggctgaaagtgaaaataacatcaggagcagatcttggtgccgcgaagacctgtgagatgtgtaagcaaggcctgctggttgacctgggtgactttaacatgattgagttctaccagaagcaccagcaatctcaggcacaaaacgagctgatgaattcaggcttgtacctggtgctgctgcttcacctctatgagcagaggtttgcagaactcatgaggctcaaccacaaccaggtggaaagagagagggaagaagttgcaaggagcaagctgggaaccagagcaaaaagcagcaggag

SEQ ID NO: 137277 - DNA, 406 bp, Homo sapiens
tttttttttttttttccaaaaaggatgggattttattggtcgctcgctcctttggcgctagaaggggcagccccagtgcaggggccacgctgtcccatcttcctgctcccccgaacaccacgccgcctggtattgttcttggtgtggcctttggcccctttcctgtccacctgccttccggaagcccgaagtcccctctccccgactgcgctgtgctgtgtgccttgcaagagtgacttaccacatgaggtaaatcctactgggccttctggggccctgaaggcacaacacaggggtctcaaccggagtggggcaggaaatggggaagtagcacagcacggcgtgggactcgggcacggggtccggggaggtggaagcggtgctttgtgaaggagggaacggtaac

SEQ ID NO: 137278 - DNA, 3006 bp, Homo sapiens
atggcagtcttccaggctgctataagagagatagatacctctaggatcaaattggatcacaacactcctttattaaacattcttcagtggtttcccattgtctttgggatcaaattcagataccttcgcaagagttctagtgaggaggatgctctaactgaaccaaggtcatctatcaagatatctgcatttaagtgtgactccaaacttccagcaattgaccaaacatcagtcaagcagaaacataaaagtaccatgactgtaaggaaagcagagaaagtggaccccagcgaaccctctccaggtggcagcagcaagcaccccctgttctgtgttgaatacaccccttactgctccgtctttgctttctcccctgtcctgcagcccaataccaattactgctgcctcctcctgccactagtgccacctgcctccccagtggcccaggaacctcctgactgtcctctccctctggttaccgttccctccttcacaagcaccgcttccacctccccggaccccgtgcccgagtcccccgccgtgctgtgctacttccccatctcctgccccactccggctgagacccctgtgctgtgccttcagggccccagaaggcccagtaggatttacctcatgtgcagaccaagcaccaatggttttattaagaaagaggaagccaaacctgaggagatttacagtcagcccagaatcgcacagcccgagagcatctggggacagaagcagacagaaacagcagtggcctgcaaaggtgccggttcccaggggagcaggtcttgtctgttgcatttaaagggcaattttgcacttggtgctagaggcctttcatccatgggcccttttactggaacgataaatgtgtcttttctcaatgcagatcaagtagttcaacaagaaggcctgatgtgtaacactaagctgaagaggccaaatcaagagagaagaaacttggtcccatcgtcacagccaatgactgagaacgcccctgatagagccaaaaaaggagacccgagtgctccttcccagagtgagctgcatccagccctgtcccaggccttccaaggaaaaaatagtcctcaagtattgagtgagttctcggggccaccactcacacccaccactgtaggagggccaagaaaggcatcatttaggttccgagatgaagacttttattccattttgtcattgaacagcagaagagaaagcgatgacactgaagaggaaacccagtctgaagaatgtctgtgggttggtgtgcgctcaccctgttctccttcccatcacaaaagaagtagatttggggggacatcgacccctcaggccaaaaataaaaattttgaagaaaatgctgaaaattgcagaggtcattcttcaagaagaagtgagcccagtcatggctcattgagaataagcaatgcaatggagccagcaacagagcggccttctgctgggcaaaggttgtcccaagaccccgggctgcctgatagggaatctgctacagagaaggacagaggtggcagtgaaaatgcgaaaaagagccctctttcgtgggacaccaaatccgagcccagacaagaggttggtgtcaatgctgaaaatgtatggagtgattgtatttctgtggaacataggcctggcacccatgattctgaaggatactggaaagactatttaaacagttctcaaaattctcttgactactttatttctggcagaccaatatctccaagatcatcagtgaattcatcctataaccctcctgcatcattcatgcattctgctctgagagatgatattccagtagacttgtcaatgtcatcgacttcagttcacagctcagactcagagggaaactcagggtttcatgtttgccaaccactgtctcccattagaaataggactccatttgccagtgccgaaaaccataattatttcccagtaaacagtgcacacgaatttgctgtcagggaagcagaagatactactttaacaagccagcctcagggggctccactatatacagatctcttactaaatccacagggcaatttgtccttagtggattcttccagctcctctccatcaagaatgaactcagaaggccatttgcatgtgtctgggtctctgcaagaaaatacaccatttactttctttgcagtgtctcatttcccaaatcaaaatgataatgggagcaggatggcagcctctggtttcacagatgaaaaggaaaccagtaagataaaggcagaccctgagaaactcaagaaattgcaagaaagtctcctggaggaggactccgaggaggagggagacttgtgtcgcatctgtcagatagccgggggttccccaagcaaccccctcctggagccttgcggctgtgtgggaagcctgcagtttgttcatcaagagtgcctgaaaaagtggctgaaagtgaaaataacatcaggagcagatcttggtgccgtgaagacctgtgagatgtgtaagcaaggcctgctggttgacctgggtgactttaacatgattgagttctaccagaagcaccagcaatctcagataaagactgaagcaactgttgttgaacacaaagatatctacaacgtcactgaaactcagctcgtccccgaggcgcgttctgtacttctggtgggagcagggcagatgctgctcacaggtgctaacagggcactgaactcggattattctagtatgaggcccaaggtcaaggcacaaaacgagctgatgaattcaggcttgtacctggtgctgctgcttcacctctatgagcagaggtttgcagaactcatgaggctcaaccacaaccaggtggaaagagagagggttagagtcactagggtcttggggggcctctcccccaatgtttcttgtggtgttgtgtctggagttggttccttccagtgggttcgtggtctcactgacctcaagaatgaagcctcggaccttcacgctcaaataccggctgaatga

SEQ ID NO: 137279 - DNA, 597 bp, Homo sapiens
atgatagctgcttttaatcctggcaaagtggatactgttaccaccaatggccctttcattgacctcaactacatggtctacatgttccattatgatcccacccatggcaagttccatgatgtccccatgtttgtgatgggcatgaaccataagcatgaaaacaaactcacagtcatcagcaatgcctcctgtaccaccaactgcttagatcccctggccaaggtcattcatgacaactttggcatcagggagggactcatgaccacagtccacagcatcattgccacccagaagactgtggatggcccctccaggaaactctggcatgacagccatggggctttccagaacaccattcctgcatctactggtgctgccaaacatcaaaaaggtggtgaggcaggcacccaaggacccctcaagggcatcctgggctatactgagcaccaggttgtccctttggaatttaaaagcaatacccgcccttccacctttgaagctggggctggcattgccgtcaatgaccactttgtcaagctcatttcctggtatggcaatgaatttgcctacagtaacaaggtcattaaacctatgtga

SEQ ID NO: 137280 - DNA, 434 bp, Homo sapiens
cggccgctctagggaagggaccatggagctccgaactaccccctcaactgaaaaatggtggggcagggccgcggcaaatggaaaacccggggggtgggatggaaaaaggacggtccggaaatgggacctttgaacagcagaccctacaacctgctgcccttccctgtccctttccaccccccacccaccctccagaggtcagtgttctgggacatttggggacccttctttgactagagtttggatctggctgggtaggattactatacacttggggcaggcccaggctcctccaaactgagggattatgagggtggtgatggtccctgttaaggactattgtgtgcttgcaagttggcatgtacccatgtgccagcattgcttaatttgtttgccaatagctgttatttgtgaaatacactgggaagccatta

SEQ ID NO: 137281 - DNA, 2466 bp, Homo sapiens
  misc_feature (1)...(2466): n = a,t,c or g
atgtcggtctgctaccgtcccccagggaacgagacactgctgagctggaagacttcgcgggccacaggcacagccttcctgctgctggcggcgctgctggggctgcctggcaacggcttcgtggtgtggagcttggcgggctggcggcctgcacgggggcgaccgctggcggccacgcttgtgctgcacctggcgctggccgacggcgcggtgctgctgctcacgccgctctttgtggccttcctgacccggcaggcctggccgctgggccaggcgggctgcaaggcggtgtactacgtgtgcgcgctcagcatgtacgccagcgtgctgctcaccggcctgctcagcctgcagcgctgcctcgcagtcacccgccccttcctggcgcctcggctgcgcagcccggccctggcccgccgcctgctgctggcggtctggctggccgccctgttgctcgccgtcccggccgccgtctaccgccacctgtggagggaccgcgtatgccagctgtgccacccgtcgccggtccacgccgccgcccacctgagcctggagactctgaccgctttcgtgcttcctttcgggctgatgctcggctgctacagcgtgacgctggcacggctgcggggcgcccgctggggctccgggcggcacggggcgcgggtgggccggctggtgagcgccatcgtgcttgccttcggcttgctctgggccccctaccacgcagtcaaccttctgcaggcggtcgcagcgctggctccaccggaaggggccttggcgaagctgggcggagccggccaggcggcgcgagcgggaactacggccttggccttcttcagttctagcgtcaacccggtgctctacgtcttcaccgctggagatctgctgccccgggcaggtccccgtttcctcacgcggctcttcgaaggctctggggaggcccgagggggcggccgctctagggaagggaccatggagctccgaactacccctcagctgaaagtggtggggcagggccgcggcaatggagacccggggggtgggatggagaaggacggtccggaatgggacctttgacagcagaccctacaacctgctgcccttccctgtccctttccaccccccacccaccctccagaggtcctcccgacggccatgaacactacatcttctgcagcacccccctcactaggtgtagagttcatctctctgctggctatcatcctgctgtcagtggcgctggctgtggggcttcccggcaacagctttgtggtgtggagtatcctgaaaaggatgcagaagcgctctgtcactgccctgatggtgctgaacctggccctggccgacctggccgtattgctcactgctccctttttccttcacttcctggcccaaggcacctggagttttggactggctggttgccgcctgtgtcactatgtctgcggagtcagcatgtacgccagcgtcctgcttatcacggccatgagtctagaccgctcactggcggtggcccgcccctttgtgtcccagaagctacgcaccaaggcgatggcccggcgggtgctggcaggcatctgggtgttgtcctttctgctggccacacccgtcctcgcgtaccgcacagtagtgccctggaaaacgaacatgagcctgtgcttcccgcggtaccccagcgaagggcaccgggccttccatctaatcttcgaggctgtcacgggcttcctgctgcccttcctggctgtggtggccagctactcggacatagggcgtcggctacaggcccggcgcttccgccgcagccgccgcaccggccgcctggtggtgctcatcatcctgaccttcgccgccttctggctgccctaccacgtggtgaacctggctgaggcgggccgcgcgctggccggccaggccgccgggttagggctcgtggggaagcggctgagcctggcccgcaacgtgctcatcgcactcgccttcctgagcagcagcgtgaaccccgtgctgctacgcgtgcgccggcggcgggcctgctgcgctcggcgggcgtgggctttttctgccaagctgctggagggcaacgggttccgaggcgtccagcacgcncccgcgggggcagcctgggccagaccgtttaagagcggccccgccgctctggagcccggcccttcggagagcctcactgcctccagccctctcaagttaaaacgaactgaactagggcttggtgaaaggaggcgcactttcctcctggcagaatgctagctctgagccagttcagtacctggaggaggagcaggggcgtggagggcgtggagggcgtgggagcgtgggaggcgggagtggagtggaagaagagggagaggtggagcaaagtgagggccgagtgagagcgtgctccagcctggctcccacaggcagctttaaccattaaaacttgaagtctgaaatttggtcaaaaaaaat

SEQ ID NO: 137282 - DNA, 7302 bp, Homo sapiens
atgaccactgcagctgcatttctattttggaatcacactctccgtgacctgtgtgagtcacagctaccagaaaacaaagacagcaaagaagatgtgtttaacacagcccctgctggtaaccaaggtcctcctccaatgacgggtatgaatatgaacaacagagcaactatacctggcccaccagtgggtcctggtcctgccatgggaccagaaggagccgcaaatatgggaactccaatgatgccagataatggagcagtgtgctgggattacaggcatgagccaccgcacctggccaaggaagacactttagatggtgccagagttgaggatttggcctgcgacttattgcagttgccgcactgcagtttccacactgtggccttagaagagtcttatccagacctgaaatcccagtgccttggaaacatcaggactggtcagaaggacatctatatgtctccacaggtgagtgcctttagggctttttctttgacagtgaccttggacagtctggggtgtggctgtagagcatgctgggtagggtcttttggctttgcttctgtagccctaatgcacttctgccagcaggttttatattgggtgtgtggtttgacctacaagccagtagatggcgccatggtccaggtttgggacaatgccggcagcgtttccctgtgtctttcccccacaaagtctccaagtctctcctcaaatgagctccaaggcttgggagaaacaatctcttcctctgcccgggttgcgtggatctccagtggaaaggaaagcctgtattattttggagaaaggcgaacagataaaacgcacagcagtaaatttcagggactagaaactccttctcaggtgagcaaggcagaggggattctccttctagtaaaggcagcactgaaaaatggagaaacagcagagcaattgcaaaagatgatgacagagttttacagactgatacctcacaaaggcacaatgcccaaagaagtgaacctgggactattggctaagaaagcagacctctgccagctaataagagacatggttaatgtctgtgaaactaatttgtccaaacccaacccaccatccctggccaaataccgagctttgaggtgcaaaattgagcatgttgaacagaatactgaagaatttctcagggttagaaaagaggttttgcagaatcatcacagtaacaacaaacatgatggaccacctgctcagatgagcccttgctgggtgtcagcacccctgagggtcaccgtggctgagtctgtgcccagcttctcagtttggaaaccccattgcatgcttgttctcaagcatgggactgactcttttgacctggtggttcattccattgcagcagttcctcttcgtcagcttggcacagcccttagaacaaatggtggcttttcttctaattcttacagtaagagcccagtggatgtcttgcagatatttagagttggcagagtgaatgaaaccacagagtttttgagcaaacttggtaatgtgaggcccttgttgcatggttctcctgtacaaaacatcgtgggaatcttgtgtcgagggttgcttttacccaaagtagtggaagatcgtggtgtgcaaagaacagacgtcggaaaccttggaagtgggatttatttcagtgattcgctcagtacaagtatcaagtactcacacccgggagagacagatggcaccagactcctgctcatttgtgacgtagccctcggaaagtgtatggacttacatgagaaggacttttccttaactgaagcaccaccaggctacgacagtgtgcatggagtttcgcaaacagcctctgtcaccacagactttgaggatgatgaatttgttgtctataaaaccaatcaggttaaaatgaaatatattattaaattttccatgcctggagatcagataaaggactttcatcctagtgatcatactgaattagaggaatacagacctgagttttcaaatttttcaaaggttgaagattaccagttaccagatgccaaaacttccagcagcaccaaggccggcctccaggatgcctctgggaacttggttcctctggaggatgtccacatcaaagggagaatcatagacactgtagcccagattaaagagaaggaagaagcccagcaagagtacctagaagccgtgacccagggccatggcgcttacctgatgagtcaggatgctccggttagtgtaggggttgaagagttgagtttgagttctgctgttgttatcattactctctgttgttattattactctccgtctcaaattcctccagtggtggactgccactacctgtgcctcttgggttctggatccggaacaattctcactgaggttcattctctgcccccagctttcagcagactctgcacactgtccgacagagctctggaagtgagagtttgctgcccttcccccagcagctggaggcttttgcttcatgtggggaaaggatccagggaagtggccccagcacctcccacacacctgctccacggagaggtgctccccttggtctcctgccctgctcagcctttccagtgggcccagtggaaggctgtggggatatggggaaacgcctgcaagagaatgcaaactccccttgggtcaggagctcccaattcttctaaaccagacgtttttactgtaagtgttggaaacttaccccctaaggctaaggttcttataaaaattacctacatcacagaactcagcatcctgggcactgttggtgtctttttcatgcccgccaccgtagcaccctggcaacaggacaaggctttgaatgaaaaccttcagcgcacagactgcaaagctgtcattagcaccatggaaggcagctccttagacagcagtggattttctctccacatcggtttgtctgctgcctatctcccaagaatgtgggttgaaaaacatccagaaaaagaaagcgaggcttgcatgcttgtctttcaacccgatctcgatgtcgacctccctgacctagccagtgagagcgaagtgattatttgtcttgactgctccagttccatggagggtgtgacattcttgcaagccaagcaaatcgccttgcatgcgctgtccttggtgggtgagaagcagaaagtaaatattatccagttcggcacagatgtgtcaatgatgacagcaaatggtgactgcatccaacaaggagaacataatctttcacttcatttcctccagtctgccacacctaccatggggaacacagacttctggaaaacactccgatatcttagcttattgtaccctgctcgagggtcacggaacatcctcctggtgtctgatgggcacctccaggatgagagcctgacattacagctcgtgaagaggagccgcccgcacaccaggttattcgcctgcggtatcggatttcaagaggtagactttattcactctttgccagctctaggcctttgggatcagattcagatagaagaccaaatgaccaggctatgttctccgagttgccactctgtctccgtcaaatggcagcaactcaatccagatgtgcccgaggccctgcaggccccagcccaggtgccgtccttgtttctcaatgatcgactccttgtctatggattcattcctcactgcacacaggcaactctgtgtgcactaattcaagagaaagaatttcgtacaatggtgtcgactactgagcttcagaagacaactggaactatgatccacaagctggcagcccgagctctaatcagagattatgaagatggcattcttcacgaaaatgaaaccagtcatgagatgaaaaaacaaaccttgaaatctctgattattaaactcagtaaagaaaactctctcataacacaatttacaagctttgtggcagttgagaaaagggatgagaatgagtcgccttttcctgatattccaaaagtttctgaacttattgccaaagaagatgtagacttcctgccctacatgagctggcagggggagccccaagaagccgtcaggaaccaggggtccccaacccccagtccctggcctgttaggaaccaggctgcacagcaggaggtgaggggcagtgagggagcattaccgcctgagctcgcctcctgtcacgtcagcagcggcagtagattctcatgggagccccgaacctgttgtgaactgtgcatatggaacatgtggaatactttcatcccaaaaccatctgccccacccctgtccatggaaaaattgccttccatgaaaccagtccccactgccataaaggttggggaccacaccttaggtgatcaagatgtgagtatgtggttaagcaaaataagcaattgtgaacttgaagggaaagaggaagcaacatcctctgagtggccagaattacgtttatccaaacgaaaacataggaaaattccattttccaaaagaaaaatggaattatctcagccagaagtttctgaagattttgaagaggatggcttaggtgtactaccagctttcacatcaaatttggaacgtggaggtgtggaaaagctattggatttaagttggacagagtcatgtaaaccaacagcaactgaaccactatttaagaaagtcagtccatgggaaacatctacttctagcttttttcctattttggctccggccgttggttcctatcttcccccgactgcccgcgctcacagtcctgcttccttgtcttttgcctcatatcgtcaggtagctagtttcggttcagctgctcctcccagacagtttgatgcatctcaattcagccaaggccctgtgcctggcacttgtgctgactggatcccacagtcggcgtcttgtcccacaggacctccccagaacccaccttcttcaccctattgtggcattgttttttcagggagctcattaagctctgcacagtctgctccactgcaacatcctggaggctttactaccaggccttctgctggcaccttccctgagctggattctccccagcttcatttctctcttcctacagaccctgatcccatcagaggttttgggtcttatcatccctctgcttcctctccttttcattttcaaccttccgcagcctctttgactgccaaccttaggctgccaatggcctctgctttacctgaggctctttgcagtcagtcccggactaccccagtagatctctgtcttctagaagaatcagtaggcagtctcgaaggaagtcgatgtcctgtctttgcttttcaaagttctgacacagaaagtgatgagctatcagaagtacttcaagacagctgctttttacaaataaaatgtgatacaaaagatgacagtatcctgtgctttctggaagtaaaagaagaggatgaaatagtgtgcatacaacactggcaggatgctgtgccttggacagaactcctcagtctacagacagaggatggcttctggaaacttacaccagaactgggacttatattaaatcttaatacaaatggtttgcacagctttcttaaacaaaaaggcattcaatctctaggtgtaaaaggaagagaatgtctcctggacctaattgccacaatgctggtactacagtttattcgcaccaggttggaaaaagagggaatagtgttcaaatcactgatgaaaatggatgacgcttctatttccaggccccagtgtgtgttgttccccattgtgtgctcatgtgttctcattgtcagctcccgcatgaggcatgggatcagggacccatccaaagaagcagtctggctgctttggggtagagcaggtgtgctgcattgtgggggatccttcctcctccggaccacctgtattctccaaagccagcaggttggagtggctgagttgaccaaactgcagagatggcagctgcccctcccgccaggagctccatttcagggagagatcaaagctctgtccatagaaccgttgctggagtggttaaagcccccacagggattcctgcccagttttaagttgcctgtgaggaggatcctgatcctgcaggtggaaaggctgacggtggcagcctcactcaggagccagctggccaaggtcaccttgcctgtgataggccagtgtggtcccagttacttctgccctggccatgtgcagccccaagtctggcattggagatgggtttgctgttttgagggtggaggacgtggcccagaaatagtagtagaaggcagctctcggtgtggccagctccccagcatggcagcagacaagagagagagagcatgtgcaggggaactcccctttgtaaaaccatcagatcttaagcgtgctaaacctggttcccaggagcacctggtgcccagggaggaggagcccgcctcatctagggtcaggagggacccacgaggctgcgcgggcagcagttctgctgtgcgctctcaaaggagcgtggagacggatgggaattctgcagccagacccaccgcggcagtcaagagatgtttccgcaagcgccacggacatggagcacttgctgccttgtgcgaggacggtagtccacacagcagcccctggccctctgagaagtgctgcccatggcggcagagaggttccgccccagccaagatgaagggatggggccttggctgtggccctgtcagctccagggcagaggctcaccgggtgagccggggtagagacaaccgtgaagctgaacgctgggctgacagtggggaatctggggagtccgtgtcatctgaaggggaatgggcaccacctcccttcccttctcaggagaaagctgaaggagccatggcagctggatatgcagccacccactactgtccccagacctgctcctggctttctgaggtttgtccacactttgcagaaaaggcagggttggacccaactccagggtggccactgaccaggattctaaggggacccctgaggccccctctggcatgccctgtgcagccctctccactggaggggacagggtacggagcagttgacttcgagttactccgaagggagattattctgggcggccaagtcatcccgaaagggagcatggctgcggctgtgaggtcagcaggcctcattcccatagacctggctgccaagaagacagtgcgcccaagaggaatcaagacagtttatgactcacacagacagcaaagccacgagcagtgtggtgtcaggtccctgggcccctactccaaaggtcgactgaaacagaaagctcaggtgatggccggcttgagtggtgggtcactctgcgactga

SEQ ID NO: 137283 - DNA, 1350 bp, Homo sapiens
cgtgagtgtatctctatccacgtggggcaggcaggagtccagatcggcaatgcctgctgggaactgtactgcctggaacatggaattcagcccgatggtcagatgccaagtgataaaaccattggtggtggggacgactccttcaacacgttcttcagtgagactggagctggcaagcacgtgcccagagcagtgtttgtggacctggagcccactgtggtcgatgaagtgcgcacaggaacctataggcagctcttccacccagagcagctgatcaccgggaaggaagatgcggccaataattacgccagaggccattacaccatcggcaaggagatcgtcgacctggtcctggaccggatccgcaaactggcggatctgtgcacgggactgcagggcttcctcatcttccacagttttgggggtggcactggctctgggttcgcatctctgctcatggagcggctctcagtggattacggcaagaagtccaagctagaatttgccatttacccagccccccaggtctccacggccgtggtggagccctacaactccatcctgaccacccacacaacgctggaacattctgactgtgccttcatggtcgacaatgaagccatctatgacatatgtcggcgcaacctggacatcgagcgtcccacgtacaccaacctcaatcgcctgattgggcagatcgtgtcctccatcacggcctccctgcgatttgacggggccctgaatgtggacttgacggaattccagaccaacctagtgccgtacccccgcatccacttccccctggccacctacgccccggtcatctcagccgagaaggcctaccacgagcagctgtccgtggctgagatcaccaatgcctgcttcgagccagccaatcagatggtcaagtgtgaccctcgccacggcaagtacatggcctgctgcatgttgtacaggggggatgtggtcccgaaagatgtcaacgcggccatcgccaccatcaagaccaagcgcaccatccagtttgtagattggtgcccaactggatttaaggtgggcattaactaccagccccccacggtggtccctgggggagacctggccaaggtgcagcgggctgtgtgcatgctgagcaacaccacggccatcgcggaggcctgggctcgcctggaccataagttcgatctcatgtatgccaagcgggcctttgtgcactggtacgtgggagaaggcatggaggagggggagttctctgaggcccgcgaggacctggcagctctggagaaggattatgaagaggtgggcgtggattccgtggaagccgaggctgaagaaggtgaagaatactga

SEQ ID NO: 137284 - DNA, 1124 bp, Homo sapiens
atgcgcgagtgtatctctatccacgtggggcaggcgggtgtccagatcggcaatgcctgctgggaactgtactgccttgaacatggaattcagcccgatggtcaaatgccaagtgataaaaccattggtggcggggacgactccttcaacacgttcttcagtgagactggagctggcaagcacgtgcccagagcagtgtttgtggacctggagcccactgtggtcgatgaagtgcgcacagggacctacaggcagctcttccacccagagcagctgatcaccgggaaggaagatgcagccagtaattacgccaggggccattacaccatcggcaaggagattgttgacctagtcctggaccggatccgcaaactgctttgggggcggcactggctctgggttcgcatctctgctcatggagcggctctcagtggattacagcaagaagtccaagctagagtttgccatttacccatgccccccaggtctccacagccgtggtggagccctacaactccatcctgaccacccacacgaccctggaacattctgactgtgccttcatggtcgacaatgaagccatctatgacatatgtcggcgcaacctggacattgaacgtcccacgtacaccaacctcaatcgcctgattgggcagatcgtgtcctccatcacggcctccctgcgatttgatggggccctgaatgtggacttgacggaattccagaccaacctagtgccgtacccccgcatccacttccccctggccacctatgccccagtcatctcagctgagaaggcctaccacgagcagctgtctgtggccgagatcaccaatgcctgcttcgagccagccaatcaaatggtcaagtgtgaccctcgccacggcaagtacatggcctgctgcatgttgtacaaggggggacgtgggtccccaaagacgtcaacgcggccatcgccaccatcaagaccaagcgcactatccagtttgtggattggtgcccgactggatttaaggtatgactgggtgacatggaggcctttcagcaagcagcagatgcacaaaataacactggccttgaaggcccacatcctttggggagactatccctgttccatgggctag

SEQ ID NO: 137285 - DNA, 2920 bp, Homo sapiens
atggatgtgtattgtgcacatgaaagccttagacatacaaagagccctgaggccacaggccaaacatctggccaaaggcctgaagctctgcaagctttctggccggcctttgggtcctctcctgtaactgggtcctctcctgtaactgaagtgacaacaaaaggccgctggagttcttcccggcaagttctatgggaccgtattcccctggcaaagagcaggccagcaatttcaaacagacaaagccaaaggactaacattccttggtgggaaagctgtccacctatcctgaacctggaaagagaacaaccaccacgttttgctcaacctgggacgtatgcatctcgatggaaggctcttgaagaaatggaaaagcagcagcgtgagcaggttgatagaaacatcagagaagccaaagagaaactggaggcagaaatggaagcagctaggcatgaacaccaattaatgctaatgaggcaagatccaggcttggccctggtgtcctgcatgcagcagggacagtccatgagtaggagtcccaagaaggtctttaaacatctgtatgaactcaaccttacaaaactgcaaagtctcggcagccggagccgactaagatggaaggattcacccttctggggagaagaggcaggaggcaagaggcctcctctggtttccctggctctccacagatctccctccctgctcctcctctttgtgccaaaacatccttctaagggcagacctgattgcactgttcagaggtccccaaagcccacagaaaagtctcaactcctggacctccgtgagtgtatctctatccacgtggggcaggcaggagtccagatcggcaatgcctgctgggaactgtactgcctggaacatggaattcagcccgatggtcagatgccaagtgataaaaccattggtggtggggacgactccttcaacacgttcttcagtgagactggagctggcaagcacgtgcccagagcagtgtttgtggacctggagcccactgtggtcgatgaagtgcgcacaggaacctataggcagctcttccacccagagcagctgatcaccgggaaggaagatgcggccaataattacgccagaggccattacaccatcggcaaggagatcgtcgacctggtcctggaccggatccgcaaactggcggatctgtgcacgggactgcagggcttcctcatcttccacagttttggggggtggcactggctctgggttcgcatctctgctcatggagcggctctcagtggattacggcaagaagtccaagctagaatttgccatttacccagccccccaggtctccacggccgtggtggagccctacaactccatcctgaccacccacacgaccctggaacattctgactgtgccttcatggtcgacaatgaagccatctatgacatatgtcggcgcaacctggacatcgagcgtcccacgtacaccaacctcaatcgcctgattgggcagatcgtgtcctccatcacggcctccctgcgatttgacggggccctgaatgtggacttgacggaattccagaccaacctagtgccgtacccccgcatccacttccccctggccacctacgccccggtcatctcagccgagaaggcctaccacgagcagctgtccgtggctgagatcaccaatgcctgcttcgagccagccaatcagatggtcaagtgtgaccctcgccacggcaagtacatggcctgctgcatgttgtacaggggggatgtggtcccgaaagatgtcaacgcggccatcgccaccatcaagaccaagcgcaccatccagtttgtagattggtgcccaactggatttaaggtaaaacagggatttcttcttggtttggatccattgctgctacccagcagtgctaccagcctccatggtggtactggggatgtctgcagagtcctgtggtgtgatttgtcttcgagtctcccacccgtggataacagcacctgcttcagtggaggtggcaggggagtgaagcagactctgtgggagtccttggttgtagttttgtttagtgccctggctttattgaatgctggttatgctaggagtgaagctgattggggacacagctctgatgcgtttagcccagcccctgctggtaaccaaggtcctcctccaatgacgggtatgaatatgaacaacagagcaactatacctggcccaccaatgggtcctggtcctgccatgggaccagaaggagccgcaaatatgggaactccaatgatgccagataatggagcagtgataatggcatctatgtctttccagtgctgtctagaggcttttggcgtcactttggactctgccttctccccctacccctgcctgctgaattccatatttagtcagcaaatgctgtctgctctatcttccaaatgtatcccatgtcccattacttctgtaaaggtgctgaatgattgggtccccactgcacctacaccctctgtgcctacaccctctgcacctacaccctttgtacctgcaccctctgcactacttacatccactgcacctacaccctctgcactacttacatccactgcacctacaccctctgcacctacaccctttacacctgcaccctctgcactacttacatccactgcacctacaccctctgcacctgcaccctctgcactacttacatccactgcacctacaccctctgcacctacaccctctgtacctgcaccctctgcactacttacatccactgcatctacaccccctgcacctatactttctgcatctacatccgctgcacctacaccgtctgcacctacactatctgcgcctactatctgctgcacctacatcatctgcacctacaccctctgcacctacatcctccgcatctacaccctctga

SEQ ID NO: 137286 - DNA, 455 bp, Homo sapiens
  misc_feature (1)...(455): n = a,t,c or g
ggctttcctttggcttttcacccggtcttcaatgcccatgagcctttccgccggggtacaggtgtggatctgggacagggtcacncagcctccagctggcaggattccctcttcctgtttctcgccatcttcttctttttttggctgctcagtatttgagctatgtctgcttcctgcccacctccagccagagaccagctccggagagcagagggggaaggaggatggattgagagaatgtctttctcctctcctaagtctttgctttccctgatttcttgatttgatcttcaaaggtgggcaaagttccctctgactcttcccccactccccatcttactgatttaatttaatttttcactccccagagtctaatatggattctgactcttaagtgcttccgccccctcactacctcctttaatacaaattcaataaaaaaggtgaaatataaa

SEQ ID NO: 137287 - DNA, 426 bp, Homo sapiens; identical to SEQ ID NO: 125602

SEQ ID NO: 137288 - DNA, 666 bp, Homo sapiens
atggcagcagcggaggaggaggacgggggccccgaggggccaaatcgcgagcggggcggggcgggcgcgaccttcgaatgtaatatatgtttggagactgctcgggaagctgtggtccagtgtggccagagaccagctccagagagcagagggggattccagccatttggtgataccgggggcttccacttctcatttggtgttggtgcttttccctttggctttttcaccatcgtcttcaatgcccatgagcctttccgccggggtacagctgccactcaaaaaagcatttgttctgtggctccttttccagatccaggctttttctactacagggtccgcaaggttatttctgctccagtcggggagccagctagcttgtggtctgttactcctctgcattcaaaaggattcatctttgtcagtgcctttctgggagagtgggcctggcttggagatgtcactgtggatccaggattttgccactggatatggaacgaagacctcgtcagtcaatcttccatgatcccggccaccgcaattggctcagccttccaagaggccgtggttgtcaccagggcgcccccacccctacccctgaatcccagctgcagggactgccattcaaacatccacgtgtccaagatggctgcggcattggcatga

SEQ ID NO: 137289 - DNA, 1218 bp, Homo sapiens
  misc_feature (1)...(1218): n = a,t,c or g
atcgtgggcaggaggtggtttctggtttgttggggcgtgtgtatgtgtatttggggggactgaagggtacgtggggcgaaacaaaaccggccatggcagcagccggaggaggaggtctggggcccccaatgttccaaatcgcgagcggggcggggcgggccgccngaaaacccccttcgaatgtaatatatgtttggagactgctcgggaacttgtgctcagtgtgttggccaacctgtacttttggacaatttctcatcaggtgcctggaaaacacggccagaaacggcaagagtgtccaagtatgtaaagctgggatcagcagagagaaggttgttccgcctttatgggcgagggagccaagaagcccccaggatccccagattaaaaactccacccccgccccccagggggcagaggaccagctccggagaagcagagggggattcccagccatttggtgataccgggggcttccacttcttcatttggtgttggtgcttttccctttggctttttcaccaccgtctttcaatgcccatgagccttttcgccggggtacaggtgtggatctggggacagggtcacccagccttcaagctgggcaggatttcccttttgctgtttctcgccatcttcttcttttttttggctgctcagtatttgagctatgtctgctttcctgcccacctccagccagagaagaatcaagtattgagggtcccctgctgacccttccgtgactcctgggacccccttgaacccctctaatttctgttgggtaaaggcccaagccctgggacatttgtccaaggaaggccctgggggaggaaggagtgaaagtctgtgccatagatgggagagccttctgcctcagaggctcacctcagtaaccgttgtttaattctctgcccctggggaaggaggatggattgagagaatgtctttcttcctctcttaagtctttgctttccctgatttcttgatttgatctttcaaaggtgggcaaaagttcccctctgactccttccccccctccccatcttactgatttaatttaatttttcacttccccagagtrctaatatggattttggactcttagttgcttccgcccccctcattacctcctttaatacaaattcaataaaaaaggtgaaatatttaaaaaaaacaaaaaatattaagtgggaatcttctttaccccaaaaaatattt

SEQ ID NO: 137290 - DNA, 537 bp, Homo sapiens
  misc_feature (1)...(537): n = a,t,c or g
ggagcnagcnccccncaattgaccccgatggaacgcctgtggtaccgggcccgacccacgcgtccgtggctgctcagagtgagcttgcttaggtactggtggctactatgtggctccagtttgaacgccctcgtccccaggaaggattttgtggtcctgtgcctttgtgatccagacaaagacggtagctcagtgcgttgagtattattacatctggaaaaaaatgatcaagtttgactgtggccgagccccagggctagaaaagagggtcaagagagagccggaggaagtggaaaggacagaggaaaaggtcccatgcagccctcgggagagacccagccaccatccaactcccaagttaaagaccaagagttataggagggagtccatcctcagctccagcccaaatgcaggctccaagcggacccccgagctgttgggaagtgcagagagccagggcatttttccatgcatagagtgtgaaagggtgtttgacaagatcaagagtcgaaatgcccatatgaagcggcaccgcct

SEQ ID NO: 137291 - DNA, 499 bp, Homo sapiens
  misc_feature (1)...(499): n = a,t,c or g
cgggcccnnnaaganaanttcgtagaccttannnnangngttgtgagtccactatccangtggtggaattctggtcctgtgcctttgtggtgagtggtaacgccaagccaaaggaagaggtgcttccggagggctttccaaaggaggcggccggcccaatggcaaggtcacactcccagggcccgcgtggcacagccacagcctgcttgttttctttcactagatccagacaaagacggtagctcagtgcgttgagtattattacatctggaaaaaaatgatcaagtttgactgtggccgagccccagggctagaaaagagggtcaagagagagccggaggaagtggaaaggacagaggaaaaggtcccatgcagccctcgggagagacccagccaccatccaactcccaagttaaagaccaagagttataggagggagtccatcctcagctccagcccaaatgcaggctccaagcggacccccgagctgttgggaagt

SEQ ID NO: 137292 - DNA, 1980 bp, Homo sapiens; identical to SEQ ID NO: 116421

SEQ ID NO: 137293 - DNA, 433 bp, Homo sapiens
cccacgcgtccgagcagcccggaggagactgacggtccctgggaccctgaaggtcacccgggcggccccctcactgaccctccaaacgcccctgtcctcgccctgcctcctgccattcccggcctgagtctcagcatggcggatgggagcagcgatgcggctagggaacctcgccctgcaccagccccaatcagacgccgctcctccaactaccgcgcttatgccacggagctgcaggacttgtgccgacagctccacgcccgtgtggacaaggtggatgaagagagatacgacatagaggcaaaaagtcaccaagaacatcacggagattgcagatctgactcagaagatctttgaccttcgaggcaagtttaagcggcccaccctgcggagagtgaggatctctgcagatgccatgatgcaggcgctgctg

SEQ ID NO: 137294 - DNA, 409 bp, Homo sapiens
ctcaagcagcccggaggagactgacggtccctgggaccctgaaggtcacccgggcggccccggcactgagcctccaaacgcccctgtcctcgccctgcctcctgccattcccgggctgagactcagcatggcggatgggagcagcgatgcggttagggaacctcgccctgcaccaaccccaatcagacgccgctcctccaactaccgcgcttatgccacggagcggcgcggagagaaggggcgcgctctgagcacccgctgccagccgctggagttggccgggctgggcttcgcggagctgcaggacttgtgccgacagctccacgcccgtgtggacaaggtggatgaagagagatacgacatagaggcaaaagtcaccaagaacatcacggagattgcagatctgact

SEQ ID NO: 137295 - DNA, 490 bp, Homo sapiens
caagcagcccggaggagactgtcggtccctgggaccctgaaggtcacccgggcgggcccctcactgaccctccaaacgcccctgtcctcgccctgcctcctgccattcccggcctgagtctcatcatggcggatgggagcagcgatgcggtgagagcagcgggctaaggcgtggctgggacccccagggccagggctagggaacctcgccctgcaccagccccaatcagacgccgctcctccaactaccgcgcttatgccacggagccgcacgccaagaaaaaatctaagatctccgcctcgagaaaattgcagctgaagactctgctgctgcagattgcaaagcaagagctggagcgagaggcggaggagcggcgcggagagaaggggcgcgctctgagcacccgctgccagccgctggagttggccgggctgggcttcgcggagctgcaggacttgtgccgacagctccacgcccgtgtggacaaggt

SEQ ID NO: 137296 - DNA, 953 bp, Homo sapiens
cggacgcgtgggcggacgcgtgggcaatcagcccgtaggagactgactggtccctgggaaccctgaaaggtcaccctgggcggcccccgtcactgaaccctccaaacgcccctgtcctcgtccctgcctcctgccattcccggcctgagtctcagcatggcggaatgggagcagcgatgcggctagggaacctcgccctgcaccagccccaatcagacgccgctcctccaactaccgcgcttatgccacggagccgcacgccaagaaaaaatctaagatctcccgcctcgagaaaattgcagctgaagactctgctgctgcagattgcaaagcaagaagctggagcgagaggcggaggagcggcgcggaagagaaggggcgcgctctctagcaccccgctgtccagcccgctggagttggccgggcctgggcttcgcggacttgccaggactttgttgccgacagttccacgcccgtgtgggacaaggtggatgaagagagatacgacatagaggcaaaagtctccaagaacatcacggagattgcaaattttgacttcagaagatttttgaccttcgaagcaagtttaagcggcccacccttgcggagagtgaggatctctgcagatgccatgatgcaggcgctgctgggggcccgggctaaggagtccctggacctgcgggcccacctcaagcaggtgaagaaggaagaccccgagaaggaaaaccgggaggtgggagactggcgcaagaacatcgatgcactgagtggaatggagggccgcatgaaaaagtggagagagctgagccttcctgcctactgcccctgccctgaggagggccactgaggaataaagcttctctctgagctgaagaaaaaagaaaggggggggcggttaaaaagaataccatgaggagccaaggttaatcacgcctggaaacccaatacttttt

SEQ ID NO: 137297 - DNA, 487 bp, Homo sapiens
aacatgctctccagtttggggagtctacttctctgtggaagtattacactagccctgggaaatgcacagaaattgccaaaaggtaaaaggccaaacctcaaagtccacatcaataccacaagtgactccatcctcctgaagttcttgcgtccaagtccaaatgtaaagcttgaaggtcttctcctgggatatggcagcaatgtatcaccaaaccagtacttccctcttcccgctgaagggaaattcacagaagctatagttgatgcagagccgaaatatctgatagttgtgcgacctgctccacctccaagtcaaaagaagtcatgttcaggtaaaactcgttctcgcaaacctctgcagctggtggttggcactctgacaccgagctcagtcttcctgtcctggggtttcctcatcaacccacaccatgactggacattgccaagtcactgtcccaatgacagattttatacaattcgctatcgag

SEQ ID NO: 137298 - DNA, 726 bp, Homo sapiens
ctacttcccatccctattcagcgacttcagctgccctccacctccagcagggacttgggtgtgcacacctccataatgacatctggccgggcatggcggcagcagtcctcgcagtgtctggcagagccactgcatcaggtacacagtatgtcccagtgcagaaatggcaatcccttggaggtctatgaattgggatggcagaccttcagggaagggagattcccttttacacccacgaagaaaacctttaccaccaaataatgtcactggaaagccaggaagtgcaggtacgttagtcatgtaccttccttttcccgccatgatttcggttttactagccaacataagctcttcttggcgtgccagtctttctccagaggcaggaactgttggttgctttatatctgtctctattctctccaagggagttccagtaggctgggtgttgaccctcaggggtggtgtagttattgggcctgatgaaatgattcttccaacaacagtcttgtgattgaaaatcttactccaaattccaccttccacattgtctttcactccaaattcataaactgtgttgggctttaggttttccacaattgtttcagtggctggacagatttgaaaaatccacttcttttctttatccttttctcgatagcgaattgtataaaatctgttgtttttcgcagatgtccctggacccagtgaaggacagctgtccagcat

SEQ ID NO: 137299 - DNA, 1418 bp, Homo sapiens
ctcctaaaacatcacaacgaactcgtcgtccacgtcccaaaactaaaaccacaccaagtcctgaggttcctcaaaccaaactgggtaaatttgggtttctggttaaagtagctcatcctagctgctctcaggaatttataactgatgccaatgatgggagtgatggcctgtgtaaaactcgttctcgcaaacctctgcagctggtggttggcactctgacaccgagctcagtcttcctgtcctggggtttcctcatcaacccacaccatgactggacattgccaagtcactgtcccaatgacagattttatacaattcgctatcgagaaaaggataaagaaaagaagtggatttttcaaatctgtccagccactgaaacaattgtggaaaacctaaagcccaacacagtttatgaatttggagtgaaagacaatgtggaaggtggaatttggagtaagattttcaatcacaagactgttgttggaacaccagccaaaacagactatgtatatcccactgccaaagcaccactctggccagaggagccaaagactgaagctcccaagcagacaccacgtgctcctcctaagccaaaaacatcaccacgcccaagaatcccacaaacacaaccagaagaaacagaccaatccacccaagaacctttcacaactaagattccacgaacaactgaactagcaaagacaactcagggcctagaaatgctctcctgcttaatccacaatccaaagatgcataaggactctactaatgagcaaatagctgcgtctctacaggcttgttattacgaacagctattaatgtacatcagagtcacagatgtagacagtgtggggcctggaaatgggaaggaggcagtgacagccccgcaggctcccacactgttttggctgaatcataaagctcaactggcaaaagattgggcagggaaagatgtaaacattactcccacctttgcgacaagcaagaaagaaaacaaaccaccaaataatcttcaaatttgtaatgtttctaaaattcatcaaagagctaaagttgcagggaaacctgaaatcaaagataagcatatccaaaaagagatgccactggatgctatagaagctagtaagataaatttggttaaaatttttaatgaattcctaaaagcctggaaatgtagactatcattcgaatacagaatccctgagaaccaaggacacaaagggagtttttatctacttgtgggctcttcacgaacctcatggttacttacagaaaagatcggaagcagcaagagagttctgagaatgcctcccatggacattctcaaaaccacccagatccttttatctttcctatggagcataaacttaaccccacgggggaagaacaaccatcttgttgctccagcgcataggtga

SEQ ID NO: 137300 - DNA, 1011 bp, Homo sapiens
aaatacaaactaccatcagggaatactacaaacacctctacgcaaataaactagaaaatctagaagaaatggatacattcctcgacacatacactctcccaagactaaaccaggaagaagttgaatctctgaatagaccaataacaggagctgaaattgtggcaataatcaatagctttccaaccaaaaagagtccaggaccagatggattcacagccgaattctaccagaggtacaaggaggaactggtaccattccttctgaaactattccaatcaatagaaaaagagggaatcctccctaactcattttatgaggccagcatcattctgataccaaagcctggcagagacacaaccaaaaaagagaattttagaccaatatccttgatgaacattgatgcaaaaatcctcaataaaatactggcaaacggaatccagcagcacatcaaaaagcttatccaccatgatcaagtggacttcatccctgggatgcaaggctggttcaatatacgcaaatcaataaatgtaatccagcatataaacagagccaaagacaaaaaccacatgattatctcaatagatgcagaaaatgcctttgacaatattcaacaacccttcatgctaaaaactctcaataaattaggtattgatgggacgtatttcaaaataataagggctatctatgacaaacccacagccaatatcatactgaatgagcaaaaactggaagcattccctttgaaaactggcacaagacagggataccctctctcaccactcctattcaacatagtgttggaagttctggccagggcaattaggcaggagaaggaaataaaagagaagaaaatacctaggaatccaacttacaagggatgtgaaggacctcttcaaggagaactacaaaccactgctcagggaaataaaagaggatacaaacaaatggaagaacattccatgctcatgggtaggaagaatcaatatcgtgaaaatggccatactgcccaag

SEQ ID NO: 137301 - DNA, 421 bp, Homo sapiens
gccaattcaaagtttttttttagttttaaaaaagccccccctgaggaagggggtatatttaagttcaaagtccctaagcaggtggttttttaaagttcaagccaactaaaggggggcgggttaatttttataaccttcccggggtgtggggtgggatccccaaaaaaagtaaaaaaaaataaagcaaataattgaaagacaacacaacacacacacacacacacacacacacacacacacccctgccaaagcatatccttgttttctgccagttgtgtcaccaatcagcgatctcaaccacaaaaggcgttttcacgtctatcttgccactgttgatgatcgagcagttggtgagtggacggtcatgcccatcagttgcttggagctctatggagtgcaccactgtcatcccatcaatgac

SEQ ID NO: 137302 - DNA, 645 bp, Homo sapiens
atggggcagagccacattgaggaggtccctgaggaggactacctttgttctttgtcctcctggagggtgtttaagatagaagtgctaatgaatggaagaaaacattttgttgaaaagagatacagcgaatttcatgctttgcacaaaaaggggcctgacttgttcattagagcccactgcgatttgtggggcctgataggtggacttatgagttatattatctgcattcacctaaacctcacaaaaggcacacatggcttaccaggagtcctgctgggaaaccaccggttgaagattaaaccacgagctcacgtgaatggcagtagcacctgcgctgtcgcttctgcaagtcctcctgaaagttctctgcagccctcccttaatctgacccttcagagtaaaggcccttgggacaccaagtgggaaagctatagagagccaagaggcaatagaaatattcagaaaggcaaactcagaagaggtatggagagacacagcagggtacagcctatgagaagagtgagtggcactgccaccatgagtacacagggaagatgggtgaacaaggaggagtgtgaacaagggccagaagccacagagattactgacagagagctgaatgcccagatgaaagacagacaatga

SEQ ID NO: 137303 - DNA, 1317 bp, Homo sapiens
cttatgccaaagcctggcagagacacaacaaaaaaagagaattttagaccaatatccctgatgaacatcaatgcgaaaatcctcaataaaatactggcaaaccaaatccagcagcacatcaaaaagcttatcaaccatgatcaagttggcttcatccctgggatgcaaggctggttcaatatccgcaaatcaataaatgtaatccagcatataaacagaaccaaagacaaaaaccacatgattatctcaatagatgcagaaaagtcctttgacaaaattcaacaacccttcatgctaaaagctctcaataaattaagtattgatgggacatatctcaaaaattaataaggagcttacctataacaaacccacaggccaatatcattactgaatggggccaaaaactggaagcattcccctttgaaaaactggcacaagaacagggatgcccctctctcacccactccctattcaacatagtgttggaagttcctggccccgggcaatcaggcaggagaaagaaataaagggtattcaattagggaaaagaggaagtcaaattgtccctgtttgcagatgacatgattgtatatttagaaaaccccattgtctcagcccaaaatctccttaagctgataggcaacttcagcaaagtctcaggatacaaaatcaatgtgcaaaaatcaccaagcattcttatacaccaataacagacaaacagagagccaaatcatgagtgaactcccatttcacaattgcttcaaagagaataaaatacctaggaatccaacttacatgggacatgaaggacctccttcaaggagacctacaaaccacttgctcaacgaaataaaaagaggacacaaacaaatggaagaacattccatgctcatggctaggaagaatcaatatcgtgaaaatggccataatgcccaaggtaaatttatagattcaatgccatccccatcaagctaccaatgacttttcttcacagaattggaaaaaaactactttaaagttcatatgggaaccaaaaaaggagcctgcattgccaagtcaatcctaagccaaaagggcaaagctgggaggcatcacactacctgactttcaaactattacttacaaggctacagtaaccaaaacagcatgatactgtagccttgtagtatcatgctgttttggttactacaaggctacagtatcatgctgttttggttactgtaccaaaacaaatatatagactactgaaacagaacagaggccttagaaataacaccacacatctacaaccatctgatcttcgacaaacctggcaaa

SEQ ID NO: 137304 - DNA, 3537 bp, Homo sapiens
cttaagaaatgtataaaaactccagaaatcccttctaaacatgttaggaactgggtccccaaagtcttggaacagcgacgacaaggcttggaaacatacttacaggtagccagcattaccctgataccaaaggcagacgaagacacccccaaaaagaaaactacagacaaaaattcctggacaggcactgatgcaaaagtcttcaataaaatactggaaatcaaattcagcagcatattaaaaagactatattggccagtgttggaagttctggccagggcaatgaggcaggagaaggaaataaagggtattcaattaggaaaagaggaagtcaaattgtcccggtttgcagatgacatgattgtatatctagaaaaccccattgtctcagcccaaaatctccttaagctcataagcaacttcagcaaagtctcaggatacaaaatcaatgtacaaaaatcacaagcattcttatacaccaataacagacaaaaccgagagccaaatcagaataaaatacctaggaatccaacttacaagggacgtgaaggacctcttcaaggagaactacaaaccactgctcaaggaaataaaagaggatacaaacaaatggaagaacattccatgctcatgggtaggaagaatcaatatcgtgaaaatggccatactgcccaagagataccctttctgccagttgtgtcaccaatcagcgatctcaaccacaaaaggcgttttcacgtctatcttgccactgttgatgatcgagcagctggtgagtggacggtcatgcccatcagttgcttggagctctatggagtgcaccactgtctgaagacagatggattttggagaatgacagtgtattcgcataagcttagccaagtggtaactccaactgcagctgctgtaccagatgtggtttcattgcctgagcaaattaacacatttcctggtacctgcgtacaacaactctcgattttgtgtcataatcttgttcacagagattttgatccattttcccttccacaaggtatcacactggtccataacactgataacattatgctgactggatcctataagcaagcagtagcaagcacactggacttattgatcaggaaaactgttttggactgtttgtgcaaagaggcaaacctgggcctgatgggcagtggcttccgcattttatggaagcagagaaactctaagagattgcatgtaaatcggcatattgggaagagagagtccagggtatctccatttggaccagccatgattatgagcgtacctgaagtggcgcgggtatttggcaaaaccgggaaagcggaaaccgccaccgattctgctccgctggagatggtagaaacgaccatccagcttaagccgcaggagcagtggcggccagtgcagtactttcagcaacagcggatgataaacacgaatcaaaaagcgccgttggccatttcagaagcacgctattatggaaaagaacatgttgaaatgagagtgatgagcattcagttaaggttaaagaatcagtggatttggaataaggatggaggtttggaggattctgggcttgggaaaaataagagcaaagttaaaaagtacttcacagttaaaggcggcattttagaactgcagcgtgaagccagagcgtttgtcttagtgaccggccaactttcgggctcactttcgagctctgtggtacaccaccattctcagattcgacgtctaactcaggagacgctgaccttcgaatcgaagggaattcggagagtcttggcccgaaacccaggcgcctggagccctgcgccctctgcttccggcccccggcacgcccagggcgcgggagcggccggccggctggccggcgcggccaatggaggtctacatcccgtcctttcgctatgaagagagcgacctggagcggggatacacggtgtttaagatagaagtgctaatgaatggaagaaaacattttgttgaaaagagatacagcgaatttcatgctttgcacaaaaagcttaagaaatgtataaaaactccagaaatcccttctaaacatgttaggaactgggtccccaaagtcttggaacagcgacgacaaggcttggaaacatacttacagggctgtcattttagaaaatgaagaacttcccaaactgtttcttgatttcctaaatgtgcgacacttgccctctctaccaaaggcagaaagttgtggatcttttgatgaaacagagtctgaagagtcaagcaaactgtcccaccagcctgtgctgctgttcctcagggatccatatgtcttgcctgcagccagcgattttccaaatgtggttattgaaggagtcctccatgggatattttaccctcatctacagcccaggtagaaatcctacatggctaaaagaagcagaagcaagtttcgaagtcacagtcaaggaaatcaataccgtaccaatttaacctagacgctatgatatataacagctctagctagtggtaaagtgcacagtcccagcttaattcagggcagggacatttccattagaatggtgctcttaaaaatagaaactgaacccggggcggtggtcaggctaaggccaagtgtttaagaagtagagtgtagctgccagcgtagaaacccatgaaaaggaggccacaggagattcctgggagcactgggtgtagcaaaaccaaagccactctctggcttcagtcgcacccatttgctaattgaaaatcatatcctgaatcataccggggacctgatccacctttgggtagcctttttggtccagatcttatgacaccactacttcttctccaccgtgagattttcctccagcccagtgatagtacattctgaaatgctggccccaggagacggccacagacacacactgctaaatgtgaagatggaactaaactggaaattaaattatactgacaatattatggcatttttaagatcatggcatttttaatttacattgagagtggagttgcatcatactcaggggttagcttccaaggtcagtacataggtaaaatgggctattaggatgatccttgaaagccctttagaagggtgccatgttggaaacctgtacatccacaacaagtagcttttcctcctatgttggaaaaaaagacttgtttctttgtttgaagaccaagtgaagttgttggtgtttgtttaggggccattttgttaaaaaaaaaaaaaaaaaaagcacataacttttaacactagaatcagcccgcaagatgcttgccccgctagtggcagatgtgaactgacaaggagtgaagcgcccacccagcggatggacagcacccacctgggtttactcaagggtgtgcattcattttaggtgggatcgccacaggatttcatgttattttccttacgggcttccttttcactgacctcatttgttgagttaatgtaagttaaatgtggtttatgatataactccactgtacatcatcctttgaggtagtaaaggataaaagcatatatactaccta

SEQ ID NO: 137305 - DNA, 457 bp, Homo sapiens
gctggaaatcgacttcggtttcagttggagttggaatttgtgcaatgtttagccaacccaaattaccttaattgtaccctcagtgtttacacatgttagagctgctccaatatgaacacttccgaaaggagctggtgaatgctcagtgtgcgaaatttattgatgaacagcagattctacattggcagcactattcccggaagcggatgcgccttcagcaagccttgggcaaagcagcaacagcaaaataacacatcgggaaaatgaaaaactggatacaaacgaggcacttaatacatgtatataatgtatttcttttgtacagtgaagacaaaaaaaatgaaaactcttcctatctacctttattatggtagcccctagaacctttagtgtgctttttcatccaactttttattgttaatagactatttctgttaaacctgaattgttctttgaa

SEQ ID NO: 137306 - DNA, 990 bp, Homo sapiens
atgattggtccacctggcagctggctggctggctggcaactggaggcctttctgtcctggctgagggccctggccccttggtggcctttgggaagcagcatctcatcgggccgttttttcgttctggcgggcggccggcttggccgcggggtcgggctctccgcgcagtgcagagacgtctccaccctcagggacgaggctctgacgtggcgggaggtcgtttccgtgcgctgcgaggaggattccacgtgccgggaggacgcctcgaggatgcgagggagccgcttccccgagggggagagggagggcccctcgctgcggcgctgggaggtctccacccgccgggacgacgtctccacgcggcagaagagaggaaaactacggtactgccatagccgggagcgccacaacacgatgacgtggaagcaccatggtccttcgaaggctaaaacactggactcctgcccctcaggcgctcccacggcccgggccccgccccctcgctattttggagccagcgcgggtggagccatcccagggctggtcggggatgggcggagccgccccgccccatatcccacagtgccccgggaccggaagagggagccgtggtttccggaacttcgcccgcgtctctgggcttttgctctgtcaggctggtggcgttttggtgtcttcgtttgttatggccgctgctgtcgctatggagacagaggttacttcaaagacaaagcttttgttaattatcttaaatacttgctttactggaaagacccagaatatgccaagtatctaaagtaccctcagtgtttacacatgttagagctgctccaatatgaacacttccgaaaggagctggtgaatgctcagtgtgcgaaatttattgatgaacagcagattctacattggcagcactattcccggaagcggatgcgccttcagcaagccttggcagagcagcaacagcaaaataacacatcgggaaaatga

SEQ ID NO: 137307 - DNA, 1220 bp, Homo sapiens
cgtggtttccggaacttcgcccgcgtctctgggcttttgctctgtcaggctggtggcgttttggtgtcttcgtttgttatggccgctgctgtcgctatggagacagatgatgctggaaatcgacttcggtttcagttggagttggaatttgtgcaatgttacgccaaccacaataccctcatctttctgccccaaaggaggttacttccaaagacaaagcttttgttaattatcttaaatacttgctttactgggaaagacccagaatatgccaagtatctaaagtaccctcagtgtttacacatgttaggagctgctcccaatatggaacacttccgaaaggaggctgggtggaatgctcagtgtggcgaaatttattggatggaacaggcaggtttctacattgggcaagcactattccctggaagcggatggcgccttcagcaagccttggcagagcagcaacagcaaaataacacatcgggaaaatgaaaaactggatacaaacgaggcacttaatacatgtatataatgtatttctttagtacagtgaagacaaaaaaaatgaaaactcttcctatctacctttattatgggtagcccctagaacctttagtgtgctttttcatccaactttttattgttaataagactatttctgttaaaccctgaattgttctttgatttccctgtggatttgtaaggtgtttttcttttttacgcatttagcataatcagctgattaagaatggaaaagttaggtgctttagaccaaataaggcactgggggcatggggtaggggtgggccaccaagtatactgaattctaaggctagctgttcctgacatatagtagggcaagaccatctcctggaaccttactgtctcagatcaactactctaccactctactctaagatgtagtgagagtagcggagtccctgacctctttaaatcataggacaggaactgcataaaggttcttgaattctgcaggacaggaaataactgtattacctgctttgcaacggtggctttaagaatcactgaatcactgtggcctcacttgacctagtcatggcaggacaactagtggttagttactaactggactcttgactttagaacaaacatgaggagcctcaaatacttgtgttcatttgggaaagctaccattgatttgggaggtaccacaaaccaggtgctatgttaagtgcttc

SEQ ID NO: 137308 - DNA, 478 bp, Homo sapiens
ttttttttgaagcttaagaaaatcatgtttagactctgtttaaaaacatccaggctggctcccattctatagcatgaagggcaagtccatgttcttctcgccagtgcccacgtagacgtagccatagttcttggtgcggggagcatggtagaaggtgaggcccggccagagcaggctgcgcagcaccaccagggcattgcccctctccatctggatgctccaggaccctcatggacacagagcaggagtcccaggaacagggccaaccaaaaccacacctgctcagaagccacgtgaagtcaccctgaacaactgcctcagaccctttgggaatgtcatgctccaaggagtccatgaaatccagggaggggtccaggtcagccttctcaagcaaggtcttattctttagctcaacaggctccctgaaatggaagtaggagctgagcttcttggcctcagacaaggacagtccttcaaa

SEQ ID NO: 137309 - DNA, 504 bp, Homo sapiens
atggtccagatcaaggaagagacccgcttggtgtctgtcattgaccagattgacaaggctgtggccatcatcccccgaggcgccctcttcaagaccccttttggacccacccatgtcaatcggacctttgaaggactgtccttgtctgaggccaagaagctcagctcctacttccatttcagggagcctgttgagctaaagaataagaccttgcttgagatggctgacctggacccctccctggatttcatggactccttggagcatgacattcccaaagggtcctggagcatccagatggagagcggcaatgccctggtggtcgtgcgcagcctgctctggccgggcctcaccttctaccatgctccccgcaccaagaactatggctacgtctacgtgggcactggcgagaagaacatggacttgcccttcatgctatagaatgggagccagcctggatgtttttaaacagagtctaaacatgattttcttaagcttcaaaaa

SEQ ID NO: 137310 - DNA, 1242 bp, Homo sapiens
tcatcttttaattccctggttgatgctgatgagcagccaggaatgagagcccttgctgatggaatcatccaggcaggatggattcactcccaatctcactgggcagatggtcaggggaagagtctgccctttcttctggctttggtgatgggctgcaccttttctgaggacgctgtgcaggccaatgcgggtgggccagacagaacatgttgtgtccttgggtttaactctctgagcccctgtttcttcatctttgggaatgtcatgctccaaggagtccatgaaatccagggaggggtccaggtcagccttctcaagcaaggtcttattctttagctcaacaggctccctgaaatggaagtaggagctgagcttcttggcctcagacaaggacagtctgccctttccctgggtgtgtttcttgctttgccagttgctgctcctcttctgcacgtcttctccttggctagtgcagggtggtggagggtctccagaattccccacgatgttcctgtaggcctcagtgacatggccaacggtttcttcatggtcctgtaccctcattcccactatgacaatcacatcactccctccaccaccatcgctgtctccatcattgccacctccatcaccaccgccatcaccttcaccatcatccccttcactgttaccatcaccaccctgggcaaaatggctaaaccttgtctttggtcccctggacctctccaccatccagaaattgaggtttatgtctggcttggcatacgccgtcagctctatgtgaactgtgcctgagccatagcaggtgttaaatgttttggccatcatcctgagctccgcaggggccttgtgccccacagctggagctgactgcgaccaggtcctggaacttggagaagcttgctgggtaccaccatggaggacagttggcttatgggggtggggggtgcctggggccacggagtgactggtgatggctatccctccttggaacccctccagcctcctcttagcttcagatttgtttatttgttttttactaagacctgctctttcaggtctgttggctcttttaggggcttggtgggggtcgagcttccccttcattgcggcgggctgcgggccaggcttcactgagcgtccgcagagcccgggcccgagccgcgtgtggaagggctgaggctcgcctgtccccgccccccggggcgggccgggggcggggtcccggcggggcggagccat

SEQ ID NO: 137311 - DNA, 565 bp, Homo sapiens
gggtcgacccacgcgtccggctcaccacctggggagattgtatctttaggaatattgagtgaaggccagtttggtattccgaaagggatcgtcttttctatgcctgtgaaatttgagaatggaacttgggtggttcttacagatctcaaagatgttgaaataagtgaacaaataatgacccgaatgacaagtgatctaattcaggagaaacttgttgcacttggagacaagatacattttcagccataccaatcaggacataaagatctggtccctgatgaagaaaaaaatctagctatgtcagatgcagcagagtttccaaatcagattcctcaaaccacctttgaaaagccacagagtcttgagttcctaaatgactttgaaggcaaagccgtggaatcctaacagatcaaattggatgaaatatataattacttgatagcacaataaacatagaaagaatttatatgaatgtctatatttaaggaagaataatttgaaagatttatgtcagtcttagataataccatgcaaggcaattaaatcactgtgacagcacaaaaaa

SEQ ID NO: 137312 - DNA, 4549 bp, Homo sapiens
cggacgcgtgggcggacgcgtggggtcatcgcgggtatagcagattgtccatattatgctaaaacagaacttgtggcagactatttacaaaagaatcttcctgattttcggatacataaaatcacacaacgtcctgaggtttgggaggattggctaaaagatgtgtgtgaaaagaataagtggagtcacaagaattcccctatcatctggagagagctgttggatcgtggaggaaagggtttgcttttgggaggatataatgagttcctggagcatgctcagctttactatgatgtcacctctagcatgacgactgaactgatgatggtaattgctcaagagaacctgggggcacatatagaaaaagagcaggaggaagaagccctgaaaacttgcatcaaccccttgcaggtctggatcaccagtgcctctgctcctgcctgctacaacctaattcccatattgacgagtggcgaagtgtttgggatgcatacagaaattagcataactctatttgacaacaagcaggcgggaagaacatctcaaaagccttgtggtggagacccaagacctggcatctcccgtcctgcgcagtgtctccatctgcacgaaggtggaggaggccttccgccaggcccacgtcattgtggtgctggatgacagcaccaacaaggaggtgttcactctggaggactgcctccgaagcagggtgcctctctgcaggctctatgggtacctgatagagaaaaatgctcatgagtctgtcagagtcatcgtgggagggagaacctttgtaaacctgaagacagttttactcatgagatatgccccacgcattgcacacaacattattgctgtggcgctgggggtggaaggtgaagcgaaagccatactggccagaaaactgaagacagctccttcatacattaaagacgtgatcatttggggtaatatcagtggaaataattacgttgatctgagaaaaacaagggtgtacagatatgagagtgccatttggggacctcttcattattcacgccctgttttaaacttgatttttgacagtgagtgggtaaaaagagaatttgtggcaattcttaaaaacttgaccaccacaggaagacaatttggaggcattttggctgcacacagtatagccactacactgaaatactggtaccatggctcaccacctggggagattgtatctttaggaatattgagtgaaggccagtttggtattccgaaagggatcgtcttttctatgcctgtgaaatttgagaatggaacttgggtggttcttacagatctcaaagatgttgaaataagtgaacaaataatgacccgaatgacaagtgatctaattcagggtcctcaacccaaggaatgtgaccacagagaacaagagctggatgggaaatcaaatggtgctttacgcagagctgggcacatggcgattgctcctcaacatacagggcttcttatgataaaactaagcgagattagaaactgtgattcagaccaagaagcccaagctaaatttcccgctccataccccttgaatcagttatgtgactcacttattacccataaccagatagaaaagctagaccaaagaacacaaccacgaacacatcacctttcaaacagaattcatgttgctctcaagagctattttcagactgatatcttatccttcttaatgcttcaaactaaatcctgttcagacatgcttcaacaatctagtgaaatttgtgaaatggatccagataaacaagatgctcttaatagtattgagaattccatttatagaacagccttcaaattacaatcagtgcaaactctgtgccagttggacttgattgacagctccctgattcagcaggtcctactgcgtccaagtttctgggaagctcgcaagcactccctttctgtgcagcaactttctcaggcactccaagagctgtttcagaaggccagggaggaaaacccaggacaagtgcatcccagagctccggaactcactctgagccttctcacgacaatgtacaacagccacaaagagactgttacttcaaagcaagtactcttcaaagatacattgcaagtattcaatttaaagattgttcctcctacatgtctagctctttttcaactctatgcagaaaatagcaggggaggctatgattctgggccacgcatgactcgaagggttttgagaaaactactaacagatctacagcagatcccaactttcgtgggagagagtcgtgctctgtgccctgtggaaagtgccacccgcagctgtttccaaggggtgttgagcccagcaatcaaagaagaaaaattcctgtcttgggtccaatctgagcctcccatcctcctgtggctcccgacctgccaccggttatcagctgctgaaagggtcactcaccctgctcggtgcactctctgcaggactttcccaatcacgggactcagtgacgtaagctgtgcttctattttaactggcagataccgctgtctgaagtgtctcaactttgacatctgccagatgtgtttcttatctggtcttcacagcaagtcccatcagaagtctcatcctgtcattgagcactgcattcagcagatgtcagcaatgcagaatacaaaacttctcttcaggaccctcagaaacaaccttcttcaggggcgctgtaggaagaaagaagcagcgagaaggcagcagctgctggaccaggtgaatccaaagggtgtgcctcaccatgcgcaggccagaagtgttggctgctgtggagaattcaaaacagggacctccctggacatcaagatggaagagcaaatagtttctcatgctggagaaatgctctccagtgtggtggtcgtatcttgtaaggattcagtcccacatcaagtagtgtctttgacaatggaaggaattgcaatcccccagctcagtgccaaaagtgtgggcagttttgaagctttttataattccattaaacctatccagattatcaacagtgccatagaaaggatgaagccagggaaatttccctatggcaaaacaaatttatttcgcatttcttctgtatacattcagtatacactacgctgtgacatgaggcagtctctgttgaccaaggacttgacaaaggccggtgaatttaccatccactctgctcctcaggaggggaagttgactccaagtcctgtggacttcacagattatacctgcaaccttacagaatatcaaagagagagccttgctccccagatttctcattcgagaacaccccaactcaatgaattgtgtcatcgtgcagctgcttacaggagagctggtggtgaaaaggcatggggctgcaactggctgtttacctgccgcatgctgaagaccaacttcaaagtggaatttgaggccaccatcgacatgcgtcttcatgctaaccacctggtcacagagaacttcctattgcagctctgcaggactcagcccaggaggagggaagcacagaaaacaggggtggccttgtggatatcctgctggaacttgggctacatcaatgaagaaaaagagacaaggatttctgctctcggctgttcctgtgcaacaatgttcctaaaatggccagcccctcttcagatcatttgcagggatgggagaagactgcagattgtagccacagctgtttataaatggagtgtaatgaaatccaatctttcattccgatgtgtgggagccaagggctggaacatggtgccccaggagcctgggccagactgggtcaggctccttaaaaaacagttaaaccaatacaaagacaagttgcaagctatatacacctcccaggaagaaagaatttgtcgatttgaaacaaggattcacaaactcaaaaccaaccaggatagtctatggaccaagctacaacagataagacgggacctacaggcaaggttgcagccacccggtccttcatcttcttcctttcaaaatgtggggaacaaggttgaccattcttcaactgaaaaggttccaaagggaggggattatttgcagatcaagaatgccactgaagatgcttcaacaggggaacctcttcctaagcttgatgaggttgacagaagtcacagaagtcacacaaatgcagagcatgctctgcgaaatccagaatcaccagagaccactttgcacagcaccagggcacaaagccaaacacaaaagatgccacagaaagtcattagtgccctacccagttatcaggagggactgaagcaggacatccccaaaatggttcctgctgaaatgagcagtcctgctctggcagccgtggaaaagaaagaggcaggtaacatcaaggagagaaaggatgagctggaggaagaggaactgcaagaactattgtcaaaacttatggatgccttcaatctagaaacgccatcaggcccggagtcttcagtaaacatggacctgtacagtggagctcagcgagtgtgcagggccttctctgcccttgttgatcaaattgccttgcccaatttgaagtga

SEQ ID NO: 137313 - DNA, 290 bp, Homo sapiens
tttggcggattatcggaatacctctgttactggggtattcgctggtttgttctagagtgcttttggcctgcttttggcctggttccgatttttggccgcgaagcaggcgaaaaacgtcgcacttgactgtggaggcgtttcccgtctggtcatatttgtatcctggcgaaacccccaggttgcacccacgagcgcacaccagaaccgtcccagccgcaatccggtatccagaccgccaaacacccaacgggttgcgaggcgcaaacactatgcactcgcagatggataca

SEQ ID NO: 137314 - DNA, 996 bp, Homo sapiens
atggtcactgaggagcatcgtctcatatgcctggcctacatccagatcacgtatgtggaaccgtactttgatacctacgagctcaaggaccgggtgacctactttgaccgcaactatgggcttcgcacattcctgttctgcacgccgttcacgccggatgggcgcgcacacggggagctgcccgagcaacacaagcgtaagacgctggtcagcaccgaccacgccttcccctacatcaagactcgcatccgtgtgtgccaccgggaggagacggtgctgacgccagtggaggtggccatcgaggacatgcagaagaagacacgggagctggcctttgccaccgagcaggacccaccagatgctaagatgctacagatggtgcttcagggctctgtagggcccaccgtgaaccaggcacggctggtggaagtgagcttgcaagctagcaagctggacgtcacatgtgagtgcttttggcctgcttttggcctggttccgatttttggccgcgaagcaggcgaaaaacctatggcaccgccccccagtcgtgctactctttttacgtcgcacttgactgtggaggcgtttcccgtctggtcatatttgtatcctggcgaaacccccaggttgcacccacgagcgcacaccagaaccgtcccagccgcaatccggtatccagaccgccaaacacccaacgggttgcgaggcgcaaacactatgcactcgcagatggatacactgaacggagatggacgaacgcaccttgcagggcagagagctcgttccccccgaactgcccgtccgcagcgccaataccggattcatacgacaagtgaccttcccggattggttcgtaaatacgcctcaggctgctgcctcaggatctggtattgctgtgcgtggatagagcgggcgctgtctctacaagttggggggggggtcttcggggatccattgtctgaaggacaggcagagtgcgatcacggttcgacgtga

SEQ ID NO: 137315 - DNA, 3117 bp, Homo sapiens
atgttgcagcaggatagtaatgatgacactaaagatgtttcactgtttgatgcggaagaggagacgactaatagaccaagaaaagtcaaaatcagacatccagtagcatcgtttttccacttattctttcgagtcagtgcaatcatcgtctgtcttctctgtgaattgctcagcagcagctttattacctgtatgagtaaaaagtggttggcggtggttatcgtgggtgtggtgctacaaggtgccaacctgtatggttacctcaggtgtaaggggcaggaggtgagagaaacatttgcagagccatccctgcaggctactcagatgaagttgaaaagagcccgactagcagatgatctgaatgaaaagattgctcaaagacctggtcctatggagctggtagagaaaaacatccttcctgtggactccagtgttaaagaagcaattataggcaagactctaaaaatttactatttgggtgctccagctgaggctgcaacaaaggaggacgagagaacaactagtggaccagggcatcatgccacgaattaccacttcctcttgaaattcgacttctatctttcttggttacacttcgtccataaagatgctattctttcgggtcaccctcttgttcggcttctttccactcgtgtgcttcgggggcctaatgatgtgtttcacggggtgtcatccgtggacagtgttttggccattttcgtccttgccgaacctatgggcagtttatctgccagcttagagaaccaactagaagctttcttggatggaactttaccctcagccaatgaaattcctccactacaaagcagcagtgaagacagagagcccttctctctgatcgaggacctccagaatgatctgctgagtcactcaggtatgctggaccattcacactcacccatggagacttccgagacccagtttgctgcaggttttcgcctgcttcgcagccaaaatcggaaaccaggccaaaagcagcccaaaggcactctagaacagaccagcgaatacccaggtaacagaggtattccgataatccgccaaagtttggttttccgtgtatcagtgacaggtactacagtcaacttctgtgatgctagcaccaatcataacagggtttttaaggtgttgcaggcgctgccgctggattcgctgcataacgtactggttttcttgtcgatgccggtcgtcgctttcagcgtgattaatattgtcctgacactaagctctttcttatggcttaatcgaccactggcctgcctgtttattctggcgcggctgcaccaatatttcataatgacttacggcatcgtcatcgaccgctcgatgattgccaatattattgataccactccggcagaaagttatgcgctgatgacaccgccaatgtcatcaacgctgggattcagcggcgtgcttgctgcgctgattgcctgctggatacaaatcaaacctgccacctcgcgtctgcgcagtgttcttttccgtggagccaatattctggtttctgtactactgattttgctggtcgccgcactgttttataaagactacgcctcgttgttccgcaataacaaagagctggtgaaatccttaagcccctctaacagcattgttgccagctggtcatggtactcccatcagcgactggcaaatctgccgctggtgcgaattggtgaagacgcgcaccgcaacccgttaatgcagaacgaacaacgtaaaaatttgaccatcctgatggtcggcgcaacctcgcgggcggagaacttctccctcaacggctacccgcgtgaaactaacccgcggctggcgaaagataacgtggtctatttccctaataccgcatcttgcggcacggcaacggcagtttcagtaccgtgcatgttctcggatatgccgcgtgagcactacaaagaagagctggcacagcaccaggaaggcgtcgcccggatatcattcagcgagcgggcatcaacagtgctgtggaatgacaacgatggcggctgtaaaggtgcctgcgaccgcgttggctgtctgaatctggtgtatattggcgaagcctgcaatgaccatttggcaaaaaaacccccaaagggccagcgtgaaaagcatcttcccggcgctacaacggagtatgccggtgtctcttatcagaccgtttcccgcgtggtgaaccaggccagccacgtttctgcgaaaacgcgggaaaaagtggaagcggcgatggcggagctgaattacattcccaaccgcgtggcacaacaactggcgggcaaacagtcgttgctgattggcgttgccacctccagtctggccctgcacgcgccgtcgcaaattgtcgcggcgattaaatctcgcgccgatcaactgggtgccagcgtggtggtgtcgatggtagaacgaagcggcgtcgaagcctgtaaagcggcggtgcacaatcttctcgcgcaacgcgtcagtgggctgatcattaactatccgctggatgaccaggatgccattgctgtggaagctgcctgcactaatgttccggcgttatttcttgatgtctctgaccagacacccatcaacagtattattttctcccatgaagacggtacgcgactgggcgtggagcatctggtcgcattgggtcaccagcaaatcgcgctgttagcgggcccattaagttctgtctcggcgcgtctgcgtctggctggctggcataaatatctcactcgcaatcaaattcagccgatagcggaacgggaaggcgactggagtgccatgtccggttttcaacaaaccatgcaaatgctgaatgagggcatcgttcccactgcgatgctggttgcacatttccgtctgcgcgtctgcgccgtcgtcacttctccctcgctgtctccgtcgctcgcgcctgtgccctccgttgccgccgctgttctcctcgtctccttgtccccggtaaaaaccaagcctgtagtggagcacaagtatgccggtgggcaatgtcttgtacatatccaagcattgatgaacgaggatactgagaagcaccaggtgcattattctacgccgaagtgtgggcggcatgcacaatggtcagacgcgtactga

SEQ ID NO: 137316 - DNA, 1440 bp, Homo sapiens
  misc_feature (1)...(1440): n = a,t,c or g
tcacgtccagtctttctctgtcaggtaaatcggggaggtacatagtttttctacgccgctctgtaggaattcaaagtccgagtgctgtagcgacggtacgccttcttctagccggttctgatcgtcgttttgccgctggatctgctggatgcgctgtactatcccgggctgaaagaagctaggagccgggttgttgctaccgaatccgccggtcagcctttcgactgcgtgcaggaagtataggaaatcgtgataagccggttgcgtggccagataccggtagcggtgacaataccgaggtttactttcgcgctcatcaggcaggaatccttccagatactgttctagcgggccctgctcaaagggtggcagtttctggaggtactccagtggactggtgaacgtgtcctgccaggccttcttgtcgtctgcccgacacatcatttttatcttttttaatgcccagactctctgcttttgatcgaggctagccatgttgttcaacgagttgcacaggtgtacacccccaacaacttgtccctcgtggagcgtgcccaggcaacctgccagggcttctgtgagtgtcacagacacttcttcttcttcttcttcttcttttaatgcctgtttaagcaagttccctgatggctgctggaagctgccagggctcctgtgagtgtcacagacacctttttcttgcttctgcacggccaggaggagctctccagatgacactgcatcactggtggcagtggccggttgtagcctctgtcgccctcgagagctctgtgctgtctccagcagaccttgctgggcttgtgaaggctcatactgcagagggtcatcgtcctggaccgggtgtgcttccagctgccacctcaaccctggaacttgagtaggggtaccacatgtgacgtccagtctgctagctatggtacccccttccggtaatgctgcaggggcgcccacaggattggaagggttgcccagctttgatttcaggtaggcaaacaagnccgccttggtacagtaggcgctggggtacttgtacagtacttgtgtctggtagtggtacgaaacgctagtaagttcttgtaggtaagctcgctggaacaccggccgcaagggaggtgtggcataacggcatagtcgggatccgtgcacgttaacgattactaggatttggcggattatcggaatacctctgttactggggtattcgctggtttgttctagagtgcttttggcctgcttttggcctggttccgatttttggccgcgaagcaggcgaaaaaccttgcagggcagagagctcgttcccccgaactgcccgtccggagcgccaataccggattcatacgacagtgacttcccggatgtctcgtaatacgcctcaggctgctgcctcaggatctggtatccttcgtgaagatgcggcat

SEQ ID NO: 137317 - DNA, 3243 bp, Homo sapiens
ttagtcgactctaaggatcccccggactttccagcagtcgagcattaaccagaaatcctcaccgcatttttcacgcatatccgcgaccatagcggcatctttgcggatccccgcatcgccatcatgtggcccccagtgcgtcggcattttgccaccgataaagcccatcatcttttgccagatccggacgcgcacagagccagatcgacacaagaaatcgtattcatcaccaggccaccagagccggagtaatacagggtggcactgagcatttgatcgtggatcagttctgatatcactgacacatttaccctcaatgaaacggttaagatgtttttcgacaataaaacagcccatttcaccggctgtcgaaacggcgaatccggtctggccgttttctgcttcgacttcaacaaccaacgtgccaagaacgttaatgccaaatgactggcgtgactgctcgtaatcgcggtatttactcatcggggtggcaatatgatcgtctatccagtgattcgccccctggtcgtgataatcaccgccgccagcgcctttttctgctgtcgcaccgccagtaaaccaggcgcgaacctgtttaatttttggtagggtcatgatgttctccattgttatgagggtgaaatatgcgctggcgcaggcaatggccttgcccgccagataatcacggtattcttcattgatttgtaagcgggtaccgaccaccgagatcgcagcggtaagctcgttattggcgttaaacaccggcgcagcgacacaacggacatcggcgtaatcttcgccgttgtcatagctccagccctgacggcgaatacgcgccagttcttcgtgaagttgcagcccttcgataatactttgctgtaccgctgcaggttgccaggcaagcaggcatttacctattccggagcgataaagcgaaaggctttttccttcatgggacgacacgctgatagtggctgatgactccactatataaatggaatggtaccgagctgattgacctacgcgcagagttggcttcgctaccggcagcggcagacgctgctcaataataccgccaccgaggcacacttcaccgttatagaagacggcagactggcccggtgtcacggcggcaaccggttcatcgaaaatcacttcaatgcgatcatcgtccagcgccttgacggtgcaagggatatcggtctggcgatagcgggtttttaccgtgcaacgcatagtgccggtgaatggttcgcgatcgacccagtgcaactgctgggcaatcaacccgacagacatcagccgcgggtgttcatggccctgagcgacaaccaggaatgtttgttttcgacgtctttgtccaccacataccacggttcttcggtaccttctttggttgccaccgatacccagacctttacgcaatttcatcgccatcgacggtaatgataatgcccggttgcgtccgggagataacggtcccaggaactcgcggaatttacgttcgccaatgaagcaaatgccggtagagtcttttttcttcgcggtgaccagaccaagatcttcagcaatcttacgcacctgcggtttttccagttcgccgaccgggaacaggctttgcgcaatctgctcatggctgagcgtataaaggaagtagctctggtctttattgctgtccagaccacgcagcaggcggctcttgccatcgacatcggcccgacgtacgtaatgaccggtagcgatataatcggcacctaaatcttcggcggcaaattcgaggaaggctttaaatttgatctctttgttgcacagaatatccggattcggcgtgcgaccggctttatattcggcaggaacagttcgaagacgttgtcccagtactcggcagcaaagtaacggtgtgcagttcatgccgagagccgggtccaggatcgtctttaaatccggcttatcggcgtaatgatccatggcaaacagcttaccggtacgcgcaaagccgctttgcacttcatcagcaatcatcacaataccgtgctcgtcgcacaggcggcgaatagcggcaaccagctcttttggcgcaacgttgaaaccgccctcgccctgcaccggttcgaaaataatcgccgccacctgcttcgcttcgatgtctgatttaaacaagcgttcgatggcgtcgagggagtcctgtgttgaaatgccgtgtaaatctgacggataaggtacgtgatacaccgaaccagggaacgggccgaagccgattttgtacggcgcaacttttccggtcagcgccatggtcatatacgtacgaccgtgaaagccgccgctaaacgcaatcacgccagggcgtccggtatgggcgcgagcaattttcaccgcgttttccaccgcttccgcaccggtggtgaagaacgcggttttggcctgcccgctcaccggggcaagggcgttgattttctccgccagggtgacgtagctttcatacggcacaatctgatacgcggtgtgggtaaactgttgcagttgctgctccaccgccgcgaccagatcagggtggcgatgtccggtattcagcaccgcaatgcctgcggcgaaatcgatgtactcgttgccctcaacatccttcagcgtggcgttttcagccgagccgcgcccatcgcggtaaacggcacacgcagcgtgcgcccgccggggaacgggtaatgcggcagattggcgaaggcatcgaaacgttcggcgtcgccgcgcagcagttcggcaatcaaacgtccggctagatgagtacaggtcacgccgtggccgctgtagcctcaggaggtcgttttcaaaccccacggctcggagagaacacaggcccttggtgaccacagtgttgagggaaccgggcaggggctctgccaggagccacgctgttgatcctggcagggtttctgccgagcgcacaccagaaccgtcccagccgcaatccggtatccagaccgccaaacacccaacgggttgcgaggcgcaaacactatgcactcgcagatggatacactgaacggagatggacgaacgcaccttaagcaactccaccacggtttctgcaaatccaaccacatacatagcaactgcaacagcgttggcaaaggcgaagattagaccaattgcaccaccaaattctggccctagacttctagatattaaataatatgctcctcctgcttccaacagcagtttcctcaaaaacaagggcaacatcgccat

SEQ ID NO: 137318 - DNA, 4632 bp, Homo sapiens
atgaagaaccctaatcatggacttggtacgatggtttatcaagtcccgttttcttttacaaacttccccttcactgcctgtctcttatctgaggcctggtacagaaattcagaccgctatttatccaagtacctccttaaggtagtcttaaggctcaagccagctcagaaacggcagaaagacttgctttcttgggttaaaggagggcgattacagggtttggcggccagctcgtgtgaggagaaaggcgggtcgaggtcaggctcccctgagctacttcctggtccgatcggactcgccttcggacacccgaaacacccccggcccggctccctcgccctttgccctgtctcctcccctctcagtgacccaccaccactgagcccgtgtgcgttaccatacccttccactgctgtgaacctctgtgaacgcaatatacacgtacaatcagcatgcacccccatcaatcgatccggcagtaaagcacgagaaacggagaacgacgcaaaatcatgcacaaacataaaaaacaaaaaaccagaaatatatagaagtaataacgacagcgcaccaaccagccacgccagagaggatggctacacgagacgctgggcaagagaccgaagacacaacgcgcagagacccaacacgacccgccagagcaaaacacacgcgagtgggaccgaggaggacatcagctcgcaagcggacacagagcacacaaccagcaagagagacacgacagagagcggagatcgagcagcatcagagaagcctaccacgacagagcgacggaagcgcaagagcgcagagacacagcgacgacggacgcaccaccgcgctcaccacacagctcgagaagacgatgaagaccgacacagcagaccacgacacgactacacacgcgcgcacacagccagagccgcaccagaagaactcggaccagccgaaagagcacgcagtgaaggcccagacgacacgaaaccacgaacagagaacaacgaagtcagtagcgagcagacgacgaagactcgcagcaacacaacaaggatagcgacactacagcgtgcacacgacaacgcacacagtcgcggacaagcgcagccgcgaaatatagacagcacacagcaatcggcatacagcacgaagcacggggcaaagacgcactcgagacagacagtacaactcagaacacaaccgacgcaagccaacaagacacgcgaagcacagcagagcgacgagaagaacaggccagaagagaagactcaaatcaagcaaagacaaggaggcgacgacaccacagcgaagacgaggaaccgacacgagctagcagagggcgaggaggtacgagagacgagacgtgacacggacgagaagcacgatcgcgaagaccgagacagcatactggagagagccgcgcacacgagccaccacgagccgatacacagaagcgcgaacagtagcagagagactacgcgcataccgcacggccaagacagtcgacgcagtacgaacgcacaacaagaacagacaggagaccagcacagacgagcacagcagcggagacaaggacggagagctcgactaacggacagcaataaaaatgctttgtacaaaataaaaggacacagaaaagcaaagaaatgcctactgaacagaatacataaacacatcacaactatcatcaacccatttgaaggaaaaagtcaagcacacgcaattaatccatatgcgaagcaggagcaagctggaagacaatttgggcatcactgtctagtacaaccaatgcctgcaggaagatgtcagatacaccatgttgaagatcctgcatcagtatatgatgaagctatggaactaattgtcaaacttgcaaatcatgggctgattcatggagattttaatgaatttaatctcattttggatgaaagtgaccatatcaccatgattgattttccacagatggtttcaacttctcatcccaatgctgagtggtacggaggccactggagaattctcaaggaggccatggcatgtgcctctgaaagagaggggctgacgcagggcaccaacttgaatgaggaaagtccggctgcattgggcccagtcagaagctgccagaatgacccaagcaaggcacagggaggcccaagggaagtctatcaaactaacagcagacttctcagcagaaatcctacaagccagaagagactggggggggatcctctagatcgacctacagctacctggaccaagcagcgtcaggcccagatacccatattcagaaatacatctgactctggggacagtgattccttaagggacgtgggcctcttcttagtcacttcttcacgaacgatcctggatgcaaatgaagaatttaagtccatgtcgggcaccatccagctgggccggaagcttatcacaaaatacaatcgccgggagctgacggacaagcttctcatcttccttgcgctagccctgtttcttgctacggtcctctatattgtgaaaaagcggctctttccatttttttgcctgcaggttggatggaacacagtgccccacttttctgcaagtagctggcttgtaaagggtgaacagagccatgggaggaaggtctggcattgggatgccgccctggggacatacgaaccgcctccttccaccattgtgcactatgggaggccgctgctgcgtggagcacttaaagtccagcctccaggaccggatgcccctcctgtctcccgctcccatcgtgcccttaaatgccagatctggtggagggaagagagaagagcgataagggcgcacaaccgcaaccacgcactcagtcacgcagcgcacggacgaacggcagcggcgtgcggatactgcactcactttggcggattatcggaatacctctgttactggggtattcgctggtttgttctagagtgcttttggcctgcttttggcctggttccgatttttggccgcgaagcaggcgaaaaacctatggcaccgccccccagtcgtgctactctttttacgtcgcacttgactgtggaggcgtttcccgtctggtcatatttgtatcctggcgaaacccccaggttgcacccacgagcgcacaccagaaccgtcccagccgcaatccggtatccagaccgccaaacacccaacgggttgcgaggcgcaaacactatgcactcgcagatggatacactgaacggagatggacggacgcaccttgcagggcagagagctcgttccccccgaactgcccgttgtagcgccaataccggattcatatcgtggatgcttccgtttgtgggccgtgaagtcccagcggtgtgagggaaaagaacgagggccactcagcgcgtgcgcccgcgcgtgcggggcgctgctgttcgtcggctgcgtcggcgtgtcgtgaggctgtgtcggcgactggtggggggtgaggcgtcgcgtcgccgcgtgcgtgtcgtgtggccgtgtggcatgtgacgacaggcaatactgcttatattgcttgactgcgcctgggttaacagtaggagctgatgaacgtatagagatatgaatgccataccggatgctaaggcgatatagagtgctacgacggagcgagccgtagatatgcgcgacagaggctggatttggcccgacgtagccagaaagacggcgactatgacgcgtagggagccaggggagccggggatgtgaaattgcggatttggtggttgtgggtgccttgcacttgactaacttgactttacttgccatcgtataagctgcctgatttttcagtgggcggttgtccatttgtatcagatcatccaacgaagaagcatacccgttgtccatttgtatcagatcatccatacgaagagcatacccgttgtcgatttgtatcacaacatccatacgaagatccataccgttgtccatttgtaacagaacatcgatgcgtagatgctcacgcgtagcgaattgatggacgcgggagccggtgtaaaagtgtacaaccacccgtacagggtagcatggtttaacaccgggatgcacacctcgaattttgcccgatagcggtagcggagttgaaacgtttgcttgatttgaagtacccagagagtttgggccgtgagggatgactactagagggcgtgtgactgtgtcagacaaagaactgcttagaatgtggagctgggcgtaaccggttggtttgggacattggtggccggcgtaccgaaggcggggacacctgtcagagtgttgaccggagtagaagcccgcctgcttacagccgcctgctttcagtctaactactactgccatcgtatagcgccgatttacacccacgctcgtgcacccgtgtatcgcaaccgtaacacgcaagtacgggacgcctttaactaggggccggagtgccgtaagaaaggggcagctacatatacgccggaatacccggtcttgcgggaaatgatatacggcctgggtgctttttgggggcaccgaaacgcccgtgtgtgacgtggatcttaacatgttgatagagacatccatgaaaaaggttgggcgtggccccggggaccaggcgacactgactagtgcggcgccccgcttgtccatgaatgtatgcat

SEQ ID NO: 137319 - DNA, 1440 bp, Homo sapiens
ttacttgtctgccttactagagtgggtagcaggttcgtcttccccttgactgcaatccaacttgccattacacagctttgatatttccaaagtgacccattggccagagttgctaaacagctctgaacctccctcaggggctgagtctggagttgcgggatctcttgggcccccacctaaggaactagcactcaaaccccctgctgacaccagaagacctccagaggggaaaagtaggacactctccactggctgcccatgctcaacggagagaacactctcactcgttcgtgcatcaaacatcttcacagtatgatcatatgatcctgttataaagagatccggattaagtttgctagcacatccacacctcacataatcagagtgttctttaaatgtcaaaatttctttggagtttggaatatcccataatttaactgtataatcatcagccccagagaccacgtgatatttgtcagctgtaaaatctactgtatgaactgcttttgtatggccttcaaactgcctgaggggagccctcccacttatatcaaaaagttgaactccaccatcttcactgccagccacaagcaatctaccatcttgtcgaaaagtagcacagtatgctgtgtctttaaatcgagaaaaggtttttataggttcttgggagtatcggccataaatgtgaattcttgaggaagctgtgacagcataattatatggaggctgaggagaaaagtctacttttgaaactgcaccaaattccttaatctgaacaggggtctgagggagcctcgtaagcaaaggcaaagatggaaatgtgtccattgccttggagagttgctgattactccgggaactaacaacggtggacaggaaagggtgtaatcgcagagaagaacctaggtcgaagcttaattgaggggaacttgagccggttaaagaatttggccactctcctatatagcccgaaagtttcagttgcattgctgcggaacgttttttagccagaaggcgaaagaagaaatcggaagtgacgtcgcggccaaaacaagcccgggcttggaggcctgtactgaagctggcctcagatgggaaggcccgactcgctgtctgctgtcgtcggtggtcgcgagaccttgcactctcaccgggtcggcctccagcccctgtgcccgggatccgctcgccgcggatgagcgagagtttcttcctgggacttttcgggcacagctggccggtggcgacagaacggactttctttcctgcaagagtctcccctccagcgggagacagcgggctcctgtctcgggacgctgggacacctgtcgcctgtgaggcatcatttattttcatagcaccttcctctccttgtagaataattccaggatcaggaagaaacgaggggctcctgttattagcatccacaggaactagcat

SEQ ID NO: 137320 - DNA, 766 bp, Homo sapiens
tgcttagcgtcgtgcgctcgcgtatacatatgggggtgggggtgggggtggggtgcccagttcgctatcggaatcaggatgaccatgagctacaaattacacacgggaacaagattctatgtggaattgtgtgcgataagggcgcacaaccgcaaccacgcactcagtcacgcagcgcacggacgaacggcagcggcgtgcggatactgcactcactttggcggattatcggaatacctctgttactggggtattcgctggtttgttctagagtgcttttggcctgcttttggcctggttccgatttttggccgcgaagcaggcgaaaaacctatggcaccgtcccccagtcgtgctactctttttacgtcgcacttgactgtggaggcgtttcccgtctggtcatatttgtatcctggcgaaacccccaggttgcacccacgagcgcacaccagaaccgtcccaggcggaatccggtatccagaccgccaaacacccaacgggttgcgaggcgcaaacactatgcacctcgcagatggatacactgaacggagatggacgatcgcaccttgcagggcagagagctcgttccctccgaactgcccgtccgcagcgccaataccggattcatacgacaagtgactttccggattgtctgtcaatacgctcaggctgttgctcaggatttggtaatgtgtcgtggataatggcggagattttgataagttgggaggcatctcaccctcttccccgctcatgcttctaa

SEQ ID NO: 137321 - DNA, 3797 bp, Homo sapiens
  misc_feature (1)...(3797): n = a,t,c or g
atggtttacaaaatgcgttatcggtctcagcacccctatagcatcaaggaaaagcagatgaagagtgaagtgttgtccgttaaagagaaaattggttatggcatgggagacgccgccagccacattattttcgataacgtaatgttatatatgatgttcttttataccgatatttttggcattcctgccggttttgtcggaaccatgtttttggtcgctcgtgcactggatgcgatttccgatccttgcatggggttgttggccgatcgaacgcgctctcgctggggtaaatttcgtccgtgggtactgtttggcgcactgccattcgggatcgtctgtgtactggcctatagcacgccagatctcagtatgaacggcaaaatgatctatgcagcaattacttacaccctacttaccttactttataccgtcgtcaatatcccttactgcgcattgggtggtgtaatcaccaatgacccgactcagcgtatctcgctgcaatcctggcgttttgtgctggcgaccgcgggaggcatgctttctactgttctgatgatgccactggttaatttaattggcggtgataataaaccactcggtttccagggcgatttaagcccgatgttctctacacctgaagagatcgcccgacctggaccgtacgaaaacgacgttcacgtagtgggcgcatcctcactggctgccggtcataaaacgctgatcccggaactggtacgaagcgctgaacaacacatggggacgcgaagatatctgcgtggtcgacgggtggcagtcattccgccgacaggattacgccttcctgcaagagcgcggcagtggcggcgatttatggtccagcacactcgcccaggccatgacgctggtggaaaggcgtcaccgcgtcatcaggcactaagtacgcagctgcttgatgccattatgccgtactgcggtaacaccctgcgactgggcgttaccggcacccccggcgcggggaaaagtacctttcttgaggcctttggcatgttgttgattcgagagggattaaaggtcgcggttattgcggtcgatcccagcagcccggtcactggcggtagcattctcggggataaaacccgcatgaatgacctggcgcgtgccgaagcggcgtttattcgcccggtaccatcctccggtcatctgggcggtgccagtcagcgagcgcgggaattaatgctgttatgcgaagcagcgggttatgacgtagtgattgtcgaaacggttggcgtcgggcagtcggaaacagaagtcgcccgcatggtggactgttttatctcgttgcaaattgccggtggcggcgatgatctgcagggcattaaaaaagggctgatggaagtggctgatctgatcgttatcaacaaagacgatggcgataaccataccaatgtcgccattgcccggcatatgtcgagagtgccctgcatattctgcgacgaccgcctatgcatcgtgttcctagaaaccctaaggtcaacctgcttcctggaaccgctatggccaatctgctgtcctaggaccgcaatggccacgctgggtcctaggaaccgctatggctttgatccattggctgtttcctcggggacccggtcttgttccttgggggttcctcgggcacaccgcttcgcccttgcgggttctcgggacccaggctatacgcacaagcgcgttcttgccatattccaagcctttaacgcgttcccggaaccaccggccaacacgccggaagatccggcaggtctctctctactgccatcaggccacacgtctgctcgagagcctggcctctgtctcccaatcaactcgctttgccctattgttcagtctctctggccctcatcactgcgctctacccaaccgctcacaccccttcccagctgcccctcccaggcccatcaccctggcagcgtggctccgtgcggtgcagcctggtacccggcggggcacacgcacaggaagctgcctggcgtgttctcgcagcgcccgaggtcacacggcggcggcacgcggtggcactcgtccacatctgtaggcacagaccaggcggctgggactggggcagacagccccgggagaagcgacgcaaggaggcaggggtcagcagggaagcgggcagcgggaccaagcttgggccagagccaggatggggacccggccaggaccagccggcagcaggggcacagtgcagcagcaggcaatcgtggcagggcagggtttggtcagcgccacagggcagaaaggcagcagctttggggaccaagctcacgggaaggtggggtaggggctagagaagaacaggagcagtttggggataggggctctggtgtggcagggttggaatcggggtcgcggtcaggagattggttgccgcagtttgcaggacagtggccgcggctgcgggaggcagtcagtcagcgcagggctcacgcagcgcacggacgaacggcagcggcgtgcggatactgcactcactttggcggattatcggaatacctctgttactggggtattcgctggtttgttctagagtgcttttggcctgcttttggcctggttccgatttttgggcgccgaagcaggcgaaaaacctatggcaccgtcccccagtcgtgctaactctttttacgtcgcacttgactgtggaggcgtttcccgtctggtcatatttgtatcctggcgaaacccccaggttgcacccacgagcgcacaccagaaccgtcccagccgcaatccggtatccagaccgccaaacacccaacgggttgcgaggcgcaaacactatgcactcgcagatggatacactgaacggagatggacgaacgcaccttgcagggcagagagctcgttccccccgaactgtccgtccggagcgccaataccggattcatacgacaagtgaccttcccggaatgtctcgtcaataccgctcaggctgctgcctaggattctgtcaggtgttgttgcccgatgacaacggtaaattgcagccgttaacacatccgcaaggaatgacgccgtgggacgatgccatcgcgcagtggagttttgataaaggcctgcctgcgggcgcgggcaccgacacgttacccggtgtaccgtaccangattttgccgctaaaaagcggcgagaaaacctacgggctggtgaaatcttaacgctcgatctggcaagcgaaggatcaccccacgcccgccaggccagcgagatccgtcagcatgtgctgaacactacccgactggtgaataatctactggatatggcgcgaattcagtccggcggctttaatttgaagaaagagtggttaacgctggaagaagtagtcggcagcgcgctgcaaatgctggaaccgggtttatcgtcgcccatcaatctttctctgccagaaccgctgaccttaatccacgttgacgggccactctttgaacgggtgctgattaatctgctggagaacgcggtgaaatatgcgggtgcgcaggccgaaattggtatcgatgcccacgttgagggcgaaaatctacaactggatgtctgggataacggccccggtcttccgccaggccaggagcagacgatatttgataagtttgctcgcgggaataaagagtcggcagtaccgggggtagggcttggactggcaatttgtcgggcgatagtggatgtacacgggggcactattaccgcgtcaaccgaccggaaggtggtgcctgttttcgtgttacacttcccccagcaaatggccctgaacttgaaaatttcctga

SEQ ID NO: 137322 - DNA, 1488 bp, Homo sapiens
atggtgggggctgagttcaccggtggtcagcatcgatgccatctggaggataaagtgcgggaatgtttcatccagcttccggcattcgatgtcactgaacttgccggtgatgctggcccggtcagccagataatgcagtcggttgccttcctgcaccagacgggctcccaggcgcagtgtaatctcccgctgcaggcccctggtagggttgctcattacagttctccactattgtcagttcagggtgatgctcatcaggcaggtatagggcccattgcggtcctggcggcgttcggcgtataccgcgaggactccggcgatatccggaacgtccctgccggtgtaatgacagacgctaccgtgccactggtatttgccggtgcagtagcgaaagattcgggactcaggatgctggcggtatatcgtcattgccctgcgtttactgataattttcataccgtgttctgcgaacgaatagatttgcctgccaccaacaatcagatggtcagggacacggatatcaacgagctgaagcgcctgcaccagacgctgcgttatagtcttatctgcctggctgggagtagtgtcgccggaggggtggttatgcgccagtatcactgctgctgcattgaaatacagggcgcgtttgaccacctcacggggatgtacctcggtactgctaatagaaccggcaaacagggtttcgtgggcaatcaactggttctgctggttcagatacagcatcataaattcttcacgctccagccccgccattttcagcttcagccagtcacgagcagcctgagtggagcgataagggcgcacaaccgcaaccacgcactcagtcacgcagcgcacggacgaacggcagcggcgtgcggatactgcactcactttggcggattatcggaatacctctgttactggggtattcgctggtttgttctagagtgcttttggcctgcttttggcctggttccgatttttggccgcgaagcaggcgaaaaacctatggcaccgccccccagtcgtgctactctttttacgtcgcacttgactgtggaggcgtttcccgtctggtcatatttgtatcctggcgaaacccccaggttgcacccacgagcgcacaccagaaccgtcccagccgcaatccggtatccagaccgccaaacacccaacgggttgcgaggcgcaaacactatgcactcgcagatggatacactgaacggagatggacgaacgcaccttgcagggcagagagctcgttccccccgaactgcccgttcgcagcgccaataccggattcatacgacaagtgacctttccggattgtctcgtaaatacggcttaggcttctgcctcaggattccggttatgcccattgcctgggatcgccgctcatcctataccccagttcgctatcggaatcaggatgaccatgagctacaaattacacacgggaacaagattactatgtggaattgtgtg

SEQ ID NO: 137323 - DNA, 1417 bp, Homo sapiens
atgcaggacaatggcacgggcaaagatttcatgatgaagacaccgaaagcgattgcaacaaaagcaaaaattgataaatgcgatctgattaaagagcttcagtacagcaaaagaagctatcaacagacgataagggcgcacaaccgcaaccacgcactcagtcacgcagcgcacggacgaacggcagcggcgtgcggatactgcactcactttggcggattatcggaatacctctgttactggggtattcgctggtttgttctagagtgcttttggcctgcttttggcctggttccgatttttggccgcgaagcaggcgaaaaacctatggcaccgccccccagtcgtgctactctttttacgtcgcacttgactgtggaggcgtttcccgtctggtcatatttgtatcctggcgaaacccccagggttgcacccacgagcgcacaccagaaccgtcccagccgcaaacccggtatccagaccgccaaacacccaacgggttgcgaggcgcaaacactatgcactcgcagatggatacactgaacggagatgcgacgaacgcaccttgcagggcagagagctcgttccccccggaactgcccgtcccgcaagtgcccaataccggattcatacgacaagtgaccttccgggattgtttcgtcaatacgcctcaggctgctgcctcaggattctggtaatgctgtgcgtggatagactcggcggagcatccgtgaacaagttgaggaggccattcatcggcatctcatgttgttctgatacggatacagcgcacagcagttgcctgaatccaaggtttcgtgaggatgacagtaccggttttttctcgaggatcgcaagtgaatcctgggttttaacatccagtttttacaggggaattcgcaagtctcatttttcaacccaaatccactacaatcaactgttcatttcatttggctttaacaactctttcacctgtaagccacaacttgcagcatattttcttctcaatttcaccagcaaagccaggcaatgcagggcccaacagcctgcagcaaccactggaacacagcctgtggttgcacatgccttccggcaattcaccccaagtccaaggttcagcaataacacccagggtcgcaacaaaatcattcctgtaaggccacataaccttgtggccaatgtaaggattactacgacatccaaatcaccctcacatgggccagcctttgctatttctggaacatgtttcataaaccccacgggtactatggacgagagtggggaaaacaacgttcagtggggttatcttctagcgttcacgcgtatgtgttgggcacactcgcacgcgctgacagcggtctcctgtcaacagaggggcacaacagacagaccacaaccagacagttgtcgcagctaa

SEQ ID NO: 137324 - DNA, 1780 bp, Homo sapiens
gagtaggaggtgtgaccggagggcgaaattggggcttcttctgctctgtgtgacccagaaccgtcaactgaaatgaccctgtctgtgtagtactccggcaggatgggcctcggagcgtaaaggcggcaaaaacaaaaatattaaaaaaaaggagagagggacaaaaaaaagaaaacccgaaagtttcagctgcattgctgcggaacgttttttagccagaaggcgaaaagaagaaatcggaagtgacgtcgcggccaaaacaagccccggcttggaggcctgtactgaagctggcctcagataggaaggcccgactcgctgtctgctgtcgtcggtggtcgcgagactctgccactctcaccgggtcggcctccagcccctgtgcccgggatccgctcgccgcggatggagcgaagagtttcttcctggggacttttcgggcacagcttggccggtggggacagaacggactttctttcctgcaagagtctcccctccagcgggagacagcgggctcctgtctcgggacgctgggacacctgtcgcctatttttaaatatccagattccaagaacacactggatactgctcttacaaaaccaagaggaaatcatgaagaaatgttttagttattgaaactacagttgaaatcatggatacatcaaacaaatcctggatattggagcccagcttatcgtggaaagaagtgtccccagcacttattagcctaacttgggcatgccagacattaaaatagaacatccactggacccaaattcagaagaagggtcagctcagggtgttgccatgggaatgaaattcatattgcctaaaccgatttgatatgaatgtgtgttctcgatttgtgaagtccttaaatgaagaagatagtaaaaatattcaagatcaggtttttcgcctgcttcgcggccaaaaatcggaaccaggccaaaagcaggccaaaagcactctagaacaaaccagcgaataccccagtaacagaggtattccgataatccgccaaacgataagggcgcacaaccgcaaccacgcactcagtcacgcagcgcacggacgaacggcagcggcgtgcggatactgcactcactttggcggattatcggaatacctctgttactggggtattcgctggtttgttctagagtgcttttggcctgcttttggcctggttccgatttttggccgcgaagcaggcgaaaaacctatggcaccgccccccagtcgtgctactctttttacgtcgcacttgactgtggaggcgtttcccgtctggtcatatttgtatcctggcgaaacccccaggttgcacccacgagcgcacaccagaaccgtcccagccgcaatccggtatccagaccgccaaacacccaacgggttgcgaggcgcaaacactatgcactcgcagatggatacactgaacggagatggacgaacgcaccttgcagggcagagagccgttccccccgaactgcccgtgggaagcgcaataccggatcatacgaaagtgacctgccggatgttcgtaaaaagcccaggtgcgcttagaatccggaagcgtgctggtagatgcgagctcgttaccattgagagcattatggactcattgttcgaaggaaagggcagattcgatccaatttgtgggcaatacggttttcccggtcggggaagaagtgccttacctttagccactccccatcactcacattaccacctgagctgcacctcctgtcagatcagtggcagcattagattctcatag

SEQ ID NO: 137325 - DNA, 714 bp, Homo sapiens
atggcagaagttgaaggggaagcaggcacatcttacatggacagagcaggagaaggagagcaagaggctatacaaggagatgaaataatcctgaaagatatacagtcaaaaggaacgatactagcagctcagaaatacatggaacctgttcttctgtgtacctctcaggcctctcagcactcaccaacaccattagcagaggagaggacaagtgaaggaagaaagagagcaatgaagctgactgaagcaaaagagagacaaggaagacagatccagcagggtgtccgctgtgcttctgatcaagcaaggcgcccattgccactaccgatcgggctaaaggcttgccattgttcctgcacagctaagtgcctggggggctgtgaaagcccacgcaagggaggtcagttattaatttttgagggacatgtaaaaatagacctggaaatattcactaaatctctgtggttgactagacaactcattgtaaagaaagaaactgagaaagctgttaagcatgcctctaacatctgtatcatgaggactggcttaacttttcagtctcataaaattgaagatgggctgtttggtttattggtaattgcaacagaagcagaatggtcttatgtttgccagtccacaaaccccgtagatgtttatccactcacggcagtgccagcctgctgcattatttcagctagtgacgttcctcgatga

SEQ ID NO: 137326 - DNA, 459 bp, Homo sapiens
gtgcgtgaactcgcaaattgggcgagggcacaaaataaccacttaccccttctcaccgaggaagagcgggagaaagggtatggcacagtcacaagggtgggtgaaaagatacatcaaggccttttgtaaaggcttctttgtggcggtgcctgtggcagtgactttcttggatcgggtcgcctgtgtggcaagagtagaaggagcatcgatgcagccttctttgaatcctggggggagccagtcatctgatgtggtgcttttgaaccactggaaagtgaggaattttgaagtacaccgtggtgacattgtatcattggtgtctgctaaaaacccagaacagaagatcattaagagagtgattgctcttgaaggagatattgtcaggtttccctaggacttctgcatgcccatgccacacatatcctgtggcccccagagcgctggcagaaattggaatcc

SEQ ID NO: 137327 - DNA, 477 bp, Homo sapiens
atggatgctaccagctctagtttctggaagccagcgatactactcaacatcgtaaaatggacagaagcacctcctaactattgtttggctcaaaatgtccataatgttaaggttgggaatctcagatacagggcttgtaagccaaaaaccataggacacaaaaaccggtatgtcaaagtcccccgtggtcacatctgggttgaaggtgatcatcatggacacagttttgacagtaattcttttgggccgatttcttccatttcagtagatggcactatccacccagttactcaagacaaaaagttaggcggcatccttggggtctcactttttattgccctcaactgcctgtggaactggcaaataatagatgtcgaaaaatgtttctcagatgaatacactagccagcgcacactgggaatccagaggcttctcttttaccacactgttggctcagcaatggcagtgatcttttaa

SEQ ID NO: 137328 - DNA, 1515 bp, Homo sapiens
tctgaggcgcgtgcggcggccaccccagcctagtcctcttcttggtgccactggctaactaggttgagaaaccggcgccacaggcggcagcacctggcccggagctggcccgctcctccccgccgagccggcgccccaacaacgcgccctctcccagtcctcacaaaggggcctagtccggcccccggctctggccgtgagggagcgctgtgggggcgcgctgcctttctgcctggaaagtgttggcagggtggtgggagaagcgtcaggcttgaacaacatgattttaaagcacgtgtctgtctgtcgttttttacttttagggttttggccaaattgggcgagggcacaaaataaccacttacccctttttcaccgaggaagagcgggagaaagggtatggcacagtcacaagggtgggtgaaaagatacatcaaggccttttgtaaaggcttctttgtggcggtgcctgtggcagtgactctcttggatcgggtcgcctgtgtggcaagagtagaaggagcatcgatgcagccttctttgaatcctgggggggagccagttcatctgatgtggtgcttttgaaccactggaaagtgacggaatttttgaagtacaccgtggtgacattgtattcattggtgtctcctaaaaacccagaacagaagatcattaagagagtgatttgctctttgaagggagatatttttcagaaccataggacacaaaaaccggtatgtcaaagtcccccgtgggtcacatctgggtttggaaggtgatcattcatgggacacagtttttgacagtaattcttttgggccggtttccctaggacttctgcatgcccatgccacacatatcctgtggcccccagagcgctggcagaaattggaatctgttcttcctccagagcgcttaccaggtacagagagaagaggaatgactgcatgaatctacctgagttgctggcattgggaggccagttactggaaaggaatggaaaaaagaagcctccaaaagggaaaaacttctgacaatatgatgctgtgcgagaaatatttacagcacagttaaacggatctgtgttatttaaaatagataattttcaaatggttaaacagtattaaatgggcaccctgattttgtgttaaattttaggttcccctgttgtttaatgcccccccaaaatatgccagaccctttgggaatataaaaatattggcaccccacatgtcttaatggggctgaatttcagattatttgttacatataccctattatattgattgttgggttttgattttggtgcttgctgctgaaataaattgaaaattaatattcaataaaaatgatgtatttgtcacttgctgttaaggtagaacaagaaggaacacatattatacacataatgatgggaattacattgtgatttgtactatctacaaaggagtaactgccagttaggaagaacagtaaacacgtgatgttaaaataaaacaatgatttgctaagaaa

SEQ ID NO: 137329 - DNA, 852 bp, Homo sapiens
agagcgagcctgggcggcgaaaggttgccgaggcgggggctgggcgcctgggaacaaagttgaaaatgcaactgcaagctccccggtgaaacaaataccgccttcaaccttcgcctccgcgcctcgcgctatgggacagagcctccgatccgccagcaccacctgaggatccagaaaccgccccagcgatggaagaggatcaggagctggagagaaaaatatctggattgaagaccctcaatggttgaaggccgagaggaagaccacccctggaattggtcccaggcagctgggaacagatagacccctgtgtgacatttgtattgcacgaggaagaccataccctagggaaattttctacgttaccatgatcatgaagaaccccggaaagtggaattttgtggttacacctacggaccccatcctttcagagagcaaaattaaatttaccgcattccagattccgagggtaccccttcccagctgttgagcccatttccagagaggccttgaatgagctcatggaatgtctgcccaaccatgtgctttcacaagttttagggccagcataaaggactataaggaatcaaaaagcaagcaggaaatggaatccacatttctagtccttttatggcagttttacaagggaggaactgtcctgtaggatattctcttcctgatggtgcagaacccaggaattaggaagtttgtgggttacagcatacttctgtcccttcaggaaagggcgtgattctagctgttgaccccttggcagctgttgggattctctggcaagaacccctgtattcttctaataaattccctcttttattttaaaaaaaaaaaaaaaaa

SEQ ID NO: 137330 - DNA, 567 bp, Homo sapiens
  misc_feature (1)...(567): n = a,t,c or g
gatcctctagagtcggcccttagataacatcattgaaactttgcgtgttactgcctttnacatttgttggagttcattgtagattctggatatnagccctttgtcagatgaacattgatgcaaaaaacctcaataaaatactggcaaaacgaatccagcagcacatcaaaaagcttatccaccatgatcaagtgggcttcatccctgggatgcaaggctggttcaatatacgcaaatcaataaatgtaatccagcatataancaaagccaaagacaaaanccacatgattatctcaataggatgcagaaaaagcctttgacaaanttcaacaacccttcatgctaaaanctctcaattaaattaagtatcgatggggacgtatttcananttanttaaggggctatctntggncaaancccgcagccantntcatactgntttggggcaaannctgggnggcnttncccttttgggaaannttggnttctngntttctttccaaccctnnacagggnnnctttngggtttngaaanggttggnncttttnntncangggtttttaaa

SEQ ID NO: 137331 - DNA, 1030 bp, Homo sapiens; identical to SEQ ID NO: 121005

SEQ ID NO: 137332 - DNA, 3045 bp, Homo sapiens; identical to SEQ ID NO: 120951

SEQ ID NO: 137333 - DNA, 3159 bp, Homo sapiens
atggggaaaaaacagagcagaaaaactggaaactctaaaaagcagagcacctctcctcctccaaaggatcgcagttcctcaccagcaatggaacaaaggtggacagagaatgactttgacgagttgagagaagaaggcttcagacgatcaaactacgagctacaggaggaaattcaaaccaaaggcaaagaagttaaaaactttgaaaaaaatttagatgaatgtataactagaataaccaatagagagaagtgcttaaaggagctgatgaagctgaaagccaagcctcgagaactatgtgaagaatgcagaagcctcaggagccaatgcgatcaagtggaagagagggtatcagtgatggaaaatgaaatgaatgaaatgaagcgagaaaggaagtttagagaaaaaagaataaaaagaaacgaacaaagactccaagaaatatgggactatgtgaaaagaccaaatctacgtctgattggtgtacctaaaagtgatggggagaatggaaccaagttggaaaacactctgcaggatattatccaagagaacttccccaatctagcaaggcaggccaacattcagattcaggaaatacagagaacgccacaaagatactcctcgagaagagcaactccaagacacataattgtcagattcaccaaagttaaaatgaaggaaaaaatgttaagagcagccagagagaaagactttaaaccaacaacgatcaaaagagacaaagaaggccattacataatggtaaagggatcaattcaacaagaagaactaactatcctaaatatatatgcacccaatacaggagcacccagattcataaagcaagtcctgagtgacctacaaagagacttagactcccacacattaataatgggagactttaacaccccactgtcaacattagacagatcaacgagacagaaagtcaacaaggatacccaggaattgaactcagctctgcaccaagcagacctaatagacatctacagaactctccaccccaaatcaacagaatatacatttttttcagcaccacaccacacctattccaaaattgaccacatacttggaagtaaagctctcctcagcaaatgtaaaagaacagaaattataacaaactatctctcagaccacagtgcaatcaaaccagaactcaggattaagaaactcactcaaaactgctcaactacatggaaactgaacaacctgctcctgaatgactactgggtacataacgaaatgaaggcagaaataaagatgttctttgaaaccaacgagaacaaagacacaacataccagaatctctgggacacattcaaagcagtgtgtagagggaaatttatagcactaaatgcccacaagagaaagcaggaaagatccaaaattgacaccctaacatcacaattaaaagaactagaaaagcaagagcaaacacattcaaaagctagcagaaggcaagaaataactaaaatcagagcagaactgaaggaaatagagacacaaaaaacccttcaaaaaattaatgattccaggagctggttttttgaaaagatcaacaaaattgatagaccgctagcaagaccaaaaaagaagaaaagagagaagaatcaaatagacgcaataaaaattgataaaggggatatcaccaccaatcccacagaaatacaaactaccatcagagaatactacaaacgcctctatgcaaataaactagcaaatctagaagaaatggataaattcttcgacacctacactctcccaagactaaaccaggaagaagttgaatctctgaatagaccaaaaacaggagctgaaattgtggcaataatcaatagcgtaccaaccaaaaagagtccaggaccagatggattcacagccaaattctaccagagctacaaggaggaactggtaccattccttctgaaactattccaatcaatagaaaaagagagaatcctccctaactcattttatgaggacagcatcatcctgataccaaagccgggcagagacacaaccaaaaaagagaattttagaccaatatccttgatgaacattgatgcaaaaatcctcaataaaatactggcaaaccaaatccagcagcacatcaaaaagcttatccaccatgatcaagtgggcttcatccctgggatgcaaggctggtccactatacacaaatcaataaatgtaatccagcacataaacagaaccaaagataaaaaacacatgattatctcaatagatgcagaaaaggcatttgacaaaattcaacaacccttcatgctaaaaactctcaataaattaggtattgatgggacgtatctcaaaataataagcgctatctatgacaaacccacagccaatatcatactgaatgggcaaaaactggaagcactccctttgaaaactggcacaagacagggatgccctctctcaccactcctattcaacatagtgttggaagttctagccagggcaattcggcaggagaaggaaataaagggtattcaattaggaaaagaggaagtcaaattgtccctgtttgcagacgacatgattgtatatctagaaaaccccattgtctcagtccaaaatctccataagctgataagcaacttcagcaaagtctcaggatacaaaatcaatgtgcaaaaatcacaagcattcttatacaccaataacagagaaacagagaaccaaatcatgagtgaactcccattcacaattgcttcaaagagaataaaatacctaggaatccaccttacaagggacgtgaaggacctcttcaaggagaactacaaaccactgctcaatgaaattaaagaggatacaaacaaatggaagaacattccatgctcatgggtaggaagaatcaatattgtgaaaatggccatactgcccaaggtaatttatagattcaatgccatccccatcaagctaccaatgactttcttcacagaattggaaaaaactactttaaagttcatatggaaccaaaaaagagcccacatcgccaagtcaatcctaagccaaaagaacaaagctggaggcatcatgctacctgacttcaaactataccacaaggctacagtaaccaaaacagcatggtactggtaccaaaacagagatatagatcaatga

SEQ ID NO: 137334 - DNA, 2079 bp, Homo sapiens; identical to SEQ ID NO: 135772

SEQ ID NO: 137335 - DNA, 1257 bp, Homo sapiens
ttagttgactgtcagctgtccttgctccaggatgctgtttttgacaacggatgttttattgcctttgatgttcattaagaagcttggcgcaaatgttgcctttttatcctcgaagaagcctctgtttgtcatgtagcttgtgataaccacattgttgcctttggcttgcggcactgcgaagtgagagtaagtgaatgtcacatcgtttggatcaagacccatttgcagcacaagccctgttttgttcagcggcttgtaagggccggttaaagagtttgatacataaccaagcatgtaaatatcgtttgagttaataccatcgatcgtcatttttgaaccgcgtgaatcagtgaacaagtaccatttgccgttcattttgaaaacattcgcgcgctcgatttcatcagttaccgtgtttgaagtgatcagcggcttcattacttttttcaatgtgtaatcattatttaactctatgataccgagggcgccgttcgctaactcagcatcgcgttttttagcgctctgctgaagcttctggctttctttacggaagaagttcgtgccgccgccgtagtactgctttgttaaataaaagattcttcgcaatagtatccgtttcactccgttgattttgagtgtgtcatcagattttgacacatttacctgcgctgttgtcaggctttgtttgccgtaatgtttaccggaatagtcagtgtagaataaacggatttttccgtcagatgtaaaggttgcagaaccggaccattcttgcgtctgatctttcaggatcggatcgttggcgtcgaacttatcgctgtctttaaagacacggcccgcgtttttccagctgtcgattgagttgtcgccgaccttttgataaaacatgtagattgatgtgtcatcagcgtctttcgggcttcccgcaagagcaaacacaacgtgatagccgttgtattcagctactgttccgtcagcgttttgcagcggccagctgtcccacacatcaagtccttttgcagactcaatatttttaatcgttgattgatcgaattgaggcacttggtatttttcgttttgctgctgtttagggatctgcagcatatcatggcgtgtaatatgagagacgccgtacgtttctttgtatgctttttggttattttctttcgcgaaggcttgagtcgctcctcctgccagaagtgcagtcgtaaaagtcagaactgtggcttgttttacaatttttttgatgttcatgttcat

SEQ ID NO: 137336 - DNA, 1188 bp, Homo sapiens; identical to SEQ ID NO: 118378

SEQ ID NO: 137337 - DNA, 3621 bp, Homo sapiens; identical to SEQ ID NO: 132600

SEQ ID NO: 137338 - DNA, 3288 bp, Homo sapiens; identical to SEQ ID NO: 127333

SEQ ID NO: 137339 - DNA, 2559 bp, Homo sapiens; identical to SEQ ID NO: 128385

SEQ ID NO: 137340 - DNA, 3090 bp, Homo sapiens; identical to SEQ ID NO: 121155

SEQ ID NO: 137341 - DNA, 1866 bp, Homo sapiens; identical to SEQ ID NO: 136000
  misc_feature (1)...(1866): n = a,t,c or g

SEQ ID NO: 137342 - DNA, 1690 bp, Homo sapiens; identical to SEQ ID NO: 135778

SEQ ID NO: 137343 - DNA, 3274 bp, Homo sapiens; identical to SEQ ID NO: 132604

SEQ ID NO: 137344 - DNA, 3255 bp, Homo sapiens; identical to SEQ ID NO: 129034

SEQ ID NO: 137345 - DNA, 3927 bp, Homo sapiens; identical to SEQ ID NO: 131783

SEQ ID NO: 137346 - DNA, 3139 bp, Homo sapiens; identical to SEQ ID NO: 131336

SEQ ID NO: 137347 - DNA, 3213 bp, Homo sapiens; identical to SEQ ID NO: 116408

SEQ ID NO: 137348 - DNA, 3156 bp, Homo sapiens; identical to SEQ ID NO: 124193

SEQ ID NO: 137349 - DNA, 3325 bp, Homo sapiens; identical to SEQ ID NO: 124194

SEQ ID NO: 137350 - DNA, 3145 bp, Homo sapiens; identical to SEQ ID NO: 131340

SEQ ID NO: 137351 - DNA, 1629 bp, Homo sapiens; identical to SEQ ID NO: 136008

SEQ ID NO: 137352 - DNA, 3352 bp, Homo sapiens; identical to SEQ ID NO: 129042

SEQ ID NO: 137353 - DNA, 2682 bp, Homo sapiens; identical to SEQ ID NO: 121266

SEQ ID NO: 137354 - DNA, 1794 bp, Homo sapiens
ttagttgactgtcagctgtccttgctccaggatgctgtttttgacaacggatgttttattgcctttgatgttcattaagaagcttggcgcaaatgttgcctttttatcctcgaagaagcctctgtttgtcatgtagcttgtgataaccacattgttgcctttggcttgcggcactgcgaagtgagagtaagtgaatgtcacatcgtttggatcaagacccatttgcagcacaagccctgttttgttcagcggcttgtaagggccggttaaagagtttgatacataaccaagcatgtaaatatcgtttgagttaataccatcgatcgtcatttttgaaccgcgtgaatcagtgaacaagtaccatttgccgttcattttgaaaacattcgcgcgctcgatttcatcagttaccgtgtttgaagtgatcagcggcttcattacttttttcaatgtgtaatcattatttaactctatgataccgagggcgccgttcgctaactcagcatcgcgttttttagcgctctgctgaagcttctggctttctttacggaagaagttcgtgccgccgccgtagtacgctttgttaaataaagattcttcgccttggtatccgttttctgttcccgtgttggcttcgaatacaaggtatttatggcctttgtcttcaacgtagtgagggtctctcagcgtatggttgtcgccggatgtataattgccttcatcgataaactgctgaacgttctgatatgtttttccgtctccgtcaaaaatcgttttgtgatcttccactccgttgattttgagtgtgtcatcagattttgacacatttacctgcgctgttgtcaggctttgtttgccgtaatgtttaccggaatagtcagtgtagaataaacggatttttccgtcagatgtaaaggtgcagtaaccggacctaacttcatctgattgtggagcatggactgtataagccattacccttaccacaaacattaaatgcaaacattctgtatcatctaaataatgcaaattaactgccatgttcctcaatttaacattaacataatttgattcaagacttacgatactgacacagggattcgtataaacgcatggcatacggattggtgatttcttttgtttcactaagccgaaactgcgtaaaccggttctgtaacccgataaagaagggaatgagatatgggttgatatgtacactgtaagccctctggatggactgtgcgcacgtttgataaaccaaggaaaagattcatagcctttttcatcgccggcatcctcttcagggcgataaaaaaccacttccttccccgcgaaactcttcaatgcctgccgtatatccttactggcttccgcagaggtcaatccgaatatttcagcatatttagcaacatggatctcgcagataccgtcatgttcctgtagggtgccatcagattttctgatctggtcaacgaacagatacagcatacgtttttgatcccgggagagactatatgccgcctcagtgaggtcgtttgactggacgattcgcgggctatttttacgtttcttgtgattgataaccgctgtttccgccatgacagatccatgtgaagtgtgacaagtttttagattgtcacatggctgtaaaaggacagaccacatcatggttctgtgttcattaggttgttctgtccatgctgacataatccgctccacttcaacgtaacaccgcacgaagatttctattgttcctgaaggcatattcaaatcgttttcgttaccgcttgcaggcat

SEQ ID NO: 137355 - DNA, 3303 bp, Homo sapiens; identical to SEQ ID NO: 124216

SEQ ID NO: 137356 - DNA, 3095 bp, Homo sapiens; identical to SEQ ID NO: 128883

SEQ ID NO: 137357 - DNA, 2678 bp, Homo sapiens; identical to SEQ ID NO: 132620

SEQ ID NO: 137358 - DNA, 3507 bp, Homo sapiens; identical to SEQ ID NO: 128728

SEQ ID NO: 137359 - DNA, 2373 bp, Homo sapiens; identical to SEQ ID NO: 132625

SEQ ID NO: 137360 - DNA, 3813 bp, Homo sapiens; identical to SEQ ID NO: 128656

SEQ ID NO: 137361 - DNA, 1218 bp, Homo sapiens
atgaacatgaacatcaaaaaaattgtaaaacaagccacagttctgacttttacgactgcacttctggcaggaggagcgactcaagccttcgcgaaagaaaataaccaaaaagcatacaaagaaacgtacggcgtctctcatattacacgccatgatatgctgcagatccctaaacagcagcaaaacgaaaaataccaagtgcctcaattcgatcaatcaacgattaaaaatattgagtctgcaaaaggacttgatgtgtgggacagctggccgctgcaaaacgctgacggaacagtagctgaatacaacggctatcacgttgtgtttgctcttgcgggaagcccgaaagacgctgatgacacatcaatctacatgttttatcaaaaggtcggcgacaactcaatcgacagctggaaaaacgcgggccgtgtctttaaagacagcgataagttcgacgccaacgatccgatcctgaaagatcagacgcaagaatggtccggttctgcaacctttacatctgacggaaaaatccgtttattctacactgactattccgacaaaggccataaataccttgtattcgaagccaacacgggaacagaaaacggataccaaggcgaagaatctttatttaacaaagcgtactacggcggcggcacgaacttcttccgtaaagaaagccagaagcttcagcagagcgctaaaaaacgcgatgctgagttagcgaacggcgccctcggtatcatagagttaaataatgattacacattgaaaaaagtaatgaagccgctgatcacttcaaacacggtaactgatgaaatcgagcgcgcgaatgttttcaaaatgaacggcaaatggtacttgttcactgattcacgcggttcaaaaatgacgatcgatggtattaactcaaacgatattaacatgcttggttatgtatcaaactctttaaccggcccttacaagccgctgaacaaaacagggcttgtgctgcaaatgggtcttgatccaaacgatgtgacattaactaactctcacttcgcagtgccgcaagccaaaggcaacaatgtggttatcacaagctacatgacaaacagaggcttcttcgaggataaaaaggcaacatttgcgccaagcttcttaatgaacatcaaaggcaataaaacatccgttgtcaaaaacagcatcctggagcaaggacagctaacagtcaactaa

SEQ ID NO: 137362 - DNA, 4542 bp, Homo sapiens; identical to SEQ ID NO: 126825

SEQ ID NO: 137363 - DNA, 3229 bp, Homo sapiens; identical to SEQ ID NO: 128659

SEQ ID NO: 137364 - DNA, 3552 bp, Homo sapiens; identical to SEQ ID NO: 126630

SEQ ID NO: 137365 - DNA, 3139 bp, Homo sapiens; identical to SEQ ID NO: 132639

SEQ ID NO: 137366 - DNA, 3057 bp, Homo sapiens; identical to SEQ ID NO: 121979
  misc_feature (1)...(3057): n = a,t,c or g

SEQ ID NO: 137367 - DNA, 3267 bp, Homo sapiens
atggggaaaaaacagaacagaaaaactggaaactctaaaacgcagagcgcctctcctcctccaaaggaacgcagttcctcaccagcaacggaacaaagctggatggagaatgattttgacgagctgagagaagaaggcttcagacgatcaaattactctgagctacgggaggacattcaaaccaaaggcaaagaagttgaaaactttgaaaaaaatttagaagaatgtataactagaataaccaatacagagaagtgcttaaaggagctgatggagctgaaaaccaaggctcgagaactacgtgaagaatgcagaagcctcaggagccgatgcgatcaactggaagaaagggtatcagcaatggaagatgaaatgaatgaaatgaagcgagaagggaagtttagagaaaaaagaataaaaagaaatgagcaaagcctccaagaaatatgggactatgtgaaaagaccaaatctacgtctgattggtgtacctgaaagtgatgtggagaatggaaccaagttggaaaacactctgcgggatattatccaggagaacttccccaatctagcaaggcaggccaacgttcagattcaggaaatacagagaacgccacaaagatactcctcgagaagagcaactccaagacacataattgtcagattcaccaaagttgaaatgaaggaaaaaatgttaagggcagccagagagaaagacagatcaacgagacagaaagtcaacaaggatacccaggaattgaactcagctctgcaccaagcggacctaatagacatctacagaactctccaccccaaatcaacagaatatacatttttttcagcaccacaccacacctattccaaaattgaccacatagttggaagtaaaactctcctcagcaaatgtaaaagaacagaaattataacaaactatctctcagaccacagtgcaatcaaactagaactcaggattaagaatctcactcaaagccgctcaactacatggaaactgaacaacctgctcctgaatgactactgggtacataacgaaatgaaggcagaaataaagatgttctttgaaaccaacgagaacaaagacaccacataccagaatctctgggacgcattcaaagcagtgtgtagagggaaatttatagcactaaatgcctacaagagaaagcaggaaagatccaaaattgacaccctaacatctcaattaaaagaactagaaaagcaagagcaaacacattcaaaagctagcagaaggcaagaaataactaaaatcagagcagaactgaaggaaatagagacacaaaaaacccttcaaaaaatcaatgaatccaggagctggttttttgaaaggatcaacaaaattgatagaccgctagcaagactaataaagaataaaagagagaagaatcaaatagacacaataaaaaatgataaaggggatatcaccaccaatcccacagaaatacaaactaccatcagagaatactacaaacacctctatgcaaataaactagaaaatctagaagaaatggatacattcctcgacacatacactctcccaagactaaaccaggaagaagttgaatctctgaatagaccaataacaggctctgaaattgtggcaataatcaatagtttaccaaccaaaaagagtccaggaccagatggattcacagccgaattctaccagaggtacaaggaggaactggtaccattccttctgaaactattccaatcaatagaaaaagagggaatcctccctaactcattttatgaggccagcatcattctgataccaaagccgggcagagacacaaccaaaaaagagaattttagaccaatatccttgatgaacattgatgcaaaaatcctcaataaaatactggcaaaccgaatccagcagcacatcaaaaagcttatccaccatgatcaagtgggcttcatccctgggatgcaaggctggttcaatatacacaaatcaataaatgtaatccagcatataaacagagccaaagacaaaaaccacatgattatctcaatagatgaagaaaaagcctttgacaaaattcaacaacccttcatgctaaaaactctcaataaattagagaataaaatacctaggaatccaacttacaagggatgtgaaggacctcttcaaggagaactacaaaccactgctcaaggaaataaaagaggacacaaacaaatggaagaacattccatgctcatgggtaggaagaatcaatatcatgaaaatggccatactgcccaaggtaattatagattcaatgccatccccatcaagctaccaatgactttcttcacagaattggaaaaaactactttaaagttcatatggaaccaaaaaagagcccgcatcgccaagtcaatcctaagccaaaagaacaaagctggaggcatcacactacctgacttcaaactatactacaaggctacagtaaccaaaacagcatggtactggtaccaaaacagagatatagatcaatggaacagaacagagccctcagaaataatgccgcatatctacaactatctgatctttgacaaccctgagaaaaacaagcaatggggaaaggattccctatttaataaatggtgctgggaaaactggctagccatatgtagaaagctgaaactggatcccttccttacaccttatacaaaaatcaattcaagatggattaaagatttaaacgttagacctaaaaccataaaaaccctagaagaaaacctaggcattaccattcaggacataggcatgggcaaggacttcatgtccaaaacaccaaaagcaatggcaacaaaagccaaaattgacaaatgggatctaattaaactaaagagcttctgcacagcaaaagaaactaccatcagagtgaacaggcaacctacaacatgggagaaaattttcacaacctactcatctgacaaagggctaatatccagaatctacaatgaactcaaacaaatttacaagaaaaaaacaaagaaccccatcaaaaagtgggcgaaggacatgaacagacacttctcaaaagaagacatttatgcagccaaaaaacacatgaaaaaatgctcatcatcactggccatcagagaaatgcaaatcaaaaccactatgagatatcatctcacaccagttagaatggcaatcattaaaaagtcaggaaacaacagaggatctgaagcccagatcaatgctgtcttggtgcttcggacccagcctcatattgagtga

SEQ ID NO: 137368 - DNA, 1921 bp, Homo sapiens
atggtaaagggatcaattcaacaagaagagctaactatcctaaatacatatgcagcccatacaggagcaccaagactcataaagcaagtcctgagtgacctacaaagagacttagactcccacacaataataatgggagactttaacaccccactgtcaacattagacagatcaacgagacagaaagttaacaaggatacccaggaattgaagtcagctctgcaccaagcggacctaacagacatctacagaactctccaccacaaatcaacagaatatacatttttttcagcaccacaccacatctattccaaaattgaccacatactgggaagtaaagctctcctcagcaaatgtaaaagaacagaaattataacaaactatctctcagaccacagtgcaatcaaactagaactctggattaagaatctcactcaaaaccactcaactacatgggaactgaacaacctgctcctgaatgactactgggtacataacgaaatgaaggcagaaataaagatgttctttgaaaccaatgagaacaaagacacaacataccataatctctgggacacattcaaagcagtgtgtagagggaaatttataccactaaatgcccacaagagaaagcaggaaagatccaaaattgacaccctaacatcacaattaaaagaactagaaaagcaagagcaaacaaacacattcaaaagctagcagaaggcaagaaataactaaaatcagagcagaactgaaggaaatagagacacaaaaaaccctctaaaaaattaatgaatccaggagctggttttttgaaaggatcaacaaaattgatagactgctagcaagactaataaagaaaaaaagagagaagaatcaaatagatgcaataaaaaatgataaaggagatatcaccaccgatcccacagaaatacaaactaccatcagagaatactgcaaacacctctatgcaaataaactagaaaatctagaagaaatggataaattcctggacacatacactctcccaagactaaaccaggaagaagttgaatctctgaatagaccaataacaggagctgaaattgtggcaataatcaatagcttaccaaccaaaaagagtccaggaccagatggattcacagccaaattctaccagaggtacaaggaggaactggtaccattccttctgaaactattccaatcaatagaaaaagagggaatcctccctaactcattttatgaggccagcatcattctgataccaaagccaggaagagacacaacaaaaaaagagaattttagaccaatatccttgatgaacattgatgcaaaaatcctcaataaaaaactggcaaaacgaatccagcaacacatcaaaaagcttatccaccatgatcaagtgggcttcatccctggaatgcaaggctggttcaatatacgcaaatcaataaatgtaatccagcatataaacagagccaaagacaaaaaccatatgattatctcaatagatgcagaaaaagcctttgacaaaattcaacaacccttcatgctaaaaactctcaataaattagagaataaaatacctaggaatccaccttacaagggatgtgaaggacctcttcaaggagaactacaaaccactgctcaaggaaataaaagaggatacaaacaaatggaagaacattccatgctcatgggtaggaagaatcaatatcgtgaaaatggccatactgcccaagatgtgcctctaaaggaggtggactccactctgtttactgacagcagcagcttccttgaacagggagtaggaaaggctggtgcagccgttactatggagacagatgtactgtgggcccaggcactgccggcaggtacctcagcacagaaggctgaattggtcaccttcactcaggctctctga

SEQ ID NO: 137369 - DNA, 2907 bp, Homo sapiens; identical to SEQ ID NO: 120355

SEQ ID NO: 137370 - DNA, 1281 bp, Homo sapiens; identical to SEQ ID NO: 118374

SEQ ID NO: 137371 - DNA, 3348 bp, Homo sapiens; identical to SEQ ID NO: 120176

SEQ ID NO: 137372 - DNA, 3369 bp, Homo sapiens
atggaggaagatctaccaagcaaatggaaaacaaaaaaaggcaggggttgcaatcctagtctctgataaaacagactttaaaccaacaaagatcaaaagagacaaagaaggccattacataatggtaaagggatcaattcaacaagaagagctaactatcctaaatatatatgcacccaatacaggagcacccacattcatacagcaagtcctgagtgatctacaaagagacttagactcccacacattaataataggagactttaacaccccactgtcaacatcagacagatcaacgagacagaaagtcaacaaggatacccaggaattgaactcagctctgcaccaagcagacctaatagacatctacagaaccctccaccccaaatcaacagaatatacatttttttcagcaccacaccacacctattccaaaattgaccacatacttggaagtaaagcactcctcagcaaatgtaaaagaacagaaattataacaaactatctctcagaccacagtgcaatcaaactagaactcatgattaagaatctcactcaaaaccactcaaccatatggaaactgaacaacctgctcctgaatgactactgggtacataaggaaatgaaggcagaaataaagatgttctttgaaaccaacgagaacaaagacacaacataaccagaatctctgggacacattcaaagcagtgtgtagagggaaatttatagcactaaatgcccacaagaggaaagcaggaaagatccaaaattgacaccctaacatcacaattaaaagaactagaaaagcaagagcaaacactttcaaaagctagcagaaggcaagaaataactaaaatcagagcagaactgaaggaaatagagacacaaaaaacccttcaaaaaattaacgaatccaggagcaggttttttgaaaggatcaacaaaattgatagcctgctagcaagactaataaagaaaaaaagagagaagaatcaaatagatgcaataaaaaatgataaaggggatatcaccaccaatcccacagaaatacaaactaccatcagagaatactacaaacacctctacgcaaataaactagaaaatctagaagaaatggataaattcctcgacacatacactctcccaagactaaaccaggaagaagttgaatctctgaatagaccaataacgggagctgaaattgtggcaataatcaatagcttaccaaccaaaaagagtccaggaccagatggattcacagccgaattctaccagaggtacaaggaggaacaggtaccattccttctgaaactattccaatcaatagaaaaagagggaatcctccctaactcattttatgtgtccagcatcatcctgataccaaagccgggcagagacacaaccaaaagagagaattttagaccaatatccttgatgaacattgatgcaaaaatcctcaataaaatactggcaaaccgaatccagcagcacatcaaaaagcttatccaccatgatcaagtgggcttcatccctgggatgcaaggctggttcaatatatgcaaatcaataaatgtaatccagcatataaacagaaccaaagacaaaaaccacatgattatctcaatagatgcagaaaaggcctttgacaaaattcaacaacctttcatgctaaaaactctcaataaattagtgttggaagttctggccagggcaattaggcaggagaaggaaataaagggtattcaattaggaaaagaggaagtcaaattgtccctgtttgcagacgacatgattgtatatctagaaaaccccattgtctcagcccaaaatctccttaagctgataagcaacttcagcaaagtctcaggatacaaaatcaatgtacaaaaatcacaagcattcttatacaccaacaacagacaaacagagagccaaatcatgagtgaactcccattcacaattgcttcaaagagaataaaatacctaggaatccaacttacaagggatgtgaaggacctcttcaaggagaactacaaaccactgctcaaggaaataaaagaggatacaaacaaatggaagaacattccatgctcatgggtaggaagaatcaatatcgtgaaaatggccatactgcccaaggtaatttatagattcaatgccatccccatcaagctaccaatgactttcttcacagaattgggaaaaactgctttaaagttcatatggaaccaaaaaagagcccgcatcaccaagtcaatcctgagccaaaagaacaaagctggaggcatcacactacctgacttccaactatactgcaaggctacagtaaccaagacagcatggttccctagtggggatgtgggtttggaggcagacttttctccctctcacacattgaaaactcagtttttcagctgccttgcagagtttgcagcggcaagctgcttctttcaaaggatgaatgggtttggcatggccatgactactacgtacagcacgggggctgctgagtctcctctaccaagctgttccattgaccagggagatgacaccaagctccaccgagcacgcagccctggccgcaccttccctgctgcagctggcatccccgcagcagctgctccagatgggccaccactatcacttctgcataaactatggttcccagtggaattaggaggaagagctcttccccgagcagaggaatcacatggtgaggtcgcagctttaggggtgatggttgtagctcagggtgggaaaaaccagggagaagaggccaggtccactccatggctccgaccaacctcacatctgcccccgtgttcctcctcctcggcctggtggacggaacagacagacgcccacccgctgctgttcctgctctgccttggcatctatctgctcaacgccctgagcaacctgagcatggtggcgctggtgagatctgacggggccctccgctcccccatgtattacttcttgggtcacctgagcctcgtggacgtctgctttaccaccgtcacggtccccaggctgctggccggcctgctccacccgggccaggccatatccttccaggcgtgctttgccgagatgtacttcttcgtggctctgggcatcaccgagagctacctcccggcggccatgtcctacgaccgcgcgacggcggcgtgccggcccctgcgctacggcgcgctggtgacgccatgggcgctgcgcctcgctgcccgctacgaccgcctggccagcgtggtctacgctgtcatcacgccgaccttgaaccctttcatcaacagccttcgcaacaaagaggtcaagggcgccctgaaaagggggctcagatggagggctgcaccccaagaggcgtga

SEQ ID NO: 137373 - DNA, 2611 bp, Homo sapiens
atgggagactttaacaccccactgtcaacattagacagatcaacgagacagaaagccaacaaggatacccaggaattgaactcagctctgcaccaagtggacctaatagacatctacagaactctccaccccaaatcaacagaatatacattcttttcagcaccacaccacacctattccacaactgaccacatacttggaagtaaagctctcctcagcaaatgtagaagaacagaaattataacaaactatctctcagaccacagtgcaatcaaactagaactcagaattaagaatctcactcaaaaccgctcaactacatggaaactgaacaacctcctcctgaatgactacggggtgcataatgaaatgaaggcagaaataaagatgttctttgaaaccaatgagaacaaagacacaacataccagaatctctgggacacattcaaagcagtgtgtagagggaaatttatagcactaaatgcccacaagagaaagcaggaaagatccaaaattgacaccctaacatcacaattaaaagaactagaaaagcaagagcaaacacattcaaaagctagcagaagacaagaaataactaaaatcagagcagaactgaaggaaatagagacacaaaaaacccttcaaaaaaatcaatgaatccaggagctggttttttgaaaggatcaacaaaattgatagaccactagcaagactaataaagaaaaaaagagagaagaatcaaatagatgcaataaaaaatgataaaggggatatcaccactgatcccacagaaatacaaactaccatcagagaatactacaaacacctctacgcaaataaactagaaaatctagaagaaatggataaattcctgcacacatacactctcccaagactaaaccaggaagaagttgaatctctgaatagaccaataacaggatctgaaattgtggcaataatcaatagcttaccaaccaaaaagagtccaggaccagatggattcacagccgaattcgaccagaggtacaaggaggaactggtaccattccttctgaaactattccaatcaatagaaaaagagggaatcctccctaactcattttatgaggccagcatcatcctgatacgaaagcctggcagagacacaaccaaaaaagagaattttagaccaatatccttgatgaacactgatgcaaaaatcctcaataaaatactggcaaaacgaatccagcagcacatcaaaaagcttatccaccatgatcaagtgggcttcatccctgggatgcaaggctggttcaatatacacaaatcaataaatgtaatccagcatataaacagagccaaagacaaaaaccacatgattatctccatagatgcagaaaaggcctttgacaaaattcaacaacccttcatgctaaaaactctcagtaaattaggtattgacgggacatatttcaaaataataagagctatctatgacaaacccacagccaatatcatactgaatgggcaaaaactggaagcattccctttgaaaactggcacaagacagggatgccctctctcaccactcctattcaacatagtgttggaagttctggccagggcaattaggcaggagaaggaaataaagctgataagcaacttcagcaaagtctcaggatacaaaatcaatgtacaaaaatcacaagcattcttatacaccaacaacagacaaacagagagccaaatcatgagtcaactcccattcacaattgcttcaaagagaataaaatacctaggaatccaacttacaagggatgtgaaggacctcttcaaggagaactacaaaccactgctcaaggaaataaaagaggatacaaacaaatggaagaacattccatgctcatgggtaggaagaatcaatatcatgaaaatggccatactgcccaaggtaatttacagattcaatgccatccccatcaagctaccaatgactttcttcacagaattggaaaaaactactttcaagttcatatggaaccaaaaaagagcccgcatcaccaagtcaatcctaagccaaaagaacaaagctggaggcatcacgctacctgacttcaaactatactacaaggctacagtaaccaaaacagcatggtactggtaccaaaacagagatatagatcaatggaacagaacagagccctcagaaataatgctgcatatctacaactatctgatctttgacaaacctgagaaaaacaagcaatggggaaaggattccctatttaataaatggtgctgggaaaactggctagccatatgtagaaagctgaaactggatcccttccttacaccttatacaaaaatcaattcaagatggattaaagatttaaacgttagacctaaaaccataaaaaccctagaagaaaacctaggcattaccattcaggacataggcataggcaaggacttcatgtccaaaacaccaaaagcaatggcaacaaaagccaaaattgacaaatgggatctaattaaactaaagagcttctgcacagcaaaagaaactaccatcagagtgaacagaaaacctacagagaggggagaaaattttcgcaacctactcatctga

SEQ ID NO: 137374 - DNA, 3099 bp, Homo sapiens; identical to SEQ ID NO: 128084

SEQ ID NO: 137375 - DNA, 3084 bp, Homo sapiens
ctatccacgcccattgatgtactgccaaaaccgcatcaccatggtaatagcgatgactaatacgtagatgtactttctcttcttttttggaggagtagaatgttgagagtcagcagtagcctcatcatcactagatggcatttcttctgagcaaaacaggttttcctcattaaaggcattccaccactgctcccattcatcagttccataggttggaatcactcgaatacttctatctacttcgtcagaataagggtgtctaacagctacaatcgtgtcaaaatccttttgtccattcgaaactgcactaccaatcgcaatggcttctgcacaaacagttactcgtcctatatacgcttcaatatgtactgccgaaatgatttctcctgttttcgtacgaattgccgctcccacatgatgtttattatcctcataaagcattgtaatcttctctgtcgctacttctactaattctagatcttgttgagaaatgttaaatgttttcatatattcttcttcctccgatttctggttgctgactaattgagatgcatgctttgcatacttctgcctgctggggagcctggggactttccacaccctaactgacacacattccacagctagcgctatatgcgttgatgcaatttctatgcgcacccgttctcggagcactgtccgaccgctttggccgccgcccagtcctgctcgcttcgctacttggagccatgtcagctgtccttgctccaggatgctgtttttgacaacggatgttttattgcctttgatgttcattaagaagcttggcgcaaatgttgcctttttatcctcgaagaagcctctgtttgtcatgtagcttgtgataaccacattgttgcctttggcttgcggcactgcgaagtgagagtaagtgaatgtcacatcgtttggatcaagacccatttgcagcacaagccctgttttgttcagcggcttgtaagggccggttaaagagtttgatacataaccaagcatgtaaatatcgtttgagttaataccatcgatcgtcatttttgaaccgcgtgaatcagtgaacaagtaccatttgccgttcattttgaaaacattcgcgcgctcgatttcatcagttaccgtgtttgaagtgatcagcggcttcattacttttttcaatgtgtaatcattatttaactctatgataccgagggcgccgttcgctaactcagcatcgcgttttttagcgctctgctgaagcttctggctttctttacggaagaagttcgtgccgccgccgtagtacgctttgttaaataaagattcttcgccttggtatccgttttctgttcccgtgttggcttcgaatacaaggtatttatggcctttgtcttcaacgtagtgagggtctctcagcgtatggttgtcgccggatgtataattgccttcatcgataaactgctgaacgttctgatatgtttttccgtctccgtcaaaaatcgttttgtgatcttccactccgttgattttgagtgtgtcatcagattttgacacatttacctgcgctgttgtcaggctttgtttgccgtaatgtttaccggaatagtcagtgtagaataaacggatttttccgtcagatgtaaaggttgcagaaccggaccattcttgcgtctgatctttcaggatcggatcgttggcgtcgaacttatcgctgtctttaaagacacggcccgcgtttttccagctgtcgattgagttgtcgccgaccttttgataaaacatgtagattgatgtgtcatcagcgtctttcgggcttcccgcaagagcaaacacaacgtgatagccgttgtattcagctactgttccgtcagcgttttgcagcggccagctgtcccacacatcaagtccttttgcagactcaatatttttaatcgttgattgatcgaattgaggcacttggtatttttcgttttgctgctgtttagggatctgcagcatatcatggcgtgtaatatgagagacgccgtacgtttctttgtatgctttttggttattttctttcgcgaaggcttgagtcgctcctcctgccagaagtgcagtcgtaaaagtcagaactgtggcttgttttacaatttttttgatgttcatgttcatgtctccttctgtatgtactgttttttgcgatctgccgtttcgatcctcccgaattgactgagtagtagcaactacagtagctgtattgggtgcaggaagaactgacgttgctgtgagggaacccgaagtcactggagtctgcaatttaggttgactactgacaactgctggaggagtgacaagattggttgaagatactgtattcacaggagtttgaaaggatggtggtgcactctcgcttacatttcttttggactccagcatctgtctcactgtgcctgcatttctgtaagacatgttattattgctgttgacatcatttacagtttttcctggtgatactggtgggttgggtggatggatcactgatgtccccacagtcgcctcagttcccgccacggaacggcgggcgaaaagcagggcgggaatacgccggtaggaatacgcgggcacgtaacgcgtcacttccggtgctggcaggctcagcaatgagggcggggcggcggcgcgcgggcctctggaaccctgccggtccaccgaaggtcccgagcccgctatcttcgtaggtgcgggcctccggaggtgcaggtccctgtcctccttgtcctgcttcgtcgcagagcagaacgcgtgtgctttaagggcagagacatctgaagatgctttgccttgccctcttgaggacacgtggcttttacctctaatagtgtctgcgtgttgtggagagagaagaccatgcagttggtatttttcgttttgctgctgtttagggatctgcagcatatcatggcgtgtaatatgagagacgccgtacgtttctttgtatgctttttggttattttctttcgcgaaggcttgagtcgctcctcctgccagaagtgcagtcgtaaaagtcagaactgtggcttgttttacaatttttttgatgttcatgttcat

SEQ ID NO: 137376 - DNA, 2044 bp, Homo sapiens
ttagttgactgtcagctgtccttgctccaggatgctgtttttgacaacggatgttttattgcctttgatgttcattaagaagcttggcgcaaatgttgcctttttatcctcgaagaagcctctgtttgtcatgtagcttgtgataaccacattgttgcctttggcttgcggcactgcgaagtgagagtaagtgaatgtcacatcgtttggatcaagacccatttgcagcacaagccctgttttgttcagcggcttgtaagggccggttaaagagtttgatacataaccaagcatgtaaatatcgtttgagttaataccatcgatcgtcatttttgaaccgcgtgaatcagtgaacaagtaccatttgccgttcattttgaaaacattcgcgcgctcgatttcatcagttaccgtgtttgaagtgatcagcggcttcattacttttttcaatgtgtaatcattatttaactctatgataccgagggcgccgttcgctaactcagcatcgcgttttttagcgctctgctgaagcttctggctttctttacggaagaagttcgtgccgccgccgtagtacgctttgttaaataaagattcttcgccttggtatccgttttctgttcccgtgttggcttcgaatacaaggtatttatggcctttgtcttcaacgtagtgagggtctctcagcgtatggttgtcgccggatgtataattgccttcatcgataaactgctgaacgttctgatatgtttttccgtctccgtcaaaaatcgttttgtgatcttccactccgttgattttgagtgtgtcatcagattttgacacatttacctgcgctgttgtcaggctttgtttgccgtaatgtttaccggaatagtcagtgtagaataaacggatttttccgtcagatgtaaaggttgcagaaccggaccattcttgcgtctgatctttcaggatcggatcgttggcgtcgaacttatcgctgtctttaaagacacggcccgcgtttttccagctgtcgattgagttgtcgccgaccttttgataaaacatgtagattgatgtgtcatcagcgtctttcgggcttcccgcaagagcaaacacaacgtgatagccgttgtattcagctactgttccgtcagcgttttgcagcggccagctgtcccacacatcaagtccttttgcagactcaatatttttaatcgttgattgatcgaattgaggcacttggtatttttcgttttgctgctgtttagggatctgcagcatatcatggcgtgtaatatgagagacgccgtacgtttctttgtatgctttttggttattttctttcgcgaaggcttgagtcgctcctcctgccagaagtgcagtcgtaaaagtcagaactgtggcttgttttacaatttttttgatgttcatgttcatgtctccttctgtatgtactgttttttgcgatctgccgtttcgatcctcccgaattgactagtgggtaggcctggcggccgcctggccgtcgacatttaggtgacagtgtgtgtggaagtggatgctcttgaggggtagtttctacagtcatggtgaccgccgtagagccctggtatgacttcggatgagagtgggttgtgccccaggtcacaccaggcaaatcagcaaaggcagaaagatctgcacaaattctggggttaaggtaaacacgtgtgacctcagaataatgcctacatagtgttctttccacccagtgctttggggagtcacagaaatggcagagggctgtggctttggctttctgtgctgctgaggggagaggaaggtgtgtctctgctggtgtagaagtgtaggggcaggtggtgaagttgtcagcaatgccacactggcgtaagagtgctatgatcgaaaggaactgctgctgctgtagccaaggcaactgtgttctgaggtctcctcctttctttccagatgccccttctgtctccttcaggcagaggttctgcaaagatccatctttgatgccttcttgtatctctgtataccctgtggcttccat

SEQ ID NO: 137377 - DNA, 5051 bp, Homo sapiens
atggggaaaaaacagaacagaaaaactggaaactctaaaacgcagagtgcctctcctcctccaaaggaacgcagttcctcaccagcaacggaaaaaagctggatggagaatgactttgacgagctgagagaagaaggtttcagacgatcaaattactctgagctacgggaggacattcaaaccaaaggcaaagaagttgaaaactttgaaaaaaatttagaagaatgtataactagaataaccaatacagagaagtgcttaaaggagctgatggagctgaaaaccaaggctcgagaactacgtgaagaatgcagaagcctcaggagccgatgtgatcaactggaagaaagggtatcagcaatggaagatgaaatgaatgaaatgaagcgagaagggaagtttagagaaaaaagaataaaaagaaatgagcaaagcctccaagaaatatgggactatgtgaaaagaccaaatctacgtctgactggtgtacctgaaagtgacggggagaatggaaccaagttggaaaacactctgcaggatattatccaggagaacttccccaatctagcaaggcaggtcaatgttcagattcaggaaatacagagaacgccacaaagatactcctcgagaagagcaactccaagacacataattgtcagattcaccaaagttgaagtgaaggaaaaaatgttaagggcagccagagagaaaggtcgggttaccctcaaagggaagcccatcagactaacagcggatctctcggcagaaaccctacaagccagaagagagtgggggccaatattcaacattcttaaagaaaagaattttcaacccagaatttcatatccagccaaactaagcttcataagtgaaggagaaataaaacactttacagacaagcaaatgctgagagattttgtcaccaccaggcctgccctaaaagagctcctgaaggaagtgctaaacatggaaaggaacaaccagtaccagccgctgcaaaatcatgccaaaatacagatcaacgagacagaaagtcaacaaggatacccaggaattgaactcagctctgcaccaagcggacctaatagacatctacagaactctccacaccaaatcaacagaatatactttttttcagcaccacaccacacctattccaaaattgaccacatagttggaagtaaagctctcctcagcaaatgtaaaagaacagaaattataacaaactatctctcagaccacagtgcaatcaaactagaactcaggattaagaatctcaatcaaagccgctcaactacatggaaactgaacaacctgctcctgaatgactactgggtacataacgaaatgaaggcagaaataaagatgttctttgaaaccaaaagagaacaaaggacacaacataccagaatctctgggacgcattcaaagcagtgtgtagagggaaatttatagcactaaatgcgcacaagagaaagcaggaaagatctaaaattgacaccctaacatcacaattaaaagaactagaaaagcaagagcaaacacattcaaaagctagcagaaggcaagaaataactaaaatcagagcagaactgaaggaaatagagacacaaaaaacccttcaaaaaatcaatgaatccaggagctggttttttgaaaggatcaacaaaattgatagaccgctagcaagactaataaagaaaaaaagagaggagaatcaaatagacacaataaaaaatgataaaggggatatcaccaccgatcccacagaaatacaaactaccatcagagaatactacaaacacctctatgcaaataaactagaaaatctagaagaaatggataaattccttgacacatacactctcccaagactaaaccaggaagaagttgaatctctgaatagaccaataacaggagctgaaattgtggcaataatcaatagtttaccaaccaaaaagagtccaggaccagatggattcacagctgaattctaccagaggtacaaggaggaactggtaccattccttctgaaactattccaatcaatagaaaaagagggaatcctccctaactcattttatgaggccagcatcattctgataccaaagccgggcagagacacaaccaaaaaagagaattttagaccaatatccttgatgaacattgatgcaaaaatcctcaataaaatactggcaaaccgaatccagcagcacatcaaaaagcttatccaccatgatcaagtgggcttcatccctgggatgcaaggctggttcaatatacgcaaatcaataaatgtaatccagcatataaacagagccaaagacaaaaaccacatgattatctcaatagatgcagaaaaagcctttgacaaaattcaacaacccttcatgctaaaaactctcaataaattaggtattgatgggacgtatttcaaaataataagagctatctatgacaaacccacagccaatatcatactgaatgggaaaaaactggaagcattccctttgaaaactggcacaagacagggatgccctctctcactgctcctattcaacatagtgttggaagttctggccagggcaatcaggcaggagaaggaaataaagggtattcagttaggaaaagaggaagtcaaattgtccctgtttgcagacgacatgattgtttatctagaaaaccccatcgtctcagcccaaaatctccttaagctgataagcaacttcagcaaagtctcaggatacaaaatcaatgtacaaaaatcacaagcattcttatacaccaacaacagacaaacagagagccaaatcatgagtgaactcccattcacaattgcttcaaagagaataaaatacctaggaatccaacttacaagggatgtgaaggacctcttcaaggagaactacaaaccactgctcaaggaaataaaagaggatacaaacaaatggaagaacattccatgctcatgggtaggaagaatcaatatcgtgaaaatggccatactgcccaaggtaatttacagattcaatgccatccccatcaagctaccaatgactttcttcacagaattggaaaaaactactttaaagttcatatggaaccaaaaaagagcccgcatcgccaagtcaatcctaagccaaaagaacaaagctggaggcatcacactacctgacttcaaactatactacaaggctacagtaaccaaaacagcatggtactggtaccaaaacagagatatagatcaatggaacagaatagagccctcagaaataacgccgcatacctacaactatctgatctttgacaaacctgagaaaaacaagcaatggggaaaggattccctatttaataaatggtgctgggaaaactggctagccatatgtagaaaactgaaactggatcccttccttacaccttatacaaaaatcaattcaagatggattaaagatttaaacgttagacctaaaaccataaaaaccctagaagaaaacctaggcattaccattcaggacataggcgtgggcaaggacttcatgtccaaaacaccaaaagcaatggcaacaaaagccaaaattggcaaatggtacctaattaaactaaagagcttctgcacagcaaaagaaactaccatcagagtgaacaggcaacctacaacatgggagaaaattttcgcaacgtactcatctgacaaagggctaatatccagaatctacaatgaactcaaacaaatttacaagaaaaaaacaaacaaccccatcaaaaagtgggcgaaggacatgaacagacacttctcaaaagaagacatttatgcagccaaaaaatacgtgaaaaaatgctcatcatcactggccatcagagaaatgcaaatcaaaaccactatgagataccatctcacaccagttagaatggcaatcattaaaaagtcaggaaacaacagcaaaaagaacaaagctggaggaatcatgccagctgacttcaaactatactacaaggctatgggaacaaaaacagcatgggacatggatgaaactgaaaaccatcatgctcagcaaactaacacaagaacagaaaaacaaacaccacatgttctcactcataagtgggagttgaacaatgagaacacatggacacagggaggggaacatcctacactgggccttgtcatgcgtttcggggctagggaagggatagcattaggagaaatacctaatgtaaatggctggttgatagttatagcattagaaaatggaagaaggcagaaaattggtatcaaaaagtggggctgttgctataagaaatacctgcaaacatggaagcagttttggaaccaggtaatgggcagaggctggaaaaatttagaagagcaggctagtaaaagcctgtattgcagtgaatggggaaagaaggacaattttggagaggactcagaagaggagagctgtagggaaagtctgaatcttctcagtgattatttgcttggttgtaaccagaatatgagtagaaatatggacagtaaaggcctttctgatgaggtttcagatgcaaataaagaacctcatatcggaaactggacaaagaactccttggctgcttcagtgattattccagtgggctcaggttcagctcaaccctctgcttcagaatgtacaagcagtaagctttggcaatgtccatatgaaactaattttgcaggaatggagaatgcaagagttaagggggcttcttccaccttgattttaaggcccacagatgacctgtggacccaggaagaaaattaccgtagaatggagccaccacatagagggcctactggggaaatgctaagcaaaaaagcgaggttggagctgccacggagagtccacactagggcaatgcctagtggaatgatgggagtgagaccacctcagagaccaaacaactgcagggccaccagcttgcaactccaacctgtaagaacggctgcacaggctgagaccagtttcatcacaggggagaggtttcctgaggccttggaggttaaacactacaacagtgtttccaggatgtga

SEQ ID NO: 137378 - DNA, 2790 bp, Homo sapiens
atgggagactttaacatcccactgtcaacattagacagatcaacgagacagaaagtcaacaaggatacccaggaattgaactcagctctgcaccaagtggacctaatagacatctacagaactctccaccccaaatcaacagaatatacatttttttcagcactacaccacacctattccaaaattgaccacatacttggaagtaaagctctcctcagcaaatgtaaaagaacagaaattataacaaactatctctcagaccacagtgcaatcaaactagaactcaggattaagaatctcactcaaaactgctcaactacatggaaactgaacaacctgctcctgaatgactactgggtacataacgaaatgaaggcagaaatgaagatgttctttgaaaccaacgagaataaagacacaacataccagaatctctgggacgcattcaaagcagtgtgtagagggaaatttatagcactaaatgcccacaagagaaagcaggaaagatccaaaattgacaccctaacatcacaattaaaagaactagaaaagcaagagcaaacacattcaaaagctagcagaaggcaagaaataactaaaatcagagcagaactgaaggaaatagagacacaaaaaacccttcaaaaaattaatgaatccaggagctggttttttgaaaggatcaacaaaattgatagaccgctagcaagactaataaagaaaaaaagagagaagaatcaaatagacgcaataaaaaatgataaaggggatatcaccaccgatcccacagaaatacaaactaccatcagagaatactacaaacacctctacgcaaataaactagaaaatctagaagaaatggataaattccttgacacatacactctcccaagactaaaccaggaagaagttgaatctctgaatacaccaataacaggagctgaaattgtggcaataatcaatagtttaccaaccaaaaagagtccaggaccagatggattcacagccgaattctatcagaggtacaaggaggaactggtaccattccttctgaaactattccaatcaacagaaaaagagggaatcctccctaactcattttatgaggccagcatcattctgataccaaagccaggcagagacacaacaaaaaaagagaattttagaccaatatccttgatgaacattgatgcaaaaatcctcaataaaatactggcaaaacgaatccagcagcacatcaaaaagcttatccaccatgatcaagtgggcttcatccctgggatgcaaggctggttcaatatacgcaaatcaataaatgtaatccagcatataaacaagagccaaaacaaaaaccacatgattatctcaatagatgcagaaaaagcctttcacaaaattcaacaacccttcatgctaaaaactctcaataaattaggaggagcgactcaagccttcgcgaaagaaaataaccaaaaagcatacaaagaaacgtacggcgtctctcatattacacgccatgatatgctgcagatccctaaacagcagcaaaacgaaaaataccaagtgcctcaattcgatcaatcaacgattaaaaatattgagtctgcaaaaggacttgatgtgtgggacagctggccgctgcaaaacgctgacggaacagtagctgaatacaacggctatcacgttgtgtttgctcttgcgggaagcccgaaagacgctgatgacacatcaatctacatgttttatcaaaaggtcggcgacaactcaatcgacagctggaaaaacgcgggccgtgtctttaaagacagcgataagttcgacgccaacgatccgatcctgaaagatcagacgcaagaatggtccggttctgcaacctttacatctgacggaaaaatccgtttattctacactgactattccggtaaacattacggcaaacaaagcctgacaacagcgcaggtaaatgtgtcaaaatctgatgacacactcaaaatcaacggagtggaagatcacaaaacgatttttgacggagacggaaaaacatatcagaacgttcagcagtttatcgatgaaggcaattatacatccggcgacaaccatacgctgagagaccctcactacgttgaagacaaaggccataaataccttgtattcgaagccaacacgggaacagaaaacggataccaaggcgaagaatctttatttaacaaagcgtactacggcggcggcacgaacttcttccgtaaagaaagccagaagcttcagcagagcgctaaaaaacgcgatgctgagttagcgaacggcgccctcggtatcatagagttaaataatgattacacattgaaaaaagtaatgaagccgctgatcacttcaaacacggtaactgatgaaatcgagcgcgcgaatgttttcaaaatgaacggcaaatggtacttgttcactgattcacgcggttcaaaaatgacgatcgatggtattaactcaaacgatatttacatgcttggttatgtatcaaactctttaaccggcccttacaagccgctgaacaaaacagggcttgtgctgcaaatgggtcttgatccaaacgatgtgacattcacttactctcacttcgcagtgccgcaagccaaaggcaacaatgtggttatcacaagctacatgacaaacagaggcttcttcgaggataaaaaggcaacatttgcgccaagcttcttaatgaacatcaaaggcaataaaacatccgttgtcaaaaacagcatcctggagcaaggacagctgacagtcaactaa

SEQ ID NO: 137379 - DNA, 4607 bp, Homo sapiens
atgggcacagtgttcaccctgaggtttgatgacaatgtagacttagaagaccctgcttttttgggctctagaagaatccccaccaacgagaacaaagacacaacataccagaatctctgggacgcattgaaagcagtgtgtagagggaaatttatagcactaaatgcccacaagagaaagcaggaaagatccaaaattgacaccctaacatcacaattaaaagaactagaaaagcaagagcaaacacattcaaaagctagcagaaggcaagaaataactaaaatcagagcagaactgaaggaaatagagacacaaaaaacccttcaaaaaattaatgaatccaggagctggttttttgaaaggatcaacaaaattgatagacagctagcaagactaataaagaaaaaaagagagaagaataaaatagacgcaataaaaaatgatgaaggggatatcaccaccgatcccacagagatacaaactaccatcagagaatactacaaacacctctatgcaaataaactagaaaatctagaagaaatggataaattcctggacacatacactctcccaagactaaaccaggaagaagttgaatctctgaatagaccaataacaggagctgaaattgtggcaataatcaatagcttaccaaccaaaaagagtccaggaccagatggatccacagccaaattctaccagaagtacaaagaggaactggtcccacaaaaggctgtctgcaagtggaggagcaaagaaagccagtctgagcaaggaaagccagccttcccaaaactgaaaaacttggagtccgatgatcaagggcaggaagcatccagcatgggagaaagatcagcaaaacgaaaaataccaagtgcctcaattcgatcaatcaacgattaaaaatattgagtctgcaaaaggacttgatgtgtgggacagttggccgctgcaaaacgctgacggaacagtagctgaatacaacggctatcacgttgtgtttgctcttgcgggaagcccgaaagacgctgatgacacatcaatctacatgttttatcaaaaggtcggcgacaactcaatcgacagctggaaaaacgcgggccgtgtctttaaagacagcgataagttcgacgccaacgatccgatcctgaaagatcagacgcaagaatggtccggttctgcaacctttacatctgacggaaaaatccgtttattctacactgactattccggtaaacattacggcaaacaaagcctgacaacagcgcaggtaaatgtgtcaaaatctgatgacacactcaaaatcaacggagtggaagatcacaaaacgatttttgacggagacgcaaaaacatatcagaacgttcagcagtttatcgatgaaggcaattatacatccggcgacaaccatacgctgagagaccctcactacgttgaagacaaaggccataaataccttgtattcgaagccaacacgggaacagaaaacggataccaaggcgaagaatctttatttacaaagcggattgccagacaccctatacagcagcattcctactggcatcgagttggtgccctcgaggtcagagaccccagaggaaggagcaggcacccatctttgttgttctccagcctccttgggtgacatctccagctggccgctgcaaaacgctgacggaacagtagctgaatacaacggctatcacgttgtgtttgctcttgcgggaagcccgaaagacgctgatgacacatcaatctacatgttttatcaaaaggtcggcgacaactcaatcgacagctggaaaaacgcgggccgtgtctttaaagacagcgataagttcgacgccaacgatccgatcctgaaagatcagacgcaagaatggtccggttctgcaacctttacatctgacggaaaaatccgtttattctacactgactattccggtaaacattacggcaaacaaagcctgacaacagcgcaggtaaatgtgtcaaaatctgatgacacactcaaaatcaacggagtggaagatcacaaaacgatttttgacggagacggaaaaacatatcagaacgttcagcagtttatcgatgaaggcaattatacatccggcgacaaccatacgctgagagaccctcactacgttgaagacaaaggccataaataccttgtattcgaagccaacacgggaacagaaaacggataccaaggcgaagaatctttatttaacaaagcgtactacggcggcggcacgaacttcttccgtaaagaaagccagaagcttcagcagagcgctaaaaaacgcgatgctgagttagcgaacggcgccctcggtatcatagagttaaataatgattacacattgaaaaaagtaatgaagccgctgatcacttcaaacgcggtcggcgacaactcaatcgacagctggaaaaacgcgggccgtgtctttaaagacagcgataagttcgacgccaacgatccgatcctgaaagatcagacgcaagaatggtccggttctgcaacctttacatctgacggaaaaatccgtttattctacactgactattccggtaaacattacggcaaacaaagcctgacaacagcgcaggtaaatgtgtcaaaatctgatgacacactcaaaatcaacggagtggaagatcacaaaacgatttttgacggagacggaaaaacatatcagaacgttcagcagtttatcgatgaaggcaattatacatccggcgacaaccatacgctgagagaccctcactacgttgaagacaaaggccataaataccttgtattcgaagccaacacgggaacagaaaaaaaataccaaggcgaagaatctttatttaacaaagcgtactacggcggcggcacgaacttcttccgtaaagaaagccagaagcttcagcagagcgctaaaaaacgcgatgctgagttagcgaacggcgccctcggtgtgatctccattcctttgtacatccctcacacgctgttcgaatgggattttggaaaggaaatctgtgtattttggctcactactgactatctgttatgtacagcatctgtatataacattgtcctcatcagctatgatcgatacctgtcagtctcaaatgctatcctaaacagcagcaaagcgaaaaataccaagtgcctcaattcgatcaatcaacgattaaaaatattgagtctgcaaaaggacttgatgtgtggaacagctggccgctgcaaaccgctgacggaaccagtagctgaatacaacggctatcacgttgtgtttgctcttgcgggaagcccgaaagacgctgatgacacatcaatctacatgttttatcaaaaggtcggcgacaactcaatcgacagctggaaaaacgcgggccgtgtctttaaagacagcgataagttcgacgccaacgatccgatcctgaaagatcagacgcaagaatggtccggttctgcaacctttacatctgacggaaaaatccgtttattctacactgactattccggtaaacattacggcaaacaaagcctgacaacagcgcagatattccagatgattacagtttttattaccagcctctgcaacactacctccagccacatctgtctccacatcagctgggtcaccacaatgcacggcgccatgcctcatcccggccacatccccacagcccctgcttctttacctgccaaggtgaaaggttccgggaaggtctgctggctggccttccctttatcagaactcaccccccccagtgccttacaggtaaatgtgtcaaaatctgatgacacactcaaaatcaacggagtggaagatcacaaaacgatttttgacggagacggaaaaacatatcagaacgttcagcattttatcgatgaaggcaattatacatgcggcgacaaccatacgctgagagaccctcactacgttgaagacaaaggccataaataccttgtattcgaagccaacacgggaacagaaaacggataccaaggcgaagaatctttatttaacaaagcgtactacggcggcggcacgaacttcttccgtaaagaaagccagaagcttcagcagagcgctaaaaaacgcgatgctgagttagcgaacggcgccctcggtatcatagagttaaataatgattacacattgaaaaaagtaatgaagccgctgatcacttcaaacacggtaactgatgaaatcgagcgcgcgaatgttttcaaaatgaacggcaaatggtacttgttcactgattcacgcggttcaaaaatgacgatcgatggtattaactcaaacgatatttacatgcttggttatgtatcaaactctttaaccggcccttacaagccgctgaacaaaacagggcttgtgctgcaaatgggtcttgatccaaacgatgtgacattcacttactctcacttcgcagtgccgcaagccaaaggcaacaatgtggttatcacaagctacatgacaaacagaggcttcttcgaggataaaaaggcaacatttgcgccaagcttcttaatgaacatcaaaggcaataaaacatccgttgtcaaaaacagcatcctggagcaaggacagctgacagtcaactaa

SEQ ID NO: 137380 - DNA, 3640 bp, Homo sapiens; identical to SEQ ID NO: 132642

SEQ ID NO: 137381 - DNA, 3688 bp, Homo sapiens
atgcacattgttgtagaaacagctctgtcagcttcatggcagaacaaggccaagcccccagctagggttctgcttcaggtggtccccaatgtgtggttccttgtggctgttgtgtgggaactgtatccatctttggatctcatggatcgttccatagaatgcagttcctcaccagcaacggaacaaagctggacagagaatgactatgacaagctgagagaagaaggcttcagacgatcaaattactctgagctacaggaggacattcaaaccaaaggcaaagatgttgaaaactttgaaaaaaatttagaagaatgtataactagaataactaatacacagaagtgcttaaaggagctgatggagctgaaaaccaaggctcgagaactacgtgaagaatgcagaagcctcaggagccgatgcgatcaactggaagaaagggtatcagtgatggaagatgaaatgaatgaaatgaagcaagaagggaagtttagagaaaaaagaataaaaagaaatgagcaaagcctccaagaaatatgggactatgtgaaaagaccaaatctacgtctgattggtgtacctgaaagtgatggggagaatggaaccaagttgaaaaacactctgcaggatattatccaggagaacttccccaatctagcaaggcaggccaaagttcagattcaggaaatacagagaatgccacaaagatattccttgacaagagcaactccaagacacataattgtcagattcaccaaagttgaaatgaaggaaaaaatgttaagggcagccagagagaaaggagcacccagattcataaagcaagtcctgagtgacctacaaagagacttagactcccacacattaataatgggagactttaacaccccactgtcaacattagacagatcaacgagacagaaagtcaacaaggatacccaggaattgaactcagctctgcaccaagtggacctaatagacatctacagaactctccaccccaaatcaacagaatacacatttttttcagcaccacaccacacgtattccaaaattgaccacatacttggaagtaaagctctcctcagcaaatgtaaaagaacagaaattataacaaactatctctcagaccacagtgcaatcaaactagaactcaggattaagaatctcactcaaaaccgctcaactacatggaaactgaacaacctgctcctgaatgactactgggtacataacgaaatgaagctagaaataaagatgttctttgaaaccaacgagaacaaagacacaacataccagaatctctgggacgcattcaaagcagtgtatagagggaaatttatagcactaaatgcccacaagagaaagcaggaaagatccaaaattgacaccctaacatcacaattaaaagaactagaaaagcaagagcaaacacattcaaaagctagcagaaggcaagaaataactaaaatcagagcagaactgaaggaaatagagacacaaaaaacccttcaaaaaattaatgaatccaggagctggttttttgaaaggatcaacaaaatagatagactgctagcaagactaataaagagaaaaagagagaagaatcaaatagatgcaataaaaaatgataaaggggacatcaccaccaatcccacagaaatacaaactaccatcagagaatactacaaacacctctacgcaaataaactagaaaatctagaagaaatggataaattcctcgacacatacactctcccaagactaaaccaggaagaagttgaatctctgaatagaccaataacaggatctgaaattgtggcaataatcaatagcttaccaacccaaaaaaagtccaggaccagatggattcacagccgaattccaccagaggtacaaggaggagctggtaccattccttctgaaactattccaatcaatagaaaaagagggaatcctccctaactcattctatgaggccagcatcatcctgataccaaagctgggcagagacacaaccaaaaaagagaattttagaccaatatccttgatgaacattgatgcaaaaatcctcaataaaatactggcaaaccgaatccagcaacacatcaaaaagcttatccaccatgatcaagtgggcttcatccctgggatgcaaggcaggttcaatatacgcaaatcaataaatgtaatccagcatataaacagaaccaaagacaaaaaccacatgattatctcaatagatgcagaaaaggcctttgacaaaattcaacaacccttcatgctaaaaactctcaataaattagtgttggaagttctggccagggcaatcaggcaggagaaggaaataaagggtattcaattaggaaaagaggaagtcaaattgtccctgtttgcagacgacatgattgtatatctagaaaacaccattgtctcagcccaaaatctccttaagctgataagcaacttcagcaaagtctcaggatacaaaatcaatgtacaaaaatcacaagcattcttatacacgaataacagacaaacagagagccaaatcatgagtgaactcccattcacaattgcttcaaagagaataaaatacctaggaaaccaacttacaagggatgtgaaggacctcttcaaggagaactacaaaccactgctcaaggaaataaaagaggatacaaacaaatggaagaacattccatgctcatgggtaggaagaatcaatatcgtgaaaatggccatactgcccaaggtaatttatagattcaatagcattcccatcaagctaccaatgcctttcttcacagaattggaaaaaactactttaaagttcatatggaaccaaaaaagagcccgcattgccaagtcaatcctaagccaaaagaacaaagctggaggcatcatgctgcctgacttcaaactatactaccagactacagtaaccaaaacagcatggtactggtaccaaaacagagatatagatcaatggaacagaacagagccctcagaaataacacctcatatctacaactatctgatctttgacaaacctgagaaaaacaagcaatggggaaaggattccctatttaataaatggtgctgggaagactggctacccatatgtggaaagctgaaactggatcccttccttacaccttatacaaaaattaattcaagatggattaaagacttaaacgttagacctaaaaccataaaaaccctagaagaaaacctaggcattaccattcaggacataagcatgggtaaggacttcatgtctaaaacaccaaaagcaaaggcaacaaaagccaaaattgacaaatgggatctaattaaactaaagagtttctgcacagcaaaagaaactaccatcagagtgaacaggcaacctacaaaatgggagaaaattttcgcaacctactcatctgacaaagggctaatatccagaatctacaatgaactcaaacaaatttacaagataaaaacaaacaaccccatcgaaaagtgggtgaaggacatgaacagacacttctcaaaagaagacatttatgcagccaaaaaacacatgaaaaaatgctcaccatcactggccatcagagaaatgcaaatcaaaaccacaatgagataccatctcataccagttagaatggcgatcattaaaaagtcagcaaacaacaggtgctag

SEQ ID NO: 137382 - DNA, 3434 bp, Homo sapiens
atgggagactttaacaccccactgtcaacattagacagatcaacgagacagaaagtcaacaaggatacccaggaattgaactcagctctgcaccaagcagacctaatagacatctacagaactctccaccccaaatcaacggaatatacatttttttcagcaccacaccacacctattccaaaattgaccacatactgggaagtaaagctctcctcagcaaatgtaaaagaacagaaattataacaaactatctctcagaccacagtgcaatcaaactagaactcaggattaagaatctcactcaaaaccgctcaactacatggaaactgaacaacctgctcctgaatgactactgggtacataacgaaatgaaggcagaaataaagatgttctttgaaaccaacgagaacaaagacacaacataccagaatctctgggacgcattcaaagcagtgtgtagagggaaatttatagcactaaatgcccacaagagaaagcaggaaagatccaaaattgacaccctaacatcacaattgaaagaactagaaaagcaagagcaaacacattcaaaagctagcagaaggcaagaaataactaaaatcagagcagaactgaaggaaatagagacacaaaaaacccttcaaaaaattaatgaatccaggagctggttttttgaaaggatcaacaaaattgatagaccgctagcaagactaataaagaaaaaaagagagaagaatcaaatagatgcaataaaaaatgataaaggggatatcaccaccgatcccacagaaatacaaactaccatcagggaatactacaaacacctctacgcaaataaactagaaaatctaggagaaataaggattaattcctcgacacatacactctcccaagactaaaccaggaagaagttaaatctctgaatagaccaataacaggagctgaaattgtggcaataatcaatagcttagcaatcaaaaagagtccaggaccagatggattcacagccgaattctaccagcggtacaaggaggaactggtaccattccttctgaaactattccaatcaatagaaaaagagggaatcctccctaactcattttatgaggccagcatcattctgataccaaagccaggcagagacacaacaaaaaaagagaattttagaccaatatccttgatgaacattgatgcaaaaatcctcaataaaatactggcaaaccgaatccagcagcacatcaaaaagcttatccaccatgatcaagtgggcttcatccctgggatgcaaggctggttcaatatacacaaatcaataaatgtaatccaacatataaacagagccagagacaaaaaccacatgattatctcaatagatgcagaaaaagcatttgacaaaattcaacaacccttcatgctaaaaactctcaataaattaggtattgatgggacgtatctcaaaataataagagctatctatgacaaacccacagccaatatcatactgaatgggcaaaaactggaagcattccctttgaaaactggcacaagacagggatgccctctctcaccactcctattcaacatagtgttggaagttctggccagggcaattaggcaggagaaggaaataaagggtattcaattaggaaaagaggaagtcaaattgtccctgtttgcagacgacatgattgtatatctagaaaaccccattgtctcagcccaaaatctccttaagctgataagcaacttcagcaaagtctcaggatacaaaatcaatgtacaaaaatcacaagcattcttatacaccaacaacagacaaacagagagccaaatcatgagtgaactcccattcacaattgcttcaaagagaataaaatacctaggaatccaacttacaagggatgtgaaggacctcttcaaggagaactacaaaccactgctcaaggaaataaaagaggatacaaacaaatggaagaacatgccatgctcatgggtaggaagaatcaatatcgtgaaaatggccatactgcccaaggtaatttacagattcaatgccatccccatcaagctaccaatggctttcttcacagaattggaaaaaactactttaaagttcatatggaaccaaaaaagagcccgcatcgccaagtcaatcctaagtcaaaagaacaaagctggaggcatcacactacctaacttcgaactatactacaaggctacagtaaccaaaacagcatggtactggtaccaaaacagatatatagaccaatggaacagaacagagccctcagaaataacaccgcatatctacaactatctgatctttgacaaacctgggaaaaacaagcaatggggaaaggattccctatttaataaatggtgctgggaaaactggctagccatatgtagaaagctgcaactggatcccttccttacaccttatacaaaaatcaattcaagatggattaaagacttaaacgttagacctaaaaccataaaaaccctagaagaagacctaggcattaccattcaggacataggcatgggcaaggacttcatgtctaaaacaccaaaagcaatggcaacaaaagacaaaattgacaaatgggatctaattaaactcaagagcttctgcacagcaaaagaaaccaccatcagagtgaacaggcaacctacaaaatgggagaaaattttcgcaacctactcatttgacaaagggctaatatccagaatctacaatgaactccaacaaatttacaagaaaaaaacaaacaaccccatcaaaaagtgggcgaaggacatgaacagacacttctcaaaagaagacatttatgcagccaaaaaacacatgaaaaaatactcatcatcactggccattagagaaatgcaaatcaaaaccacaatgagataccatctcacacccgttagaatggcaaccattaaaaactcaggaaacaacaggtcattgtgtttttataaggaaaacctaagcctttgtctggcgatccttctctctgttcctgtgcaagaaggaggggccagaagttttctggccccagcaggaggcgtggcaggccgagcaacaagtcactatggcggacacatggcgactgcagagaggctgtcagtggagctatctgggcaagccctgaaggaattccaaaagggccctttatctccaaaacagtttaagggtcatcacagccagcagctccgatggactcatagattaaacccctcctatggccaatcaaagacccccaagaacacactgttgaagatgagagggcccaccacttgggcccttggagggaccgatgtggcagcttccactgataataatggaaacgcacattttgagacgttgcaagtcatggacatgcccaggccatggtgctgcctgttggacggtgctttgcttgtttctgtctga

SEQ ID NO: 137383 - DNA, 3071 bp, Homo sapiens
atggaaggtgaaatgaatgaaatgaagcgagaagggaagtttagagaaaaaagaataaaaagaaatgagcaaagcctccaagaaatatgggactatgtgaaaagaccaaatctacgtctgattggtgtacctgaaagtgatggggagaatggaaccaagttggaaaacactctgcaggatattatccaggagaacttccccaatctagcaaggcaggccaacgttcagattcaggaaatacagagaacgccacaaagatactcctcgagaagagcaactccaagacacataattgtcagattcaccaaagttgaaatgaaggaaaaaatgttaagggcagccagagagaaagacagatcaacgagacagaaagtcaacaaggatacccaggaattgaactcagctctgcaccaagcggacctaatagacatctacagaactctccacctcaaatcaacagaatatacatttttttcagcaccacaccacacttattccaaaattgaccacatacttggaagtaaagctctcctcagcaaatgtaaaagaacagaaattataacaaactatctctcagaccacagtgcaatcaaactggaactcaggattaagaatctcactcaaaaccgctcaactacatggaaactgaacaacctgctcctgaatgactactgggtacataacaaaatgaaggcagaaataaaaatgttctttgaaaccaacgagaacataagacacaacataccagaatctctgggatgcattcaaagcagtgtgtagagggaaatttatagcactatatgcccactggagaaagcagggaaagatccaaaatggacaccctaacatcacaattagaagaactagaaaagctagagcaaacacattcaaaagctagcagaaggcatgaaatagctaaaatcagagcagaactgaaggaaatagagacacaaaaaacctttcaaaaagttaatgaatccagcagctggttttttgaaaggatcaacaaaattgatagaccgctagcaagactaataaagaaaaaaagagagaagaatcaaatagacacaataaaaaatgataaaggggatatcaccaccgatcccacagaaatacaaactaccatcaggagaatactacaaacacctctacgcaaataaactagaaaatctagaagaaatggataaattcctcgacacatacactctcccaagactaaaccaggaagaagttgaatctctgaatagaccaaataacagggatctgcaattgtggcaataatcaatagtttaccaaccaaaaagagtccaggaccagatggattcacagccgaattccaccagaggtacaaggaggaactggtaccattccttctgaaactattccaatcaatagaaaaagaaggaatcctccctaactcattttatgaggccagcatcattctgataccaaagccgggcagagacacaaccaaaaaagagaattttagaccaatatccttgatgaacattgatgcaaaattcctcaataaaatactggcaaaacgaatccagcagcacatcaaaaagcttatccaccatgatcaagtgggcttcatccctgggatgcaaggctggttcaatatacgcaaatcaataaatgtaatccagcatataaacagagccaaagacaaaaaccacatgattatctcaatagatgcagaaaaagcctttgacaaaattcaacaacccttcatgctaaaaactctcaataaattagaattggaaaaaactactttaaacttcatatggaaccaaaaaagagcccgcattgccaagtcaatcctaagccaaaagaacaaagctggaggcatcacactacctgacttcaaactttactacaaggctacagtaaccaaaacagcatggtattggtaccaaaacagagatatagatcaatggaacagaacagagccctcagaaataacaccgcatacctacaactgtctgatctttgacaaacctgagaaaaacaagaaatggggaaaggattccctatttaataaatggtgctgggaaaactggctagccatatgtagaaagctgaaactggatcccttccttacaccttatacaaaaatcaattcaagatggattaaagatttaaacgttagacctaaaaccataaaaaccctagaagaaaacctaggcattaccattcaggacataggcatgggcaaggacttcatgtccaaaacaccaaaagcaatggcaacaaaagacaaaattgacaaatgggatctaattaaactaaagagcttctgcacagcaaaagaaactaccatcagagtgaacaggcaacctacaacatgggagaaaattttcgcaacctactcatctgacaaagggctaatatccagaatctacaatgaactcaaccaaatttacaagaaaaaaacaaacaaccccatcaaaaagtgggcgaaggacatgaacagacacttctcaaaagaagacatttatgcagccaaaaaacacatgaaaaaatgctcatcatcactggccatcagagaaatgcaaatcaaaaccacaatgagataccatctcacaccagttagaatggcaatcattaaaaagtcaggaaacaacaggtgctggagaggatgtggagaaatacgaacacttttacattgttggtgggactgtaaactagttcaaccattgtggaagtcagtgtggcgattcctcagggatctagaactagaaataccatttgacccagccatcccattactgggtatatacccaaatgactataaatcatgctgctataaagacacatgcacacgtatgtttattgcggcattattcacaatagcaaagacttggaaccaacccaaatgtccaacaatgatagactggattaagaaaatgtggcacatatacaccatggaatactatgcagccataaaaaatgatgagttcatgtcctttgtagggacatggatgaaattggaaatcatcattctcagtaaactatcacaagaacaaaaaaccaaacaccgcatattctcactcataggtgggaattga

SEQ ID NO: 137384 - DNA, 2374 bp, Homo sapiens
tcacaacaaactgtctctcagaccacagtgcaatcaaattagaactcaggattaagaaactcactgaaaaccacacaactacatggaaactgaacaacctgctcttgaatgactactgggtagataacgaaatgaaggcagagataaagatgttctttgaaatcaatgagaaaaaaagacacaacatcccagaatctctgggacacatttaaagcagtgtgtagagggaaacttatagccctaaatgcccacaagagaaagcaggaaagatcaaaaattgacaccctaacatcacaattaaaaaaaactagagaagcaagagcaaagaaactcaaaagctagcagaaagcaagaaataactaagatcagagcagaactgaaggagatagagacacaaaaaaaaacccttcaaaaaatcaatgaatccaggagctggttttttgaaaagatcaacaaaattgatggaccgctagcaagactaataaagaagaaaagagagaagaatcaagtggacgcaataaaaaatgataaaggggatatcatcaccgatcccacagaaatgcaaactaccatcagagaatactataaatacctctacgcaaataaactagaaaatctagaagaaatggataaattcctcaacacatacaccctccaaagactaaaccaggaaggaattgaatctcttaatagaccaataacaggctctgaaattgaggcaataattaatagcttaccaaccaaaaaaagtccaggaccagacggattcacagccaaattctaccagaggtacaaggaggagctggtctaccccgagccccggagcgagagcgagtgcctgagcaacatccgcgagttcctgcgcggctgcggggcttccctgcggctggagtcaattcgggaggatcgaaacggcagatcgcaaaaaacagtacatacagaaggagacatgaacatgaacatcaaaaaaattgtaaaacaagccacagttctgacttttacgactgcacttctggcaggaggagcgactcaagccttcgcgaaagaaaataaccaaaaagcatacaaagaaacgtacggcgtctctcatattacacgccatgatatgctgcagatccctaaacagcagcaaaacgaaaaataccaagtgcctcaattcgatcaatcaacgattaaaaatattgagtctgcaaaaggacttgatgtgtgggacagctggccgctgcaaaacgctgacggaacagtagctgaatacaacggctatcacgttgtgtttgctcttgcgggaagcccgaaagacgctgatgacacatcaatctacatgttttatcaaaaggtcggcgacaactcaatcgacagctggaaaaacgcgggccgtgtctttaaagacagcgataagttcgacgccaacgatccgatcctgaaagatcagacgcaagaatggtccggttctgcaacctttacatctgacggaaaaatccgtttattctacactgactattccggtaaacattacggcaaacaaagcctgacaacagcgcaggtaaatgtgtcaaaatctgatgacacactcaaaatcaacggagtggaagatcacaaaacgatttttgacggagacggaaaaacatatcagaacgttcagcagtttatcgatgaaggcaattatacatccggcgacaaccatacgctgagagaccctcactacgttgaagacaaaggccataaataccttgtattcgaagccaacacgggaacagaaaacggataccaaggcgaagaatctttatttaacaaagcgtactacggcggcggcacgaacttcttccgtaaagaaagccagaagcttcagcagagcgctaaaaaacgcgatgctgagttagcgaacggcgccctcggtatcatagagttaaataatgattacacattgaaaaaagtaatgaagccgctgatcacttcaaacacggtaactgatgaaatcgagcgcgcgaatgttttcaaaatgaacggcaaatggtacttgttcactgattcacgcggttcaaaaatgacgatcgatggtattaactcaaacgatatttacatgcttggttatgtatcaaactctttaaccggcccttacaagccgctgaacaaaacagggcttgtgctgcaaatgggtcttgatccaaacgatgtgacattcacttactctcacttcgcagtgccgcaagccaaaggcaacaatgtggttatcacaagctacatgacaaacagaggcttcttcgaggataaaaaggcaacatttgcgccaagcttcttaatgaacatcaaaggcaataaaacatccgttgtcaaaaacagcatcctggagcaaggacagctgacagtcaactaa

SEQ ID NO: 137385 - DNA, 3422 bp, Homo sapiens
agcacccagattcataaagcaagtcctgagtgacctacaaagagacttagactcccacacaataataatgggagactttaacaccccactgtcaacattagacagatcaacaagacagaaagtccacaaggatacccaggaattgaactcagctctgcaccaagcggacctaatagacatctacagaactctccaccccaaatcaacagaatatacatgtttttcagcaccacaccacacctattccaaaattgaccacatagttggaagtaaagcactcctcagcaaatgtaaaagatcagaaattataacaaactgtctctcagaccacagtgcaatcaaactagaactcaggattaagaaactcactcaaaaccgctcaactacatggaaactgaacaacctgctcctgaatgactactgggtacataacgaaatgaaggcagaaataaggatgttctttgaaaccaacgagaacaaagacacaacataccagaatctctgggacacattcaaagcagtgtgtagagggaaatttatagcactaaatgcccacaagagaaagcaggaaagatccaaaattgacaccctaacatcacaattaaaagaactagaaaagcaagagcaaacacattcaaaagctagcagaaggcaagaaataactaaaatcagagcagaactgaaggaaatagagacacaaaaaaccctttcaaaaaattaatgaattccaggagctggtttttttgaaaggatcaacaaaattgatagaccactatcaagactaataaagaagaaaagagagaagaatcaaatagacggcaataaaaaacgataaattgggatatcacccaccggatccccacagaaatagaaactatcatccagagaatactacaaacacctctgtgcaaataaactagaaaatcctagaagaaatggataaattccttgacacatacaccctccccaagactaaacccaggaagaagttgaatcccttcagtagactaataacaggctctgaaattgaggcaataactaatagcctaacaaaccaaaaaaagtccaggaccagatggattcacagccgaattctaccagaggtacaaaaaggagctggtaccattccttctgaaactagtccaatcaatagaaaaagagggaatcctccctaactcattttatgaggccagcatcatcccgataccaaagcctggcagagacaaaaccaaaaaagagaattttagaccaatatccttgatgaacattgatgcaaaaatccccaataaaatactggcaaaccgaatccagcagcacatcaaaaagcttatccaccatgatcaagtgggcttcatccctgggatgcaaggctggttcaatatacgcaaatcaataaatgtagtccagcatataaacagaaccaaagacaaaaaccacatgattatctcaatagatgcagaaaaggcctttgacaaaattcaacaacccttcatgctaaaaactctcaataacttaggtattgatgggatgtatctcaaaataataagagctatctatgacaaacccacagccaatatcatactgaatgggcaaaaactggaagcattccctttgaaaactggcacaagacagggatgccctctctcaccactcctattcaacatagtattggaagttctggccagggcaattaggcaggagaaggaaataaagggcattcaattaggaaaagaggaagtcacattgtccctgtttgcagacgacatgattgtttatctagaaaaccccattgtctcagcccaaaatctccttaagctaataagcaccttcagcaaagtctcaggatacaaaatcaatgtacaaaaatcacaagcattcttatacaccaacaacagacaaacagagagccaaatcatgagtgaactcccattcacaattgcttcaaagagaataaaatacctaggaatcctacttacaagggatgtgaaggacctcttcaaggagaactacaaaccactgctcaaggaaataaaagaggatacaaacaaatggaagaacattccatgctcatgggtaggaagaatcaatatcgtgaaaatggccatactgcccaaggtaatttacagattcaatgccatctccatcaagctaccaatgactttattcacagaattggaaaaaactactttaaagttcatatggaagcaaaaaagagcccgcatcgccaagtcaatcctaagccaaaagaagtgtgctggaggcatcacactacctgacttcaaactatactgcaaagctacagtaaccaaaacagcatggtactggtaccaaaacagagatatagatcaatggaacagaacagatccctcagaaataacgccgcatacctacaactatctgatctttgacaaacctgagaaaaacaagcaatggggaaaggattccctatttaataaatggtgctgggaaaactggctagccatatgtagaaagctgaaactggatcccttccttacaccttatacaaaaatcaattcaagatggattaaagatttaaacattagacctaaaaccataaaaaccctagaagaaaacctaggcattaccattcaggacataggcatgggcaaggacttcatgtccaaaacaccaaaagcaatggcaacaaaagccaaaattgacaaatgggatctaattaaactaaagagcttctgcacagcaaaagaaactaccatcagagtgaacaggcaacctacaacatgggagaaaattttcgcaacctactcatctgacaaagggctaatatccagaatctacaatgaactcaaacaaatttacaagaaaaaaacaaacaaccccatcaaaaagtgggcgaaggatatgaacagacacttctcaaaagaagacatttatgcagccaaaaaacacatgaaaaagatggtgatgtacagatgggtttttggtgtggatgtcctttctgtttgttagttttccttctaacagacaggaccctcagctgcaggtctgttggagtttgctagaggtccactccagaccctgtttgcctgggtaccagcagtggtgtctgcagaacagcagattttcatgaaccgtgaatgctgctgtctgatcgtaaagcccaacgaatgcagagaaaatgagaacgctttcacccagtagtcaatattcagtttgcaacagagaattcacaccgaagagaaaccctatatatgcactgaatgtgggcaggccttcatccaaaagacacacttgattgcacatcagagaatatatagtggagagaagccttttgaatgctgttactgtgggaaagcctttcattccaaatcccaagtgaatgagcatgggaaaacccacacaggagaaaaaccctatacaggcacaaaatgtgtgaaggtctt

SEQ ID NO: 137386 - DNA, 5280 bp, Homo sapiens
ctatcctgtcgtcatggaagtgatatcgcggaaggaaaatacgatatgagtcgtctggcggcctttctttttctcaatgtatgagaggcgcattggagttctgctgttgatctcattaacacagacctgcaggaagcggcggcggaagtcaggcatacgctggtaactttgaggcagctggtaacgctctatgatccagtcgattttcaaaagagacgaaggcttaacccttccgggcatccgatactgacacagggatttgtaataacgccatggcatacggattggtgatttcttttgtttcactaagccgaaaactgcgtaaaccggttctgtaacccgataaagaagggaatgagatatgggttgatatgtacactgtaaagccctctggatggactgtgcgcacgtttgataaaccaaggaaaagattcatagcctttttcatcgccggcatcctcttcagggcgataaaaaaccacttccttccccgcgaaactcttcaatgcctgccgtatatccttactggcttccgcagaggtcaatccgaatatttcagcatatttagcaacatggatctcgcagataccgtcatgttcctgtagggtgccatcagattttctgatctggtcaacgaacagatacagcatacgtttttgatcccgggagagactatatgccgcctcagtgaggtcgtttgactggacgattcgcgggctatttttacgtttcttgtgattgataaccgcttgttccgccatgacagatccatgtgaaagtgtgacaagttttttagattgtcacacttttcttgtgcttctttccaggctttcactgggtcagattcataacctctctggactaacatttgaatcaaatctttctttgacctattctctatagtaattttcccttgtatcttctctaaaatgaaacgggcttgattgttaagctttgtagattctgctcccaacattcccacaagccactccttacgtaaaccgtaataacttaatcgtaaatcaaagaattctttcagaatgtcttgcacagtttcatatttcttcagacatcccatatgatcaaaaagtaccatggaattacaagtaagagtagtttgaagtttaaaaactttatgcagtccagcagcttctgcttgtgctagtttctcttcagtcattttcaccacaaatttcacagttgtgtcagtatgatattctttataatcagaaattaatgctggtgttttatctgttccatttagcataggttctaaaacctgttctttatatacctgtgtccaagttctaactggaagctctgtaatttctactgtgtttctgtccactacaaatatttcaccactgactgcatactggttttgaccaagttcttgaatcgtgcctttaaagtttttgtagtttggaagccgttctcggagcactgtccgaccgctttggccgccgcccagtcctgctcgcttcgctacttggagccactatcgatgtcagctgtccttgctccaggatgctgtttttgacaacggatgttttattgcctttgatgttcattaagaagcttggcgcaaatgttgcctttttatcctcgaagaagcctctgtttgtcatgtagcttgtgataaccacattgttgcctttggcttgcggcactgcgaagtgagagtaagtgaatgtcacatcgtttggatcaagacccatttgcagcacaagcccctgttgttgttcagcggcttgtaagggccggttaaagagtttgatacataaccaagcatgtaaatatccgttgagtttaaatcccatcgatcggtcatttttgaacccgcgtgaatcagtgaacaagtaccatttgccgttcattttgaaaacattcgcgcgctcgatttcatcagttaccgtgtttgaagtgatcagcggctttcattacttttttcaatgtgtaatcattatttaactctatgatacccgagggcgccgttcgctaactcagcatcgcgttttttagcgctctgctgaagcttctggctttctttacggaagaagttcgtgccgccgccgtagtacgctttgttaaataaagagttcttcgcctgtcgtatccgttcttctgttcccgtgttggcttcgaatacaaggtatttatggcctttgtcttcaacgtagtgagggtctctcagcgtatggtggtcgccggatgtataattgccttcatcgataaactgctgaacgttctgatatgtttttccgtctccgtcaaaaatcgttttgtgatcttccactccgttgattttgagtgtgtcatcagattttgacacataaacatgcgcaaggaggcaggctttgtttgccgtaatgcttaccggaatagtcagtgtagaataaaccggattttttccgtcagatgtaaaggttgcagaaaccggacctttctttgcgtctgatctttcaggatcgggatccgttggcgtcgaacttatcgctgtctttaaagacacggccccgcgtttttccaactgttgatggatttgtccccccctgcccgctttccagtcgggaaacctgtcgtgccagctgcattaatgaatcggccaacgcgcggggagaggcggtttgcgtattgggcgccagggtggtttttcttttcaccagtgagacgggcaacagctgattgcccttcaccgcctggccctgagagagttgcagcaagcggtccacgctggtttgccccagcaggcgaaaatcctgtttgatggtggttccgaaatcggcaaaatcctgcccgctttccagtcgggaaacctgtcgtgccagctgcattaatgaatcggccaacgcgcggggagaggcggtttgcgtattgggcgccagggtggtttttcttttcaccagtgagacgggcaacagctgattgcccttcaccgcctggccctgagagagttgcagcaagcggtccacgctggtttgccccagcaggcgaaaatcctgtttgatggtggttccgaaatccgcaaaatcctgcccgctttccagtcgggaaacctgtcgtgccagctgcattaatgaatcggccaacgcgcggggagaggcggcttgcgtattgggcgccagggtggtttttcttttcaccagtgagacgggcaacagctgattgcccttcaccgcctggccctgacagagtttaagcaagcggtccacgctggtttgccccagcaggcgaaaatcttgtttgatggtggttccgaaatcggtaaaatccattaattgcgttgcgctcactgcccgctttccagtcgggaaacctgtcgtgccagctgcattaatgaatcggccaacgcgcggggagaggcggtttgcgtattgggcgccagggtggtttttcttttcaccagtgagacgggcaacagctgattgcccttcaccgcctggccctggattggggaggcggttgccgccgctgctgctgacggtgtgacgttctctgttccggtcacaccacatacgttccgccattcctatgcgatgcacatgctgtatgccgctataccgctgaaagttctgtaaagccagtgagacgggcaacagctgattgcccttcaccgcctggccctgagagagttgcagcaagcggtccacgctggtttgccccagcaggcgaaaatcctgtttgatggtggttccgaaatcggcaaaatcctgcccgctttccagtcgggaaacctgtcgtgccagctgcattaatgaatcggccaacgcgcggggagaggcggtttgcgtattgggcgccagggtggtttttcttttcaccagtgagacgggcaacagctgattgcccttcaccgcctggccctgagagagttgcagcaagcggtccacgctggtttgccccagcaggcgaaaatcctgtttgatggtggttccgaaatcggcaaaatcctgcccgctttccagtcgggaaacctgtcgtgccagctgcattaatgaatcggccaacgcgcggggagaggcggtttgcgtattgggcgccagggtggtttttcttttcaccagtgagacgggcaacagctgattgcccttcaccgcctggccctgagagagttgcagcaagcggtccacgctggtttgccccagcaggcgaaaatcctgtttgatggtggttccgaaatcggcaaaatccttgtcaggctgcccatctgccaaggaaactgtcaaggcttcactggttgtgccaggcccttgaccaacctctgggtcagctgcattcccaatgctgttctgagtctgcaagcgttgctgcccgctttccagtcgggaaacctgtcgtgccagctgcattaatgaatcggccaacgcgcggggagaggcggtttgcgtattgggcgccagggtggtttttcttttcaccagtgagacgggcaacagctgattgcccttcaccgcctggccctgagagagttgcagcaagcggtccacgctggtttgccccagcaggcgaaaatcctgtttgatggtggttccgaaatcggcaaaatcctgcccgctttccagtcgggaaacctgtcgtgccagctgcattaatgaatcggccaacgcgcggggagaggcggtttgcgtattgggcgccagggtggtttttcttttcaccagtgagacgggcaacagctgattgcccttcaccgcctggccctgagagagttgcagcaagcggtccacgctggtttgccccagcaggcgaaaatcctgtttgatggtggttccgaaatcggcaaaatcctgcccgctttccagtcgggaaacctgtcgtgccagctgcattaatgaatcggccaacgcgcggggagaggcggtttgcgtattgggcgccagggtggtttttcttttcaccagtgagacgggcaacagctgattgcccttcaccgcctggccctgagagagttgcagcaagcggtccacgctggtttgccccagcaggcgaaaatcctgggaggaagagaactctgtcagcgggtcaggcagcttgagccactgcccgctttccagtcgggaaacctgtcgtgccagctgcattaatgaatcggccaacgcgcggggagaggcggtttgcgtattgggcgccagggtggtttttcttttcaccagtgagacgggcaacagctgattgcccttcaccgcctggccctgagagagttgcagcaagcggtccacgctggtttgccccagcaggcgaaaatcctgtttgatggtggttccgaaatcggcaaaatcc

SEQ ID NO: 137387 - DNA, 5938 bp, Homo sapiens
  misc_feature (1)...(5938): n = a,t,c or g
gtctggagcccccaactcccttgacagtgtacgctggagcaggttccagggtggggctgccctgccgcctgcctgctggtgtggggacccggtctttcctcactgccaagtggactcctcctgggggaggccctgacctcctggtgactggagacaatggcgactttacccttcgactagaggatgtgagccaggcccaggctgggacctacacctgccatatccatctgcaggaacagcagctcaatgccactgtcacattggcaatcatcacaggaggagcgactcaagccttcgcgaaagaaaataaccaaaaagcatacaaagaaacgtacggcgtctctcatattacacgccatgatatgctgcagatccctaaacagcagcaaaacgaaaaataccaagtgcctcaattcgatcaatcaacgattaaaaatattgagtctgcaaaaggacttgatgtgtgggacagctggccgctgcaaaacgctgacggaacagtagctgaatacaacggctatcacgttgtgtttgctcttgcgggaagcccgaaagacgctgatgacacatcaatctacatgttttatcaaaaggtcggcgacaactcaatcgacagctggaaaaacgcgggccgtgtctttaaagacagcgataagttcgacgccaacgatccgatcctgaaagatcagacgcaagaatggtccggttctgcaacctttacatctgacggaaaaatccgtttattctacactgactattccggtaaacattacggcaaacaaagcctgacaacagcgcaggtaaatgtgtcaaaatctgatgacacactcaaaatcaacggagtggaagatcacaaaacgatttttgacggagacggaaaaacatatcagaacgttcagcagtttatcgatgaaggcaattatacatccggcgacaaccatacgctgagagaccctcactacgttgaagacaaaggccataaataccttgtattcgaagccaacacgggaacagaaaacggataccaaggcgaagaatctttatttaacaaagcgtactacggcggcggcacgaacttcttccgtaaagaaagccagaagcttcagcagagcgctaaaaaacgcgatgctgagttagcgaacggcgccctcggtatcatagagttaaataatgattacacattgaaaaaagtaatgaagccgctgatcacttcaaacacggtaactgatgaaatcgagcgcgcgaatgttttcaaaatgaacggcaaatggtacttgttcactgattcacgcggttcaaaaatgacgatcgatggtattaactcaaacgatatttacatgcttggttatgtatcaaactctttaaccggcccttacaagccgctgaacaaaacagggcttgtgctgcaaatgggtcttgatccaaacgatgtgacattcacttactctcacttcgcagtgccgcaagccaaaggcaacaatgtggttatcacaagctacatgacaaacagaggcttcttcgaggataaaaaggcaacatttgcgccaagcttcttaatgaacatcaaaggcaataaaacatccgttgtcaaaaacagcatcctggagcaaggacagctgacagtcgggggccaaccccttcgcccagtgaaaaaccgcggccgggtctttaaaaacagcgatagttcgacgcccaacgatccgatcctgaaagatcagacgcaagaatggtccggttctgcaacctttacctctgagggaaaaatccgtttattctacactgactattccggtaaacattccggcaaacaaagcttgacaacagcgcaggtaaatgtgtcaaaatctgatgacacactcaaaatcaacggagtggaagatcacaaaacgatttttgacggagacggaaaaacatatcagaacgttcagcagtttatcgatgaaggcaattatacatccggcgacaaccatacgctgagagaccctcactacgttgaagacaaaggccataaataccttgtattcgaagccaacacgggaacagaaaacggataccaaggcgaagaatctttatttaacaaagcgtactacggcggcggcacgaacttcttccgtaaagaaagccagaagcttcagcagagcgctaaaaaacgcgatgctgagttagcgaacggcgccctcggtatcatagagttaaataatgattacacattgaaaaaagtaatgaagccgctgatcacttcaaacacggtaactgatgaaatcgagcgcgcgaatgttttcaaaatgaacggcaaatggtacttgttcactgattcacgcgggtcaaaaatgacgatcgatgacatgttagttgttgcaaacgttgtgggaaccggaggtgaatccacggtttatccgttgggtttggtctgcggggaagcccgaaagccggttgattccccaccattctccagttttatcaaagggtggcggccactccaatcgcaagctggaaaacgggggccggttcttaaagacagcgataagttcgacgccacgatcccgatcctgaagatccagacgcaaagaatgtcgggttctgcaacctttacatctgacggaaaaatccgtttattctacactgactattccggtaaacattacggcaaacaaagcctgacaacagcgcaggtaaatgtgtcaaaatctgatgacacactcanaatcaacggagtggaagatcacaaaacgatttttgacggagacggaaaaacatatcagaacgttcagcagtttatcgatgaaggcaattatacatccggcgacaaccatacgctgagagaccctcactacgttgaagacaaaggccataaataccttgtattcgaagccaacacgggaacagaaaacggataccaaggcgaagaatctttatttaacaaagcgtactacggcggcggcacgaacttcttccgtaaagaaagccagaagcttcagcagagcgctaaaaaacgcgatgctgagttagcgaacggcgccctcggtatcatagagttaaataatgattacacattgaaaaaagtaatgaagccgctgatcacttcaaacacggtaactgatgaaatcgagcgcgcgaatgttttcaaaatgaacggcaaatggtacttgttcactgattcacgcggttcaaaaatgacgatcgatgtctcaagccatcgaaaggccacgccgcgcacaccgcccagcgaccggccgccgcccgcgtgcggcagcaaagcaacacaaaaacaggcaccaccgaccaggcgtcccgggaaagacagaaaacccacaacacggcgccgacaactggggaagacacgcaagagggcccgagaacagagcggacgcccccgggcacaagagggaaacgccgaacaggaagacccggcacaacacaaaacgagcaaagggaagagagaaagagccaccaagcacaggaaaaggcgggacaggccaccagcaaacaaggcgagccacaccccccccacaacgaaatacgacctcacactcactagaacgcgacaatgtcctgtgcatgtagccagggtgttactccaactgaagtgggtcactttccatgactccaactccagagtattggtgcagatgttttgtgcaggggaagagcataatgaacgaggactcttagagtccaagaccgttcagctggatattacggcctttttaaagaccgtaaagaaaaataagcacaagttttatccggcctttattcacattcttgcccgcctgatgaatgctcatccggagttccgtatggcaatgaaagacggtgagctggtgatatgggatagtgttcacccttgttacaccgttttccatgagcaaactgaaacgttttcatcgctctggagtgaataccacgacgatttccggcagtttctacacatatattcgcaagatgtggcgtgttacggtgaaaacctggcctatttccctaaagggtttattgagaatatgtttttcgtctcagccaatccctgggtgagtttcaccagttttgatttaaacgtggccaatatggacaacttcttcgcccccgttttcaccatgggcaaatattatacgcaaggcgacaaggtgctgatgccgctggcgattcaggttcatcatgccgtttgtgatggcttccatgtcggcagaatgcttaatgaattacaacagtactgcgatgagtggcagggcggggctggaagatcaccaaaacgatttttgacggagacggaaaaaacatatcagaacgttcagcagtttatcgatgaaggcaattatacatccggcgacaaccatacgctgagagaccctcactacgttgaagacaaaggccataaataccttgtattcgaagccaacacgggaacagaaaacggataccaaggcgaagaatctttatttaacaaagcgtactacggcggcggcacgaacttcttccgtaaagaaagccagaagcttcagcagagcgctaaaaaacgcgatgctgagttagcgaacggcgccctcggtatcatagagttaaataatgattacacattgaaaaaagtaatgaagccgctgatcacttcaaacacggtaactgatgaaatcgagcgcgcgaatgttttcaaaatgaacggcaaatggtacttgttcactgattcacgcggttcaaaaatgacgatcgatggtattaactcaaacgttattcacatgaatggttatgtatcaggatcaactaagttaccgctgatggccactggggtcagtccttctggggaccttatgagagactgtgtaggacatacttcagaactgtcccaccaaggcccaaggaaactaggatgtttatccagcaactcttgtctgtccttggttgagagctgttctcagggcaacttacagcccacccctcatgttcctatggctggagagggatcttcaggcaaagagacacagtgccctcccttttcggccgcggcgcgtgactggtgtgacaatctaaaaacttgtcacacttcacatggatctgtcatggtggaaacagcgggttatcaatcacaataaacgtactagtagcccgcgaatcgtccagtcaaacgacctcactgaggcggcatatagtctctcccgggatcaaaaacgtatgctgtattctgttcgttgaccagttcaaaaaatttgatggcaccctacaagaaccatgccggtatctgcgagatcccatgttgcttaaatatgttgaaatatttcggattggccctctgcggaaagccagtaaggatatacggccaggcattgaagagtttcgcggggaaggaaagtggttttttatcgccctgaagaggatgccggcgatgaaaaaggctatgaatcttttccttggtttatcaaacgtgcgcacaggtccattccagagggcgctttacagttgtaccatatgcaacccataaatcctcattcctcttctttatcggggtacagaacccggttaacgcagtttcggcttagtgaaacaaaagaaatcaccaatccgtatgccatgcgtttatacgaaatccctgttgtcagtatccgtaagcccgggatgggctcaagcatcgtctctctgaaaatcgactggatcataaagcggtaccagctgccctcaaagttaccaagcggtaggcctgactttccgccgccgcttcaggcaggtctgatgttaatgagatcaacagcagaactccaatgcgcctctcatacattgagaaaaagaaagcgccgccagacgactcatatcgtattttccttccgcgatatcacttccatgacgacaggatagtctgaggttatttgtccagattggagggggttcgccaatggttctgcctacggagggaattgcccagtttggtggttcttacccgcgggatttttcatcg

SEQ ID NO: 137388 - DNA, 11378 bp, Homo sapiens
tcagaggggtggtgagagtgggcatccttgtcttgttccagttctcagagggaatgctttcagcttttctccattcagtattatgttggctatgggtttgtcatagatggttgttattaccttgaggtatgctccttgtatgccaattttgctgagagctttaatcataaagggatgctggattttgtcaaatgctctttctgcatctattgagatcatcatgtgatttttgtttcttgttttgtttttttgaggcagggtctcactgttgtttcctgactttttaatgattgccattctaactggtgtgagatgatatctcatagtggttttgatttgcatttctctgatggccagtgatgatgagcatttttttcatgtgttttttggctgcataaatgtcttcttttgagaagtgtctgttcatgtcctttgcccactttttgatggggttgtttgtttttttcttgtaaatttgtttgagttcattgtagattctggatattagccctttgtcagatgagtaggttgcgaaaattttctcccatgttgtaggttgcctgttcactctgatggtagtttcttttgctgtgcagaagctctttagtttaattagatcccatttgtcaattttgtcttttgttgccattgcttttggtgttttggacatgaagtccttgcccacgcctatgtcctgaatggtaatgcctaggttttcttctagggtttttatggttttaggtttaacgtttaaatctttaatccatcttgaattgatttttgtataaggtgtaaggaagggatccagtttcagctttctacatatggctagccagttttcccagcaccatttattaaatagggaatcctttccccattgcttgtttttctcaagcaaaggtttgtcaaagatcagatagttgtagatatgcggcattatttctgagggctctgttctgttccattgatctatgtctctgttttggtaccagtaccatgctgttttggttactgtagccttgtagtatagtttgaagtcaaggagtgtgatgcctccagctttgttcttttggcttaggattgacttggcaatgcgggctcttttttggttccatatgaactttaaagtagttttttccaattctgtgaagaaagtcattggtagcttgatggggatggcattgaatctgtaaattaccttgggcagtatggccattttcacgatattgattcttcctacccatgagcatggaatgttcttccatttgtttgtgtcctcttttatttccttgagcagtggtttgtagttctccttgaagaggtccttcacatcccttgtaagttggattcctaggtattttattctctttgaagcaattgtgaatgggagttcacccatgatttggctctctgtttgtctgttgttggtgtataagaatgcttgtgatttttgtacattgattttgtatcctgagactttgctgaagttgcttatcagcttaaggagattttgggctgagacgatggggttttctagataaacaatcatgtcgtctgcaaacagggacaatttgacttcctcttttcctaattgaataccctttatttccttctcctgcctgattgccctggccagaacttccaacactatgttgaataggagcggtgagagagggcatccctgtcttgtgccagttttcaaagggaatgcttccagtttttgcccattcagtatgatattggctgtgggtttgtcatagatagctcttattattttgaaatacatcccatcaatacctaatttattgagagtttttagcatgaagggttgttgaattttgtcaaaggctttttctgcatctattgagataatcatgtggtttttgtctttggctctgtttatatgctggattacatttattgatttgcgtatattgaaccagccttgcatcccagggatgaagcccacttgatcatggtggataagctttttgatgtgctgctggattcggtttgccagtattttattgaggatttttgcatcaatgttcatcaaggatattggtctaaaattctcttttttggttgtgtctctgcccggctttggtatcagaatgatgctggcctcataaaatgagttagggaggattccctctttttctattgattggaatagtttcagaaggaatggtaccagttcctccttgtacctctggtagaattcggctgtgaatccatctggtcctggactctttttggttggtaaactattgattattgccacaatttcagagcctgttattggtctattcagagattcaacttcttcctggtttagtcttgggagagtgtatgtgtcgaggaatgtatccatttcttctagattttctagtttatttgcgtagaggtgtttgtagtattctctgatggtagtttgtatttctgtgggatcggtggtgatatcccctttatcattttttattgtgtctatttgatttcttctctctttttttctttattagtcttgatagcggtctatcaatttttttgatcctttcaaaaaaccagctcctggattcactgatttttttgaagggttttttgtgtctcgatctccttcagttctgctctgatcttagttatttcttgccttctgctagcttttgaatttgcccgctcttgcttctctagttcttttaattgtgatgttagggtgtcaattttagctctttcctgctttctcttgtgggcatttagtgctataaatttccctctatacactggctttaaatgtgtcccagagattctggtatgttggtgtctttgttctcgttggtttcaaagaacatctttatttctgccttcatttcgttatgtacccagtagtcattcaggagcaggttgttcagtttccatggagttgagcggctttgagtgagattcttaatcctgagtttcagtttgattggcactgtgggtctgagagatagtttggttataatttctgttcttttacatttgctgaggagaactttacttccaactatgtggtcagttttgaaataggtgtggtgtggtgctgaaaaaaatgtatattctgttgatttggggtggagagttctgtagatgtctattaggtccgcttggtgcagagctgagttcaattcctgggtatccttgttgactttctgtcttgttgatctgtctaatgttgacagtggggtgttaaagtctcccattattaatgtatgggagtctaagtctctttgtaggtcactcaggacttgctttatgaatctgggtgctcctgtattgggtgcatatttatttaggatagttagctcttcttgttgatttgatccctttaccattatgtaatggccttctttgtctcttttgatctttgttggtttaaagtctgttttatcagagactaggattgcaacccctgcctttttttgttttccatttgcttggtagatcttcctccatccttttattttgagactatgtgtgtctatcactgatgccctttcttccagttgatcgcattggctcctgaggcttctgcattcttcacgtagttctggagccttggttttcagctccatcagctcctttaagcacttctgtgtattggctattctagttatatattcttctgaacttttttcaaagttttcaacttctttgcctttggtttgaatgtcctcccgtagctcagagtaatttgatcgtctgaagccttcttctctcagctcgtcaaagtcattctccatccagctttgttccattgctggtgaggaactgcgttccatgagaggagctctgtcctcttcaatgtagacacctttgttcacatcttcccaaatgtgaggtgaaccgtccacctgatactctattgcacaaacaccaggattagaaattgtttttcctcccacgtctccagctgcaaccccgccaggcactgagtgaggcttgtgcagcttgtcacaggcagagtttctgttcagctgccacttatgagtgagaacatgcggtgtttggttttctgttcctatgttagtttgctgagagtgacggcttccagcttcatccatgtccctgcgtctgggtcctgtctccacttccagattgctaattccctgaacctgtttcatccagtggagcacagcagtgtccacaccacagaccctgtccatgccacctgggtgggtagtgctgccttttgggacagttactccacacgctgacgcaggacgatcccttgaggcccacaaggttaaaatttcagtgcgcgtgcccctgggcactgtgacttcagcgtgcggactttccgcgtcctccctgtccgttccatcgcgggccgactcgcgttgcgcctgtatttccacctcacacaccccttgtttctgccacaggaatctcttctttccgtgcaccctcataagcctgttgtttcctgacttttttcatgattgccattctaactggtgtgagatggtatctcatagtggttttgatttgcatttctctgatggccagtgatggtgagcattttttcatgtgttttttcggctgcataaatgtcttcttttgagaagtgtctgttcatgtcctttgcccactttttgatggggttgtttttttttttttcttgtaaatttgtttgagttcattgtagattctggatattagccctttgtcagatgagtaggttgcgaaaattttctcccattttgtaggttgcctgttcactctgatggtagtttcttttgctgtgcagaagctctttagtttaattagatcccatttgtcaattttggcttttgttgccattgcttttggtgttttggacatgaagtccttgcccacgcctatgtcctgaatggtaatgcctaggttttcttctagggtttttatggttttaggtctaacgtttaaatctttttttttaatccatcttgaattgatttttgtataaggtgtaaggaaaggatccagtttcagctttctacatatggctagccagttttcccagcaccatttattaaatagggaatcctttccccattgcttgttttttctcaggtttgtcaaagatcagatagttgtagatatgcggcattatttctgagggctctgttctgttccattgatctatatctctgttttggtaccagtaccatgctgttttggtaccagtgccatgctgttttggttactgtagccttgtagtacagtttgaagtcaggtagcctgatgcctccaactttattcttttggcttaggattgacttggcaatacgggctctttttttggttccatatgaactttaaagtagtttttttccaattctgtgaagaaagtcattggtagctttatggggatggtattgaatctgtaaattaccttgggcagtatggccattttcatgatattgattcttcctacccatgagcatggaatgttcttccatttgtttgtatcctcttttatttccttgagcagtggtttgtagttctccttgaagaggtccttcacgtcccttgtaagttggattcctaggtattttattctctttgaagcaattgtgaatgggagttcactcatgagttcactcatgatttggctctctgtttgtctgttgttggtgtataagaatgcttgtgatttttgtacattgattttgtatcctgagactttgctgaagttgcttatcggcttaaggagattttgggctgagacaatggggttttctagatatacaatcatgtcgtctgcaaacagggacaatttgacttcctcttttcctaattgaataccctttatttccttctcctgcctaattgcccctggcccagaacactatggggcagaatactatgttgaataggagtggtgaggtgagagagggcatccctgtccttgtgccagttttcaaagggaatgcttccagtttttgaccattcagtatgatattggctgtgggtttgtcatagatagctcttattattttgaaatacgtcccatcaatacctaatttattgagagtttttagcatgaagggttgttgaattttgtcaaaaggcccttttcctgcatcctattgaagataaccatgtggtttttgtctttggctctgtttatatgctggattacaatttattgatttgtgtatattgaaaggagccttgcatccccagggatgaagcctacttgatcatggtggataagcctttttgatggtgctgctggattccggtttgccagtattttattgaggatttttgcatcaatgttcatgcaaggatattggtctaaaattctctttttttttgttgtgtctctgccgggctttggtatcaggatgatgctggcctcataaaatgagttagggaggattccctctttttcctattgattgggaatactttcagaagggaatggtaccagttcctccttgtacctctggtaggaattcggctgtgaaatccatctggttcctgggactctttttggttggtaaagctattggattattgccacaattttcagagccctgttattggtctattcagagattcaacttcttcctggtttagtcttgggagagtgtatgtgtcgaggaatttatccattccttctagattttcaagtttatttggcgtagaggtgtttgtagtaatctctggatgggtagtttgtatttcctgtgggatcggtggtggtgatatcccctttatcattttttattgcgtctatttgattcttctctctttttttctttattaagtccttgctaagcggtctatcaattttgttgatcctttcaaaaaacccagctcctgggattcactgatttttttgaagggttgaaaggggtttttttgtgtccccaatttccttcagttctgctctgattttaagttatttcttgccttcttctagcttttgaatgtgtttgctctttgcttctctagttcttttaattgtgatgttaggggtgtcaattttgggaccttccttgctttctcttgtgggcatttagggcttataaatttccctctacacactggctttgaatgtgtcccagagattctggtatgttgtgtctttgttctcgttgggtttcaaagaacatctttctttatttctgccttcatttcgttatgtatcctgaatgactattcaggagcaggttgttcagtttccatggtagttgagcagttttgagtgagtttcctaatcctgagttctagtttgattgcactgtggtctgagagacagtttgttataatttctgttcttttacatttgctgaggagtgctttacttccaagtatgtggtcaattttggaataggtgtggtgtgggtgctgaaaaaaatgtatattctgttgatttggggtggagagttctgtagatgtctattaggtccgcttggtgcagagctgagttcaattcctgggtatccgtgttgactttctgtctcgttgatctgtctaatgttgacagtggggtgttaaagtctcccattattaatgtgtgggagtctaagtctctttgtaggtcactcaggacttgctttatgaatcttggtgctcctgtattgggtgcataaatatttaggatagttagctcctcttgttgaattgatccctttacctttatgcagtggccttctttgtctcttttgatctttgttggtttaaagtctgttttatcagagactaggattgcaacccctgccttttttttgttttccatttgcttggtagatcttcctccatccttttattttgagcctatgtgtgtctctgcacatgagatgggtttcctgaatacagcacactgatgggtcttgactctttatccaacttgccagtctgtgtcttttaattggagaatttagtccatttacatttaaagttaatattgttatgtgtgaatttgatcctgtcattatgatgttagctggtgattttgctcgttagttgatgcagtttcttcctagtctcgatggtctttacattttggcatgattttgcagtggctggtactggttgttcctttccatatttagtgcttccttcaggagctcttgtaacgtaggcctctggtctttgattttggtgaccttcagatggggcttttgagtggatgtcctttttgttgatgttgatgctattcctttgtgtttgttcattttccttctaacagtcaggcccctctgctgcaggtctgctggagtatgctggaggtccactccagaccctgtttgcctgttgtttcctgactttttaatgattgccattctaactggtgtgagatgatatctcatagtggttttgatttgcatttctctgatggccagtgatgatgagcattttttcatgtgttttttggctgcataaatgtcttcttttgagaagcgtctgttcatgtccttcgcccactttttgatggggttgtttgtttttttcttgtaaatttgtttgagttcattgtagattctggatattagccctttgtcagatgagtaggttgcaaaaattttctcccatgttgtaggttgcctgttcactctgatggtagtttcttttgctgtgcagaagctctttagtttaattagatcccatttgtcaattttggcttttgttgccattgcttttggtgttttggacatgaagtccttgcccacgcctatgtcctgaatggtaatgcctaggttttcttctagggtttttatggttttaggtctaacgtttaaatctttaatccatcttgaattgatttttgtataaggtgtaaggaagggatccagtttcagctttctacatatggctagccagttttcccagcaccatttattaaatagggaatcctttccccattgcttgtttttctcaggtttgtcaaagatcagatagttgtagatatgcggcattatttctgagggctctgttctgttccattgatgtatatctctgttttggtaccagtaccatgctgttttggttactgtagccttgtagtatagtttgaagtcaggtagtgtgatgcctccagctttgttcttttggcttaggattgacttggcgatgcgggctcttttttggttccatatgaactttaaagtagttttttccaattctgtgaagaaagtcattggtagcttgatggggatggcattgaatctgtaaattaccttgggcagtatggccattttcacgatattgattcttcctacccatgagcatggaatgttcttccatttgtttgtgtcctcttttatttccttgagcagtggtttgtagttctccttgaagaggtccttcacatcccttgtaagttggattcctaggtattttattctctttgaagcaattgtgaatgggagttcactcgtgatttgcctctctgtttgtctgttgttggtgtataagaatgcttgtgatttttgtacattgattttgtatcctgagactttgctgaagttgcttatcagcttaaggagattttgggctgagacgatggggttttctagataaacaatcatgtcgtctgcaaacagggacaatttgacttcctcttttcctaattgaataccctttatttccttctcctgcctgattgccctggccagaacttccaacactatgttgaataggagtggtgagagagggcatccctgtcttgtgccatttttcaaagggaatgcttccagtttttgcccattcagtatgatattggctgtgggtttgtcatagatagctcttattattttgaaatacgtcccatcaatacctaatttattgagagtttttagcatgaagggttgttgaattttgtcaaaggctttttctgcatctattgagataatcatgtggtttttgtctttggctctgttgatatgctggattacatttattgatttgcgtatattgaaccagccttgcatcccagggatgaagcccacttgatcatggtggataagctttttgatgtgctgctggatttggtttgccagtattttattgaggatttttgcatcaatgttcatcaaggatattggtctaaaattctcttttttggttgtgtctctgcccggctttggtatcagaatgatgctggcctcataaaatgagttagggaggattccctctttttctattgattggaatagtttcagaaggaatggtaccagttcctccttgtacctctggtagaattcggctgtgaatccatctggtcctggactctttttggttggtaaactattgattattgccacaatttcagagcctgttattggtctattcagagattcaacttcttcctggtttagtcttgggagagtgtatgtgtcgaggaatgtatccatttcttctagattttctagtttatttgcatagaggtgtttgtagtattctctgatggtagtttgtatttctgtgggatcggtggtgatatcccctttaccattttttattgtgtctatttgattcttctctctttttttctttattagtcttgctagcggtctatcaattttgttgatcctttcaaaaaaccagctcctggattcattgattttttgaagggttttttgtgtctctatttccttcagttctgctctgattttagttatttcttgccttctgctagcttttgaatgtgtttgctcttgcttttctagttcttttaattgtgatgttagggtgtcaattttggatctttcctgctttctcttgtgggcatttactgctataaatttccctctacacactgctttgaatgcgtcccagagattctggtatgtggtgtctttgttctcgttggtttcaaagaacatctttatttctgccttcatttcgttatgtacccagtagtcattcaggagcagattgttcagtttccatgtagttgagcggctttgagtgagattcttaatcctgagttctagtttgattgcactgtggtctgagagatagtttgttataatttctgttcttttacatttgctgaggagagctttacttccaactatgtggtcaattttggaataggtgtggtgtggtgctgaaaaaaatgtatattctgttgatttggggtggagagttctgtagatgtctattaggtccgcttggtgcagagctgagttcaattcctgggtatccttgttgactttctgtctcgttgatctgtctaatgttgacagtgggatgttaaagtctcccattattaatgtgtgggagtctaagtctctttgtaggtcactcaggacttgctttatgaatctgggtgctcctgtattgggtgcataaatatttaggatagttagctcctcttgttgaattgatccctttaccat

SEQ ID NO: 137389 - DNA, 2375 bp, Homo sapiens
atggtctcgatctccgacctcgtgatctgcccgcctcggcatcccaaagtgctgggattacaggggcccccaggcctggactccatctcagacccttcagctggagctggattcctggactggggagagatcgggatgcctggtcccgggagagctggccaccaagccctctgcaagtgtgactgccagtgtctggagaaaacaaccacgaaggccccagggaaaatgcctaagagtactagaagtgggcctgtccgggttcgtctggccgatgggcccaaccgctgtgctggccggctggaatgtggcatgccggacgctggggaacagtgtgtgatgacaactgggacctcgggacgccactgtggcctgctgggaactgggctgtggaaaggctacacagacttgacgattatcccccctggacctgggaccccacctcaagagaggacctgccaaggggactaccacagcgggggtacctggacacactctcccctggagaccacccggcgcccgggtagctcctccccagcaataaggcgcctgccggcacagatgctgctgctgcctgcgcggccaccccaccctcggtcctcctctccggaggccatggacccaccgccccccaaggctccccctttccccaaggcggaaggcccctcctccactccttcctcggcggcggggccccgacccccgcggctgggccgccacctcctcatcgacgccaatgggtgtacccctacacatacacggtgcagctggaggaggagccccggggcccgccccagcgcgaggcgcccccaggagagcccggccctcgcaagggctacagctgcccggagtgcgcccgtgtctttgccagccctctgcggctgcagagccaccgcgtgtcgcactcggacctcaagcccttcacgtgcggcgcctgcggcaaggccttcaagcgctccagccacctgtcgcggcatcgcgccacgcaccgcgcccgcgccgggccgccgcacacctgcccgctctgcccacgccgcttccaggacgccgcggagctggcgcagcactcctggggcacacccagaggtccccttctcgccgccgcctgcaactgcgaggtagcccggggccgcttggagtcgcccggacctgagaggctgctgcacgggtacgggggccgggaggaggaagggggctgggggcgggcggcgggagggctggaccgcgtggagggcttcatctcctccaaggcccaccactacctgcttattgacactcagggtgtcccctacacagtgctggtgacgaggagtcacagagggagccaggggccagtggggctccaggccagaaaagtgctacagctgccccgtgtgctcaagggtcttcgagtacatgtccaccttcagcgacacagcatcacccactcggaggtaccacaggactttgcagggagcctggactccttccagacacctggtgagagcctgaggctggtgttcagggccctggacacgacacagagcagccgcatctcaaaggcagagccctgcctgaaggaggaaccgttatcacttggagacttaccatatatgcacacgaccctctgcttctgccgcaaacggcgggcctcacctggacccgggactcttcaacgaggggcgctagcctggcccgactgggcgagtccccgcgccctgcccgttccgtcgctcagttccacgacacgctcccctgccgcccccctgttcgcggttccgctcagtggacgaactacccaggctatggcctttgatggcatcatcttccagggccagtcacaaagatccgcaggcctcacgactaccagccgcttcctggcatgtcagagacccctccgtctatgtgcctggtgggcctcccgcagcccgcggtgcacgttgcgccgcccagttggcctccgccctggagtacatccacgcccgcgcctggtgtaccgggacctgaagccggagaacgtcatggcgtcgggccagccccgggaccgccctcagccctggttcgcctggccgccgcggccgacgcgcttctgcgggggctgctggaccctcaccccgaaggaggagcgctgtgatcgccatcagggagcacctggggcgccctggaggcagcgggagggcgaggcggaggcagtgggagcggtggaagagaggctgggcagtgaggaggccccgggggatgcagaaagggaagccgcccacccgaggcccccaaggccaacggcttttggtgtctcctcgggcctcccagaactgctggtgaagcgggtggtggcccagttgcaggagctctggacttcctccacagccgggggctggtccacgcagatgcaaacctga

SEQ ID NO: 137390 - DNA, 2006 bp, Homo sapiens
  misc_feature (1)...(2006): n = a,t,c or g
tgcggcaaggccttcaagcgctccagccacctgtcgcggcatcgcgccacgcaccgcgcccgcgccgggccgccgcacacctgcccgctctgcccacgccgcttccagnacgccgcggagctggcgcagcacgtgcgcctccactaagctcgagacccggcctgtgctgccctgcccgtctcagggccaccaagtctgacccacacagcgtcactcactcccacacacaccccctggctctgctgaggttactgccttaccctgggcctcagtttccccaccttccaaagggaggagcatcattccttccttaccccctttctagctgtgtgatgtagaccaaagtcgttgcccctccttggggcttgggaaccagtcggaactgggttccaagtccagctgtgcatgtgtgagcctgtgcaagtgacatgacctctctaaaccttggttttctgctctctggagcggtgaaccggtggttgtctgcggggaagagatgataaagagcacgggcacggtctggttcatttctgtatctacccccctttcggccaacgcccccgaccctttgctcaataaacattccgcactccattttcaggctcttccttgcgtgtgcgtgcacgttgggtgctgggggggcggagaccggatcttcctcgcttgggtactttcctttcggtgtgtgtttctggccggagcacgatagcgacgggccgcgcgccccgccccaacctttcttccctagaccctcttctctcccttcggcttctctctttcggccggcgccgccagttcctggggcacacccagaggtccccttctcgccgccgcctgcaactgcgagggtagcccggggccgcttggagtcgcccggacctgagaggctgctgcactgagcctcagccagccctccggatgctggtgctggcatccccctgccctcagcctctggcattttcctccgttgagaccatggagggccctccccgtcggacttgccgctccccagaacctggaccttcctcctccatcggatctccccaggcttcatctcctccaaggcccaaccactacctgcttattgacactcagggtgttccctaacacagttgcttggttggacgaggagtcacagagggagccaggggccagtggggctccaggccaaaaaaagtgctacagctgccccgtgtgctcaagggtcttcgagtacatgtcctaccttcagcgacacagcattcagccactcggaggtaaagcccttcgaagtgtgacatctgtgggaaaggcattcaagcgcagccagcacctttggcacggcaccattccattcacctgggcgggtgggtgggcggccccacggcttgccgcttctgccctcgccgctttccgggatgcgggtgagctggcccagcacagccgggtgcactctggggagcgccccgtttcagtgtccacactgccctcgccgctttatggagcagaacacactgcagaaacacacgcggtggaagcatcccatgaagccgggctgccgggtgccccaggtacccacaggactttgcagggagccctggactcctgtccagacacctggtgagagcctgaggctggtgttcaagggccctggacacagacacagagcagccgcatcctcaaaaagcagagccctgccctgaaaggaggaatcccgtgaagtaatccttcaggtccctccgtgttctggagctgagatgggaatgagccccctacacagaatggagtcctctagcctaaagatatcagctgttcccatgggcagagccttgactggatggaggtggggagtgtggtgtgtaaagtctctggcctcataaaaggttggctgtgggtcgtcaggaatctgcgccatcttcctgggggcttctgcggctgttgttgggggaagggaccccagtcctgccttccaccccccaaccaggcctgagactgatcaaacaataaacacgttttcccacttttga

SEQ ID NO: 137391 - DNA, 1218 bp, Homo sapiens
atgggtcatcatctcatgatagataaactcgtcgcgctcggtggtttgtactacgccatccagcgccattacgcgaccaaatgcagcgttctcaaaaatgatcagatcctggtgatcggtcttttcatgatacagaacgttatctaccgcaaacatttcgccaacccgctgagcgctctgttcctgcaacaaggcatcgaactgtttgccgccattgcagaaattcacataactactgtcgccgagcgcaatcacgccataacgcagattcggctggaagcccagactatctttgattccctgaaagagtggcacaatgctatcaggaagtcgctggactacgaggccctgcaggctttcgagttccgcgtgggcgccacagaccgcggcttcccggcgttgagcagcgaggcgctggtgcgcgtgctggtgctggacgccaacgacaactcgcccttcgtgctgtacccgctgcagaacggctccgcgccctgcaccgagctggtgccccgggcggccgagccgggctacctggtgaccaaggtggtggcggtggacggcgactcgggccagaacgcctggctgtcgtaccagctgctcaaggccacggagcccgggctgttcggcgtgtgggcgcacaatggcgaggtgcgcaccgccaggctgctgagcgagcgcgacgtggccaagcacaggctagtggtgctggtcaaggacaatggcgagcctccgcgctcggccaccgccacgctgcaagtgctcctggtggacggcttctctcagccctacctgccgctcccaagagcggccccggcccaagcccaggccgactcgctcactgtctacctggtggtggcgttggcctcggtgtcgtcgctcttcctcttctcggtgctcctgttcgtggcagtgcggcctgtgcaggaggagcagggcggccccggtcggtcgctgctcggtgcccgagtgtccctttccagggcatctggtagacgtgagcggcaccgggaccctatcccagagctaccagtacgaggtgtgtctgacgggaggctcaggggcaaatgagttcaagttcctgaagccggtgattcccaatctcctgtcccgcgacagcgaaatggagaaagccccacctttctgaatggcgtggaatgcaattagggatctgattatgatgcagaacttttagaatgagtctatttctttgaaatctta

SEQ ID NO: 137392 - DNA, 1260 bp, Homo sapiens
atggtttgctacattcaagagaatctgccattcctactaaaaccttctgtggagaatttttacatcctaattacagaaggcgcgctggacagagagatcagagccgagtacaacatcactatcaccgtcactgacttggggacacccaggctgaaaaccgagcacaacataacggtcctggtctccgacgtcaatgacaacgcccccgccttcacccaaacctcctacaccctgttcgtccgcgagaacaacagccccgccctgcacatcggcagcgtcagcgccacagacagagactcgggcaccaacgcccaggtcacctactcgctgctgccgccccaagacccgcacctgcccctcgcctccctggtctccatcaacgcggacaacggccacctgttcgccctcaggtcgctggactacgaggccctgcaggctttcgagttccgcgtgggcgccacagaccgcggctcccccgcgctgagcagagaggcgctggtgcgcgtgctggtgctggacgccaacgacaacttggcccttcgtgctgtacccgctgcagaacggctccgcgccctgcaccgagctggtgccccgggcggccgagccgggctacctggtgaccaaggtggtggcggtggacggcgactcgggccagaacgcctggctgtcgtaccagctgctcaaggccacggagcccgggctgttcggtgtgtgggcgcacaatggggaggtgcgcaccgccaggctgctgagcgagcgcgacgcggccaagcacaggctggtggtgcttgtcaaggacaatggcgagcctcctcgctcggccaccgccacgctgcacgtgctcctggtggacggcttctcccagccctacctgcctctcccggaggcggccccggcccaggcccaggccgaggccgacttgctcaccgtctacctggtggtggcgttggcctcggtgtcttcgctcttcctcctctcggtgctcctgttcgtggcggtgcggctgtgcaagaagaagcagggcggcctctgtgggccgctgctcgatgcctgagggcccctttccagggcgtctggtggacagtaagcggcaccgggaccctgttccagagctaccagtacgaggtgtgtctgactggaggttcagagaccggcgagttcaagttcttgaagccgattaccccccacctcccgccccataggggtgggaaagaaatagaggaaaattctactctccccaatagctttggatttaattat

SEQ ID NO: 137393 - DNA, 6524 bp, Homo sapiens
tttcgtggaaagcctgttagcagagcacggaccagtgtctccggagaatgctattctcctacatttccgaacaggttatcaacgcacagatcgatcactgcctctgtcccatcgctccctgaagtagctctgactccggttccttgaaaggggcgtgtacagaagtaaagatggagcctgcaggggagcgctttcccgaacaaaggcaagtcctgattctccttcttttactggaagtgactctggcaggctgggaaccccgtcgctattctgtgatggaggaaacagagagaggttcttttgtagccaacctggccaatgacctagggctgggagtgggggagctagccgagcggggagcccgggtagtttctgaggataacgaacaaggcttgcagcttgatctgcagaccgggcagttgatattaaatgagaagctggaccgggagaagctgtgtggccctactgagccctgtataatgcatttccaagtgttactgaaaaaacctttggaagtatttcgagctgaactactagtgacagacataaacgatcattctcctgagtttcctgaaagagaaatgaccctgaaaatcccagaaactagctcccttgggactgtgtttcctctgaaaaaagctcgggacttggacgtgggcagcaataatgttcaaaactacaatatttctcccaattctcatttccatgtttccactcgcacccgaggggatggcaggaaatacccagagctggtgctggacacagaactggatcgcgaggagcaggccgagctcagattaaccttgacagcggtggacggtggctctccaccccgatctggcaccgtccagatcctcatcttggtcttggacgccaatgacaatgccccggagtttgtgcaggcgctctacgaggtgcaggtcccagagaacagcccagtaggctccctagttgtcaaggtctctgctagggatttagacactgggacaaatggagagatatcatactccctttattacagctctcaggagatagacaaaccttttgagctaagcagcctttcaggagaaattcgacttaattaaaaagctagatttgaagacaatgtcttcgtatgatctagatatagaggcatctgatggcgggggactttctggaaaatgctctgtctctgttaaggtgctggatgttaacgataacttcccggaactaagtatttcatcacttaccagccctattcccgagaattctccagagacagaagtggccctgtttaggattagagaccgagactctggggaaaatggaaaaatgatttgctcaattcaggatgatgttccttttaaagctaaaaaccttctgttgagaatttctacaggctggtaacagaaggggcgctggacagagagaccagagccgagtacaacatcaccatcaccatcacagacttggggactccaaggctgaaaaccgagcagagcataaccgtgctggtgtcggacgtcaatgacaacgcccccgcctttcacccaaacctcctacaccctgttcgtccgcgagaacaacagccccgccctgcacatcggcagtgtcagcgccacagacagagactcgggcaccaacgcccaggtcacctactcgctgctgccgccccgggacccgcacctgcccctcacctccctgggtctccattaacacggacaacggccacctgtttcgctctccagttcgctggattacggaggccctgcaggcttttcgagtttccgcgttgggcgccacagaccgcggcttcccggcgcttgagcagcgaggcgctggtgcgcgtgctggtgctggacgccaacgacaactcgcccttcgtgctgtacccgctgcagaacggctccgcgccctgcaccgagctggtgccccgggcggccgagccgggctacctggtgaccaaggtggtggcggtggacggcgactcgggccagaacgcctggctgtcgtaccagctgctcaaggccacggagcccgggctgttcggcgtgtgggcgcacaatggcgaggtgcgcaccgccaggctgctgagcgagcgcgacgtggccaagcacaggctagtggtgctggtcaaggacaatggcgagcctccgcgctcggccaccgccacgctgcaagtgctcctggtggacggcttctctcaaccctacctgccgctcccagaggcggccccggcccaagcccaggccgactcgcttaccgtctacctggtggtggcattggcctcggtgtcttcgctcttcctcttctcggtgttcctgttcgtggcagtgcggctgtgcaggaggagcagggcggcctcagtgggtcgctgctcggtgcccgagggcccctttccagggcatctggtggacgtgagcggcaccgggaccctttcccagagctaccagtacgaggtgtgtctgacgggaggctctgaaaagttggtactggaccaatccctggatcgagaaaaggtgtctgagtttagtttaacgctaacagccgtggatggcgggtctccgcccaggtctgggactacactgattaacgttgtggtcctggacatcaatgacaatgcccctgaatttgagaagccagtctatgaagttcatgtacctgagagcagccctctggactccttgatcatcaaagcgtctgctacagatttagatgcaggaataaatggagaactgtcttattcattttcccacgtctccagagatgtacggaaaacatttgaaatccatccaatttctggcgaagtctatttaaaagcccctctagatttcgagattattcaatcttatatcataaatattcaggccattgaaggtgggagcctttctggaaaatcaagcattttagttcgggttgtagatgtgaatgacaacccgccagaaatagccatgacatctcttaccagccccataccggaaaactcttcacctgagatggtggttgctgttttcagcatacgagaccaagacgctggagacaatgggagaacggtttgctcaattcaggacaacctcccctttgtcttgaagcctaccttcaagaatttttacgctctggtaacagagcacccactggacagagaggtcagaaatgaatataacatcaccatcaccgtgaccgacttggggacacccaggctgaaaaccgagcacaacataaccgtgctggtctccgacgtcaatgacaacgcccccatcttcacccaaacctcctacaccctgttcgtccgcgagaacaacagccccgccctgcacatcggcagcgtcagcgctacagacagagactcaggcaccaacgcccaggtcacctactcgctgctgccgccccaggacccgcacctgcccctcacctccctggtctccatcaacgcggacaacggccacctattcgccctcaggtctttggactacgaggccctgcaggagttcgggtttcgcgtgggcgccgcagaccacggctccccggcgctgagcagcgaggtgctggtgcgcgtgctggtgctggacgccaacgacaactcgcccttcgtgctgtacccgctgcagaacggctcggcgccctgcaccgagctggtacctcgggcggccgagccgggctacctggtgaccaaggtggtggcggtggacggcgactcgggccagaacgcctggctgtcgtaccagctgctcaaggccacggagcccgggctgttcggcgtgtgggcgcacaatggcgaggggcgcaccgccaggctgctgagcgagcgcgacgcggccaagcacaggctggtggtgctggtcaaggacaatggcgagcctccgcgctcggccaccgccacgctgcacgtgctcctggtggagggcttctctcagccctacctgcctctcacggaggctgccccctcccaggcccaggccgactccctcaccgtctacctggtggtggcgttggcctcggtgtcgtcgctcttcctcttctcggtgttcctgttcgtggcggtgcggctgtgcaggaggagcagggcggcctcgatgggtcgctgctcggtgcccgagtgtccctttccagggcatctggtagacgtgagcggcaccgggaccctatcccagagctaccagtacgaggtgtgtctgacgggaggctcaggggcaaatgagttcaaatttctgaaaccaattatccccaacttcctaccccagagcacagaaccgtcctcccaggaagctgaatccagcaagactgaggaaacagagaaaggatcctttgtggtcaatctggcaaaggatctgggactagcagagggggagctggctgcaaggggaaccagggtggtttccgatgataacaaacaatacctgctcctggattcacataccgggaatttgctcacaaatgagaaactggaccgagagaagctgtgtggccctaaagagccctgtatgctgtatttccaaattttaatggatgatccctttcagatttaccgggctgagctgagagtcagggatataaatgatcacgcgccagtatttcaggacaaagaaacagtcttaaaaatatcagaaaatacagctgaagggacagcatttagactagaaagagcacaggatccagatggaggacttaacggtatccaaaactacacgatcagccccaactcttttttccatattaacattagtggcggtgatgaaggcatgatatatccagagctagtgttggacaaagcactggatcgggaggagcagggagagctcagcttaaccctcagagcgctggatggtgggtctccatccaggtctgggacctctactgtacgcatcgttgtcttggacgtcaatgacaatgccccacagtttgcccaggctctgtatgagacccaggctccagaaaacagccccattgggttccttattgttaaggtatgggcagaagatgtagactctggagtcaacgcggaagtatcctattcattttttgatgcctcagaaaatattcgaacaacctttcaaatcaatcctttttctggggaaatctttctcagagaattgcttgattatgagttagtaaattcttacaaaataaatatacaggcaatggacggtggaggcctttctgcaagatgtagggttttagtggaagtattggacaccaatgacaatccccctgaacgtgatcggtatcatcattttccaactctgttgctgagaattctcctgagacgccgctggctgtttttaagattaatgacagagacctctggagaaaatggaaagatggtttgctacattcaagagaatctgccattcctactaaaaccttctgtggagaatttttacatcctaattacagaaggcgcgctgggacagagagatcagagccgagtacaacatcactattcaccgtcactgacttgggggacacccgggctggaaaaccgaggcacaacattaacggtcctgggtcttccgacgttcaatggacaacggcccccgcctttcacccaaacctccttacaccctgttcgtccgcgagaacaacaggccccgccctgcacatcggcagcgtcagcgccacagacagagactcgggcaccaacgcccaggtcacctactcgctgctgccgccccaagacccgcacctgcccctcgcctccctggtctccatcaacgcggacaacggccacctgttcgccctcaggtcgctggactacgaggccctgcaggctttcgagttccgcgtgggcgccacagaccgcggctcccccgcgctgagcagcgaggcgctggtgcgcgtgctggtgctggacgccaacgacaactcgcccttcgtgctgtacccgctgcagaacggctccgcgccctgcaccgagctgatgccccgggcgggccgccgagccgggctacctggtgaccaaggtggtggcggtggacggcgactcgggccagaacgcctggctgtcgtaccagctgctcaaggccacggagcccgggctgttcggctggtggtgctggtcaaggacaatggcgagcctttcgttgctcggccacacaacacgcgtgtcacttgcttcctgggtggagcggcttttcctcagccctaacctgcccgcttttcggagggctgcctccagcctcaggggccaggctgactctctcaccgtctacctggtggtggcgttggcctcggtgtcttcgctcttcctcttctcggtgctcctgttcgtggcggtgctgctgtgtaggaggagcagggcggcctcggtgggtcgctgctcagtgcctgagggcccctttccagggcatctggtggacgtgaggggcaccgggagcctgtctcagaactatcagtacgaggtgtgcctggcaggaggctcagggacgaatgagttccagttcctgaaaccagtattacctaatattcagggccattcttttgggccagaaatggaacaaaactctaactttaggaatggctttggtttcagccttcagttaaagtaa

SEQ ID NO: 137394 - DNA, 466 bp, Homo sapiens
  misc_feature (1)...(466): n = a,t,c or g
tttttttttccccctcaggatgctttttctgaaggatgccagcctaggggaaaggaagaatgagaacctagggtctttctggagcacaggctgcattagcaaataccctccagggcacgcctgtccccaggccacagcgataaccaatccgaatggagaggacactggcatttgtgagtttcagagttcttggggactaacgtgtatttactggattctagaacacgtgatgctcccgacactcacctaccaagttagtcacctctccctccacaagggactcccactcctgagggntttcccgttactgtgacacaggagccggtacgggaggaacacgtccggcttgaacacttatctatgacaattggctgtgccctttgtgttggttcagttaatgacagggtcctggctctcatgtcccactgggggccgctgctctcaggcaggtaccacactgttggaa

SEQ ID NO: 137395 - DNA, 453 bp, Homo sapiens
tttcgtgtgggagtacgaggctgacgcggcggccctgtccccgtaactgtgacacgggtgcacgcgagcgtcattgggggcgatgggggccgtgctgggtgcgcgtttgcgccagtgacgcagccgctgcatctccgccagtccgcgcaggccagcatccttcagaaaaagcatccccgaggaggaagacgaatcgttaaacatctgaaagggtcaggtgagtatcctttttttttatattaaatgatatgtgtttataagacttaagaccaaacattaaaggtagatgaccaagatttgagtcctgtttctgcctcttagctttttgagccttctgaagataggcttgtgaggagggtgaaatgcattaacacgcataaaacccatagacgcgcacccctgagtgggagtgcacagtgagtgctgcttgtttgtgctaagtctggatgtctg

SEQ ID NO: 137396 - DNA, 498 bp, Homo sapiens
gttccgggaggcgcgtggggcttgaggccgagaacggcccttgctgccaccaacatggagactttgtaccgtgtcccgttcttagtgctcgaatgtcccaacctgaagctgaagaagccgccctggttgcacatgccgtcggccatgactgtgtatgctctggtggtggtgtcttacttcctcatcaccggaggaataatttatgatgttattgttgaacctccaagtgtcggttctatgactgatgaacatgggcatcagaggccagtagctttcttggcctacagagtaaatggacaatatattatggaaggacttgcatccagcttcctatttacaatgggaggtttaggtttcataatcctggaccgatcgaatgcaccaaatatcccaaaactcaatagattccttcttctgttcattggattcgtctgtgtcctattgagttttttgatggctagagtattcatgagaatgaaactgccgggctatctgatg

SEQ ID NO: 137397 - DNA, 3579 bp, Homo sapiens
atggctttcctgtttgagttcagtgaccttgtgagcctcttgtccatcgggactatgcttgcttactccttggtggctttttctgttcttgtcctcaggtaccagccagacgagaatttcagcaagaacgagaagccgaaggaggaagtagttgagatgaattctgtacccaaagcagaatccccagcatgtgttcctgaagcgtccagcactccggcgagtctgtggagccctgtcagcaccatccccaccccgagatggggccgcatcgtctatggatgtgcctttctgcttgttgtcctgctgtccatgctatgcctggtattggcccattggcccaaacgcctgttctctggagagctgatctacatcgcagcggctgtgttgctgctggtgctcattgtgggattcactttcaccgtctggagacagccccagagcaacactcctctttacttcaagcccccacatatcagtacttcccaaaacctgtctcttccagaacacccaatggaatacctactcagaacaggcattgagccagacgttcgtggtgtgctcacggttaacgctttgcctgcaggtccccctgttgcctgttctcctctggtcagcatctctgcacatgtttacctgatgatgcagatgaccactgagacctgggcccaatgtggagtctggatgttgattgcgcttgaatgtcccaacctgaagctgaagaagccgccctggctgcacatgccgttggccatgactatgtatgctctggtggtggtgtcttacttcctcatcaccagaggaatcgtttatgatgttacggttgaaccgccaggtgttggctctatgactgatgaacaagggcatcagaggccagtagctttcttggcctacagagtctggttcaagaatcacagagcaaaactcaagaaagcgaaatgcaagcatattcatcaaaaacaagaaactccacaaccgccaataccagagggtggggtctccaccagtgtcggcctgagaaatgcagacacactacccagattgcccaacgctgctcacccgatcggcctggtgtacacgggtcatcgagtcccctcattccagctcatcctgtaccccaacctcaagtgcgctgctttcatggagaggaaacagggtaactgcccggtcttcaagggcatagaccagaacaccatgctgggattcaccagggctgcggtgggacttggagaacaggcaagcactgctggtacccgaccacttccctcagggcctgaggttgggcccagccagctggccaccaccacaacacacacctgcacagccccagaggtggtgcccctcttacatgaagcagcagtgccaccatatgagaggccaggactgctggctctgggagctcgggagtcagcctggggttccaaagtcttcacaggtgtgaaccttttggttctgagctgcgtcatcttctccggcttcatcaagggagatctgcacaactggcagctcacagacgccgactacaaatgggccgagctggggtggtccaacgacacccacagctcgggctccctgggctctggagggtttgtgccttttggctttggcgtgattctccatggagcggccacgtgtttctttgcatttgtgggttttgatggcattgccaccacaggagaagaagccctccaccctcaccgcctccaccctcaccgctccatccccttgggcactgtgacctcgatcttcatctgcttcttggcctattttggtgtctcagcggcgctcaccctcatagtgcccctactacctgatatgtcccgagaaccccttgccggaggcttttgtccacattggatgggcccccatcagatatgctgtggccgtcggcaccctctgtgccctttcctccagtcaatggctgaggacaggctccttttctgcggactcgcccggatccacgcccacaccagcacccctgtggtggccactgtcgttgctgggacccttgcagtgcaaaggcacatccgtgggccacggagacccgtcctgatcgccgcccccacatatcccccagagcgcacctcacagaacagagtcccggggacgcactgccgaggttcacaggtgcgggttccgtcgccccaaagcctcgggagcaccccagccctagttatggggagagcccggctgcgtcaccccacaccctctccagcaagtgcgtcaccgctagaagctccgtgcccgtctccccttggagccatgggcgccaatctcacctgcgcggactggcggagacacagcggttgcgtcaccggtgcagaagcgcaccgagcacggcccccatcacccccaatgacgcttgcgtgcacccgtgtcacagttacgggagatagagccgccgcgtcagcctcgcactcccacgcaagtgcgtcacacagtcggtcccgccacccatggaggccagcgcgcatgcgcaccccggactcgggaggggcctcccgcacccagcggccggagcgcgcaggcagcagcagagcccgacacgcatgtgcgtgcacacagatcctgacacgcatgtacacccagaccgcgacatgcacgtgtacgcgcacacagacccccaacgcatgcgtgtggccagaccttgatccgcatgtgcgaccagacccgacacacatgatgctttttctgaaggatgccagcctaggggaaaggaagaatgagaacctagggtctttctggagcacaggctgcattagcaaataccctccagggcacgcctgtccccaggccacagccgaaaccaatccgaatggagaggacactggcatttacacatctgcgcccctcatacccactaacgcccagcacggccatgctacgggccccaccaccccacacggtgcagaggtgcatccgtgggccacggagacccgtcccgaccgctgcccccgcacaacccccagagcgcacctcacggagcagagtcccagggacgcaccgccgaggttcacaggcacgggctgcgttgacccaaagcctctggagcacccccggtcaccagttatggggagagcccggctgtgtcaccccacactctccagcaagtgcgtcaccgtcagaagccccgtgcccgtctcccctcggagccacgcgcaccaatctcacctgcgcggactggcggagatgcagcggctgcgtcactggtgcaaacgcgcacccagcacggcccccatcgcccccaatgacgctcgcgtgcacccgtgtcacagttacggggacagggccgccgcgtcagcctcgtactcccacgcaagtgcgtcacacactcggtcccgccaccccctggaggccagcgcgcatgcgcacgcgcacccagcggccgcagcgcgcagacagcagcagagcccgacacgcatgtgcacacagacccctacacgtatgtgcacgtacccagaccccgacacgtataccctgacgggcgtgtgcgcacgcacagatgccgacacgcatgtgcagacacaacagagcccgacacacacgtgcgcctgcacagatgctgacacgcggacacactga

SEQ ID NO: 137398 - DNA, 1763 bp, Homo sapiens
cgtccgtgcggcctggtccgggccatgtccgcgtgagtgttcttttcgctgtcgccgctcccgctccggccctggcccctctgcccggcagcgcggcgcaccatgggctccattctcagccgccgcatcgcgggggtggaggacatcgacatccaggcgaactcggcctatcgctaccctccgaagtccggaaactactttgcttcgcactttttcatgggaggagagaaattcgacaccccccaccctgaaggtcacctctttggagagaacatggatctgaacttcctgggcagccgcccgagccagtttccctacgtcactcctgccccccacgagcccgtgaagacgctgcggagcctggtgaacatccgcaaagactccctgcggctggtgaggtacaaagacgatgccgacagccccaccgaggacggcgacaagccccgggtgctctacagcctggagttcaccttcgacgccgatgcccgcgtggccatcaccatctactgccaggcatcggaggagttcctgaacggcagggcagtatacagccccaagagcccctcgctacagtccgagaccgtccactacaagagaggggtgagccagcaggtctccctgccctccttcaagattgacttctcggaatggaaggatgacgagctgaactttgacctggaccggggcgtgtttccagtagtcatccaggctgtggtggacgaaggagatcagtggtggaagtgactggccacgcccacgtgctcttggctggctttgaaaagcacatggacggcagcttctctgtgaagcctttaaagcagaagcaaattgtggaccgggtcagctacctcctgcaggagatctatggcattgagaacaagaacaaccaggagaccaagccctcggacgacgagaacagcgacaacagcaacgagtgtgtggtgtgcctgtccgacctgcgggacacgctgatcctgccctgccgccacctgtgcctctgtacctcctgcgccgacacgctgcgctaccaggccaacaactgccccatctgccggctgcctttccgggccctcctgcagatccgggcggtgcggaagaagccaggagccctgtcccccgtgtccttcagccccgtcctggcccagagcctggagcatgatgagcactcttgtccctttaaaaaatcaaagccgcaccccgcctccctggccagcaagaaacctaaaagggaaacaaactctgacagcgtcccacctggctacgagcccatctcgctgctcgaggcgctcaacggcctccgggctgtctccccggccatcccctcggcccctctttatgaagaaatcacctattcaggcatctcggacggcctgtcccaggccagctgtcccctcgcggctatcgaccacatcctggacagcagccgccagaagggcaggccgcagagcaaggcccccgacagcaccctacggtccccgtcttcccccatccacgaagaggatgaggagaagctctccgaggacgtggacgcccctcccccactgggtggcgcagagctggccctgcgggaaagcagctcccctgagagtttcataacagaagaggttgatgagtcgtcgtcaccacagcaagggacccgagcagcttccattgagaatgtcctgcaggacagcagccccgagcactgtggccgaggcccacctgctgacatctacctgccagccctggggcccgactcctgctctgttggtatagacgagtaa

SEQ ID NO: 137399 - DNA, 3134 bp, Homo sapiens
atgcagcgcctgaaggtctcagaattcccgctgaaggccccgggaagggcccacctggcctcagctacccgggtcctcccctcggagactcttcccgtggtcacccggctcctcctcccggggactcttcccgtggtcacccggctcctcctcccgcgggctcttcccgtggtcacccggctcctcctctcggggactcttcccgtggtcacccggctcctcctcccggggactcttcccgtggtcacccgggtcctcctcccgggggctcttcccgtggtcacccggctcctcctctcggggactcttcccgtggtcacctggctcctcctcccgggggctcttcccgtggtcacccgggggctcctcccggggctcttcccgtggtcacccgggtcctcctcccgggggctcttcccgtggtcacccgggtcctcctcccggggctcttcccgtggtcacccgggtcctcctcccgggactcttcccgtggtcacccggctcctcctcccggggactcttcccgtggtcacccgggtcctcctcccgggggctcttcccgtggtcacccggctcctcctctcggggactcttcccgtggtcacccggctcctcctcccggggctcttcccgtggtcacccgggtcctcctcccggggctcttcccgtggtcacccgggtcctcctcccggggctcttcccgtggtcacccggctcctcctctcggggactcttcccgtggtcacccggctcctcctctcggggactcttcccgtggtcacccgggtcctcctctccggggctgtgtgccaggagaaatggggctggatctgggcgtcaggaaactactttgcttcgcactttttcatgggaggagagaaattcgacaccccccaccctgaaggttacctctttggagagaacatggatctgaacttcctgggcagccgcccggtccagtttccctacgtcactcctgccccccacgagcccgtgaagacgctgcggagcctggtgaacatccgcaaagactcctgcggctggtacaaagacgatgccgacagccccaccgaggacggcgacaagccccgggtgctctacagcctggagttcaccttcgacgccgatgcccgcgtggccatcaccatctactgccaggcatcggaggagttcctgaacggcagggcagtggactccccacttttctgcgggaaccagctggggtcctttgactggtttcagttccaacgctgcctggagctggaagttcgggtgggtggtgtgaggaggggaccatgtgtcctgtgcacagcccctcgcgtgacaggtgctcttgaaaggagcctgagtgctcgagttgaggggctggtggagacgacttatgtggggaggttcttagggacctgccaccagactctccaggctcaaatcaaaagactggaaatgaacaaggtgaataagagcacgatggaggaggagctgagagagaaagctgacaggagtgccctggcaggcaaggcaagccgcgttgacctggagactgtggccttggagctgaacgagatgattcagggcatactcttcaaggtcacgatccatgaggacagctggaagaaggctatggaggagctcagcaaggacgtgaacaccaagttagtccacagtgatctggatcccttgaagaaagaaatggaagaggtctggaaaatcgtccggaagctgctgattgagggcttaagactggatcctgacagtgctgctggctttaggaggaagctgttcaagcgcgtgaagtgcatctcctgtgaccggcctgtggagatgatgactggcccacagctgatcaccatccgcaaagcccacctgctgtcccggctgcggccagccagcgccaacagctgcgagtacttgcagcggcaacagatgagggaacagcagtggctgcagctccaggacctcggtatccaggaggattgtcagcaggactggggtgatggcccccaaaacgccaccagcctcaagtgcaagtcctgcaacctgttgacgctctatccctacggggatccccacgtgatcgactatgacagcgccgaggtggacatcctgggcgtggatgggatcctgtacaaaggccgcgtgaacagccagcgtggggctcagcccttggccgtcgcaaaggagctggcagctgtgaaggctccatctcccccgtcacaaagcctgtatgaccgtgtgcactccagtgccctatttggcgccatctgcccccccctgtgcccccgctccagtgcctgctcagctgcctcgggccctcacctgacgatgccagctcgaccaccttccctgccacctctgctgctgctgccaccgctgattccatccctaagggacccccagcaggccccagggtccaccaggctctcaagagctccacacattgagtcccgagtcggcaggaagccccccgaggagcccgccaacccgaccatgaactcattaacactaagggataaacaacagacgccagcacgtgtgttggaaaagggcactgtgagtacccgaaagtggactgcccagggctctgttgaaatacatccgttgtccaaatatgagcagtgctcaaaaacccagagaactttccaaacgcaggaattagaagtagccttgtgtcaaaagaactccattccggccaacctaggaggtctcccgtattcggggaagaagaccggagtcaaaggactcatctgtcctgtgccagggactgctgtgaaagcccctcagagacctccagggccacagcagccccacccagccccgcagtcagcctcggagacagcctggttccctgtggctgaccgcagggtgttctcagagaaccctggctggaccgctgcaaagaccctggggacactcagcagcccctgccaagcaggggcaggggtgggccgacaggatggggacccaggccaggaactaacttcacaggaaaagccctgggtgggcaggaagattccagagcacgctgtggctgacaagggctacaggcagcagtgtggagccggggaggctcggggtggccctgtcttctgggcggcggcccccagaaccagctggcagcaagcctcgtatacaag

SEQ ID NO: 137400 - DNA, 479 bp, Homo sapiens
cggtattaagaaacatcgagtcactttgcctggacaggaggaaccctgggacatccggaacctgctcatctggatcaagaagaatttgctaaaagagctggcctgccccgctccacaggccaccagatgggctcctgagaccctccccaggctgcttacagctcattctgctgggggtagagatgaggggagggagtaagttaaaccttggactagcaagtagaagcctggggggatgcgtgtgcctcagtttcctcctccacaactgaatatagtggctgaaaactggggagatacttgatggcgcgaatgtccgttttctctcccttcccacctcctgcaggaagcaggacggggcaggcagcacctggtaggcacagtgctttgcccctcctccccttcccttctggaagtcttggggcctcagtgcttgcaacagccggccttgggcaaataaaagactaggaagtttactaaaa

SEQ ID NO: 137401 - DNA, 382 bp, Homo sapiens
ggcgcccttgtcagtggaggtggcgatcggagtgtggtgcggagctcctgtttgacggtattaagaaacatcgagtcactttgcctggacaggaggaaccctgggacatccggaacctgctcatctggatcaagaagaatttgctaaaagagcggccccatcagtgcacctgattggaacacactagatttcaggtcctggaaactgggcgctaggatccgtttccctggctgcagagagtgggaggtgtgatgtggaatatcccttctcccagcacaccccaattaatactgaaggagtaggcaggagggagttgctgggaaaaccgggtttcttggcacatgggggtgcaagcactgtggttgaatttgccatgtccaag

SEQ ID NO: 137402 - DNA, 448 bp, Homo sapiens
gctcgacggtggagttcggaggtggtgcggctccaggtttgacggtattaagaaacatcgagtcactttgcctggacaggaggaaccctgtgagtattggctttctgaacccctctcttggggccattgaacaggagttggtccatggggaacactcagccccgttcaggcctgtgttctgcatccgtgtgctaagctgcctctctagcaggcagaggaataaaaacaagagtctacacggctgggcgcggtggctcatgcctgtaatcccagcactttgggaggccaaggtgggtggatcacaaggtcaggagttcgagaccagcctggccaacatggtgaaatcctgtctctattaaaaatacaaaaattagctgggcatggtggcgcgtgcatgtaatcccagctactcaggaggctgaggcaggagaattgcttgaaccggaac

SEQ ID NO: 137403 - DNA, 2016 bp, Homo sapiens
atggctgcgcccttgtcagtggaggtggagttcggttcattcaccagccatttattgagtgcctaccatgtgccgggcagcaagccagacactgaggatacaaagataaatagaagtctgtccgtgccctacagcgttcagcatttctgccccttagaagggggaggtggtgcggagctcctgtttgacggtattaagaaacatcgatgtcactttgcctggacaggaggaaccctgggacatccggaacctgctcatctggatcaagaagaatttgctaaaagagcggccagagttgttcatccagggagacagcgtgcggccaggaattctggtgctgattaacgatgccgactgggagctactgggtgagctggactaccagcttcaggaccaggacagcgttcctctttcatctccactctgcacggcggctgagggcccttctctgggcctggggcaccctttagaggggagaacgaagcaattcagacatccccttggggccctgcttccaggtctccctgtcccccttgcctgccttcttccctgctctgtcccctaaagcttccctccagggcaggggaaaagaggccagggtgttaaaaatgagcttttttcaagcacgtgagcagcggaaggcagacaggcgccagagcccagcacttcccttttccagcagctgtggtgggggagggtttccccttcaagttttgtcaagagttgaaggaggctctgtggccagggtgacctggctgccttccactccttgtacctcagtctaaacatggagtggccgctgacaaggcgctccagccccagagccagcgtcttcatggggaagatgaatggacctgagtagctgaaggaaggcccctccctacccaaagactggaggcttctcagcctcaatttccctgtctgtacagctgagggctctgcctgtcccccactgctatcagtatgggaaccccagctgggttcccctatttgagtgccgacttccccccaaccgccagcagctgctcctccagccacacccctcctgctccccccacccctagcccttgaaccccctggctggccctgccccccgctcccacaggcccacccagatggggctccctgagaccctcccccaggcctgcttacagctcattctgcctgggggtagagatgaggggagggagtaagttaaccccttggactagcaagtagaagccctggggggatgcgtgtgccctcagtttcctcctccacaactgaatatttatagtggctgaaaactggggagatacttgatggcgcgaatgtccgttttctctcccttcccaccctcctgcaggaagcaggacggggcaggcagcaccctggtaggcacagtcgctttgcccctcctccccttcccttctggaagtcttggggcctcagtgcttgcaacagccggccttgggcaaataaaagactaggttgtttactagccttgcttggagcttcatccttgttataacgggtggcacctcatatccccccagccgtggtctgtgatacaacctctccatcctcagcctagggcctcagagctacccttcacccaaaagaggggtgggggtgaacactcagacaatctgagagggggtagtctaatagagccatctggagaagggagtggcagagccagtctgtgctgaccagtctgtgtcccgggacgcatccccacccgtctgtccaaggctttgtcccaccagctgcagccagcagcctcagaacccaaaatgagggtagcatagataagactgctgagccccctttctgtggtctttcctttccatgacctagagaaaagagctttgctggagggagacccccaaaaagaattagggtgctaacatcccaccaaaagcattcatcccacccaaaatgttgctttttcattctatgtcaataatttaaggtgggattttttttcaccctgtggagatgaaagtggaaaaggttgtccagcagtgttgggga

SEQ ID NO: 137404 - DNA, 4930 bp, Homo sapiens
caaacagcggcataacaaactatggagatctcattcagatagtgacctctcagaccaccacgaacccatctgcaaacctgggctagaactcaacaagaaggatatcaccacctcagcagaccagattgctgaggtgaagaccatggagagtcacccacccatacctcctgtctttgtggaacatatggtcccacaagatgcaaatcagaaaggcctgtgtaccaaagaaagaatgatctgcttggagtttacttctagggaatttcatgctggacagattgaggatgaattaaacttaaatgacatcaatggatgctcatcagggtgttgtctgaatgaatcaaaatttcctcttgacaattgccatgcatccaaagccttaattcagcctggacatgtcccagaaatggccaacaagtttccagacttaacagtggaagatttggagacagatgcactgaaagcagacatgaatgtccacctactgcctatggaagaattgacatctccactgaaagacccccccatgtcccctgatcctgagtcaccaagcccccaacccagttgccagactgaaatctcagatttcagtacagatcgcattgacttttttagtgccctagagaagtttgtggagctctcccaagaaacccggtcacgatctttttcccattcaaggatggaggaactgggtggaggaaggaatgagagctgtcgactgtcagtggtagaagtagccccttccaaagtgacagctgatgaccagagaagcagctctttgagtaatactccccatgcatcagaagaatcttcaatggatgaggaacagtcaaaggcaatttcagaactggtcagcccagacatcttcatgcagtctcactcggaaaatgcaatttcagtcaaagaaattgtcactgaaattgagtccatcagtcaaggagttgggcagattcaactgaaaggagacatcttacccaacccatgccatacaccaaagaagaacagcatccatgagctgctccttgagagggcccagactccagagaacaaacctggacatatggagcaagatgaggactcctgcacagcccagcctgaactagccaaagactcagggatgtgcaacccagaaggctgcctaaccacacactcatctatagcagacttggaagaaggggaaccagctgagggggaacaagagctccagggctcagggatgcacccaggtgccaagtggtaccctgggtctgtgaggcgagccaccttggagttcgaagagcgcttacggcaggagcaagagcatcatggtgctgccccaacatgtacctcattgtccactcgtaagaattcaaagaatgattcttctgtggcagacctagcaccaaaagggaaaagtgatgaagcccccccagaacattcatttgtcctcaaggaaccagaaatgagcaaaggcaaagggaaatacagtgggtctgaggctggctcactgtcccattctgagcagaatgccactgttccagctcccagggtgctggagtttgaccacttgccagatcctcaggagggcccagggtcagatactggaacacagcaggaaggagtcctgaaggatctgaggactgtgattccataccaggagtctgaaacacaagcagtccctcttccccttcccaagagggtagaaatcattgaatatacccacatagttacatcacccaatcacactgggccagggagtgaaatagccaccagtgagaagagcggagagcaagggctgaggaaagtgaacatggaaaaatctgtcactgtgctctgcacactggatgaaaatctaaacaggactctggaccccaaccaggtttctctgcacccccaagtgctacctctgcctcattcttcctcccctgagcacaacagacccactgaccatccaacctccatcctgagtagccctgaagacagaggcagcagcctgtccacagccctggagacagcagcaccttttgtcagtcatacaacccatttactgtctgccagtttggattacctgcatccccagactatggttcacctggagggcttcacagagcagagcagcactacagatgagccctctgcagaacaggttagctgggaagaaagtcaggagagccctctctccagtggcagtgaggtgccatataaggactcccagctaagtagcgcagacctaagtttaattagcaaacttggtgacaacactggggagttacaggagaaaatggacccattgcctgtagcctgtcgactcccacatagctctagtagtgaaaacataaagagtctcagccacagccccggtgtggtgaaggagcgtgctaaagaaatcgagtctcgagtggttttccaggcagggctcaccaaaccatcccaaatgaggcgctcagcttctctcgccaaattaggttacttggacctctgtaaagactgcttaccagagagggagcctgcctcctgtgaatcccctcatctcaaactgcttcagcctttcctcagaacagactcaggcatgcacgcgatggaggaccaagagtccctagaaaacccaggtgccccccacaacccagagcccaccaagtcttttgtagaacaactcacaacaacagagtgtattgtgcagagcaagccagtggagaggccccttgtgcagtatgccaaagaatttggttctagtcagcagtatttgctccccagggcaggacttgaattgactagttctgaaggaggccttcccgtgctacagacccagggactgcaacctgaggcatcgaatgggctaaaggtcagccagaagtcagagggctctcagccttcatccagccgcagccctttagagttcctgaaggaggcagagagccgcaggatcggccagagtgcggagctggacacccgggtcccagatactacagacacccggagaggtggctccttcgccctgaagccttcctcggccccctacgcactcgggccccttccgcagaggattcgcagcgtgagcgccccgcagcccgctcaggaccagatgcgagttcggtatcctgtggtggctgcagtcttggccccatacctggctttaagccaagatccaatggtcaagtcttctgcttctggacagggtgcctctgggagctacaaccacgtccgtgaagagatgctcatcaaggctggcggtgctatgagcagacgtgtggttcggcaaagcaagttccgccatgtgtttgggcaggcagcaaaggccgaccaggcctacgaggacatccgtgtgtccaaggtcacatgggacagctccttctgtgccgtcaaccccaaattcctggccattattgtggaggctggaggcgggggtgccttcatcgtcctgcctctggccaagacagggcgagtggataagaactacccactggtcactgggcacactgcccctgtgctggatattgactggtgtccacacaatgacaacgttatcgccagtgcctcagacgacaccaccatcatggtgtggcagattccagactatacccccatgcgcaacattacggaacctatcatcacacttgagggccactccaagcgtgtgggcatcctctcctggcaccctactgccaggaatgtcctgctcagtgcaggtggtgacaatgtgatcatcatctggaatgtgggcaccggggaggtgctgctgagcctggatgatatgcacccagacgtcatccacagtgtgtgctggaacagcaacggtagcctgctagccaccacctgcaaggacaagaccttgcgcatcattgaccccagaaaaggccaagtggtggcggagcaagcccggcctcacgagggcgcccgcccgctgcgggctgtcttcaccgcagacgggaagctgctcagcaccggcttcagcaggatgagtgagcggcaactcgcgctctgggacccggagaggtttgcggcccacgaggggatgaggcccatgcgggccgtcttcacgcgccagggccatatcttcaccacgggcttcacccgcatgagccagcgagagctgggcctgtgggacccgaacaacttcgaggagccagtggcactgcaggagatggacacaagcaacggggtcctattgcccttttacgatcccgactccagcatcgtctacctgtgtggcaaggtgctcacggccgggcagggagaacagggcactggatggagatgtggagggccttgtccgggcgcgcccctgaaccgactgattttgcagggcgacagcagcattcggtactttgagattaccgacgagccgcctttcgtgcactacctgaacacgttcagcagcaaagagccgcagcggggcatgggtttcatgcccaaaaggggactggatgtcagcaagtgtgagatcgcccggttctacaagctacacgaaagaaagtgtgaacctatcatcatgactgtgccccgcaagtcagacctcttccaggacgatctgtacccggatacgccaggcccggagccggccctagaagcggacgaatggctatccggccaggacgccgaacccgtgctcatttcgctgagggacggctatgtgccccccaagcaccgcgagctccgggtcacgaagcgcaacatcctggacgtgcgcccgccctccggcccccgccgcagccagtcggccagcgacgcccccttgtcggtaagatcggccctgctgcactctggcccaatctacatctcccccaaccgcccctatacgacacggcctctctgtcctccgccccagcagcagcacaccctggagacgctgctggaagagatcaaggccctccgcgagcgggtgcaggcccaggagcagcgcatcacggctctggagaacatgctgtgcgagctggtggacggcacggactag

SEQ ID NO: 137405 - DNA, 1900 bp, Homo sapiens
atgtcccgaaaggggccgcgagcggaggtgtgtgcggactgcagcgccccggtaggacctgattttgcattggcaatttcagaactggtcagcccagacatcttcatgcagtctcactcggaaaatgcaatttcagtcaaagaaattgtcactgaaattgagtccatcagtcaaggagttgggcagattcaactgaaaggagacatcttacccaacccatgccatacaccaaagaagaacagcatccatgagctgctccttgagagggcccagactccagagaacaaacctggacatatggagcaagatgaggactcctgcacagcccagcctgaactagccaaagactcagggatgtgcaacccagaaggctgcctaaccacacactcatctatagcagacttggaagaaggggaacagctgagggggaacaagagctccagggctcagggatgcacccagaattcaaagaatgattcttctgtggcagacctagcaccaaaagggaaaagtgatgaagcccccccagaacattcatttgtcctcaaggaaccagaaatgagcaaaggcaaagggaaatacagtgggtctgaggctggctcactgtcccattctgagcagaatgccactgttccagctcccagggtgctggagtttgaccacttgccagatcctcaggagggcccaggacctgaggcatcgaatgggctaaaggtcagccagaagtcagagggctctcagccttcatccagccgcagccctttagagttcctgaaggaggcaggagttcccaatcagacgctctcttctgggactccggatccatacttcatggccctcttgggacccaagctcaattctagaagaccacacctccaccccgtctcccacacgctcgacctaggcaatagccccccacttccccagcagtttgcaaaatgccagcgggggaggaaggggcccgagggcaagtatccgctgcactacctcgtgtggcacaaccgccaccgcgagctggagaaggaggtccgcgcgggccagaccctgatcactcagactctgagccaagccaaccccactgccatcactgcagaagaatacttcaaccccaactttgagctgggcaaccgtgatatgggccgccccatggaactgaccaccaagacacagaagttcaaggccaagctgtggctgtgtgaggagcatcccctgtccctgtgtgagcaggtggcccccatcattgacctcatggccgtcagcaatgcgctttttgccaagctccgggacttcatcaccctgcaaatcccgatcttccacatcctcaacgcccgcatcaccttcgggaacctcaacggctgcgacgaaccggtgccatcggtgcgaggcagccccagcagcgagacgccttccccaggcagcgactcctccagcgtcagcagctccagctccacgagtgaggccccccgcgagaacgcctgcccctcggctctccccggggtggcctcctgccgcggctgcgagatctccccagcgttgttcgaggccccgcgcggctacagcatgatgggcggccagcgggaggcggcgacccgggacgacgacgacgacctgctgcaattcgccatccagcagagcctgcttgaggcgggcagtgagtatgaccaggtcaccatctgggaggcgctaaccaacagcaagccaggcacccaccccatgtcctacgagggtcgccgacaggacagggccaggttccggcggccacgtgttccggagctacgacgagcagctgcggctggcgatggaactgtcggcgcaggagcaggaggagaggcggcggcgcgcgcgccaggaggaggaggagctggagcgcatcctgaggctctcactgaccgagcagtag

SEQ ID NO: 137406 - DNA, 905 bp, Homo sapiens
catgaactgaagcttctgtcagaatgccaatacaagcggttgagggtttcgttgctgtgttataacttcctgagggaagctctggaagtggcagtagctggaactgaattgtttagagactctgggacaatgtggcagctgaagctgcaggtgctgatcgagtcaaagagccctgacatagccatgctttttgaagaagcctttgtgcacctgaaaccccaggtttgtctgccattgtggatttcctgggcagagtggagtgaaggtgccaaaagccaagaagacactgaggcagtctttaagaaagctctcttagctgtcataggtgccgactcagtaacccctgaagaataagtacctggattgggcttatcgaagtggtggctacaaaaaggccagacctgtgtttaaaagtttacaggagagccgaccattttcagttgactttttcaggaaaatgattcattttgaaaaggggcaagaatcctgcaatatggcgaacataagagaatattatgagagagctttgagagagtttggatccgcagattctgatctttggatggattatatgaaagaagaattgaaccacccccttggtagacctgagaactgtggacagatctactggcgagcgatgaaaatgttgcagggagagtcagcagaggcatttgtagctaaacatgctatgcatcagactggccatttatgaagatgaagaataccgtccgctttgtgaaatagtattgcaagccagcccccgtgggcaaatttgttattgagtccatctgtaatttgctcagtgatggcagacaagatggctgtctggttttgagacacactttaattttatgttaacttgttaaatctttttaaaaattaaaaaatttttatgattgagaaaa

SEQ ID NO: 137407 - DNA, 2738 bp, Homo sapiens
aaaccgggagcttcctgctcgtgttcgctgttgagaagctacccgcggggttgtagacctcggacctcatggcagagataattcaggaacgcatagaagatcggctcccggaattggaacagctggagcgcattggactgttcagtcatgcggagattaaggctatcattaagaaggcttccgatctagagtacaaaatccagagaagaacccttttcaaggaagactttatcaattatgttcaacgcattggatattcatttaagaaggatgagattgagaattctattgtacaccgggtacaaggtgttttccagcgtgcctcagcaaaatggaaagacgatgttcaactttggctctcctatgtggctttttgtaagaagtgggctactaaaactcgacttagcaaggtattctctgccatgttggcgattcattccaacaaaccagctttgtggattatggcagccaaatgggaaatggaagatcgattgtcttcagaaagcgcaaggcaactatttcttccgcgcactgcgctttcatccagagtgcccaaaactttataaagaatactttaggatggagctgatgcatgctggaaaaactggaggaaggagaaggaagaatttgaaaaagccagtatggatgtggagaatcctgattattctgaagaaatccttaagggcgagttggcatggatcatctacaaaaattctgtaagcataattaaaggtgcagaatttcacgtgtcactgctttcgattgcacagctatttgactttgccaaagatctacaaaaagagatttatgatgaccttcaggctctacacacagatgatcctctcacttgggattatgtggcaaggcgagaattagagattgagtcacagacagaagagcagcctacaacgaaacaagccaaagcagtggaggtcggccggaaggaggagaggtgctgtgctgtgtatgaagaggcagtgaagactctgccaacaggtgaacttcaccaaaccatgaggttggaaagaaccatgactgtattcaggaaggcacatgaactgaagcttctgtcagaatgccaatacaagcagttgagtgtttcgttgctgtgttataacttcctgagggaagctctggaagtggcagtagctggaactgaattgtttagagactctgggacaatgtggcagctgaagctgcaggtgctgatcgagtcaaagagccctgacatagccatgctttttgaagaagcctttgtgcacctgaaaccccagaaagctctcttagctgtcataggtgccgactcagtaaccctgaagaataagtacctggattgggcttatcgaagtggtggctacaaaaaggccagagctgtgtttaaaagtttacaggagagccgaccattttcagttgactttttcaggaaaatgattcagtttgaaaaggagcaagctgattggcgcttctgcggcggatcctcgggcgggcagccgggccggcgcgtcacgtggcccacggcgtccagggcgaccagccgcgggccgcagggcatggaccttcaggccgccggggcccaggcgcagggggccgcggagccgtctcggggcccgccgctgcctagcgcgcggggggcgccccccagcccggaggtgagcgccgcgtgggggccaggagcaacagccagccgcagcctggggcgggaagtcgcggggccgggctgggcgggggccgcggggccggggaagcgcctctggccggcctcgggccgccccgcgacacggagcgctgtttgggctcgcgctcgagctgaaaacggccaggccgcggggccgcggggctgcggggcggggaaagccgagggcgtgggtgggcgctctgggtcagcagagacggctgtccgcccgctgggcgccgctgcggatttggtaaatgggagtctgtaccggctaggtgctgagcggcttgaagcccgtggaacacagagcattcctaatgacagtcctgcccggggtgagggcacccattctgaagaggaaagctttgccatggaatgaaggaggaactctgatggagaactgaatacctgggaagctgtcagaagggacaaactgtcgcacccaaggaacagcctggcgatctttttaatgaggactgggaactcggaattgaaagcagatcaaggggaatccatatgatgctgacgacatccaggagagcatttctcaagagctttaaaccttggggtgtgctgtgcccccacaaaggagaccatgatctatgaccccagctggccaccatccgccttccactgatacccctattattccaagatggtctttgaaacaggaccagtttgaacgatgcctgaaagatttgagtgtggaagctttcctgcccttgtaggtgggcgggccctcccacgtccaagatctcttttccctgtctttgaaggtgaaaagtcatatcctgagaaaatgtttgcagtgacccctagtctggggtacacaggaccagtgttccttattgacagtgttcaataaggccccgtcattctcgcccagtctgttgttggttcttaatgggctcctcccttgaaatgtgtgtgtgtttgtgtcaagaggagttgtgatctttgtaaataaaggttaaaaaggagataaaaagaaagaaaaaaaatttttgccccaaaggggggcggttaaaagataacggcggcggggatttgtgagaatatgccc

SEQ ID NO: 137408 - DNA, 444 bp, Homo sapiens
cagcaacgcggaggaaacgggagtgaacggagagcgtagtgaccatcatgagcctcctcaacaagcccaagagtgagatgaccccagaggaagcgagaggaggaggaatttaacaccggtccactctctgtgctcacacagtcagtcaagaacaatacccaagtgctcatcaactgccgcaacaataagaaactcctgggccgcgtgaaggccttcgataggcactgcaacatggtgctggaggaacgtgaaggagatgttgactgagggtaccgctacatctccaagatgttcctgggcgggggatccagtcatcgtggtcctgcggaacccgctcatcgccggcaagtaggggccgcctgtctgttgacagaactcactcctctgtcctatgaagaccgctgccattggtgttgagaataataaagctctgtgtttttttct

SEQ ID NO: 137409 - DNA, 613 bp, Homo sapiens
aagctggtctcaaactcctgacctcaaatgatccacccgcctcgaccttccaaagtgctgggattacaggagcctcttcaacaagccccaagagtgagatgacccccagaggagctgcagaagcgagaggagcgaggaatttaacacccggtcccactcctctgtgcctcacacagtccagtcaagaacaatacccaaagtgctcaatcaacttgcccgcaacaataagaaacttcctggggccgcgtgaaggcctttcgatagagcctcccctccctgttccccaccaggcacttgcaacatggtgctgggagaacgtgaaaggagatgtggacttgaggtacccaagaagtgggcaagggcaaggaaggaagttccaagccaagtcaacaaagaccggcttacatcttccaagatgtttcctggcggcgggggattcagttcattcgtggttccttgcgggaacccgtttcattcggccgggcaaattagggggccgcctgttttgtttgacaagaactcacatcctctggtcctattgaagaccgcttgccatttggtgtttgagaattattaaagctctgtgtttttttctaaaaaaaaaaaaaaaaaa

SEQ ID NO: 137410 - DNA, 791 bp, Homo sapiens
  misc_feature (1)...(791): n = a,t,c or g
aggatccttaataaattaatccccccccccccgctttcctttcgctgctgcggccgcagccatgcagtatgctcagggcttcagaatgaggctcgcctctaggtgacctccggctgtggcaagaagaaggtctggttagaccccaatgagacccaatgaaatcgccaatgccaacttccgttcagcagatcccggaaggctcatcaaagatgggctgatcatccgcaagcctgtgacgggtccattcccgggctcgattgccggaaaaaacacctttggcccggcgnaaagggcacggcacactgggcataggtaagcggaagggtacagccaatgccccgaatgccaaaagagggtcaccatgggatgaggagaatgaggattttggcgccggcttgctccagaagataccgtgaatctaagaagatcgattcgccacatgtatcacagcctgtacctgaaggtgaaggggaaatgtgttcaaaaacaaagcggatttctcatgggaacacatccacaaggctgaaggcagagcaaggccccgcaaagaagcttcctggcttgaccaggctgaggccccgcaggtctaaggaccaaggaaagcacggaaagcgccgtgaagagcggcttccagggcaaaggaaggaggagatcaatcaaagactttattccaaggagggaaggagacccagaaataaaaacctcacactttgatctgtacaatacatgacctctgtgattacatagaaacaaccattaaaataaaacaagccttaaaaaaaaaaaaaacc

SEQ ID NO: 137411 - DNA, 2850 bp, Homo sapiens
atgtttggttttcagagaaggggattgggcaccccacgactacagctctggcttctcctcctcgaattctgggaggtggggagcggccagctccactactccgtctcggaggaggccaaacacggcaccttcgtgggccgcatcgcgcaggacctggggctggagctggcggagctggtgcagcgcctgttccgggtggcgtccaaaacacatggggaccttctggaggtaaatctgcagaatggcattttgtttgtgaattctcggatcgaccgcgaggagctgtgcgggcagagcgcggagtgcagcatccacctggaggtgatcgtggacaggccgctgcaggttttccatgtgaacgtggaggtgaaggacattaacgacaacccgccggtgttctcgctcagagaacaaaagctgctgattgcggaatctaagcaatcggactcgcgttttccactagagggagcttctgatgctgacattgaagagaatgctctattgacctacaggctaagtaaaaatgagtatttttctttagattcaccaacaaatggtaagcagattaaaagactgtcacttattttaaagaagtctctggatagagagaaaactccggaacttaatttgctgctaacagctacagacgggggaaaaccagagcttactggcaccgttcggctgttagtccaagtcttggatgtcaacgacaatgatccagagtttgataaatcagaatataaggtgagccttatggaaaatgctgctaaagaaactcttgtgctcaaactaaacgccacagaccgagacgaaggagtcaacggagaggtaacatactccttaatgtcaattaagcccaatggaagacacttatttacactagatcaaaataatggagaagtgagggtcaatggaactttagattatgaagaaaacaagttttataaaattgaagtacaggctacagataaggggactcccccaatggcaggtcactgtacagtctgggtggaaatcttggacaccaacgataactctcctgaagtcgccgtgacttccttgtccctcccagtacgagaggacgctcagcccagcacggtcattgccctgatcagcgtgtctgaccgtgactcaggtgtcaacggacaggtgacctgctcgctgacgccccacgttcccttcaagctggtgtccaccttcaagaattactactcgttggtgctggacagcgccctggaccgcgagaacgtgtgggcctatgaactggtggtgactgcgcgggatgggggttcgccttctctgtgggccacggccagggtatccgtggaggtggccgacgtgaacgacaatgcgcctgcgttcgcacagcccgagtacaccgtgttcgtgaaggagaacaacccaccaggctgccacatcttcacagtgtcggcgcgggacgcggacgcgcaggagaacgcgctggtgtcctactcgctggtggagcggcggttgggcgaccgcgcgctgtcgagctacgtgtcggtgcacgcggagagcggcaaggtgtacgcgctgcagccgttggaccacgaggagctggagctgctacagttccaggtgagcgcgcgcgatgcgggcgtgccgcctctgagcagcaacgtgacgctgcaggtgttcgtgctggacgagaacgacaacgcgccggcactgctggcgactcaggctggcagcgcgggaggcgcagttaacaagctagtaccgcggtcggtgggtgcgggccacgtggtggcgaaggtgcgcgcagtggatgcggactcaggctacaacgcgtggctttcatatgaattgcagccggcggcgggcggctcgcgcatcccgttccgcgtggggctgtacacgggcgagataagcacaacgcgtgccctggacgaggcagactcgccgcgccaccgacttctagtactggtgaaggatcacggtgagccggcgctgacggccacggccaccgtgctggtgtcgttggtggagagcggacaggcgccaaaggcctcttcccggactttggcgggcgccgcgagcccagaggctgcgctggtggatgtcaacgtgtacctgatcatcgccatctgcgtggtgtccagcctcctggtactcacgctgctgctgtatacggcgctgtggtggtcggcaacgcccactgagggcgcgtgcgcgccggggaagcccacgctggtgtgctcccgcgcggtggggagctggtcatactcgcagcagaggcggcagagggtgtgctctgaggagggcccacctaagacggacctcatggccttcagccccagtcttcctctaggtctgaataaagaggaggaaggggaaagacaggagccagggtcaaatcaccccggacagccacgacagcccaaccctgactggcgttactctgcctccctgagagcaggcatgcacagctctgtgcacctagaggaggctggcattctacgggctggtccaggagggcctgatcagcagtggccaacagtatccagtgcaacaccagaaccagaggcaggagaagtgtcccctccagtcggtgcgggtgtcaacagcaacagctggacctttaaatacggaccaggcaaccccaaacaatccggtcccggtgagttgcccgacaaattcattatcccaggatctcctgcaatcatctccatccggcaggagcctactaacagccaaattgacaaaagtgacttcataaccttcggcaaaaaggaggagaccaagaaaaagaagaaaaagaagaagggtaacaagacccaggagaaaaaagagaaagggaacagcacgactgacaacagtgaccagtga

SEQ ID NO: 137412 - DNA, 2826 bp, Homo sapiens
atggtgattatcggaccaagaggcccgggatcccagcgtctgctgctctcgcttctgctccttgcagcctgggaggtggggagcggccagctccactactccgtctacgaggaggccaaacacggcaccttcgtgggccgcatcgctcaggacctggggctggagctggcggagctggtgccgcgcctgttccgggtggcgtccaaaagacacggggaccttctggaggtaaatctgcagaatggcattttgtttgtgaattctcggatcgaccgcgagaagctgtgcgggcggagcgcggagtgcagtatccacctggaggtgatcgtggacaggccgctgcaggttttccatgtggacgtggaggtgaaggacattaacgacaacccgccggtgttcagagaaagggaacaaaaggtacctgtttctgaatctgcgcctctggactctcattttcctctagagggcgcttctgatgcggatatcggcgtaaactctcttttgacctatgcgttaagtctaaatgagaattttgagcttaaaataaaaacaaaaaaagataaaagtatattgcctgaattagttcttcggaagttattggacagagagcaaacgccaaaactcaatttattgctgatggtaatcgatggcggtaaaccagaactaacagggtctgtccagattcaaataaccgtcctggatgtgaatgacaatggtccggcgtttgataagcccagctataaagtagtgttgtctgaaaatgtccaaaacgacacaagagtgatccaactaaatgcttccgatccagacgaaggacttaatggagaaatttcctatgggatcaaaatgattttgccagtgagtgagaaatgtatgttttcaataaatccagacacaggtgaaattagaatttatggtgaactggattttgaagagaataatgcctatgaaattcaggttaacgccattgataaagggattccttccatggcaggtcacagcatggtcctggtggaagttctggacgtgaatgacaatgtccctgaagtaatggttacttcactgtcgctccctgtgcaagaggatgctcaggtgggtaccgtcattgccctgattagcgtgtcggatcgtgactctggagccaatggacaggtcatctgctcactgacacctcatgttcccttcaagctggtgtccacctacaagaattactactcgttggtgctggacagcgccctggaccgcgagagcgtgtcggcctatgagctggtggtgactgcgcgggatgggggctcgccttcgctgtgggccacggctagagtgtccgtggaggtggccgacgtgaacgacaatgcgcctgcgttcgcgcagcccgagtacacagtgttcgtgaaggagaacaacccgccgggctgccacatcttcacggtgtcggcatgggacgcggacgcgcagaagaacgcgctggtgtcctactcgctggtggagcggcgggtgggcgagcacgcactgtcgagctacgtgtcggtgcacgcggagagcggcaaggtgtacgcgctgcagccgctagaccacgaggagctggagctgctgcagttccaggtgagcgcgcgcgacgccggcgtgccgcctctgggcagcaacgtgacgctgcaggtgttcgtgctggacgagaacgacaacgcgccggcactgctggcgactccggctggcagcgcaggaggcgcagttagcgagttggtaccgcggtcggtgggtgcgggccacgtggtggcgaaagtgcgcgcggtggacgctgactccggctataacgcttggctgtcctacgagttgcaaccggcggcggtcggcgcgcacatcccgttccacgtggggctgtacactggcgagatcagcacgacacgcatcctggatgaggcggacgctccgcgccaccgcctgctggtgctggtgaaggaccacggtgagcccgcgctgacgtccacggccacggtgctggtgtcgctggtggagaacggccaggccccaaagacgtcgtcgcgggcctcagtgggcgctgtggatcccgaagcggctctggtggatattaacgtgtacctcatcatcgccatctgtgcggtgtccagcctgctggtgctcacgctgctgctgtacactgcgctgcgttgctcagcgccgcccaccgtgagccggtgcgcgccgggcaagcccacgctggtgtgctccagcgccgtggggagttggtcttactcgcagcagaggaggcagagggtgtgctctgcagagagcccgcccaagacggacctcatggccttcagcccaagccttcagctgtctcgagaagattgtttaaatcctcccagtgaaccacgacagcccaaccctgactggcgttactctgcctccctgagagcaggcatgcacagctctgtgcacctagaggaggctggcattctacgggctggtccaggagggcctgatcagcagtggccaacagtatccagtgcaacaccagaaccagaggcaggagaagtgtcccctccagtcggtgcgggtgtcaacagcaacagctggacctttaaatacggaccaggcaaccccaaacaatccggtcccggtgagttgcccgacaaattcattatcccaggatctcctgcaatcatctccatccggcaggagcctactaacagccaaattgacaaaagtgacttcataaccttcggcaaaaaggaggagaccaagaaaaagaagaaaaagaagaagggtaacaagacccaggagaaaaaagagaaagggaacagcacgactgacaacagtgaccagtga

SEQ ID NO: 137413 - DNA, 8035 bp, Homo sapiens
atgcgatgtttggttttcagagaaggggattgggcaccccacgactacagctctggcttctcctcctcgaattctgggaggtggggagcggccagctccactactccgtctcggaggaggccaaacacggcaccttcgtgggccgcatcgcgcaggacctggggctggagctggcggagctggtgcagcgcctgttccgggtggcgtccaaaacacatggggaccttctggaggtaaatctgcagaatggcattttgtttgtgaattctcggatcgaccgcgaggagctgtgcgggcagagcgcggagtgcagcatccacctggaggtgatcgtggacaggccgctgcaggttttccatgtgaacgtggaggtgaaggacattaacgacaacccgccggtgttctcgctcagagaacaaaagctgctgattgcggaatctaagcaatcggactcgcgttttccactagagggagcttctgatgctgacattgaagagaatgctctattgacctacaggctaagtaaaaatgagtatttttctttagattcaccaacaaatggtaagcagattaaaagactgtcacttattttaaagaagtctctggatagagagaaaactccggaacttaatttgctgctaacagctacagacgggggaaaaccagagcttactggcaccgttcggctgttagtccaagtcttggatgtcaacgacaatgatccagagtttgataaatcagaatataaggtgagccttatggaaaatgctgctaaagaaactcttgtgctcaaactaaacgccacagaccgagacgaaggagtcaatggagaggtaacatactccttaatgtcaattaagcccaatggaagacacttatttacactagatcaaaataatggagaagtgagggtcaatggaactttagattatgaagaaaacaagttttataaaattgaagtacaggctacagataaggggactcccccaatggcaggtcactgtacagtctgggtggaaatcttggacaccaacgataactctcctgaagtcgccgtgacttccttgtccctcccagtacgagaggacgctcagcccagcacggtcattgccctgatcagcgtgtctgaccgtgactcaggtgtcaacggacaggtgacctgctcgctgacgccccacgttcccttcaagctggtgtccaccttcaagaattactactcgttggtgctggacagcgccctggaccgcgagaacgtgtgggcctatgaactggtggtgactgcgcgggatgggggttcgccttctctgtgggccacggccagggtatccgtggaggtggccgacgtgaacgacaatgcgcctgcgttcgcacagcccgagtacaccgtgttcgtgaaggagaacaacccaccaggctgccacatcttcacagtgtcggcgcgggacgcggacgcgcaggagaacgcgctggtgtcctactcgctggtggagcggcggttgggcgaccgcgcgctgtcgagctacgtgtcggtgcacgcggagagcggcaaggtgtacgcgctgcagccgttggaccacgaggagctggagctgctacagttccaggtgagcgcgcgcgatgcgggcgtgccgcctctgagcagcaacgtgacgctgcaggtgttcgtgctggacgagaacgacaacgcgccggcactgctggcgactcaggctggcagcgcgggaggcgcagttaacaagctagtaccgcggtcggtgggtgcgggccacgtggtggcgaaggtgcgcgcagtggatgcggactcaggctacaacgcgtggctttcatatgaattgcagccggcggcgggcggctcgcgcatcccgttccgcgtggggctgtacacgggcgagataagcacaacgcgtgccctggacgaggcagactcgccgcgccaccgacttctagtactggtgaaggatcacggtgagccggcgctgacggccacggccaccgtgctggtgtcgttggtggagagcggacaggcgccaaaggcctcttcccggactttggcgggcgccgcgagcccagaggctgcgctggtggatgtcaacgtgtacctgatcatcgccatctgcgtggtgtccagcctcctggtactcacgctgctgctgtatacggcgctgtggtggtcggcaacgcccactgagggcgcgtgcgcgccggggaagcccacgctggtgtgctcccgcgcggtggggagctggtcatactcgcagcagaggcggcagagggtgtgctctgaggagggcccacctaagacggacctcatggccttcagccccagtcttcctctaggtctgaataaagaggaggaaggggaaagacaggagccagggtcaaatcaccccggacagaaaagggtgactgctcataaaatacctcaggcaagcgatcccttaaaactgattgtcccaactcagaggccctcattttctgcaatggtgattatcggaccaagaggcccgggatcccagcgtctgctgctctcgcttctgctccttgcagcctgggaggtggggagcggccagctccactactccgtctacgaggaggccaaacacggcaccttcgtgggccgcatcgctcaggacctggggctggagctggcggagctggtgccgcgcctgttccgggtggcgtccaaaagacacggggaccttctggaggtaaatctgcagaatggcattttgtttgtgaattctcggatcgaccgcgagaagctgtgcgggcggagcgcggagtgcagtatccacctggaggtgatcgtggacaggccgctgcaggttttccatgtggacgtggaggtgaaggacattaacgacaacccgccggtgttcagagaaagggaacaaaaggtacctgtttctgaatctgcgcctctggactctcattttcctctagagggcgcttctgatgcggatatcggcgtaaactctacttttgccctatgcgttaagtctaaatgagaattttgagcttaaaataaaaacaaaaaaagataaaagtatattgcctgaattagttcttcggaagttattggacagagagcaaacgccaaaactcaatttattgctgatggtaatcgatggcggtaaaccagaactaacagggtctgtccagattcaaataaccgtcctggatgtgaatgacaatggtccggcgtttgataagcccagctataaagtagtgttgtctgaaaatgtccaaaacgacacaagagtgatccaactaaatgcttccgatccagacgaaggacttaatggagaaatttcctatgggatcaaaatgattttgccagtgagtgagaaatgtatgttttcaataaatccagacacaggtgaaattagaatttatggtgaactggattttgaagagaataatgcctatgaaattcaggttaacgccattgataaagggattccttccatggcaggtcacagcatggtcctggtggaagttctggacgtgaatgacaatgtccctgaagtaatggttacttcactgtcgctccctgtgcaagaggatgctcaggtgggtaccgtcattgccctgattagcgtgtcggatcgtgactctggagccaatggacaggtcatctgctcactgacacctcatgttcccttcaagctggtgtccacctacaagaattactactcgttggtgctggacagcgccctggaccgcgagagcgtgtcggcctatgagctggtggtgactgcgcgggatgggggctcgccttcgctgtgggccacggctagagtgtccgtggaggtggccgacgtgaacgacaatgcgcctgcgttcgcgcagcccgagtacacagtgttcgtgaaggagaacaacccgccgggctgccacatcttcacggtgtcggcatgggacgcggacgcgcagaagaacgcgctggtgtcctactcgctggtggagcggcgggtgggcgagcacgcactgtcgagctacgtgtcggtgcacgcggagagcggcaaggtgtacgcgctgcagccgctagaccacgaggagctggagctgctgcagttccaggtgagcgcgcgcgacgccggcgtgccgcctctgggcagcaacgtgacgctgcaggtgttcgtgctggacgagaacgacaacgcgccggcactgctggcgactccggctggcagcgcaggaggcgcagttagcgagttggtaccgcggtcggtgggtgcgggccacgtggtggcgaaagtgcgcgcggtggacgctgactccggctataacgcttggctgtcctacgagttgcaaccggcggcggtcggcgcgcacatcccgttccacgtggggctgtacactggcgagatcagcacgacacgcatcctggatgaggcggacgctccgcgccaccgcctgctggtgctggtgaaggaccacggtgagcccgcgctgacgtccacggccacggtgctggtgtcgctggtggagaacggccaggccccaaagacgtcgtcgcgggcctcagtgggcgctgtggatcccgaagcggctctggtggatattaacgtgtacctcatcatcgccatctgtgcggtgtccagcctgctggtgctcacgctgctgctgtacactgcgctgcgttgctcagcgccgcccaccgtgagccggtgcgcgccgggcaagcccacgctggtgtgctccagcgccgtggggagttggtcttactcgcagcagaggaggcagagggtgtgctctgcagagagcccgcccaagacggacctcatggccttcagcccaagccttcagctgtctcgagaagattgtttaaatcctcccagtgaagacgccgattcgggctacaatgcgtggctttcgtatgaattgcagccggcggcgatagctctgaggtttttggagtgtaccatgctgtcttcctggcaaggaggcccaagaccgcggcaactactgctctggcttctgatcctcgcagcctgggagacgggtagtggccagctccactactccgtccccgaggaagcaaaacacggcaccttcgtgggccgcatcgctcaggacctggggctggagctggcggagctggtgccgcgcctgttccgggtggcgtccaaaagacacggggaccttctggaggtaaatctgcagaatggcattttgtttgtgaattctcggatcgaccgcgaggagctgtgtgggcggagcgcggagtgcagcatccacctggaggtgatcgtggacaggcctctgcaggttttccatgtggaggtgaaggtgagggacattaacgacaacccgcccatattccctgaaagcaagaaacgaataatcattgcagaatctagacctccggaaactcgatttccactagatggcgcatccgatgcagatattggagtaaactcggcattgacctaccgactggatcccaacgattatttcactttggacgcacaaaacagtcttgagcaaatgtcttcattatcacttgtactgaggaaaacactggacagagaggaaattccaggaaccatagtttaattacctgaacagcccagtgatggaggtaaacccgagcctgactggccacagttccagcctgcctcatcacgattctggacgtgaatgacaacgccccggaattttaccaatccgtttataaagtgacggtgttagagaacgccttcaatggaacattagtgatcaagctaaatgccacagatcctgatgatggtacaaatggagatatagtttactcatttagaaggcctgtatggcctgcagtggtatatgcatttaccataaatccgaacaatggagaaattaggacaaaaggcaaactagatttcgaagaaaagaaattatatgaaatatccgtggaggcagttgacaaaggaaatattccaatggcgggtcattgtacccttttggtggaagtactagatgtaaatgataacgccccagaggttaccatcacttctttgtcactccccatcagagaagacactcagcctagcgccattattgccctaatcagtgtgtccgatcgtgactctggctcaaatggacaggtcacctgcaccttgacgccgcatgtccccttcaagctggtgtccacctacaagaactactactcattagtgctggacagcgccctggaccgcgagagcgtatcagcctatgaactggtggtgaccgcgcgggacgggggctcgccttcgctgtgggccacggccagcgtgtcggtgggggtggccgacgtgaacgacaacgcgccggcgttcgcgcagcccgagtacacggtgttcgtgaaggaaaacaatccgccgggctgccacatcttcacggtgtctgctcaggacgcggacgcacaggagaacgcgctggtctcctactcgctggtggagcggcgggtgggcgagcgtgcgctgtcgagctacgtgtcggtgcacgcggagagcggcaaggtgtacgcgctgcagccgttggaccacgaggagctggagctgttgcagttccaggtgagcgcgcgcgactctggcgtgccgcctctgggcagcaacgtgacgctgcaggtgttcgtgctggacgagaacgacaacgctccggcgctgctgacgcccggggctggcagcgcgggaggcacagtgagcgagctgatgccgcggtcggtgggtgcaggccacgtggtggcgaaggtgcgcgcggtggacgccgattcgggctacaatgcgtggctttcgtatgaattgcagctggcggcggtcggcgcgcgcatcccgttccgcgtggggctgtacactggcgagatcagcacgacgcgccctctggacgaggtggacgcgccgcaccaccgccttctggtgctggtgaaggaccacggtgagcccgcgctgacggccacggcaacggtgctgttgtcgctggtggagagcggccaagcgccacaggcttcgtcgagggcgtcggcaggcgctgtgggtccagaagcggcgctggtggatgtcaatgtttacttgatcattgccatctgcgcggtgtccagcctgttggtgctcacgttgctgctgtatactgcgctgcggtgctcggcaccgcccaccgagggcgcgtgcgcgccgggcaagcccactctagtgtgctccagcgcggcagggagttggtcgtactcgcagcagaggcggccgagggtgtgctctggggagggcccgcataagacggacctcatggccttcagtcccagccttcctccttgtctgggttctgcagagggaacaggccagagggaggaggactcagaatgcttgaaagagccacgacagcccaaccctgactggcgttactctgcctccctgagagcaggcatgcacagctctgtgcacctagaggaggctggcattctacgggctggtcccaggagggcctgatcagcagtggcccaacagtatcccagtgcaacacccagaacccagaggcaggagaagtgtcccctcccagtcggtgcgggtgtcaacagcaacagctggacctttaaatacggaccaggcaaccccaaacaatccgagtcccggtgagttgcccgacaaattcattatcccaggatctcctgcaatcatcgtgcatgcggcaggagcctactaacagccaaattgacaaaagtgacttcataaccttcggcaaaaaggaggagaccaagaaaaagaagaaaaagaagaagggtaacaagacccaggagaaaaaagagaaagggaacagcacgactgacaacagtgaccagtgaggtcctcaaatgggaaacaagccacttagccagtttttgtaataatgggcaaatctctcccatgtaggcaattccctgctcctttttcctatcttacatggggccctctttaggagaccttcaggaattttgcaggaaagtttccctgtgtctgtctagaacgcatttaacaggttttgtcgtaaaagctttactaagtctggggttaactctttctctccactctggcttggt

SEQ ID NO: 137414 - DNA, 1680 bp, Homo sapiens
atgggggcaaaggatggccgtctactcagtgagtcctcacaaggtctttcctcatgtggagcatccctggtgcccttctgtgtgtccaaatctcgtcttcttatgaagacgccagtcagattagacaaagaaacagtatccacagtggactccggggctcctacagacttggcacagcttcctacagtcttgaaacagccctgttgttcctgtcatggccagtgggcagtttgtgaacaaactgcaagaggaagtgatctgccccatctgcctggacattctgcagaaacctgtcaccatcgactgtgggcacaatttctgccctcaatgcatcactcagattggggaaacatcatgtggatttttcaaatgtcccctctgcaaaacttccgtaaggaagagacgcaatcaggttcaactccgctgttgcggaaatctggtgggagaaaatccaagctctacaagcctctgaggtgcagtccaaaaggaaaagaggctacattgcccgaggcaccaggagatgttccactatttctgcgaggatgatgggaagttcctctgttttgtgtgtcgtgaatccaaggaccacaaatcccataatgtcagcttgatcgaagaagctgcccagaattatcaggggcagattcaagagcagatccaagtcttgcagcaaaaggagaaggagacagtacaagtgaaggcacaaggtgtacacagggtcgatgtcttcacggaccaggtagaacatgagaagcaaaggatcctcacagaatttgaactcctgcatcaagtcctagaggaggagaagaatttcctgctatcacggatttactggctgggtcatgagggaacggaagcagggaaacactatgttgaaattccactgatgcccacagttgaacgatctcaagaagctcgttgttacccctgaagaccaatggcagaactagccacccaggcagctgctggaggtatacaaagtcgtcttgtgcagctcaaccacatcttcctagaagtgaagagtttcagtttctcaacccaacccctgttcctctggaactggagaaaaaactcagtgaaggcaaaatcaagacacgactccatcacagggagcctgaaaaaattcaaagaccaactccaggctgataggaaaaaagatgaaaacagattcttcaaaagcatgaataaaaatgacatgaagagctgcggcagaactacatcggggccaccaaatcaccactcttcagccccatcccactccctgtttcgggcctcgtctgctgggaaagtcacttttccagtatgtctcctggcctcttatgatgagatttctggtcaaaggagcgagctctcaggatacggaagacatttgacgttgcgctgtccgaggagctccatgcggcactgacccctgtgacactggacgcagcctcggcccacccggatctcatcctttcccaggatgagatagtgacgctgaacctcgcatcccagggcggttcgcagaagcggggcaacccccgacgcttctacaggcggggcttcctggaggtggagcccttgaccggcttcgtggagctgcacagcagcggctcccagtgccaggcgctcatcgagagcggttcccgggaggatctcccgatctgtccgaacaaagtgggcgtccgcttggattactag

SEQ ID NO: 137415 - DNA, 744 bp, Homo sapiens
ggccattaactggacttctgccaggccagtaagccagtgctgggacccggtgccctccttcccaggtcgtctgcttggctggacttcctccttgacgagtttgccaaaatccagtgaagggacccacactgcccgctagctcacacttctgagcccacgggccattgtctcctgtaaaccagaggaatgtgttttccttcactgtgtggtcaactttgtccttgatctggcccaccagactgtccatctcccagagccctgcaccatacaggcttctgccccgtggcgctgctggtagctgagtcacaggtaagggcacgtgcatgtgggccagagccacatagagcaggaagggcctcccgctggtgcttgcacgctggatgaactgggttgctttctcagcatacttctgggcaaggctgctcaagttcaccggctgctccacaatgttgaggttttcataaagagggagggccacgtcagtgtaacagtctctttgaaggttccttgatggtccatcaccctgtggacacgctggacaaggagggtggttgtagcctggagtatcagtacagcccatatcatggctatatgggattccaaagtagtaatcaaaaccacggaagttggggtgataagagccgtggtgtccaagatgccatttgcacgggaaaccacagtgaaaggggaagacagcccatctccaggagcccggagaagcgtgagcctctgaattacaccacg

SEQ ID NO: 137416 - DNA, 645 bp, Homo sapiens
atggcttgctactgcccatcatttttcaatgccatattcggtgacatctccatagctggaaatcagccatggagacaccagatccatcatggtaccacttcctgctgcataggagctggtctcagtatcccctcaccacaggaatatgccctcaaggtgccaacacctgatctggtccaacccctcaactgtcaaggacacataaaggatgaccccagactcacacgggaaaccacagtgaaaggggaagacagcccatcaccaggagcccggagaagcctgagcctctgcccctcaaagagggctccacagacacagcaaccccacatgggctccttcactttgccctcccgcgctggggccctgcaaaggcaccaggaggcccagggtgcaggtgcaccgccccacatcgtctcagaaatgcccgcttcctgcctggtttcatcatcttcctctctggccaacatcagcagcccgcagttcaagcaccgagacacctacggggcagcaaatgaggaaactcagacaccctgctgctcctcggtctgcaaatgcgctcagtctgggggaataatcgggcaatgtgtggcaagagctctgacagtgtcagaactctctgatctgctcttccgctctgaggagtag

SEQ ID NO: 137417 - DNA, 456 bp, Homo sapiens
  misc_feature (1)...(456): n = a,t,c or g
agtttgataacataggaagngcgctgaattccgtgccagagcccagcatcaccctcacgctgcggatgctgatgcacgggaaggaagtgtgcagcatcatcgggaagaagggcgagactgtaaagcgaatccgggagcaggacctttgtgctgctcctgcaaatggtggaaatgtctccaggcctccagtgaccctgcgccttgtcatccctgccagtcagtgtggctcactgattgggaaggctggcaccaagatcaaggagatccgagagactacgggtgcccaggtacaggtggcaggggacctgctccccaactccacagagcgagctgttacggtatctggggtgcctgatgccatcatcctgtgtgtgcgccagatctgcgctgttatcctggagtccccacccaaaggagccactatcccctaccatccgagcctctccctatgtactg

SEQ ID NO: 137418 - DNA, 352 bp, Homo sapiens
cactggctctccggtctccatcgccctggcccagtacctcatcactgcctgggccgccgccgggcttggcggcctacactgccaagatggcagcagctaatgggagtcagggaggagggcccgttgggtagctggggccaggcttctctccccaccacctgcagatttcttgctgcttccactgatacccttttgactggaatgaactggctgggcttgtcagggggcaccccaaagagggggcactgccaggtagctgggggagtggcatggggcaggggcccagttctcagcagcagacactctgtacagttttttcaatccctgtttttgaataaaaaatctcagcgac

SEQ ID NO: 137419 - DNA, 266 bp, Homo sapiens
caggacaaatatgcttttttattgtgtctgtgagatgaaatgaggagtcctggctgggtctgaccctggcctctggcctccaatcccagaggctgtctccctggttcagggagggtggcggtccagactgtccaagctcatgccaggctgggagctgggagtgggttagttcaaggtagatggtcaaggaaggcaagccgagttcccaaaacctggaaggtcaagggccacggcccggtagccccctctgtgacagtagctgcagt

SEQ ID NO: 137420 - DNA, 454 bp, Homo sapiens
gtttttctttaaccagctgccaggagtaaccttggtcagcagcagagtctctggggaaagggttcctccctaacctggaggggctgcctcagtctatttacttggggaatggctggaggggttggggagccatttgggacagcagagtggggctcagctgggtgacaggggttggaggctggtttagagcacagtccccgtcccttaggccccgtcacaggctctggaaccaccgtcttctcaccatagtcaggcttgggctggacagtgcggatacgcaggtactggcggaagagcgtcaccgatgggtgctcctcctcgggacccttgctggtcatggcgctgcgcgtggtgagctggaaggtcaagggccacggcccggtagcccctctgtgacagtagctgcagtgtgcccagctgctcccacgtgtgagaggaattccaccacactggc

SEQ ID NO: 137421 - DNA, 3978 bp, Homo sapiens
actagttctctctctctctctcttttcacttcccaggcaggacaaatatgcttttttattgtgtctgtgagatgaaatgaggagtcctggctgggtctgaccccagctggcctctggcctccaatcccagaggctgtctccctggttcagggaggggtggcggtccagactgtccaagctcatgccaggctgggagctgggagtgggttagttcaaggtaaatggtcaaggaaggcaagcaggacaaggtggaagtcttgcggcttgtggaggttaacaggcatggcctgcattgcgtagcttcaccacagagtgtttggggcaggtggcggacctgccggcaagttgactctcgaagccaggatgtggtccagctctccatacaggataagggttggagtctggaaggtcaagggccacggcccggtagcccctctgtgacaagtagctgcaagtgtgcccagctgctcccacgtgtgagagttaaaggcctttccatgaagcaagcaccacctccaccctgtgtgccttggttgagtgggagcacttcgcggtaaaagattgggcgagttgccaggggtgagaccagccaggactgtgacattggggtctccccagaggcaggaagtctgctcaatggggcctggcagccccacatacagtaggagcatgagcagcagactcaggcccagcagggctacctgggaccggctcatggaggtctgtaccacagtcgggcccaacgggatgagcgggcgggccccgcccaggcggaaccagcagccgcacagcgccccgaccatggctgcctccgcagctccgcgggccgctccggctctaggcggccaggagcgcggccatctcggcgcgcctgcgcactccgcagccgcgggcctgcaacccagttaccgagtcgtctgcgtggagggggtcaccgccagcacgcgcctgcttcccgtctgcgcgagtccacgcagctccccagagctagcgagccagaaccgtagtccgcggaagcaacctgaccgcgaggtcaacgcgttgggccccaggtggcagcgcgttgagcaccccgcatccccggcgggtcgcctttcccactgggcgcttcggtttccgcctctagaaaatgggctttccggtgtggaagcgcgcctgtggttccagctactggggggtgttctgtggcccctcatcatcgtggttttgaaccacaggcccttcaccagcacagcagcagcaggcatggcagcaagcgtggagcagcgcgagggcaccatccaggtgcagggccaggccctcttcttccgagaggccctgcccggcagtgggcaggctcgcttctctgtactgctgctgcatggtattcgcttctcctccgagacctggcagaacctgggtacactgcacaggctggcccaggctggctaccgggctgtggccattgacctgccaggtctggggcactccaaggaagcagcagcccctgcccctattggggagctggcccctggcagcttcctggcggctgtggtggatgccttggagctgggccccccggttgtgatcagtccatcactgagtggcatgtactccctgcccttcctcacggcccctggctcccagctcccgggctttgttgccagtggcccccatctgcactgacaaaatcaatgctgccaactatgccagtgtgaagactccagctctgattgtatatggagaccacggacccccatgggtcagaccagctttgagcacctgaagcagctgcccaaccacccgggtgctgatcatgaagggggcggggcacccctgttacctggacaaaccagaggagtggcatacagggctgctggacttcctgcaggggctccagctctggctcatgcacatgcaacagctgatgtcactcgcagttgtgagcggccgcctctcccggggacaatgtgggactgagcggcccagccgccgtgccgccgccgccgccgccgcaggacagccccagcgaggccatttccagcacatagaagagagattggaaaccaacgtgcagaactgccagtcccctgacacgctgtgccccacccactgcagcccagtgctgaatgaaccctgcccagaggtgtctgtagtcgctgtggccccagcctcgcctgacagaatgagcggctcggacgggggactggaggaggagccagagctcagcatcaccctcacgctgcggatgctgatgcacgggaaggaagtgggcagcatcatcgggaagaagggcgagactgtaaagcgaatccgggagcagagcagtgcccggatcaccatctccgagggctcctgccctgaacgcatcaccaccatcaccgggtctacagcagctgtcttccatgcagtctccatgattgctttcaaactggatgaggacctttgtgctgctcctgcaaatggtggaaatgtctccaggcctccagtgaccctgcgccttgtcatccctgccagtcagtgtggctcactgattgggaaggctggcaccaagatcaaggagatccgagagactacgggtgcccaggtacaggtggcaggggacctgctccccaactccacagagcgagctgttacggtatctggggtgcctgatgccatcatcctgtgtgtgcgccagatctgcgctgttatcctggagggcttctctgtccagggtcagtatggggctgtgaccccagctgaggtcaccaagctccagcagctctcaagccatgcggtcccctttgccacacccagcgtggtgccaggactggatcccggcacacagaccagctcacaggagttcttggttcccaacgatgtgagcaggggatgggatggctggaggttgattggctgtgtgatcgggcgccagggcaaccaagatcaacgagatccggcagatgtcaggggcacatatcaagatcgggaaccaaggcagagggcgctggggagcggcatgttcaccatcactggctctccggtctccatcgccctggcccagtacctcatcactgcctgtctagagacggccaagtctacctctggggggacgcccagctcggcccccgcagacctgcctgcccccttctcgccacccctgacggccctgcccacagcttcccccttggcctgctgggcacaccctatgccatctccctctccaactttaatcggctttaaagcccatgcccttcttggctttaccacctgcttccccagggccgccgccgggcttggcggcctacaccgccaagatggcagcagctaatgggagcaagaaggatgagcggcagaaattctccccctactgaggccagctgaggtacaggcaggggcaggcaggaccaccagcagggggcttgcctctgcaccctacccgcccaaggagactccaccctggggtcccaaacgccgctaacgcccagacgcatggattgcaccccctaccctgcctccatctatgggagttctttctctcagagtgggggcagttttctggccccaggggtctgaagctgcggccagccccagggcagggggccctaacctcctcaagctctgtgcttggaatacagggagccagcccaggagactccctaggtgcccccaacccatggcgggtgtcactcacgcactccccagtcccttagggcttcctggccctactgcatccttgtgggagtcagggagaaggggcccgttgggtagctggggcccaggcttctctccccacccacctgcagatttcttgctgcttccactgatacccttttgactggaatcgcactggctgggcttgtcagggggcaccccaaagagggggcactgcacaggtagctgggggagtggcatgggacaggggcccagttctcagcagcagacactctgtacagttttaacaataccctgtttttgaataaatattctcagcgcccagaaaaaaaaaaaaaaaaa

SEQ ID NO: 137422 - DNA, 363 bp, Homo sapiens; identical to SEQ ID NO: 114880

SEQ ID NO: 137423 - DNA, 1148 bp, Homo sapiens
cccacgcgtgcggggggcctcaaggctctggtgttcggctgtgggcgttttctccgtgggctactagcgggcccggcagcgaccagctgggtctcggcttccagctcgcgggttcagggaagtggtggagacccaagaagggaagacaactataattgaaggccgtatcacagcgactcccaaggagagtccaaatcctcctaacccctctgggccagtgccccatctgccagttggaacctgaagcacaagtataactatggacgatgttctgcttgcttagccagtttcatccggcctcatgggagggattgcttgccccgaaagattcacagggcctattgccaggggaaggaacaccgcaagattcgagggagtgttgttgaagatggcccaccgagcaggtctatttaccaaatcacaaggcctcggcttcctggaaggagtttgttcccgaagagcaaaccccaaactcaaccgggtaacttgacggcgctgggctcctggctcccgtcaaagcccatctacaaaaaaagggcccccggcttggaacaaggggttgcgcaatgccccgtttggggtcaacccctttcttgaagggacaatgtctggctaattcaagaaacaccttggaagctgtatcactgacagagagcagtgcttccagagttcctcctgcacctgtgctggggagtaggaggccccactcaccaagcccttggccacaactatactcctgtcccacccccaccacggatggccctggtccctcccaacatgcatggacaggggacagtgggactaacttcagtacccttggcctgcacagtagcaatgcttgggagctataagcaagccggggcatttggtccccttgccaactgctatgggggcttaggccatgctcagtgctggggacaggagttttgcccaacgcagtgtccataaaactgggttcgatgggcttacccattgggtgttgcgctcacttgcttttgggaagttgcagggggtcctggggcacattgccagctgggtgctgagcattgagtcactgatctcttgtgatggggccaatgagtcaattgaattcatgggccaaacaggtcccatcctcttcatgaaaaaaaaaaaaaaaaaaaaaaaaa

SEQ ID NO: 137424 - DNA, 681 bp, Homo sapiens
ccgcggggcctgtgacaccgcacgctgagctctgtgaggtagccgcttgcggagactgcaagcagccgcggcgcgcccggccctccctcttccgctgccgccgtgggaatggaaacatctgccccacgtgccggaagccaagtggtggctgacaactgcgcgccactccgcggcctaccgcgcagatcctctacgtgtgtcctcgcgagacaagctcaccgaaatggccgcgtccagtcaaggaaactttgagggaaattttgagtcactggaccttgcggaatttgctaagaagcagccatggtggcgtaagctgttcgggcaggaatctggaccttcagcagaaaagtatagcgtggcaacccagctgttcattggaggtgtcactggatggtgcacaggtttcatattccagaaggttggaaagttggctgcaacagctgtgggaggtggattttttctccttcagcttgcaaaccatactgggtacatcaaagttgactggcaacgagtggagaaggacatgaagaaagccaaagagcagctgaagatccgtaagagcaatcagatacctactgaggtcaggagcaaagctgaggaggtggtgtcatttgtgaagaagaatgttctagtaacatgggggatttttcggaggctttctgcttggcatggcatcctaag

SEQ ID NO: 137425 - DNA, 517 bp, Homo sapiens; identical to SEQ ID NO: 115477

SEQ ID NO: 137426 - DNA, 760 bp, Homo sapiens
ctgaacttcctaagcccatgaattgggcttcatgcagcagaaccttggcctcctttttgttgcaggccgccagatcccacccttggacccccatgaaaatggaaacaatggaacaatcaaagttgagaagccaaccatgcaagccagccgccggtgctgttgacccaagggccgtggtccacggtacttgaagaagccagagcccacatcctgtgcactgctgaaggaccctacgctcggtggcctggcacctcactttgagaagagtgagcacactggctttgcatcctggaagacctgggagatactgggtgggagtgtgaacatttggctccacattacttatgcaaatttctgcagccagcttggatttctcctcagaaaatgggattttcttttctatcacattgccagactgcaaattttctaaacttttatgctctgcttcccttataaaaccaaatgcctttaacagcacccaagtcacctcttgaatgcttctctgcttagaaatttcttccgccaggtaccctaaatcatctctctcaagttgaaaattccagaaatctctagggcaagggcaaaatgctgccagtctctttgctaaaacataacaagagtcacctttgctccagttgccaacaagttccccatctccatctaagaccacctccgcctggactttattgtccatattgctatcagcattttgggcaaagccgttcaacaagtctctaggaagttccaaactttcccacat

SEQ ID NO: 137427 - DNA, 1280 bp, Homo sapiens
  misc_feature (1)...(1280): n = a,t,c or g
gagcgtggggcaaaggcgatagacgccggcggtgcgcgggcgcggcnggccccggaggatgctgctgagccccggcactgcctggctgcgagcacatgatggcgatacgggagctcaaagtgtgccttctcggggacactggggttgggaaatcaagcatcgtgtgtcgatttgtccaggatcactttgaccacaacatcagccctactattgggggcatcttttatgaccaaaactgtgccttgtggaaaatgacttcacaaagttcctcatctgggacactgctggtcaggaacggttttcattcattgggctcccattgtactattcgaggcttcagctggcagctgtttattcgtgttatggatatttaccaagcagggatttcatttttattaccttgaaagaaatgggtccaagcggctgaaagaacttggtccggaaaaacattgtaatggccatcgctggaaacaagtgcgacctctcagatatttagggaggttccccctgaagggatgctaaaggaatacggctgaatccataggtgccatcgtggttgagacaagtgcaaaaaatgctattaatatctgaagagctctttcaaggaatcagcccgccagatcccacccttggacccccccatgaaaaatgggaaacaatgggaccatcaaaagttgagaagccaacccatgcaagccagccgccggtgctgttgaccccaaggggccgtggtcccacgggtactttgaagaagccagagcccacatccctgtggcactgctgaaggaccctacgcttcggtgggcctgggcacctcactttgagtaagagtgaggcacactggctttgcatcctggaagacctgcagggggcggggcaggaaatgtacctgaaaaggattttagaaaaccctgggaaaacccaccacaccaccaccacaaaatggcctttagtgtatgaaattgcacatggaggggatgttagtttgcatttttgctaaaaaaaaaaaaaaaaacctttaaaaattgttggatgtgtacaaaagtcttactgccttattatgtgtatgggattctaaagtggcattccacttggatttcctgtgctacctatccaaattccaagtaactacttcaggggcattgcctttgttacctaaccacccttccctgaagggcaaatttagttcaggggggtagtttttacctacctttggaagaaaccctttatttattactttttggaggaaatcaaaaaaggggcaagggcccgcccctcaa

SEQ ID NO: 137428 - DNA, 428 bp, Homo sapiens
ttgtgacttccaccatggcgtaccgcgcccagggccaaaaggtgccagaaggtgatggtgcagcccatcaaccttatcttcagatacttgcaaaatagatctcgaattcaggtgtggctgtatgaacaagtgaatatgcggatagaaggttgtattattggctttgatgagtacatgaacctcgtattagatgatgcagaagagattcattctaaaacaaagtcaagaaaacaactgggtcggatcatgctaaaaggagataatattactctgctccaaagtgtttccaactagcagtgaatggtgaagtctgtaggatgttgagaagaccccttgagcgtgtttaaagatgtctgctgcaacctgcatttactcaacttgttttacttgcacattattattagggtgacaataaatgctgtaggaag

SEQ ID NO: 137429 - DNA, 771 bp, Homo sapiens
ggcacgagagttgctctcagaggcagcgtgcgggttgtgctctttgtgaaaattcccacccatggcggtcccgtggcccaggggtccagaaaagtgcagaagggttatggtgccagcccatctgcagaacctcatcctccagatacttaccaaaataggatcgccggattccaggtgtggctctatgagcaagtgaatatgccggatagtaaggctgtatcattggttttgagtgagtatgtgaaccttgtattagatgatgcagaagagattcattctaaaacaaagtcaagaaaaacaactgggtcgtgatcatgctaaaacggagataatattactctgctacaaacgtgtctcccacctagaatggtccatggaagtggagaaattgtttgaaaaaggatacagtttgtttttaagatgtccttttgtcccatgttgaacatttattccatattgttttgattaccctcgtcgttactacatagatggcaataaatacgtatgggattgtttgtattaaaaaatttacattgcttcttactattcagcagtagaaactttttacacagtaacaccattcgttgttggtatttagttttctgaagggtcgcagttgccttgagcacttggtattcgcagagcttggacctgtagatttttaggcagattaggaattctgcctgatgggtaagcttccagtattgggaggtggagaaggggagggttcagaaaaataaataagagttattgctctaaaaagaattaaaa

SEQ ID NO: 137430 - DNA, 476 bp, Homo sapiens
  misc_feature (1)...(476): n = a,t,c or g
cccttgcctggctcctgtggtggcaggctgngcacgaggaccatgctgggccggagcctccgagaagttatataccaccttataatgctacagtagttcagaagttgttggatcagggagctctactaatgggaaaaacaaatttagatgagtttgctatgggatctgggagcacagatggtgtatttggaccagttaaaaacccctggagttattcaaaacaatatagagaaaagaggaagcagaatccccacagcgagaatgaagattcagactggctgataactggaggaagctcangtgggagtgcagctgctgtatcggcgttcacatgctacgcggctttaggatcagatacaggaggatcgaccagaaatcctgctgcccactgtgggcttgttggttcaaaccaagctatggcttagtttcccgtcatggtctcattcccctggtgaattcgatggatgtgccaggan

SEQ ID NO: 137431 - DNA, 748 bp, Homo sapiens
aatttgtaagatatgtttactgttttagagagacagaggctaacttttcattttcaaggactgctgaacaatcatccatgagttcttgaagttgaataacaggaaactgtacttgtttttcaaaccatttggctactgtaagaagctgctggtcacaaaacgcacgtccaataaactgtagtcctattggcaacccttggtttgagagtgcaacagggatactcactgctggcaatcctgccatatttacagcttgtgtaaaaatatcatcctgggcacttcgggttctgttgtcctctttgatgaactccaagtatggtactgcctcactcaaggtggtgggagttagcaagacatctactccagagttaaaagcatttacaaagtcattagcaatgaggcgtctcactttctgtgctttgacaaaataattttcatagttttcttttaataagaaaaagtttcctgagagaattcttcctctcaccacatcattaaacccttctcgtctggttgcagcatacatggcttcagtggacacatcaatgtcacatctgtgaccatattgtagcccatcaaatcttgccatattcgatgccacttctgatgtgcacaatacatggtagcagacaattgaataactggtgtgaggaagggatacttcaattactttggccccctcagactcaaagaggtcagcagctttggaccaaagagactgtacttcacttgataattccggtacaag

SEQ ID NO: 137432 - DNA, 963 bp, Homo sapiens
gcgcgatcgagaccctattgagtgccgtggaattcggctgcgcccatgtaacatcactagcgaccggtgacctctttttcccccttgcctgtctcctgtggtggcaggctgggcacgaggacacatgctgggccagagccaccaacaagttgctgccccactgaaacaccgtccaattacaccaacagagctctgtcaaaaatgtctctctcttatcaagaagaccaagtttctaaatgcctacattactgtgtcagaagaggtggccttaaaacacgctgaagaatcagaaaagagatataagaatggacagtcacttggggatttagatggaattcctattgcagaaaaagacaatttcagcacttctggcattgagacaaccatgtgcatcaaatatgttgaaaggttatataccaccttataatgctacagtagatcagaagttgttggatcaaggagctctactaatgggaaaaacaaaattaaatgattttgctatgggatctgggagcacagatggtgtatttggaccagttaaaaacccctggagttattcaaaataatgactttgcaaatgcttttaactctggagcagacgtcttcctaactcccaccatcttaagtgaggcagtaccatattcggagttcatcaaagtagacaacagaacacgaagttcccagaatgatatttttacacaagctgtaaatatggcaggattgccagcagtgagtatccctgctgcactctcaaaccaagggttgccagtaggactgcagttttttgaacatgcattttgtgaccagcagcttcttacagtagccaagtggtttgaaaaacaagtacagtttcctgttattcaacttcaggaattcatggatgattgttcatcaatgatcactcagtagggcacatcactcagtagggcaggaagaaatttctggattcttctcattctacct

SEQ ID NO: 137433 - DNA, 1300 bp, Homo sapiens
  misc_feature (1)...(1300): n = a,t,c or g
gctgccgctgctgccgccgcctcgcccgaagcgacacagacgctgggatcggccttagcgagagatttcttctgacttgagcctgcagtgtgctgtgagagatctaccactagattatctcaactttggtctcctgggaccactcgttgctgacagggagaggttgcagggcatctgatctcctggtgttaaaatctgtcgtgataccgaggaaggccccgagatcccaggcactgagtgactgcatactctgaattcttgccgccaggatggggaaacagaacagcaagctgcgcccggaggtcatgcaggacttgctggaaagcacagactttacagagcatgagatccaggaatggtataaaggcttcttgagagactgccccagtggacatttgtcaatggaagagtttaagaaaatatatgggaactttttcccttatgggggatgcttccaaatttgcagagcattgtcttcccgaactttcgatgcaaatggagatggggacaatagactttagagaattcatcatcgccttgagtgtaacttcgagggggaagctggagcagaagctgaaatgggccttcagcatgtacgacctggacggaaatggctatatcagcaaggcagagatgctagagatcgtgcaggcaatctataagatggtttcctctgtaatgaaaatgcctgaagatgagtcaaccccagagaaaagaacagaaaagatcttccgccagatggacaccaatagagacggcacttgggtcccccacctggcgctgatctatagaacagcagaaggcggcttcgcagtacagagagcctctgtctccttttatcccccgcccagtgctggcaatgccatggtgaatgaggcagcagtgttcctggagattccactgggctcttccccgggacaggtgagtgctgtgtgtcacagtggcagaaaactctccctggaagagttcatccgaggagccaaaagcgacccgtccattgtgcgcctcctgcagtgcgacccgagcagtgccggccagttctgagccctgcgcccaccaatcgaattgtagagctgcttgtgttcccttttgattcttctttttaacaannnnnnnnnnnnnnngccaaacaatataaagggggaggccgccccctggggggtttgaggccccttcttcggggacgccttaagttttttttgtcggggatgcttcggggaaaggcccaaacccccagggtgtttggggaaaacatggacaaacttcgggggggtcattgttggaggattttaaaccgttt

SEQ ID NO: 137434 - DNA, 721 bp, Homo sapiens
atggatgggaatttgagaaaaataagatttgaaaaacatgccattactgaggagtttaggaccacagaacctggacttgcagcattgaggttgccaagcacctggataaggggagtgagaacaagtgagagcaagagagaggttggaaaagggggacaaagccaacagtatgaaaacagagacacagaaggagaaggccatgtgatgacaaaggcaagagactggagtaaagcagctgcaagccaacgactgccagcaaaccatctgaagctaaggctctgcatcgatggctttcggtcccattccctccctgaagaggggcccaagaagccctgtcagcatcatgcagcacaggaagagccatgcacacgcagtggccgtttgccccaagcccatgaggggtcaatctcagactgttgcactagcagtgagcaaggctccatggacataggatctgtcgagccaggcacaggatataatctcctggtgtgccatttgctaagactttggaaaagcgcagtatttgggcaggagtgtcccgtttttccaggtaccatctgtcacggcttcccttggctaggaaaaggaaatcccctgactccttgcgcttcccagttactccttcccctaccgtccacaacccaaaaacgacaatctggtcatgccctttactccttcccctaccgtccacaacccaaaaacgacaatctggtcatgccct

SEQ ID NO: 137435 - DNA, 692 bp, Homo sapiens
cttccgtgcccctcacttgctcatgggcccatgcctagccctgattcgttggacagagcctttgtagacccttgtctgagaccgagctatgtggggcgacctctggctcctcccgcctgcctctgccaatccgggcactgggacagaggctgagtttgagaaagctgcagaggaggttaggcaccttaagacccaagcccatcggatgaggagatgctgttcatctatggccactacaaacaagcaactgtgggcgacataaatacagaacggcccgggatgttggacttcaacgggcaaggcacaagtgggatggcctggaatgagctgaaagggacctccaagggagatgccgtggaagccttacctcaaccaagttagaagagctaaagaaaaaatacggggatatggagagactggatttggttactgtgccatgtgtttatcctaaacctgagacaatccctttttttttttctaataccgtggatgggtgggaattccgggaaaataacccagttaaaccagctactcaaaggctgctcacccatacgggctcctaaccagattaagggggctaaaacgattactgactttccttgagtagtttttatctgaaaatcaattaaaaagtgtatttgttactttaaaaaaaaaaaaaaaaaaaaaaaaaaaaagatgcggccgcaagc

SEQ ID NO: 137436 - DNA, 3871 bp, Homo sapiens
acgcgctcacacacagagagaaaatcctttctgcctgttgatttatggaaacaattatgattctgctggagaacttttcagctgagaaatagtttgtagctacagtagaaaggctcaagttgcaccaggcagacaacagacatggaattcttatatatccagctgttagcaacaaaacaaaagtcaaatagcaaacagcgtcacagcaactgaacttactacgaactgtttttatgaggatttatcaacagagttatttaaggaggaatcctgtgttgttatcaggaactaaaaggataaggctaacaatttggaaagagcaactactctttcttaaatcaatctacaattcacagataggaagaggtcaatgacctaggaggtaacaatcaactcaggattcattttcattatgttattcatggaacacccggagcactacactataatgcacaaatggatactgacatggatcctgccaactttgctctacagatcatgctttcacattatctgtctagtgggtactatatctttagcttgcaatgacattgactccagagcaaatggctacaaatgtgaactgttccagccctgagcgacacacaagaagttatgattacatggaaggaggggatataagagtgagaagactcttctgtcgaacacagtggtacctgaggatcgataaaagaggcaaagtaaaagggacccaagagatgaagaataattacaatatcatggaaatcaggacagtggcagttggaattgtggcaatcaaaggggtggaaagtgaattcctatcttgcaatgaacaaggaaggaaaactcctatgcaaagaaagaatgcaattgaagatttgtaacttcaaagaactaattctggaaaaccattacaacacatatgcctcagctaaattgggacacacaacggaggggaaatgtttgttgccttaaatcaaaaggggattcctgtaagaggaaaaaaaacgaagaaagaacaaaaaacagcccactttcttcctatggcaataacttaattgcatatggtatataaagaacccagttccagccagggagatttctttaagtggactgttttctttcttctcaaatttttctttccttttattttttagtaatcaagaaaggctggaaaaactactgaaaaactgatcaagctggacttgtgcatttatgtttgttttaaggcactgcattaaagagacatttgaaaagtatacacaaaaatcagatttagtaactaaaggttgtacaaaattgtaaaactggttgtacaatcatgatgttagtaatagtaatttttttcttaaattaatttaccctttaagagtatgttagatttgattatctgataatgattatttaaatattccctatctgcttataaaatggctgctataataataataatacagatgttgttatataaggtatatcagacctacaggcttctggcaggatttgtcagataatcaagccacactaactatggaaaatgagcagcattttaaatgctttctagtgaaaaattataatctacttaaactctaatcagaaaaaaagaatattctcaaaaaaatctattacgaaagtcaataaaatagataatttaacaaaagtacaggattagaacatgcttatacctattaacaagaacaaaatttctaatgctgctcaagtggaaagggtattgctaaaaggatgtttccaaaaatcttgtatataagatagcaacagtgattgatgataatactgtacttcatcttacttgccacaaaataacattttataatttctcaaagtaaaattgagaaatctttaagtttttttcaagtaacataatctatctttgtataattcgtatttgggaatatggcttttaataatgttcttcccacaaataatcatgcttttttcctatggttacagcattaaactatattttaagttgtttttgaactttattgttttgttatttaagtttatgttatttataaaaaaaaaaccttaataagctgtatctgtttcatatgcttttaattttaaaggaataacaaaactgtctggctcaacggcaagtttccctcccttttctgactgacactaagtctagcacacagcacttgggccagcaaatcctggaagcagacaaaaataagagcctgaagcaatgcttacaatagatgtctcacacagaacaatacaaatatgtaaaaactctttcaccacatattcttgccaattaattggatcatataagtaaaatcattacaaatataagtatttacaggattttaaagttagaatatatttgaatgcatgggtagaaaatatcatattttaaaactatgtatatttaaatttagtaattttctaatctctagaaatctctgctgttcaaaaggtggcagcactgaaagttgttttcctgttagatggcaagagcacaatgcccaaaatagaagatgcagttaagaataaggggccctgaatgtcatgaaggcttgaggtcagcctacagataacaggattattacaaggatgaatttccacttcaaaagtctttcattggcagatcttggtagcactttatatgttcaccaatgggaggtcaatatttatctaatttaaaaggtatgctaaccactgtggttttaatttcaaaatatttgtcattcaagtccctttacataaatagtatttggtaatacatttatagatgagagttatatgaaaaggctaggtcaacaaaaacaatagattcatttaattttcctgtggttgacctatacgaccaggatgtagaaaactagaaagaactgcccttcctcagatatactcttgggagagagcatgaatggtattctgaactatcacctgattcaaggactttgctagctaggttttgaggtcaggcttcagtaactgtagtcttgtgagcatattgagggcagaggaggacttagtttttcatatgtgtttccttagtgcctagcagactatctgttcataatcagttttcagtgtgaattcactgaatgtttatagacaaaagaaaatacacactaaaactaatcttcattttaaaagggtaaaacatgactatacagaaatttaaatagaaatagtgtatatacatataaaatacaagctatgttaggaccaaatgctctttgtctatggagttatacttccatcaaattacatagcaatgctgaattaggcaaaaccaacatttagtggtaaatccattcctggtagtataagtcacctaaaaaagacttctagaaatatgtactttaattatttgtttttctcctatttttaaatttattatgcaaattttagaaaataaaatttgctctagttacacacctttagaattctagaatattaaaactgtaaggggcctccatccctcttactcatttgtagtctaggaaattgagattttgatacacctaaggtcacgcagctgggtagatatacagctgtcacaagagtctagatcagttagcacatgctttctactcttcgattattagtattattagctaatggtctttggcatgtttttgttttttatttctgttgagatatagcctttacatttgtacacaaatgtgactatgtcttggcaatgcacttcatacacaatgactaatctatactgtgatgatttgactcaaaaggagaaaagaaattatgtagttttcaattctgattcctattcaccttttgtttatgaatggaaagctttgtgcaaaatatacatataagcagagtaagccttttaaaaatgttctttgaaagataaaattaaatacatgagtttctaacaattaga

SEQ ID NO: 137437 - DNA, 1340 bp, Homo sapiens
cccacgcgtccggacggaatgaggagacagtgttgtatttttgcggggagttctaggccgaccgggagcgagagaacgctcgggggcgaagcgcgccattgcggccctccccgccgactgcggtagtccagtcccaagatggcggccaccatgaagaaggcggctgcagaagatgtcaatgttactttcgaagatcaaccaaaagataaacaaatttgcacggaatacaagtagaatcacagagctgaaggaagaaatagaagtaaaaaaagaaacaactccaaaacctaggaagatgcttgtgatgacatcatgcttgcagatgatgatttgcttaattgataccttatccaattgggtgatgtcttcattagccattctcaagaagaaacgcaagaaatgttagaagaagcaaagaaaaatttgcaagaagaaattgacgccttagaatccagagtggaatcaattcagcgagtgttagcagatttgaaagttcagttgtatgcaaaattccgggagcaacataaaccttgaagctgatgaaagttaaacattttataatactttttttatttgtttaataaacttggaatattgtttaaaatgataattttccttcttcaaatgacatggaaagcaaaactttcttttttaaaaattttcatttatttaatggaaacttgcccattttcacatgtctgcctcatttatttttaatttttaaaagaagacagtattcacctatgtattttgcataacgattatatcaagtctaggggcttcatgtcatgttattaaaatcagttaagcaatcttttatgtttctatattatttagaatatttgttgttgcaatttttcgacataagaaaatttaacagttgtgtcatgttgtttctgtctgattttaattgctgtctaatgacggggaaagcacgatgaaaagatgtacaatcctgcatccttgcttatttcacaactaaagctttgtcatagactttaaaataatatatgtatatattttatttaaatatatgttacatattatatttaaacatacatatttaacattttttacatatctatcaatatcagagatttggggtaaaagaatgggtaatggttaaaacatgtggaggcatgtggagctttatacaaaacagggcagaacccacagaagaacggtttagaaacccaagagatgtgcagaaagaaatgtttagtgttttttccgttttaaattttagattttattttagtgctttgtaattaattggggtttatattgataaagatgtggaagttaaacagctatgtatgtaaaagtaaggcttatttctt

SEQ ID NO: 137438 - DNA, 2265 bp, Homo sapiens
atggaatatgaaagtatggtgatttcttttgatgatagagtcatggagaagactgagtatggaccaatatttacagtctttgctatgggaaaccgaatgacctttgttactgaagaagaaggaattaatgtgtttctaaaatccaaaaaagtagattttgaactagcagtgcaaaatatcgtttatcgtacagcatcaattccaaagaatgtctttttagcactgcatgaaaaactctatattatgttgaaagggaaaatggggactgtcaatctccatcagtttactgggcaactgactgaagaattacatgaacaactggagaatttaggcactcatgggacaatggacctgaacaacttagtaagacatctcctttatccagtcacagtgaatatgctctttaataaaagtttgttttccacaaacaagaaaaaaatcaaggagttccatcagtattttcaagtttatgatgaagattttgagtatgggtcccagttgccagagtgtcttctaagaaactggtcaaaatccaaaaagtggttcctggaactgtttgagaaaaacattccagatataaaagcatgtaaatctgcaaaagataattccatggactcagatgaggatcctgttaacctacagagtaggtcagcgttggtgtgtgagatgttgcatgtccaacggtcctctagtgatgctgatgctattggtccccacgcagaccacagcttaagtaacagatgggaagttattcttgctgatgaacatgggatcatagcagatgatatgattagcaggtatgctctcagtgaaaaatctcaagtagaactttctacccaagtaattaaaagtgccagttcaaagtctgttaacaaatcagacattgacacttcagtatttcttaactggtataatccagaaaaaaaaatgataagagcttatgccactgtgatagatggacctgagtacttttggtgtcagtttgctgatacggagaaacttcagtgtttagaagtagaagtacagactgctggagaacaggtagcagacaggagaaattgtatcccatgtccttatattggagatccttgtatagtaagatacagagaagatggacattattatagggcacttatcactaatatttgtgaagattatcttgtatctgtcaggcttgtggactttggaaacattgaagactgtgtggacccaaaagcactctgggccattccttctgaacttctgtcggttcccatgcaagcctttccatgttgcctctcagggtttaacatttcagaaggattatgttctcaagagggaaatgactatttctatgaaataataacagaagatgtgttggaaataacaatactagaaatcagaagggatgtttgtgatatccctttagcaattgttgacttgaaaagcaaaggtaaaagtattaatgagaaaatggagaaatattctaagactggtattaaaagtgctcttccctatgaaaatattgactcagagataaagcagactcttgggtcctacaatcttgatgtaggacttaagaaattaagtaataaagctgtacaaaataaaatatatatggaacaacagacagatgagcttgctgaaataactgaaaaagatgtaaacattattggaaccaaaccaagtaacttccgtgaccctaaaactgataacatttgtgaagggtttgaaaacccctgcaaagataaaattgatactgaggaactggaaggagttagtcagaaagcacaggaatccatgtgtactgaggacatgagaaagtcaagttgtgtagaatcttttgatgaccagcgcaggatgtcattgcatctacatggagcagattgtgatcctaaaacacagaatgaaatgaatatatgtgaagaagaatttgtagagtataaaaacagggatgccatttcggcattgatgcctttgttctctgaggaagaaagcagtgatggaagcaagcacaataatggtttaccagatcatatctcagctcaactacagaacacctacactctgaaagcctttactgttggatctaaatgtgttgtgtggtcaagtctaagaaacacatggtctaaatgtgagattttagaaacagctgaagaaggaacaagggttttgaacctttcaaatggtatggaggagatagtgaaccctgagaatgtctggaatggcatacccaaattggataagagtccacctgaggtatggaattctataaatagtaattag

SEQ ID NO: 137439 - DNA, 2856 bp, Homo sapiens
  misc_feature (1)...(2856): n = a,t,c or g
ccacgcgtccgcccacgcgtccgggcctgtcgcccgaccccacctcgccaaccgaggcggaccgcggagtgtgcgaacgaccccaccgctgctttctcctcccccagatcacgcaccccagctccggaagacggtgtttatgcctgctatcccccacctcgtttgatttctccctgctttacgagtctcagtccgaccgggctatctttggcgtggggacggagccggatcaagagccgccgccgccatatcatgaacaagttccagtttcagtctaccacccaacaacctaggccagacttgggtagcaactcagctgactgaagaggaacaaattaggatagctcaaagaataggtcttatacaacatctgcctaaaggagtttattgacccctggagagatggatcagaaaaaaagatccgggagtgtgtgatctgtatgatggactttgtttatggggacccaattcgatttctgccgtgcgtgcacgagtggtatcacctggactgtatagatgactggttgatgagatccttcacgtgcccctcctgcatggagccagttgatgcagcactgctttcatcctatgagactaattgagccagggtctctttatctgacttcaagtgaaccaccattttggtggtttttgatcttttgtcactgagccccaaagagccagggattaggaattaagatcgtgcacaaaagttatccttaaaaatcctggaaggctggcaaatgttgggggaaaaagtacgtggatattttataaacttagtgggaaaagtaggatggtatttttatgtaaagccttgacccaatgttttaaaaatataattgtatttaggatcttgttattgctccagtacatagggaattgtgtaaagtgttaacagcagcttgtattttgtttaaattgtgtgtattgaaggttagggaaaaagatagtagttatttttccctaaatgaaataactttcttctcttccccttccccaccccgaattcttttctgaagttgctggcatttgggtcaaggttttattaaaagctacattttataacactgggcacacaccaaaaaagtagttttaagcttgttttgcacagttcctttttttcccattgggaaatgggaattcattgccttaagtctttttaaatagtgtattattatcgttggggctggctctatgcttgaaaaccagtttatttataacctgttataagtgctatattctgtttgcagttagggaaatgcaggaattcaaagtgatctcctaggcttgtaaggcaaactgaggatgcactatcccttttctattaaaaaataggttaatgtgtccaggaacccactctattaagggtgggggttttaattattaccctttcctatgtggttttatctaattattttggttgttaatatgggtgataatgggaaagtcaagttaaatttttaaatattaagaattctgatttattgagattgaattatgcccaccacgtttatgtaaaaatgaaggtggcaccgtcggtgacgacctaatgaggaaatagttactcagttgtaaaaaattttggatttattctctttcttctggacctccttgcctcttgtcttggaaccataggcaaaagggatactggcatctctccattactgtaggtgctgagggttattggaggttattaccaaaacacatctccagtctctgtttcttgggaaagggtatcctattacatcctgctaggctgacgtgacaaaactaagcagggagaataaagataattgtattttatgttttgcacacaaacgcagaatttgtataaccatatgacttcagtagttgtgatctcaaaaaaagaaggaatttctcctttgtttcttgcagttaatgtaagaatactttaaatctctaagctttcctgaagtgttaggaggtagaggattggtctagttaaagatgtaggtaggaaatgttttatccattttagcatgtggtttattttttccatatggacctcaaagggtgacttattgggttcacccccaggnggtatttacaggctaaaaaaatccattccattagcaaaaggggaaaagtgggcctcaacccctaaccatccagaaggggtccccttattattattttatattgaggttgaatattgaactcctaacagttttcctacatacaaaaacacagtgtccatgaaggttattccataattgccattatagaggaatgtagtatgtccataagtactttgtaaagatttgacattcaacctgtagtatcccatatggttggcttaaaatttcccctatggagccccatgatgggaaagacctaaagatggatttggagaaaaattggaaggaatttaggtttatcagggtccggtaaaatggtacaaggaacctggctaaaattccggttaattaattaatatccacaccaagtacataaagcacaatttggaggaaacaactgaagttgtgcaatattttctgataattgttttttttattctggtgttttctacttaaacataatgtctgtgtcatcaagtattatagtcagacttttcttttttttctagattgttaaaattggcaaatgaacttttttaaaaatcatcttccatgttgcagttagtctttcttttcattacaagtctttcacagaagtttggtggtaatattgaaagaactagcattgggcagaatgtgtcttttttaggcactttatattctcaacatacaatgttaagaaccatcaattttgacttttactaagttgttaaataaagttataatacagctgtgaagggcaaaaaaaaaaaaa

SEQ ID NO: 137440 - DNA, 571 bp, Homo sapiens
  misc_feature (1)...(571): n = a,t,c or g
gggcccgaccgcggccgccccaccagccctgaactgcagcacggtgccagggcgggccaacacacgtccctgcctttgtaggcactgcctgccccacacggattccgggccacgccccagcccgacaatgtcgagaatattattattaatattattatgatttttgaaagaaccgaggcgatgccacgctttgctgctaccgccctgggctggactggaggtgggcatgccaccctcacacacacagntgggcatgcacccagngcctccccccccccatctggaagtgaaggcccagggactcctccaacagacaacggacggacggatgccgctggtgctcaggaagagctagtgccttaggtgggggaaggcaggactcacgactgagagagagaggagggggatatgaccaccctgccccatctgcaggagcctgaagatccagctcaagtgccatcctgccagtggcccccagactgtggggttgggacgcctggcctctgtgtcctagaagggaccctcctgtggtctttgtcttgatttttcttaataaacggtgctatccccg

SEQ ID NO: 137441 - DNA, 1734 bp, Homo sapiens
atggcagccccccgggaccaccttgctggaggggctggatgggactgttccagccccctcccaacccaccccatttgcacacagacccacggctcgctgctgcggctgcaccaggtgaccccggccgactcaggcgagtatgtgtgccatgtggcctcagtcctggtcaccatcgaagcctctgtcatccctggagcatctacaactctcactcccatccccactgctgcaggacccatcccacctgtcaggatcgagtcttcatcctccacagtggccgagggccagaccctggatctgagctgcgtggtggcagggcaggcccacgcccaggtcacatggtacaagcgtgggggcagcctccctgcccggcaccaggttcgtggctcccgcctgtacatcttccaggcctcacctgccgatgcgggacagtacgtctgccgggccagcaacggcatggaggcctccatcacggtcacagtaactgggacccagggggccaacttagcctaccctgccggcagcacccagcccatccgcatcgagccctcctcctcgcaagtggcggaagggcagaccctggatctgaactgcgtggtgcccgggcagtcccatgcccaggtcacgtggcacaagcgtgggggcagcctccctgtccggcaccagctggggccagaatgggtgccgtggagcacagacacagtaatggaggcctccttggggcccgatccattctccacacggcacacatattctccagaatcagctgagagtccgtacctgaaaggacaaccacttggatccgggcctgggcagtgcctgcagggctggtggccacgcagagctccaggactggcccagcccatctacatcgaggcctcctcttcacacgtgactgaagggcagactctggatctgaactgtgtggtgcccgggcaggcccatgcccaggtcacgtggtacaagcgcgggggcagcctccccgcccggcaccagacccatggctcccagctgcggctccacctcgtctcccctgccgactcaggcgagtatgtgtgtcgtgcagccagcggcccaggccctgagcaagaagcctccttcacagtcaccgtcccgcccagtgaggggtcttcctaccgccttaggagcccggtcatctccatcgacccgcccagcagcaccgtgcagcagggccaggatgccagcttcaagtgcctcatccatgacggggcagcccccatcagcctcgagtggaagacccggaaccaggagctggaggacaacgtccacatcagtcccaatggctccatcatcaccatcgtgggcacccggcccagcaaccacggtacctaccgctgcgtggcctccaatgcctacggtgtggcccagagtgtggtgaacctcagtgtgcacgggccccctacagtgtccgtgctccccgagggccccgtgtgggtgaaagtgggaaaggctgtcaccctggagtgtgtcagtgccggggagccccgctcctctgctcgttggacccggatcagcagcacccctgccaagttggagcagcggacatatgggctcatggacagccacgcggtgctgcagatttcatcagctaaaccatcagatgcgggcacttatgtgtgccttgctcagaatgcactaggcacagcacagaagcaggtggaggtgatcgtggacacgggcgccatggcccagggctcttcaggtcccagctga

SEQ ID NO: 137442 - DNA, 714 bp, Homo sapiens
atggccgaggaacccaactggggcagccccgcgcccaccatccactggtccaagctgcgttccccactgccctggcagcaccggctggaaggtgacacactcatcataccccgggtagcccagcaggactcgggccagtacatctgcaatgccactagccctgctgggcacgctgaggccaccatcatcctgcacgtggagagcccaccatatgccaccacggtcccagagcacgcttcggtgcaggcaggggagacggtgcagctccagtgcctggctcacgggacacccccactcaccttccagtggagccgcgtgggcagcagccttcctgggagggcgaccgccaggaacgagctgctgcactttgagcgtgcagcccctgaggactcaggccgctaccgctgccgggtcaccaacaaggtgggctcagccgaggcctttgcccagctgctcgtccaagcagggtccacgcccaccgtgcaggtcacgcctcagctagagaccaagagcattggggccagcgttgagttccactgtgctgtgcccagcgaccggggtacccagctccgttggttcaaggaagggggtcagctgctccgggtcacagcgtgcaggatggggtgctccggctcagggcagcccctgggccgcccgcccgtggctggcatgatggtctcggagcctgatgaggagtcccctctcagtaagtga

SEQ ID NO: 137443 - DNA, 1989 bp, Homo sapiens
atggggataggagaaggccccaccacctccgagggctgtcgtgagagtgttgagtactcacatcagaaatcagagctcccgctcagtggagacagccaggtgccagggcccataggctgcaactgtgacccccaaggcagcgtcagcagccagtgtgatgctgctggtcagtgccagtgcaaggcccaggtggaaggcctcacttgcagccactgccggccccaccacttccacctgagtgccagcaacccagacggctgcctgccctgcttctgtatgggcatcacccagcagtgcgccagctctgcctacacacgccacctgatctccacccactttgcccctgggacttccaagctttgccctgtgaacccacagcgaaacagccgcctgacaggagaattcactgtggaacccgtgcccgagggtgcccagctctcttttggcaactttgcccaactcggccatgagtccttctactggcagctgccggagacataccagggagacaagggggaggcgtactttgcgcggatgcgccgggctcaccagaaccgcacatccctctcagaggagcagttgcgggcagccgtgacagctgggaggatcccagagcccccagagggcagggactgggcacagcgggcatcacagttctctctctcctacgaaggcttctctctgcttcctggaagcctctattactggcagctgccccgggccttcctgggggacaaggtggcggcctacggtgggaagttgcgatacaccctctcctacacagcaggcccacagggcagcccactctctgaccccgatgtgcagatcacgggcaacaacatcatgctagtggcctcccagccagcgctgcagggccctgagaggaggagctacgagatcatgttccgagaggaattctggcgccggcccgatgggcagccggccacacgcgagcacctcctgatggcactggccgacctggatgagctcctgatccgggccacgttctcctccgtgccgctggcggccagcatcagcgcagtcagcctggaggtcgcccagccggggccctcaaacagaccccgcgccctcgaggtggaggagtgccgctgcccgccaggctacatcggtctgtcctgccaggactgtgcccccggctacacgcgcaccgggagtgggctctacctcggccactgcgagctatgtgaatgcaatggccactcagacctgtgccacccagagactggggcctgctcgcaatgccagcacaacgccgcaggggagttctgcgagctttgtgcccctggctactacggagatgccacagccgggacgcctgaggactgccagccctgtgcctgcccactgaccaacccagagaacatgttttcccgcacctgtgagagcctgggagccggcgggtaccgctgcacggcctgcgaacccggctacactggccagtactgtgagcagtgtggcccaggttacgtgggtaaccccagtgtgcaagggggccagtgcctgccagagagctccgagctccacttccccagcgtccagccctcggatgctggggtctacatttgcacctgccgtaatctccaccaatccaataccagccgggcagagctgctggtcactgaggctccaagcaagcccatcacagtgactgtggaggagcagcggagccagagcgtgcgccccggagctgacgtcaccttcatctgcacagccaaaagcaagtccccagcctataccctggtgtggacccgcctgcacaacgggaaactgcccacccgagccatggatttcaatggcatcctgaccattcgcaacgtccagctgagtgatgcaggcacctacgtgtgcaccggctccaacatgtttgccatggaccagggcacagccactctacatgtgcagggctctgcagaagcaggggagagaagcatgtacagtatctcggtcctcctgaagtacacgtcctag

SEQ ID NO: 137444 - DNA, 14586 bp, Homo sapiens
  misc_feature (1)...(14586): n = a,t,c or g
ggccggcgagcgggcggctgcgggcggcgcggagcgggcggcgcggagcgagcgagcgagagagcggcgcgggccgggccatggggtggcgggcgccgggcgcgctgctgctggcgctgctgctgcacgggcggctgctggcggtgacccatgggctgagggcatacgatggcttgtctctgcctgaggacatagagaccgtcacagcaagccaaatgcgctggacacattcgtacctttctgatgatgagtacatgctggctgacagcatctcaggagacgacctgggcagtggggacctgggcagcggggacttccagatggtttatttccgagccctggtgaatttcactcgctccatcgagtacagccctcagctggaggatgcaggctccagagagtttcgagaggtgtccgaggctgtggtagacacgctggagtcggagtacttgaaaattcccggagaccaggttgtcagtgtggtgttcatcaaggagctggatggctgggtttttgtggagctcgatgtgggctcggaagggaatgcggatggtgctcagattcaggagatgctgctcagggtcatctccagcggctctgtggcctcctacgtcacctctccccagggattccagttccgacgcctgggcacagtgccccagttcccaagagcctgcacggaggccgagtttgcctgccacagctacaatgagtgtgtggccctggagtatcgctgtgaccggcggcccgactgcagggacatgtctgatgagctcaattgtgaggagccagtcctgggtatcagccccacattctctctccttgtggagacgacatctttaccgccccggccagagacaaccatcatgcgacagccaccagtcacccacgctcctcagcccctgcttcccggttccgtcaggcccctgccctgtgggccccaggaggccgcatgccgcaatgggcactgcatccccagagactacctctgcgacggacaggaggactgcgaggacggcagcgatgagctagactgtggccccccgccaccctgtgagcccaacgagttcccctgcgggaatggacattgtgccctcaagctgtggcgctgcgatggtgactttgactgtgaggaccgaactgatgaagccaactgccccaccaagcgtcctgaggaagtgtgcgggcccacacagttccgatgcgtctctaccaacatgtgcatcccagccagcttccactgtgacgaggagagcgactgtcctgaccggagcgacgagtttggctgcatgcccccccaggtggtgacacctccccgggagtccatccaggcttcccggggccagacagtgaccttcacctgcgtggccattggcgtccccgccccctttctcatcaattggaggctcaactggggccacatcccctctcagcccagggtgacagtgaccagcgagggtggccgtggcacactgatcatccgtgatgtgaaggagtcagaccagggtgcctacacctgtgaggccatgaacgcccggggcatggtgtttggcattcctgacggtgtccttgagctcgtcccacaacgagcaggcccctgccctgacggccacttctacctggagcacagcgccgcctgcctgccctgcttctgctttggcatcaccagcgtgtgccagagcacccgccgcttccgggaccagatcaggctgcgctttgaccaacccgatgacttcaagggtgcgttggcgggcgggtgtgaatgtgacaatgcctgcgcagcccggcacgccacccctctcctccacgcagctgcagatcgacccatccctgcacgagttccagctagtcgacctgtcccgccgcttcctcgtccacgactccttctgggctctgcctgaacagttcctgggcaacaaggtgaactcctgggggggttggggtgcgggacaacgtgcgctaccacttggcccgtggcatgctgaagccactgcatcgcccggacgtggtcctcgtgggtgccggataccgcctcctctcccgaggccacacacccacccaacctggtgctctgaaccagcgccaggtccagttctctgaggagcactgggtccatgagtctggccggccggtgcagcgcgcggagctgctgcaggtgctgcagagcctggaggccgagctcatccagaccgtgtacaacaccaagatggctagcgtgggacttagcgacatcgccatggataccaccgtcacccatgccaccagccatggccgtgcccacagtgtggaggagtgcagatgccccattggctattctggcttgtcctgcgagagctgtgatgcccacttcactcgggtgcctggtgggccctacctgggcacctgctctggttgcaattgcaatggccatgccagctcctgtgaccctgtgtatggccactgcctgaattgccagcacaacacggaggggccacagtgcaacaagtgcaaggctggcttctttggggacgccatgaaggccacggccacttcctgccggccctgcccttgcccatacatcgatgcctcccgcagattctcagacacttgcttcctgggacacggatggccaagccacatgtgacgcctgtgccccagggtaacactgggccgccgctgtgagagctgtgcccccggataacgagggcaaccccatccagcccggcgggaagtgcaggcccgtcaaccaggagattgtgcgctgtgacgagcgtggcagcatggggacctccggggaggcctgccgctgtaagaacaatgtggtggggcgcttgtgcaatgaatgtgctgacggctctttccacctgagtacccgaaaccccgatggctgcctcaagtgcttctgcatgggtgtcagtcgccactgcaccagctcttcatggagccgtgcccagttgcatggggcctctgaggagcctggtcacttcagcctgaccaacgccgcaagcacccacaccaccaacgagggcatcttctcccccacgcccggggaactgggattctcctccttccacagactcttatctggaccctacttctggagcctcccttcacgcttcctgggggacaaggtgacctcctatggaggagagctgcgcttcacagtgacccagaggtcccagccgggctccacacccctgcacgggcagccgttggtggtgctgcaaggtaacaacatcatcctagagcaccatgtggcccaggagcccagccccggccagcccagcaccttcattgtgccttttccgggaagcaagcattggcagcggcccgatgggcagccagccacacgggagcacctgctgatggcactggcaggcatcgacaccctcctgatccgagcatcctacgcccagcagcccgctgagagcagggtctctggcatcagcatggacgtggctgtgcccgaggaaaccggccaggaccccgcgctggaagtggaacagtgctcctgcccacccgggtaccgtgggccgtcctgccaggactgtgacacaggctacacacgcacgcccagtggcctctacctgggtacctgtgaacgctgcagctgccatggccactcagaggcctgcgagccagaaacaggtgcctgccagggctgccagcatcacacggagggccctcggtgtgagcagtgccagccaggatactacggggacgcccagcgggggacaccacaggactgccagctgtgcccctgctacggagaccctgctgccggccaggctgcccacacttgttttctggacacagacggccaccccacctgtgatgcgtgctccccaggccacagtgggcgtcactgtgagaggtgcgcccctggctactatggcaaccccagccagggccagccatgccagagagacagccaggtgccagggcccataggctgcaactgtgacccccaaggcagcgtcagcagccagtgtgatgctgctggtcagtgccagtgcaaggcccaggtagaaggcctcacttgcagccactgccggccccaccacttccacctgagtgccagcaacccagacggctgcctgccctgcttctgtatgggcatcacccagcagtgcgccagctctgcctacacacgccacctgatctccacccactttgcccctggggacttccaaggctttgccctggtgaacccacagcgaaacagccgcctgacaggagaattcactgtggaacccgtgcccgagggtgcccagctctcttttggcaactttgcccaactcggccatgagtccttctactggcagctgccggagacataccagggaggcaaggtggcaggctacggtgggaagttgcgatacaccctctcctacacagcaggcccacagggcagcccactctcggaccccgatgtgcagatcacgggcaacaacatcatgctagtggcctcccagccagcgctgcagggcccagagaggaggagctacgagatcatgttccgagaggaattctggcgccggcccgatgggcagccggccacacgcgagcacctcctgatggcactggccgacctggatgagctcctgatccgggccacgttctcctccgtgccgctggtggccagcatcagcgcagtcagcctggaggtcgcccagccggggccctcaaacagaccccgcgccctcgaggtggaggagtgccgctgcccgccaggctacatcggtctgtcctgccaggactgtgcccccggctacacgcgcaccgggagtgggctctacctcggccactgcgagctatgtgaatgcaatggccactcagacctgtgccacccagagactggggcctgctcgcaatgccagcacaacgccgcaggggagttctgcgagctttgtgcccctggctactacggagatgccacagccgggacgcctgaggactgccagccctgtgcctgcccactgaccaacccagagaacatgttttcccgcacctgtgagagcctgggagccggcgggtaccgctgcacggcctgcgaacccggctacactggccagtactgtgagcagtgtggcccaggttacgtgggtaaccccagtgtgcaagggggccagtgcctgccagagacaaaccaagccccactggtggtcgaggtccatcctgctcgaagcatagtgccccaaggtggctcccactccctgcggtgtcaggtcagtgggaggggaccccactacttctattggtcccgtgaggatgggcggcctgtgcccagcggcacccagcagcgacatcaaggctccgagctccacttccccagcgtccagccctcggatgctggggtctacatttgcacctgccgtaatctccaccgatccaataccagccgggcagagctgctggtcactgaggctccaagcaagcccatcacagtgactgtggaggagcagcggagccagagcgtgcgccccggagctgacgtcaccttcatctgcacagccaaaagcaagtccccagcctataccctggtgtggacccgcctgcacaacgggaaactgcccacccgagccatggatttcaatggcatcctgaccattcgcaacgtccagctgagtgatgcaggcacctacgtgtgcaccggctccaacatgtttgccatggaccagggcacagccactctacatgtgcaggcctcgggcaccttgtccgcccccgtggtctccatccatccgccacagctcacagtgcagcccgggcaactggcggagttccgctgcagcgccacagggagccccacgcccaccctcgagtggacagggggccccggcggccagctccctgcgaaggcacaaatccacggcggcatcctgcgcctgccagctgtcgagcccacggatcaggcccagtacttgtgccgagcccacagcagcgctgggcagcaggtggccagggctgtgctccacgtgcatgggggcggtgggcccagagtccaagtgagcccagagaggacccaggtccacgcaggccgcaccgtcaggctgtactgcagggctgcaggcgtgcctagcgccaccatcacctggaggaaggaagggggcagcctcccaccacaggcccggtcagagcgcacagacatcgcgacactgctcatcccagccatcacgactgctgacgccggcttctacctctgcgtggccaccagccctgcaggcactgcccaggcccggatccaagtggttgtcctttcagcctcagatgccagccaaccgccggtcaagattgagtcctcatcgccttctgtgacagaagggcaaacactcgacctcaactgtgtggtggcagggtcagcccatgcccaggtcacctggtacaggcgagggggtagcctgcctcaccacacccaggtgcacggctcccgtctgcggctcccccaggtctcaccagctgattctggagagtatgtgtgccgtgtggagaatggatcgggccccaaggaggcctccattactgtgtctgtgctccacggcacccattctggccccagctacaccccagtgcccggcagcacccggcccatccgcatcgagccctcctcctcacacgtggcggaagggcagaccctggatctgaactgcgtggtgcccgggcaggcccacgcccaggtcacgtggcacaagcgtgggggcagcctccctgcccggcaccagacccacggctcgctgctgcggctgcaccaggtgaccccggccgactcaggcgagtatgtgtgccatgtggtgggcacctccggccccctagaggcctcagtcctggtcaccatcgaagcctctgtcatccctggacccatcccacctgtcaggatcgagtcttcatcctccacagtggccgagggccagaccctggatctgagctgcgtggtggcagggcaggcccacgcccaggtcacatggtacaagcgtgggggcagcctccctgcccggcaccaggttcgtggctcccgcctgtacatcttccaggcctcacctgccgatgcgggacagtacgtctgccgggccagcaacggcatggaggcctccatcacggtcacagtaactgggacccagggggccaacttagcctaccctgccggcagcacccagcccatccgcatcgagccctcctcctcgcaagtggcggaagggcagaccctggatctgaactgcgtggtgcccgggcagtcccatgcccaggtcacgtggcacaagcgtgggggcagcctccctgtccggcaccagacccacggctccctgctgagactctaccaagcgtcccccgccgactcgggcgagtacgtgtgccgagtgttgggcagctccgtgcctctagaggcctctgtcctggtcaccattgagcctgcgggctcagtgcctgcacttggggtcacccccacggtccggatcgagtcatcgtcttcgcaagtggcagaggggcagaccctggacctgaactgcctcgttgctggtcaggcccatgcccaggtcacgtggcacaagcgcgggggcagcctcccggcccggcaccaggtgcatggctcgaggctacgcctgctccaggtgaccccagctgattcaggggagtacgtgtgccgtgtggtcggcagctcaggtacccaggaagcctcagtccttgtcaccatccagcagcgccttagtggctcccactcccagggtgtggcgtaccccgtccgcatcgagtcctcctcagcctccctggccaatggacacaccctggacctcaactgcctggttgccagccaggctccccacaccatcacctggtataagcgtggaggcagcttacccagccggcaccagatcgtgggctcccggctgcggatccctcaggtgactccggcagactcgggcgagtacgtgtgtcacgtcagtaacggtgcaggctcccgggagacctcgctcatcgtcaccatccagggcagcggttcctcccacgtgcccagagtctccccaccgatcaggatcgagtcgtcttcccccacggtggtggaagggcagaccttggatctgaactgcgtggtcgccaggcagccccaggctatcatcacatggtacaagcgtgggggcagccttccctcccgacaccagacccatggctcccacctgcggttgcaccaaatgtctgtggctgactcgggcgagtatgtgtgccgggccaacaacaacatcgatgccctggaggcctcaatcgtcatctccgtctcccctagcgccggcagcccctccgcccctggcagctccatgcccatcagaattgagtcatcctcctcacacgtggccgaaggggagaccctggatctgaactgcgtggtccccgggcaggcccatgcccaggtcacttggcacaagcgtgggggcagcctccccagttaccatcagacccgcggctcacggctgcggctgcaccatgtgtccccggccgactcgggtgaatacgtgtgccgggtgatgggcagctctggccccctggaggcctcagtcctcgtcaccatcgaagcctctggctcaagtgctgtccacgtccccgccccaggtggagccccacccatccgcatcgagccctcctcctcccgagtggcagaagggcagaccctggatctgaagtgcgtggtgcccgggcaggcccacgcccaggtcacgtggcacaagcgtggaggaaacctccctgcccggcaccaggtccacggcccactgctgaggctgaaccaggtgtccccggctgactctggcgagtactcgtgccaagtgaccggaagctcaggcaccctggaggcatctgtcctggtcacaattgagccctccagcccaggacccattcctgctccaggactggcccagcccatctacatcgaggcctcctcttcacacgtgactgaagggcagactctggatctgaactgtgtggtgcccgggcaggcccatgcccaggtcacgtggtacaagcgcgggggcagcctccccgcccggcaccagacccatggctcccagctgcggctccaccacgtctcccctgccgactcaggcgagtatgtgtgtcgtgcagccggcggcccaggccctgagcaagaagcctccttcacagtcaccgtcccgcccagtgaggggtcttcctaccgccttaggagcccggtcatctcgatcgacccgcccagcagcaccgtgcagcagggccaggatgccagcttcaagtgcctcatccatgacggggcagcccccatcagcctcgagtggaagacccggaaccaggagctggaggacaacgtccacatcagtcccaatggctccatcatcaccatcgtgggcacccggcccagcaaccacggtacctaccgctgcgtggcctccaatgcctacggtgtggcccagagtgtggtgaacctcagtgtgcacgggccccctacagtgtccgtgctccccgagggccccgtgtgggtgaaagtgggaaaggccgtcaccctggagtgtgtcagtgccggggagccccgctcctctgctcgttggacccggatcagcagcacccctgccaagttggagcagcggacatatgggctcatggacagccacacggtgctgcagatttcatcagctaaaccatcagatgcgggcacttatgtgtgccttgctcagaatgcactaggcacagcacagaagcaggtggaggtgatcgtggacacgggcgccatggccccaggggcccctcaggtccaagctgaagaagctgagctgactgtggaggctggacacacggccaccttgcgctgctcagccacaggcagccccgcgcgcaccatccactggtccaagctgcgttccccactgccctggcagcaccggctggaaggtgacacactcatcataccccgggtagcccagcaggactcgggccagtacatctgcaatgccactagccctgccgggcacgctgaggccaccatcatcctgcacgtggagagcccaccatatgccaccacggtcccagagcacgcttcggtgcaggcaggggagacggtgcagctccagtgcctggctcacgggacacccccactcaccttccagtggagccgcgtgggcagcagccttcctgggagggcgaccgccaggaacgagctgctgcactttgagcgtgcagcccctgaggactcaggccgctaccgctgccgggtcaccaacaaggtgggctcagccgaggcctttgcccagctgctcgtccaaggccctcccggctctctccctgccacctccatcccagcagggtccacgcccaccgtgcaggtcacgcctcagctagagaccaagagcattggggccagcgttgagttccattgtgctgtgcccagcgaccggggtacccagctccgttggttcaaggaagggggtcagctgcctcccggtcacagcgtgcaggatggggtgctccgaatccagaacttggaccagagctgccaagggacgtatatatgccaggcccatggaccttgggggaaggcccaggccagtgcccagctggttatccaagccctgccctcggtgctcatcaacatccggacctctgtgcagaccgtggtggttggccacgccgtggagttcgaatgcctggcactgggtgaccccaagcctcaggtgacatggagcaaagttggagggcacctgcggccaggcattgtgcagagcggaggtgtcgtcaggatcgcccacgtagagctggctgatgcgggacagtatcgctgcactgccaccaacgcagctggcaccacacaatcccacgtcctgctgcttgtgcaagccttgccccagatctcaatgccccaagaagtccgtgtgcctgctggttctgcagctgtcttcccctgcatagcctcaggctaccccactcctgacatcagctggagcaagctggatggcagcctgccacctgacagccgcctggagaacaacatgctgatgctgccctcagtccaaccccaggacgcaggtacctacgtctgcaccgccactaaccgccagggcaaggtcaaagcctttgcccacctgcaggtgccagagcgggtggtgccctacttcacgcagaccccctactccttcctaccgctgcccaccatcaaggatgcctacaggaagttcgagatcaagatcaccttccggcctgactcagccgatgggatgctgctgtacaatgggcagaagcgagtcccagggagccccaccaacctggccaaccggcagcccgacttcatctccttcggcctcgtggggggaaggcccgagttccggttcgatgcaggctcaggcatggccaccatccgccatcccacaccactggccctgggccatttccacaccgtgaccctgctgcgcagcctcacccagggctccctgattgtgggtgacctggccccggtcaacgggacctcccagggcaagttccagggcctggatctgaacgaggaactctacctgggtggctatcctgactatggtgccatccccaaggcggggctgagcagcggcttcataggctgtgtccgggagctgcgcatccagggcgaggagatcgtcttccatgacctcaacctcacggcgcacggcatctcccactgccccacctgtcgggaccggccctgccagaatggcggtcagtgccatgactctgagagcagcagctatgtgtgcgtctgcccagctggcttcaccgggagccgctgtgagcactcgcaggccctgcactgccatccagaggcctgtgggcccgacgccacctgtgtgaaccggcctgacggtcgaggctacacctgccgctgccacctgggccgctcggggttgcggtgtgaggaaggtgtgacagtgaccaccccctcgctgtcgggtgctggctcctacctggcactgcccgccctcaccaacacacaccacgagctacgcctggacgtggagttcaagccactcgcccctgacggggtcctgctgttcagcggggggaagagcgggcctgtggaggacttcgtgtccctggcgatggtgggcggccacctggagttccgctatgagttggggtcagggctggccgttctgcggacggccgagccgctggccctgggccgctggcaccgtgtgtctgcagagcgtctcaacaaggacggcagcctgcgggtgaatggtggacgccctgtgctgcgctcctcgcccggcaagagccagggcctcaacctgcacaccctgctctacctggggggtgtggagccttccgtgccactgtcccccggccaccaacatgggcgctcacttccgcggctgtgtgggcgaggtgtcagtgaatggcaaacggctggacctcacctacagtttcctaggcagccagggcatcgggcaatgctatgatagctccccatgtgagcgccagccttgccaacatggtgccacgtgcatgcccgctggcgagtatgagttccagtgcctgtgtcgagatggattcaaaggagacctgtgtgagcacgaggagaacccctgccagctccgtgaaccctgtctgcatgggggcacctgccagggcacccgctgcctctgcctccctggcttctctggcccacgctgccaacaaggctctggacatggcatagcagagtccgactggcatcttgaaggcagcgggggcaatgatgcccctgggcagtacggagcctatttccacgatgatggcttcctcgccttccctggccatgtcttctccaggagcctgcccgaggtgcccgagaccatcgagctggaggttcggaccagcacagccagtggcctcctgctctggcagggtgtggaggtgggagaggccggccaaggcaaggacttcatcagcctcgggcttcaagacgggcaccttgtcttcagctcatacttcttgggcctggatgactgcaggtaccagcttgggtagtggggaggcccgcctggtctctgaggacccattcaatgacggcgagtggcaccgggtgacagcactgcgggagggccgcagaggttccatccaagtcgacggtgaggagctggtcagcggccggtccccaggtcccaacgtggcagttaacgcccaagggcagcgtttacatcggcggagcccctgacgtggccacgctgaccgggggcagattctcctcgggcatcacaggctgtgtcaagaacctggtgctgcactcggcccgacccggcgccccgcccccacagcccctggacctgcagcaccgcgcccaggccggggccaacacacgcccctgccccttgtaggcacctgcctgccccacacggactcccgggccacgccccagcccgacaatgtcgagtatattattattaatattattatgaatttttgtaagaaaccgaggcgatgccacgctttgctgctaccgccctgggctggactggaggtgggcatgccaccctcacacacacagctgggcaaagccacaaggctggccagcaaggcgaggttggatgggagtgggcacctcacaaagtcaccaggacttggggtcaggaacagtggctgggtgggcccagaactgcccccactgtccccctacccaccgatggagcccccagatagagctgggtggcctgttttctgcagcccttgggcagttctcaatccttaggaggagccaacctcggcttgtggggttggtgccccacagctacctgagacgggcatcgcaggagtctctgccacccactcaggattgggaattgtctttagtgccggctgtggagcaaaaggcagctcacccctgggcaggcggtccccatccccaccagctcgtttttcagcacccccacccacctccacccagcccctggcacctcctctggcagactccccctcctaccacgttcttcctggcctgcattcccaccccctcctgccagcacacagcctggggtccctccctcaggggcatgtacgggaaggccccacccccaactcttaccaggagctgctacaggcaggagcccagcactgataggggcnccgcccaccgggccccgcccaacccccagggccacatcccccacccattttggaaagtgaaggcccagggactccctccaacagacaacggacggacggatgccgctggtgctcaggaagagctagtgccttaggtgggggaaggcagggactcaccgactgagagaaagaggagggggatatgaccacccctgccccatctgcaggagcctgaagatccagctcaagtgccatcctgccagtggcccccagactgtggggttgggacgcctggcctctgtgtcctagaagggaccctcctgtggtctttgtcttgatttttcttaaataaacggtgctatccccgccagaaaatagaaaaaacnnnnnnnnnnnnnnngggggggccccttaaaaaaaactctgttttggatcgggggttataaagaaataannnnnnnnnnatggcccccaaaaataaatcccggggccggggtttaacaacgtggggacgggaaaaacccgggggtaccccaattaaat

SEQ ID NO: 137445 - DNA, 1362 bp, Homo sapiens
gagcatctggaaaatgagtcttctagaagaccaaggctgacactacctggtttttttcctgcccagcctcagaaggtatacagtatcactttcaccaaattccactagttaccaactactggtccctgggcccagctacaggctctgccaattagcagcgcggctagcctctatgcaggcgccagggggctctggttcccggatgtccgtgtcccactccaccagcctccgggacggcataagttccgggggcctggcgcggggatggccaggggtctgggaggaatgggaggcatccagaacaagaaggaaaccacgcaaagcctgaatgacagcctggcggtcagagtaaggagtctggagactgagaaccggaagctcgaaagcaaaatccgggagcacttggagaagaagggaccccaggtcagagactggagccattacttcaagaccatcgaggacctgagggctcagatcttcgcaaatactgtggacaatgtccgcatctttctgcagatcgacaatgcccgtcttgctgctgatgactttagagtcaagtatgagacagagctggccatgcgccagtctgtggagagcgacatctatgggctccacaaggtcattgatgacaccaatgtcatcaatggctgcagcttcttcatgaagaagaaccacggagaggaagtaaaatgcctacaagcccagattgccagctctgggttgaccatggaggtagatgcccccaaatctcaggacctcgccaagatcacagcagacatctcgacccgatatgacgagctggctcggaagaaccgagaagagctggacaagtactggtctcagccgattgaggagagcaccacagaggtcaccatgcagtccgccaaggttagagctgctgagatgacattcatggagctgagacgtacagtccagtccttggagatcgacctggacttgatgagaaatccgaaggccagcttggagaacagcctgagggaggtggaggcctgttatgccctgcagatggagcagctcaacctggatcctggatcctgctgcacctggagtcagagctaacacagacccgggcagagggacagcttccaagcccagaagtacaaggccctgctgaacatcaagaacaagctggaggctgagatcgccacctactgcctcctgctggaagatggcaaggacttcaatcttggtgataccctggacagcagcaaccccatgcaaaccatccaaaagaccaccaccagccggatagtggatggcaaagtggtgtctgagaccaacgacaccaaagtttggagacattaagccagcagaagcagagtaccctttggggaccaggag

SEQ ID NO: 137446 - DNA, 774 bp, Homo sapiens
atggcctccaaatgccagtctccactcctccctcaaaagaagaaaccaagaccacttcctgctctgggaccggagaagacatcagcctctgcaggcttgccgaagaagggagaaaaagaacagcaagaaacaattgaacacattcatgaagtacaaaatgaaatggacagacttaatgaacaagccaatttttgggtaacaatatttgtcaatcatccagaagtgtctgcactgcctggggaggaggacgaagaggcactgcattatttgaccagagttgaaatgacagactttgatgatattaaatcaggttacagaatagatttttattttgatgaaaatccttactttgaaaataacattctcgccaaagaatttcatctgaatgagagtggtgatccatcttcaaagcccaccgaaatcaaatggaaatatggaaaggatttgatgaaacgttcaagtcaaacgcagaataaagctcacaggaagaggcagcatgaggaaccagagagcttctttacctggtttactgaccattctgatgttggtgctgatgagttaggagaggtcatcaaagatatttggccaaatccattacagtactacttggttcctgatatggataatgaagaaggagaaggagaagaagatgacgatgatgatgaagaggaggaaggattagaagatattgatgaagaaggggatgaggatgaaggtgaagaagatgaagatgaaggggagaaaggagaggaggatgaaggagaaaatgactaa

SEQ ID NO: 137447 - DNA, 1659 bp, Homo sapiens
atgttttcacatggaaattttgaaaacgcaagtgactctatgaggttccagattgccaggtgtggagggagaggcgtggacgggaaccggggctgcagggtggtggagctcgtgggccagcgcgagttccgggtgggcacgggctccgcgggccccacactcagatcggctgaccggccagcaccaccagccccaggcagtgaggggcttagcacccgggccagcagctacggagagtgtgctgggtcccccagcactgctgtcctgcctgcgccgcacttgaattctcgcggggcctcagccgcctccccacggggcagggctcgggacctgcagcctgccatgcccgagccccccgcgacagctcaagtgttatccagcccagtgccctcttggtacctggatgctgggttcttgtccagcatccaggaagaatcaggtcacacaggcaaattgaaggatagtgaatgcaagagattttattgccagatggaggttataattcatgatgttcagagaaacctgagtggggagggggttggtgcagaagagacagtagatcatggagagaaacacattcacccagacctgttcccatgtgaagtctgcttcaagttttttgtcagagcatccaactcttctcttgcaattgttcacattggcaaacacatcacactggcaaacgctgtgtcaatctcagagcatcctcagatgagcgaggagactcatagtcttgttcttggacttccccagcagcatggcccccaaacgccagtctccactcctgcctcaaaagaagaaaccaagaccacctcctgctctgggactggaggttcttggacttccctagcagcatggcctccaaatgccagtctccactcctccctcaaaagaagaaaccaagaccacttcctgctctgggaccggagaagacatcagcctctgcaggcttgccgaagaagggagaaaaagaacagcaagaaacaattgaacacattcatgaagtacaaaatgaaatggacagacttaatgaacaagccaaagaggtcagaattgatctccaaaatcccagatttttgggtaacaatatttgtcaatcatccagaagtgtctgcactgcctggggaggaggacgaagaggcactgcattatttgaccagagttgaaatgacagactttgatgatattaaatcaggttacagaatagatttttattttgatgaaaatccttactttgaaaataacattctcgccaaagaatttcatctgaatgagagtggtgatccatcttcaaagtccaccgaaatcaaatggaaatatggaaaggatttgatgaaacgttcaagtcaaacgcagaataaagctcacaggaagaggcagcatgaggaaccagagagcttctttacctggtttactgaccattctgatgttggtgctgatgagttaggagaggtcatcaaagatatttggccaaatccattacagtactacttggttcctgatatggataatgaagaaggagaaggagaagaagatgacgatgatgatgaagaggaggaaggattagaagatattgatgaagaaggggatgaggatgaaggtgaagaagatgaagatgaaggggagaaaggagaggaggatgaaggagaaaatgactaa

SEQ ID NO: 137448 - DNA, 1416 bp, Homo sapiens
gggcgaggagactcgtggtctggttctgggacttccctaacagcatggcccctaaacgccagtctccactcccgcctcaaaagaagaaaccaagaccacctcctgctctgggaccggaggagacatcggcctctgcaggcttgccgaagaagggagaaaaagaacagcaagaagcgattgaacacattgatgaagtacaaaatgaaatagacagacttaatgaacaagccagtgaggagattttgaaagtagaacagaaatataacaaactccgccaaccattttttcagaagaggtcaaaatgtgagcgccggaatcccaaatttttgggtaacaacatttgtcaacccatccacaagtgtcttgcactgcttggggaggaagatgaagaggcactgcaattatttggaccagagttgaagtgacagaatttgaagatattaaatcaggttacagaatagatttttattttgatgaaaatccttactttgaaaataaagttctctccaaagaatttcatctgaatgaggagtggtgatccatcttcgaagtccaccgaaatcaaatggaaatctggaaaggatttgacgaaacgttcgagtcaaacgcagaataaagccagcaggaagaggcagcatgaggaaccagagagcttctttacctggtttactgaccattctgatgcaggtgctgatgagttaggagaggtcatcaaagatgatatttggccaaacccattacagtactacttggttcccgatatggatgatgaagaaggagaaggagaagaagatgatgatgatgatgaagaggaggaaggattagaagatattgacgaagaaggggatgaggatgaaggtgaagaagatgaagatgatgatgaaggggaggaaggagaggaggatgaaggagaagatgactaaatagaacactgatggattccaaccttcctttttttaaattttctccagtccctgggagcaagttgcagtccttttttttttttttttttttttccctcttgtgctcagtcgccctgttcttgagtctcttttctctactccatggttctcaatttatttggggggaaataccttgagcagaatacaatgggaaaagagtctctacccctttctgttcgaagttcatttttatcccttcctgtctgaacaaaaactgtatggaatcaacaccaccgagctctgtgggaaaaaagaaaaacctgctcccttcgctctgctggaagctggagggtgctaggcccctgtgtagtagtgcatagaattctagcttttttcctcctttctctgtatattgggctcagagagtacactgtgtctctatgtgaatatggacagttagcatttaccaacatgtatctgtctactttctcttgtttaaaaaaaaaaaaaaaaa

SEQ ID NO: 137449 - DNA, 1659 bp, Homo sapiens; identical to SEQ ID NO: 137447

SEQ ID NO: 137450 - DNA, 1418 bp, Homo sapiens
gggcgaggagactcgtggtctggttctgggacttccctaacagcatggcccctaaacgccagtctccactcccgcctcaaaagaagaaaccaagaccacctcctgctctgggaccggaggagacatcggcctctgcaggcttgccgaagaagggagaaaaagaacagcaacgaagcgattgaacacattgatgaagtacaaaatgaaatagacagacttaatgaacaagccagtgaggagattttgaaagtagaacagaaatataacaaactctcgccaaccattttttcagaagaggtcaaaatgtgagcgccggaatcccaaatttttgggtaacaacatttgtcaacccatccacaagtgtcttgcactgcttggggaggaagatgaagaggcactgcaattatttggaccagagttgaagtgacagaatttgaagatattaaatcaggttacagaatagatttttattttgatgaaaatccttactttgaaaataaagttctctccaaagaatttcatctgaatgaggagtggtgatccatcttcgaagtccaccgaaatcaaatggaaatctggaaaggatttgacgaaacgttcgagtcaaacgcagaataaagccagcaggaagaggcagcatgaggaaccagagagcttctttacctggtttactgaccattctgatgcaggtgctgatgagttaggagaggtcatcaaagatgatatttggccaaacccattacagtactacttggttcccgatatggatgatgaagaaggagaaggagaagaagatgatgatgatgatgaagaggaggaaggattagaagatattgacgaagaaggggatgaggatgaaggtgaagaagatgaagatgatgatgaaggggaggaaggagaggaggatgaaggagaagatgactaaatagaacactgatggattccaaccttcctttttttaaattttctccagtccctgggagcaagttgcagtccttttttttttttttttttttttccctcttgtgctcagtcgccctgttcttgagtctcttttctctactccatggttctcaatttatttggggggaaataccttgagcagaatacaatgggaaaagagtctctacccctttctgttcgaagttcatttttatcccttcctgtctgaacaaaaactgtatggaatcaacaccaccgagctctgtgggaaaaaagaaaaacctgctcccttcgctctgctggaagctggagggtgctaggcccctgtgtagtagtgcatagaattctagcttttttcctcctttctctgtatattgggctcagagagtacactgtgtctctatgtgaatatggacagttagcatttaccaacatgtatctgtctactttctcttgtttaaaaaaaaaaaaaaaaa

SEQ ID NO: 137451 - DNA, 2031 bp, Homo sapiens
  misc_feature (1)...(2031): n = a,t,c or g
atgggaaagcagaagggagggggaccccaggcctgggaggccgagggactgggtagggagtggatgagaatgccgcaggaagggaagggctctcagaggaagtcaacccagaaacagacaaagagggagatcgacgcgtacatcgtgcaggccaaggagcgcagctacgagaccgtgctcagcttcgggaagcggggcctcaacattgccgcctcccctgctgtgcaggctgccaccaaggtgctctgggcccccagccctccagcagcccccatcccacccctaaggccctttgggctcattcagctcctctgccagggagcccagagatggcagccggggagcagggaggtcaaggggcggctgtgccaggcaaggctggcggagacttcttccattgcagggaacctgcgcgttcaatcttatgaacggcccgtggaccctggcgttaccatggaccccctgttacctgggaggaccatagtgttcgcagccggagaccacaccctatggcgagcacctgtgagcagctgtgcacagaggagtggggtctggagcctggataacatgggtgtgaattctggctcagtccctttccatggggtgagaattcaagcaagtcagctgatttccctgagcttcaatttctccttctgtgaagcagatttaaaaaccccacttcatgggttcctgattctgccagccgggcccaaggaagaagtaactgtcaagaaggagaagcgtgaaagggacagagaccgacaacgagaggggcatggacgagggcgaggccgtccagaagtgatccagtctcactccatctttgagcagggcgccagctgaaatgatgaagaaaaaagggaactgggataagacagtggatgtgtcagacatgggaccttctcatatcatcaacatcaaaaaagagaagagagagacagacgaagaaactaaacagatcttgcgtatgctggagaaagacgatgtggatcaccacgccctgagtgagcacctggttaccactgccaccttctccatcggctccactggcctcgtggtgtatgactaccagcaggtggagtgcgggggccatgtacgggcagacttgaaaacccaagacctttactcccacgcccagtttggagacaacaactaccctgggggtgtggactggtaccgggccgggggcctgcaggacagcgacaccgaggatgagtgttggtcagatactgaggcagtcccccgggcgccagcccggccccgagagaagcccctaatccgcagccagagcctgcgtgtggtcaagaggaagccaccggtgcgggagggcacctcgcgctccctgaaggttcggacgaggaaaaagactgtgccctcagacgtggacagctagggtttgctgcatctgcccccttcttacctcgtgccctgcagggctccagggctatttggagggaccttggggctgcacatctggcctgcctgcaccagctgcctgggccccaccctcctgactcctgctgatgggttaaggggccgggagcagatgctggccaaggccacatgcagggatgcaccccncaatgtaccaaaagcaggctgggcccagggttctatttattgccttggctctgccctctcccttcccccggttgtgggacaagagccctccctgaacccctgcaaccctccctgaaccccctgcaaatgaaaccaaacgtccacccgggtgtgttcattccttcatgtccttcaaagtacttgatagcctttcataaggcctggcacatgtgtcccggtagtgtgtgtgtgtgttggtgagtgaggtcaggcctgcgagtgttctgataaataaatacataaaggggcgggcgcgcggtaaattctggcaactttgataaaaaagaaaccnnnnnnnnnnnnnnnncccccgccacatcctgttgtgggggctttggataaacacccccgcgcgcggctgacaccgggggggagaaggaacagtnnggcctggngacaaaaaaatccttt

SEQ ID NO: 137452 - DNA, 651 bp, Homo sapiens
gatgtcaagtaaatattattgtcagacctctgagcccaagcctgcaggtatacacccagatggcctgaagcaagtgaagaatcacaaaagaactgaaaatggccggttcctgccctccaccctataatccttctatcacctcccctcctcacacctggtccagcttacagtttcattctgtgactagccctcccccacctgcccaacaatttcctcttaaagaggtggctggagctaaaggcatagtcaaggttaatgctcctttttctttatccaacctctcccatctcagttagtatttaggctttttttcatcaaatcacccttacctgggtcaacgccagtatcccatcccacaacaggctttaaagggattaaagcctgttatcacttgcctgttacaacatgtccttttaaagcctgtaaactctccttacaattcccccattttacctgtccaaaaactggacatgccttacaggttagttcaggatctgtgccttatcaaccaaattgtcttgcctatccacgccatggtgccaaacccagaaaccttcataccccttaccgtcctcaatccttaggaaaggtagaactgattaatggtcttttaaaaacacacctcaccaagctcagcctccaacttaaaaa

SEQ ID NO: 137453 - DNA, 238 bp, Homo sapiens
atgcatgaaatttggtgccgtgactccgatcgggggacctcccttgggagatcaatcccctgtcctcctgctctttgctctatgaaaaagatccacttacaacctcgggtcctcagacccaccagcccaaggaatatctcaccaattttaaatcggcagctgaagactgacgctgcccaatcgcctcggaagcctacaggatcatcacagacgctctgggtaactctcacagtggagg

SEQ ID NO: 137454 - DNA, 263 bp, Homo sapiens; identical to SEQ ID NO: 124294

SEQ ID NO: 137455 - DNA, 1080 bp, Homo sapiens; identical to SEQ ID NO: 119350

SEQ ID NO: 137456 - DNA, 1359 bp, Homo sapiens
atgctacctgacttcaaactatactacaaggctacagtaatcaaaaaagcatggtactggtaccaaaacagaggtatagatcaatggaacagaagagagccctcagaaataacgccgcatatctacaactatctgatctttgacaaacctgagaaaaacaagcaatggggaaaggattccctatttaataaatggtgttgggaaaactggctagccatatatagaaagctgaaactggatcccttccttacaccttatacaaaaattaattcaagatggattaaagacatgaacgttagacctaaaaccataaaaaccctagaagaaaacctaggcattaccattcaagacataggcatgggcaaggacttcatgtctaaaacaccaaaagcaatggcaacaaaagccaaaattgacaaacgggatctaattaaactaaagagcttctgcacagcaaaagaaactaccatcagagtgaacaggcaacctacaaaatgggagaacattttcacaacctactcatctgacaaagggctaatatccagaatctacaaagaactcaaacaaatttacaagaaaaaaacaaacaaccccatcaacaagtgggccaaggatatgaacagacacttctcaaaagaagacatttattcagccaaaagacacatgaaaaaatgctcatcatcactggtcatcagagaaatgcaaatcaaaaccacaatgagataccatctcacaccagttagaatggcgatcattaaaaagtcaggaaacaacagaattaaaaaaaacaactttagaattcctgtggaagcaaaaaagagcccatatagccaagacagtcctaagcaaaaagaacaaagctggaaccatcacactacccaacttcaaacaatactacaaggctacagtaaccaaaacagcaagctgaagactgacaccgcccaattgcctcggaagcctacaggaccatcacagacgctctgggtaactctcacagtggaggataagtccgtccccttcttagtcaatacggaggctacccactccacattaccttcttttcaagggcctgtttcccttgtctccataactgctgtgggtattgacggccaggcttctaaacctcttaaaactccccaactctgggatccggagccacaggccctttcagtgtctcaaagcactgaaaataatagatcaaatgtcataaccacacgggctgtggaggcagtgcacctcagagagcatcttagaagtaacaggaaagccaaatgtccagaaaaacagctccctatttccaagcagaggcttgtattttcacagttaaagttcctctttatggaagccttcatgatataa

SEQ ID NO: 137457 - DNA, 2234 bp, Homo sapiens; identical to SEQ ID NO: 117270

SEQ ID NO: 137458 - DNA, 1494 bp, Homo sapiens
atggccaaagccgtcctgagcaaaaagaacaaaactggaagcaccacactacccgacttcaaaatatattacaaggatatagtaactgaagaacctggtattgaaaccctgaggcacacaagtagcacaaagttttccaaaggcctacctagtcgtgaatctttctcagagaagcaaaacaaaacaacaacccacctgcacccaggtgaaataaacagctttattgctcacacaaagcctgcttggaggtctcttcacacggacgcgcatgaaatttggtgccgtgactcggatcaggtgaactcccctgggagatcaatcccctgtcctcctgctctttgctccatgagaaagatccacctacgacctctggtcctcagaccagccagcccaaggaacatctcaccaattttaaatccgctacacctcattgctgcccttcttcccaatccaaagcctccttttcgtcctcctcttgtatcccccgaccttaacccacaagtaaaagatatctctactccctcctgggcaaccgatcatgtacacctcaccgtctcattaaaaccttatcacccttaccctgctcaatgccaatatcccatcccacagcacgctttgaaaggattaaagcctgttatcactcgcctgctacagcatggccttttaaagcctataaactctccttacaattcccacattttacctgtcctaaaaccagacaagccttacaagttagttcaggatctatgccttatcaacccaattgttttgcctatccaccccatggtgccaaacccatatactctcctatcctcaatacctccctccacaatccattattctgttctggatctcaaacatgctttctttactattcctttgcacccttcatcccagcctctctttgctttcacctggactgaccctgacattcatcaagctcagcaaattacctgggccgtactgccgcaagccttcacagacagcccccacttcaaatcacccaagcagcttctcaggctcttggtattcagtggaaacttcatatcccttatcgtcttcaatcttcaggaaaggcagaacggactcgtggtctttgaaagacacacctcaccaagctcagcctccaacttaaaaaggactggacagtacttttacctcttgcccttctcagaattaagagcctgtcctcgagatgctacagggtacagtccatttgaacttgtatacggatgcgctttcttactcagccccaacctcgtcccagacaccagccccctagacaggtccagcaaaacgtccccagacatttcacaccagcaagctgccgccctcctccacacttacataaaaaacctttctccttatatcaactctactccccccatatttggacctctcacaacacaaactactattcctgtggccactcctttatgtatctctcagcaaagacccactggaattcccctgggtaacctttcaccttcttga

SEQ ID NO: 137459 - DNA, 520 bp, Homo sapiens
gcagcttacaaagctgttaattatgacaagctgaaagaaactacccaaggtaaagatgaaaacccagcccagtacatggcccacttagcagtgacccttagacgctttactgccctagacccagaagggccagagggccgccttattcttaatatgcattttatcacccagtccactcccaacattaggaaaaaacttcaaaaattaaattccggccctcaaaccccacaacaggatctaattaacctcgccttccagctgaagactgacattgcccgatcacctcggaagcctacaggaccatcacagatgctctgggtaactctcacaatggaagaatctggaggagctgacatagagaagaaactcaggttcctcctgaaggacccatccatggagaggtcctcccagataccctggggcgaggtgatgaagacctgggacaaggccctcagccacaggaagaagatgaccatgaagagcttggggaagcaaatgcagagaaaggcctgtgtgtgtg

SEQ ID NO: 137460 - DNA, 2709 bp, Homo sapiens; identical to SEQ ID NO: 121954

SEQ ID NO: 137461 - DNA, 863 bp, Homo sapiens
gggacatgcatgaaatttggtgccgtgactcagatcgggggacctcctttgggagatcaatcccctgtcctcctgatctttactccatgagaaagatccacctacaacctcaagtcctcagactgaccagcccaagaaacatctcaccaatttcaaatccggaccctactgaaaatcagactgttcaactcacctggcagccactcccagagcccctggaactctggcccaaggctctctgactgactccttcccagatcttctcagcttagcagctgaagactgacactgcccaatcgcctcagaagcctacaggaccatcacggatgcccgagcttcgagtaactctcacagtggagggccaatatcccatcccacagctcgctttaaaaagattaaagcctgttatcactcgcctgctacagcatggccttttagagcctataagctctccttacaattcccccattttacctgtcctaaaaccagacaagccttacaagttagttcaggatctgcgccttgtcaaccaaattgttttgcctatccaccccatggtgccaaacccatatacactcctatcctcaatacctccctccacaacccattattctgttctggatctcaaacattctttcgttactattcctttgcacccttcatcccagcctctcttcactttcacttggactgaccctgacacccatcaggctcagcaaatcacctgggctgtactaccacaaggcttcacagacagcccccattacttcagtcaagcccaaatttcatcctcatctgttacctatctcgggataattctcataaaaacacacgtgctctccctgctgatcgtgttcgactga

SEQ ID NO: 137462 - DNA, 1083 bp, Homo sapiens
atgacctcaaacaagtccatagctccagattcccgtaatcatcggaagaaacggcatacaaaacaagcttttcgatacaccatctgcagtggaaccaccatcaaaatgcagatttttacaaaaactcttacagagaagaccatcaccctggaggttgaaacttcagatacaatagaaaatgtaaaggccaagatccaggataaggaaggaaatctgcctgcccacctgcacccaggtgaaataaacagctttattgctcacacaaagcctgtttggtggtctcttcacacagacacgcatgaaatttggtgctgtgactcggatcgggggaccacccttgggagatcaatcccctgtcctcctgttctttgttccaagagaaagatccacctacgaccttggtcctcagaccgaccagcccaagaaacatctcaccaatttcaaatccacctcctttgtgttctcctcttgtattcccccaccttaaccctcaagtatatctctactccctccttggcgaccgatcatgcaccccttaccatctcattaaaacctaatcacccttaccctgctcaatgccaatatcccatcccacagcatgctttgaaaggattaaagcctgctatcactcgcctgctacagcatggccttttaaagcctataaactctccttacaattcccccattttacctgtcctagaaccagagaagatttacaggttagtagttcaggatctgcgccttatcaaccaatttgttttgcctatccaccccatggtgccaaacccatatactctcctatcctcaatacctccctccacaacctattattctgttctggatctgaaacatgctttctttactattcctttgcatccttcatcccagcctctcttcgctttcacttggactgaccctgacactcatcaggctcagcaaattacctgggctatactgccgcaaagcttcactgacagcccccattacttcagtcaagcccaaatttcttcctcatctgttacctatcttggcataattctcataaaaacacatgtgctttccctgccgatcatgtccgactga

SEQ ID NO: 137463 - DNA, 678 bp, Homo sapiens
atgggaatagaagacacttcttctaggcccttatggaaacacgcaagtgttctgtggagcccagaagctcaagcagctgcagtgtatctcagttgcttgatgtcagccaacactcaggttctgaaattactgaatgcattacttccattccagtgtgcaaatagggctgcccctcaccaggcggagccaggtcctaattcttcctcagcctctactccccaaccctataatccttttatcacctcccctcctcacacctgttccagcttacagtttcattctgcgactagccctcccccacctgcccggcaatttcctcttaaaaaggtggctgaagctaaaggcatagtcaagcagctgaagactgacactgcccgatcacctcggaagcctacaggaccatcacagacgctctgggtaactctcacagtggaggatctcaaacatgctttctttactattcctttgcacccttcatcccagcctctcttcgctttcacttggactgaccctgacacccatcaggcacagcaaattacccgggctgtactgccgcaagtcttcacagacagcccccattacttcagtcaagctcaaatttcttcctcatctgttacctatcttggcataattctcataaaaacacatgtgctctccctgctgatcatgtctggctaa

SEQ ID NO: 137464 - DNA, 1392 bp, Homo sapiens
atggaagttcataaacacccgttcaatacattggccctacggcatgagagtggctgtgaattagtttgggcagaaaaacacaggaatcagattttcccatttccgaagtcaacagcttccccaaagcaatgggacacaggacgtcataactcagacgccaaacagcaggagccaggagggagggaagaaaggaacacaatggaaatggagacaaaggagacacattttatccgtggacccaaaactctggcgtcggtcacggactgggaaggcagccttcccttggtgtttaatcattgcaggggcacctctctgattattcacccacgtttcaaaggtgtcagaccacgcagggatgcttgccttggtccttcacccttagcggcaagtcccgcttttctggggaaggggcaacacgctttaaaaggattaaagcctgttatcactcgcctgctacagcatgggcttctaaaacctataaactctcctttcccttcctcccattttacctgtcctaaaaccagacaaggcttacaagttagttcagaatctgcgccttatcaaccaaattgttttgcctatccaccctgtggtgccaaacccatacactctcctatcctcaatacctccttctactacccattattctgttctggatctcaaacatgctttctttactattcctttgcacccttcatcccagcctctctttgccttcacttagactgaccctgacacccattaggctcagcaaattacctgggctgtactgccgcaaggcttcacaaggcagcccccattacttcagttaagcccaaatttcatcctcatctgttacctatctcggcataattctcataaaaacacacgtgctctccctgctgatcgtgtctgactgatctttcaaccccaaaaccttctacaaaacaacaactcctttccttcctaggcatggttagtgtggtcagaattcttacacaagagctgggactgtaccctgtaagttttctgtccaaacaacttgaccttactgttttagcctaagcatcatgtctccgtgcagcggctgccgctgctttaacacttttagaggccctcaaaatcacaaactatgctcaactcactctctacagctctcataatttccaaaatctattttcttcctcacacctgacgcatatactgtctgctccccggctccttcagctgtactcactctttgttgagtctcccacaattaccattgttcctggcccggacttcaatcctgcctctcacattattctggataccacacctgaccctcatgactgcatctctctgatccacctgacgttcaccccatttccccatatttccttctttcctgttcctcaccctgatcacacttag

SEQ ID NO: 137465 - DNA, 1121 bp, Homo sapiens
atgattcaagagcatgcagacaaacaggtgcagaggctgcagggagtgcttttgggctccatccccacagcagcatcaagggcccgcctgcacccaggtgaaataaacaaccatgttgctcatacagagcctgtttggtggtctcttcacatggacgcgtatgaaatttggtgccgtggctcggatcggaggacatcccttgggagatcaatcccccttcctcctgctctttgctccctgagaaggatccacctacgacctcaggtcctcagatcgaccagcccaagaaacatctcaccgatttcaaatccgggacacctctctgattatacacccacgtttcaagggtgtcagaccatgcagggacgcctgccttggtccttcacccttagcggcaagtctcgcttttctggggaaggggcaactcaacgccaatatcccatcccacagcaagctttgaaaggattaatgcctgctatcactcgcctgctacagcatggccttttaaagcctataaactctccttaccattcccccattttacctgtcctaaaaccagacaagccttacaagttagttcaggatctgcgccttatcaaccaaattgttttgcctatccaccccatggtgccaaacccatatactcttctatcctcaatacctgcctctacaacccattattctgttcgtatatgtcaaacatgctttctttactattcctttgcacccttcatcccagcctctctccactttcacttggactgaccctgacacccatcaagctcagcaaattacctaggctgtactgcctcaagtcttcacagacagcccccattacttcagtcaagcccaaatttcttcctcatctgttacctatctcggcataattcttcatgaaaacacccgtgctctccctgctgaccatgtctgactaatctcccaaaccccaatctcttctacaaaacaacaactcctttccttcctaggcatggttaggtacttctgcctttggatacctagttttaccatcctgactaaaccattatattaattcacaaaagcaaacctagctgaccccacagatcctaaatcctttccccactcctctttccgttccttga

SEQ ID NO: 137466 - DNA, 1030 bp, Homo sapiens
gatgtcaagtaaatattattgtcagacctctgagcccaagcctgcaggtatacacccagatggcctgaagcaagtgaagaatcacaaaagaactgaaaatggccggttcctgccctccaccctataatccttctatcacctccccctcctcacacctggtccagcttacagtttcgttccgtgacttagccctcccccacctgcccagcaatttactcttaaaaaggtggctggagctaaaggcatagtcaaggttagtgctcctttttctttatccgacctctcccaaatcagttagcgtttaggctctttttcatcaaatcacccttacctgggtcaacgccagtatcccatcccacaacaggctttaaagggattaaagcctgttatcacttgcctgttacaacatgtccttttaaagcctgtaaactctccttacaattcccccattttacctgtccaaaaactggacatgccttacaggttagttcaggatctgtgccttatcaaccaaattgtcttgcctatccacgccatggtgccaaacccatatactctcctaacctcgatacctccctccacaacccattattctgttctagatctcaaacctgctttctttactattcctttgcgcctttcattccagcctctcttcactttctcttggactgaccctgacacccatcaggctcagcagattacccgggctgtactgccgcaaagcttcacagacagcccccattatttcagtcaagcccaaatttcttcctcatctgttacctatctcggcatacctggttttgccatcctaacaaaaccattatataaactcacaaaaggaaaccttgctgaccccatagatcctaagtcctttccccactcctctttccgttccttgaagacagctttagagactgcccccatcctagctctccctgtctcatcccaacctttttcattacccacagctgaagtgtgggctgcgcagtcagaattcttacacaagaaccgggaccgcaccgagtag

SEQ ID NO: 137467 - DNA, 622 bp, Homo sapiens
  misc_feature (1)...(622): n = a,t,c or g
ttggctagcacttctgggaaaattcggcnngnnctctgntgntgctcaaggaggtaaagagagccagtgttcccacttttgcctttggtcttttgtaggtggactctgttatagaagtcaacttccaaatagccctagaatacggccaggcaatgacggtccgagtgtgcaagatggatggagaagtaatgcccgtggttgtagtgcagagtgccacagtcctggacctgaagaaggccatccagagatacgtgcagctcaagcaggagcgtgaagggggcattcagcacatcagctggtaagtggaacaacattcccttcattatagcccttcgtggggctagtgcccttcttggcactgtcaccagggcaccacctgggaaacagctctcagctctgcattgagtacagcaccacttgaagtgattgagctccctgttcacaagagtgatgagctccctgttcacagacagttgcggggttcgtttctgttgcctggggacttcttggccttcgggccattnccccaacatttcttgttctttcccttcgggcntcaccccttccgagttgttgggtatttttcatttggggggacattttnggggattttccatntttt

SEQ ID NO: 137468 - DNA, 830 bp, Homo sapiens
tcagttctgctccccccacccacctccttgctggaagctcacagacactgtgtgtacctccaaggcccagaggagatgcactggaggaagaggaggtttgtgtgacatgcctggtcccaaaagtctccggggtgccagcaagccatgctttggcttctcaggtaatgtgaaatagctaaatgagagggcgtctctgtgttcctcctcctttccccgtaccagggtcagccccaggtgtcccggagatgcagccccaggtgtcccagagatgtcctcatcgcggacgtggccccaggtgtcctcaggtgtctcgaagccatggcccctcctgggtgggtcacccagggatgccgctgtacggatcagacgcagttctactgtggcgctccgggtttggccgggccccctaatggcagccgtggagaatccctgaaaattagcgtttggatttttccatgccgtgattttggaaatttcaactgacatggagcccaccatcccgtgccccgatcgaaacccatggagacagcaagcaaagaagatggccagttcacgctctcggagcttatttcagtcttccgtgagtttctctcctgcagaggtcagatggtacgtcctccacacgtaggaccagctgatgtgctgaatgcccccttcacgctcctgcttgagctgcacgtatctctggatggcattcttcaggtccaggactgtggcactctgcactacaaccccgggcactgcttctccatccatcgtgcacactcggtccgtcactgcctggcagtattatagggctatttgagagttgacttcttccagctcgtgcc

SEQ ID NO: 137469 - DNA, 885 bp, Homo sapiens
aagctcccactgatgctctctggaccagcgtggtggaattcggctggcagtgcgggcagagcccggctgagaggggcggccctggaggagacggaggcggcgggtgggcccgaggcgcaagaggaagatgaggacgaagaagaggcgctgccgcactccgaggccatggacgtgttccaggagggtctggctatggtggtgcaggacccgctgctctgcgatctgccgatccaggttactctggaagaagtcaactcccaaatagccctagaatacggccaggcaatgacggtccgagtgtgcaagatggatggagaagtaatgcccgtggttgtagtgcagagtgccacagtcctgggacctgaagaaggccatccagagatacgtgcagctcaagcaggagcgttgaagggggcattcagcacatcagctggtcctacgtgtggaggacgtaccatcttgacctctgcaggagagaaacttacggaagacagaaagaagctccgagactacggcatccggaatcgagacgaggtttccttcatcaaaaagctgaggcaaaagtgagcctccagacaggacaacgctcttcatcactggtgggctgagctttttcccagcaggaattgggtcctcgaatcatcgtgcctcttttcacagaaaggacgttgtggtggcctcaccccagggcattgcccaacagggaactgttcagcataaacctgggggggccctcaggactaggacagggtgagccagtgctccctcctttcatgtacttggcctgagactgacctctccctaggtccaaatgccctagtcacatggcagacccacggcctggcccactgtataaaataaacctgtttgcttcttagtttgaaa

SEQ ID NO: 137470 - DNA, 12027 bp, Homo sapiens
atggcaaccagatggttctactatggtcatcccccaagggatgcccgtgtaccacgtattgttgctgaagcaaaagaaaagaatcttaccccaggtaagattatcgaagtggatgtcactatcgaagctcagattcgtcaggagtttctggacgctgaacgtgatacaggtggctttgttaaattcttccgtattaccaagaagaagctacaagagttcttcttaggagaagaggaagaacaagtccctcatgtatcacctgtagagttaggtgctaaacccactgctttcaatgcttttattgctaatgctgtgggcaaaactcttgctgtacaacatgcatcattaaaagcacctgaaccagaaatgacagttactcatgagcgtttttacggtaactatgctgtatggattacagatgtagacccacggaatcatcgtattgaggttattcatgttatccgtgaaatctcaggaagaaccagtgaatatgtcaataacctgctggctcaaccaaccccattcaaagtatttgattggctcacagagacgcaggctaaagagtttgtaagacgtctgaataacactcagggtgttatctctgtctataacaaactggaagacggtattcctgttaaggttgctgtaaaggccacagagccaaccaataaggaaaagctggaagctgcatcaactaagctgaaagctatgggtgctgtcgctactgatgcttatgagtttcatactgacttgaatgagaatgaagagactattgtagctgtagtgaatgataaggtggttcctgacgttcagaacctacaccgtcacatccgtcaatctgcaaacctgaaagactataaaggctttactaagttccttgaacgtctgtctactgtaattgataaacgtcgccactctgttgaagacctgatgaagtttatggaaaaaggtgacctgcccattgcagatgatggctccattgttatcttcaaacgtctggaaagcaaagacaatcctgaacatctcaaagacgtaatggatgatgtatttgttgattgccattctaagaagattgagcaatgcgttggtatgcgtgtaatggttaaagaaaaccttgtagaccagaaccgtcgtaaagactgttctcatggtctgcacgtagcttctctgcaatacattcgtaatttctcaggcaacgtaaccattattggtaaagttgctccagaggatgtatttgcagtaccagaatacgatgttactaagatgcgtgtatctgcttatcacatcattaccaagctacctgatgctattcgtgaccatgttaataatggcaatccaatctccaccattgagggtggtacggaaatcctgaacatggttctcagtggtaatcaccctgaaccttcccgtcaggtactagttggtggtcattatggaaccaatctgacttattcagaactcactcgtaattatctggatgatgatgaagacagcgttattccagatgaaccagtaattaagaaaactgccttgaatatggaagagagctttacggcaactaatcctaaagctgaaccagtgaaggcaacggatgttaaacctattaagaagactaagatggaaattcttaaagacctttggaaccagttcctgaaagcagagacttctaatgaagctattacactggctgatgaaatcattgctgctaagggcaaatgtaagaaatcatgggcttctttaggcttcagtggtgacatggttcagaaactgattgatgctcgtgctaataaacctaagccagaaaaagcagtcaaacaggataaaaccgttgcacctaagaaaactacagtcactcgtagtcggaatgctgatgttattcgtagttatctaaatgacaaaggtatgtctgattactgtaaagctcatgccattcacgatgtgaaacgtgctgctaagaaatcttatgctgcactgggtctgactcctgaagaatgcagccaaattgataaactgaagcatcacctgaagatacatactatggccaaagtttatcgtgctaaccgtaaagcccatgatgacgatattattcgtatgaatgcagtcggtttatcattgggaaccattgctaaaacactgggtgttcaccccactacagttaccttacgattacgctctcttggtattgaaccagccgacacacgtcgaacatttatggagaacgtactagcaccattacctactcacgtagctgattggttatcagaacaagtaggaccaaaatatgagattcgacaatacgttcgagacttattactggaagcctacaataatcgtcataatcataaggaaactgctcatgaacgattcctcaaaagatacgttgaagtagttgagatgctggaagaattggctccaaattctgaagaagcatacgatacacttcataatgccattgcagctttaactgaattgtcagaattaatgaagtcctctgataaagaagtttatgcacctaacagcaatcgcttagctattctggatgcactggcagaccagattgttacagcaactggcatcggtactttcttgggtatgaacgtacccggagcactcactgaagtgaaccgttctaattattcaaaatttgaagacggtgagcctgttttcaatgagaataagaaagtaatgaaagaggcagcggcagaaggtttcttcgactttctgctcgaccccaatgcttctgaacttcgtattagtggacctggtggtacaggcaagacatttacaatggctcatatgattgacgagattatgcctcgttatcatgagacatgtagtctgatgggaatccctgctctctataacgaagttattatgactgctactactaataaggcagcagaagtattagcccgtgcaacaggacgtcctacgtctacctatcattcctttcaaggtctgacagtacggaataacctgaagactggggaagcagacctgattccatctaagtccttcagtatcaaaaagaataaggtcatttttattgatgaagcatcaatgattgaccgtaaactgaagaagtttattaacgaaggtactcaccaaagtaagattgtttacttaggcgataaatgccaattgttacctgtaaaggaaacttcttcccctgtctacaatgacagtagcattaaagagtttatgctgacccaacagatgcgtactgatgtccctgaactccatgcactgcatgaacagcttcgtggaaccattgaagagttagtaagtaactctgctattcagattggtgctggtgaccgccttagtattgaacaggaatgccagattgttgaccaggattctgctactcgtaagattctgattgattcctctggcatcgaattagaagtacgtgattgcaccctggatactggttatggtggtgtctttgaaggtatccctattccggtagatatggattatttcattcgtttgcaaaagtactatgcacaccaaaagaactgggaacgtcacttctatttgaaagaaacattccctgaacttcgagcattacatgcttctactgtgcataagtctcaaggttctacctacgacaccatctttattgatgctactgatttatctacttgccgtcagcctgatgtagtagcacgtctgctttacgtagcagtatctcgtgctcgtcatcgtgttgtgttctatggctctttggcagagaaatttggtggagaacttatgcaactgggtgaaaaacaaatccgtgaaatgactaatagtagtgaactggttcaggaattattcttagccgagttacgtcggctagataaagtgctggatagtatcattacacgtaatggggaaacattcgctgtatacaactcaacagggttcctgtatttaggggagttctattcgagttcccgttcatcacaacaacctccttctggtcatcgtctggctctagctaatcacctactggatgatatgcgggagtatctggaacaagcaggtaaacttctgctagaagtccatatggtgaatcagatggtctttcgtctggttcagggctgtaagacttatcaagacgttcgtgatgcattgccagaatgcctcattgctatggataaacaaggtcatctgaaatccttacagagaaccagaaaggcagcatttactctggataatgatgctatggctctccgtcatatgagaaaatcttgccgattatcgaatactatgcgggaacccatcttatcttttgaggtctgtatgcgttacattacattcaacaatgagggtatctaccctattgctatccttactacaacgttacgtaaggatgatattgtcaaagcatacatggaaccctgggatgtagataaagattcagtaatgattcttgaacttcatacagccccagggaaaaagaaaactcctgctaaagagatgcaggagtttattacccaagaattagtgccagcattcgaagcagcacaaactcagtatatcatctgtggtgattctgaatattacaaacagctaaccaaacaaggtaaagctgatgccaatattggctatgtaatggattgtgcttatgggaaccagaaagttatttacgttcccaattacagacaaatcttttatgacccagataagataaagactaagattgctttatccatgcaggctctgattgattatgtctctggttcttatgttgagccaggaactaagattatccattatgctgattacccattaactccagaagctatatctaagtggttagataagttactggagatggatgttccattagcagtagatatagaaaccttcagtctgaagcattatgactgtggtataggcactattacattctgctggaacaagcacgaagggattgcattccctgtggattatgaaccaattgagggggctactgaagctccttatggtagacaagttcacaacatgcttgttcgttctatgctcagggacttttttattaagtatctgaacaggcagatgtatcacaatattgcctttgacgtatacgcactcatttaccagttatttatgacagaccttctggatacggaagggttgttgcatggcatgagtatcatgctaagaaactgggattgcactaagttaattacctatctggctactaactcttgtgccggtaataagctaagtcttaaagaccaggctcaggaatatgctggtaactatgctcaagaagaaatcaatgacattaccagaatcccattagcagagttgttggaatacaacttagtggatggattatgtacctggtatgtctatgaaaagcattgggatactctggttaatgaccaacagttagatgttatacaaacatctttagacctgcataaccatactcaagataccagtattctggaaattcttgatgctctgattgattacaaagctgtagataaaattctgacagcatttattccagcattaaaaaatgccagacaaggaccagatggttggcattatctctttggtaatctgaacttaggtgggactgtatcaggccgtctatccagtagtgaaccaaacctacagaacctaccttctggttccagatatgccaagatgattaaaaaatgttttgaggctcctcctggatggatattttgtgggctagactttgcttctctcgaagaccgtatatctgctttaacaaccaaagaccctaataaactaaaggtgtataccgatggttacgacgggcatagtctacgtgcatatgcttacttcggtgagatgatgcctgacattgaagatacggtagagtctgttaattctattcaggagaagtacaaagcatatcgtcaggattctaaagcacctacctttgctcttacctatcagggcacgtacatcactttgatgaagaactgtggtttccctgaacagaaagctcgaatggttgaggaacgttatcacacactttataaggtaagtgatgactgggttcaggctaaactagaccaagctgcaaaagatggttatgtaaccgtagcatttggcctgagagtcagaacccccttacttcaacaagttatccgtggaaccagtaaaactccttatgaagctgaagctgaaggacgtactgctggtaatgcattaggccaaagttggtgtcttctgaataaccgtgctggttcagagttcatgcgtaaggtacggaatagtaagcatcgtcttgatattcgtccaagtacccatatccatgatgctcagtatttccttatccgtgatgatatggatgttgtgatatataccaatactcatttggtgaaagcagtacaatggcaagaccatcctgatattgctcatccagatgttcatttggatggtcaggaaggtgctgttattgttcagaacactatgctgcttactgaagagaaacaggtaactttccgtgacctgggacgtgctcagtctgctctgtttcagaatctgaatgaccgttttggtcaagtggtagatgtacgggatattgtattcctgaacgtcagctacttgggtcatatgagccagcctgactttcagcaaaatctggtaaccaaccctcaacgtatggaacagcctccatatcaggccgagtgtgaggatattatccaagcactgaatatgacctttgatgaagggtgtctgttcaaggcattgtggcgtaatgctgctgctcgtttaggtaatggtaaaccaggtaacaatgccgtttatgatgcagagaagatggttcattatgctaaccgcatttttattaaagaatccggtgggcagaaaaaagaagcagaagaaccagtttctgcggctctgaagaagggtgaagagattcatatgtctctgtctgaattattcaccctgttaactggtgaagcagcagaagctgtctggcttttgcatgacgagtatgattatgtgaaggataaaaagtatctttctgtgactaccctgcttaagccaattaagcacattgtcatgaagcatcgtgtagacctttctgtagaaagtatggacatcatggatttggtgtccacttctatggggtatcctgagcgtgtcgttcagaatgttgtcatcaaccctacccctgagcagattgcatcaaatccaaacttaattcctgtatggatagaacaacgagcaactaaaaagattgctggttggactattgggggcaagttcgacattgttactgaaggtcttcttcaggatgtaaaatccacctccacttacacatgggtaaagggtggacgtgatgaagaacatagacttcaggggtcaatgtatcgttggttacatgacgacaagattaccgaagatgtgattcgtattaactacatcttcactgactggatgaaagcattagctacatctcaagaaaactatccaaagcatcgtgtgctgcataaagacattccattgatgtcttatgaagcgactgaagaatggattaaagccaagctggctctcattgataagtactgggatgctcctgaaagcgagattccagaatgtactgatgaagagttatggcgttctgacccagtgtttaaatactttgctgacccagagaaggcaaagcaacctggtgctcgttctaccaaaaacttccctactctctttgaggctcggaagttcatggcagagaaaggcaaaggcactattcttcatgttcctgagatatttcccatgattgacctgaccggagtctcacatcatccggcgattgaagaaatcgttgatgtgttatgtaacaagacgcaaaacactgaccgtggttttttccgtgtagaagtggcctatttccttgcgaaaatggcttcatgtatgggtgcaactatcatcactaaagaccgtggtgaaattccagtaaacatctatgcagtggctcttgctacttcaggcttcggtaaaggccattcggtcaacattgttgaagacggttttatggctggctttaagaagcggtttatggaagacaccatgcctgctttagcagaagaccgtctgtggaaaattgctaacgaacgttctgctcgtaatgctactgaccagaaggaagagtttgacaaggtggaagctgaatacagacgtactggtgcttatccatttacgtttgactcaggtacacctcctgctgtgaaacagttacgtcataaactcttattagctggatgtggtgctattaacttacagattgatgagattggttcaaaccttctcgctaatgctgatgtattaactgtgttccttgagttgtacgaccaaggcaagattaaacagaaacttactaagaatactgctgaaagtattcgtagtgaggaagttgatggtaaaactccagctaaccttcttctgtttggtacaccgagcaaacttctcaatgggagccagactgaggaactcttctatgacttccttgatactggctattctcgtcgttgtctgtttgctgtagatgcatccaagtttggttggaaaatgacagttgaagatgatgttggtattgcactaatcgactacaagattcagtgtgaaaaacaagcagcagctttagctgaccacgaagagattcgtaaagcagaactggaacatcgctattttaaggcactgaaattggcaggtgcatttgcatttgttgataacagtatcatggtagagatggaacatctgaagcaagcaattcttctggtggaagagtctggtgttgcattccagactatcctcaatcgtgaaaaagcctacgttaaattagccaagtatattgcatctgttggtactgaagttactcatgcagatttgcttgaagctttaccattctataagagtgggaatgctgcacgtaatgagatgatgactttagctactgcatggggctataagcagcatatcatcattaagaagacatacaacgaaggtattgagttcttccgtggtgaaacactgaaagagactgatactaacgaaatgattgtttcttatggtgagaactttgcttatgactatattgcagagaaagttccatttgaccagttacatgtactgacccagcaagcaggttatcactgggctaaccaccatttccgtcgagggcatcgtgctgaagagaatgctattgctggcttcaatatgattgtcattgatgtggatggtacgtgtagtttggacgtgtgccatgaattgatgaaagaataccgattcatgacatatacaaccaaacgccatactgatgaagaaaaccgtttccggttaattatcccaatgaactatcagcttgaacttgatggtgctgaatataaagagttcatggataacgttatggcatggctcccatttaaaacggacgagtctgctaatcaacgagccaagaaatgggaatcatgtgctaagggtacgtattactacaatatggatgctcccctgctagacgtaagagatttcattcctagaaccagtaagaatgaggcattccagcaagggatgcagaaggttcaaaatctggataatctcgaacgttggtttgcccaacgaattgctacaggcaatcgtaataaccacatgattaagtatgccctggctctggtagatagtggtataggcttcaatgaagttaaacaacgtgtgcatgagttcaataagaaactcagcaatcccctatctgctgatgaactggattccactgtaatgattactgtggctaaactccttttcttggttgaagaggactgtcagttaaaagaggaaactatgtcagaagaatttgaacatggcgaaatgaatgaccagctaatcctgattgtaggattttctgctgctggtaaatcggcctcacttcgtaacatccgtaaccaggaacgttgggtatatctgaatacagaagctggtaaacgtctgccatttaaaaataacttcaatggtgttcgtattactgacccataccaaatcctggaatactttgaccaatgcattgaacatcgtgatgacgtggacggaatcattgtagattccctgactttcatgatggatatgctggaaactcagtatgtactcactgctgcaaacactcagaaggcttggggtgaatttgcacagttcttcaaaattctccttcaggagaaagtagttaaatttgccaagccagttatcttcactgctcacgtcaaagacgaagtagatgaacgtgcaatggaactgaagactttcgttccagtaaaaggttctctgaagaacaatggcattgaagcatacttctctactgttgtatcagcagaacgtatcgaccttaaagaacttgaaaagtattccaatggaatgttggaaattactgaggatgagcaagagttggggtacaaacacgtattccagactcgacctactaagaaaacagtaggtaaacgtattcgttctcctatgggtatgttcagtaagcaagagacttatatggacaatgatgcccaaaaacttctcgaccatctggcagagtattactctaccggtcaggcagctaaagcagagaaagcaacggataacctgggtggtggatttggtgcaaaagaatctgatatttatctggctaatctgaaagtagcttatgcaggtaaagcagcttctggtgctaacttcattcagattattgcagacctgactgaccttgatggacacagtgctggtgaatatcgtgagcaactgtacatcacttctggtactgaaaaaggctgcaagtgtacttatgaaaagaatggtaaggaatacttcctgccaggctacactgtaatcaatgacatcctggtaatgacttctggtgagactattcctgaagcagtcttcgaagagaaagtcgttaacgtatatgacttcgatgagaagaaagaagttgccaaatctgtcatggttccagtcaatgctatcggtggtaagtttgctgtagctattctgaaatctgaagaagataagcagactaaagatggctccggtaactatgtgtctactggtgaaactcgtttcactaataccatcgaaaaagtattccaccctgacctgcatctgactgttgttgaagcagaagaactgactgaacgtggtaaagaactgaccgttgaagaagcagtcttttgggacaatggctggagaaaacaaaggcgttaccgtgacaaaacactaaaggcggtgcttccggtaaagctggtcagccaccaaaaccaggtgctactaatactggtgcgggtgcttctgctgcaaaatctctgttcgatacctgtgcttggagttgaccccagttttcgtaactggggactagcacggggaatgctcgacttagagacgggaatactctctggattagacctgaagctggtagaaaccaaacctgatggaaccaagcaagtaaggcagaacagcaaagatatgcaagctgctgaggacattactactggtgtcatcgactggttcaaagaagcaaaggtcatctttgtagaggttcccgttggctcacaaagtgccaatggaatgaaatcctatggtgtttgtgtaggcatcttaggagcactcagggcactaggacatgagattattgaagttactcctatcgagaacaaagtagctctgtccggtattaagactgcttctaaagatgtgatgattagagcagctacaggattttatccagaggccaactggctcaaggataccaaagtatttgaaacaatacagagaaataccatgcctcggaaactcagtgttgaattatttcattcttgggcagcctttaaacacatcagctcaggcctccagaagagaacctgtgaacatgttaccttcaacgacaaaagggactttgcagatgtgatgaaggatcttgagaaggagggttattttggttatgcaggtggtcacaatgttatcataaggacccttatgagagggaagcaagaggatcaaaatcagaaaaagatgtga

SEQ ID NO: 137471 - DNA, 16395 bp, Homo sapiens
ttaacgtttcagacctgcaaacagagaaggtttggcttgtactggttctttagcctcttcttcctgtacttctttttcttcttcctgagcagcagcttcttcagctacttcaacagtttcatcaacagtttcagtagtagtttctacttcaactacttcttcactgcgagattcccaccattcctgataagcatcaaagtctctgttagcctgagcaaagccttctaccaaagcatccatagttgggtagtttgggtcagcaggcattgactgattcactaactggaagaatctgtatatgtactctttagctgtattttcaggactattaagagaacaaccaaatacagcatagatatactgaatatcaccaatatctttgttcttcttcaggtcatccataatgtcagaaatcttaccccctgtagccttcttaaaggctttcttacaaagagtatatgtagaaccagaaatccagttcttatcactacggatagggatgaatgaatagaatctgttattggtcgtcttattaataaacagagcatcaaggatggcattaccactgttctgtttataaataaacaattgaggcataccaccagcagacatagtagtaactacatctgtattctgataagaccatgtataacctaaagtatctgtagttactgtagtagttctggtttcagtaaccccaccacctaaatcaataacttcagtgtttgtagtggaaccagtagatacagtaccagtctgtacctgggtcattgtagtcttacgaataatgattaagcctacttcacttggttcacgaaattctttctcgtaaacatctgagaagttagtccaactaacctgttcttcttcagtattggtactttcctcatcaggtctgccatcagagaatacactcttaatatgagtaactgtcttcagggtagctgacttaggagtatggttctgagatacctgagtccattcagaagtagaaggtaagtcatcagcagatggtacagatacagcaggatgaaccactgggtctgcaacactagtaggctgtatgtagtaatagttcacatacagatacattgcatcctgactgtaattctctggataaaaggataactcactaccatcagtagcagtgagtacaatcctgtcatcatccatgatgtctatttcaaactcttcagtaatacggtctggataattctcatagaggaatttatcagcccattcctcaaaatcaccaaatccaatcctactgctctgaacctgtacctcataacctgctttttgaggaacttgccatttaactacttcagggtctatctgagacagtattgacaagttcccataagcaataccaattgaagggtcatagttagttgcagcccaaccagggaatctacgtaaacgaataccaggtccatttaaataagagttagtgatggtatcacccatactaaagtcagatttactgacgatgttaccaatcaccgtagtctttaaataatttggacgtttatgtatatcccctgccaaattgtagacagaggatgctacgtagattttagtcttacccaatgcgttgttattcttcaatgcagtaagaatgctatccagactggtgttagtgaagccattaggaggagacagaccctcatcaatggttttctgagtgacccatgcatcagtaaacagtttggcagctttaacttcagcatcacgtttataagacgtaatctgttggtcatagagttctttctgtttacctacagaaccagctacacgagtaccatcagtacgagtatcagaagtctgagcacgttgtgcttccttctgctctttcgtcatattgatttgttcagtagttaacttagtctgttcagcaacctgagtggtctggttcttcaacatcagtaattgttgaggaagcatagaggatagattgtattgagcagtacagtaagttactgactcattagacagcttcagcttagtaagggcatattcagctttagtagccagagcctgaatcttagctgtaacaaagttagctttgataataccaagattagcacgagcagtaattgcagctacctgagcagtaacagcattccaataagcctggtctttagtggtgaggaattgcacagcattagccatacatgcttccatagtagcaatgtatgccttaacgtaatcaccaccagtaattcggttattcttaaattctgccagtagatgattgcttgctgattgcattaaagcgtcaaatacaccagaacccccaacctcacgagtagttagttgttctgtggttatcttctctatctctgcatagatagggctattaatgccaccaggaatatcatactcactgccagacatgtcgatgtcaggaagcgtaaaatcctcaccagcagcaatctgagcagcagccagagtttgtaattcttccttagtcagtggagacagaacttcaatggcaaactcacgtacccatgcagacgtaatattaggctgaccattcttacctttggtaactcgaatgttcaggaacttacgttctttgaggaagttataaatacagtaagggatgtgatagccctcatcagtagcttcaccaaatggaacgaatttacgaacagtaccaatatattcgttagctactgtaataatctcaccaggcaggtctttcttcttagggtcaaggttctgaatacgtactcgaaccagctttaattgttctaagcgttgctggtgacgtaaagaagttgccgtagttactgtacctgtagacagagccagaggattaggctgaggttctactggttcctgagctgcttcaatcttcttacgaagagtttcagcactaatattatttgagtatgaaatacccatcatattagctcgttgtttcagcagagaaagttcatcaaccttaacttcatcaacggtgtcatcgttgccctgagttaaatcagcggtcggtttatcgttaatgctcatgtgtatatatccgtcagtctggaagccaatggaggtaaaggaatcatcacctactaccagcattgggtaaacgtcatagtgctcttggccagataccatagaggtacggtaaccagggttagctacagtagcctgtgcaccagcacctgccccagtgcagcatttctgaatgatacggaacttatcaatagaaccgacttcaccattcatgatagtacctgcatcagcatagtgctgagtttcgataaaggctttattaccgaacaggtctttcattgctttcagttctggaaccagttcagaacctacatacataacacgagtagcaccgatgactttagtatcaatcatacgggaaccagtgataatggtagtctgagtaggagtacggttctctgtcagaatctggtcaagacgcatcaggttcttataagaaacgatagacggagtagaaccttcaccagtgatggtggcatcagaagtagcagcaccagcatacagaacagtaccagcagcagccagcaggtctttttgcagtacagcttcagtaatctgagtagcaccattcatcagttcacgggacaggtgttccatcaggccatcatcagaatcgaagtcaatagattcctgagtgaactcatagaagaagccaaacttgtgaatagaaccttcacgagcaatacgagtaaaaccaacacggttaactcgaccaccgttttcagtcagtagaggcagtttggaagtaatgttaccgatgtctttgctggaaccatacaggttaccgttaacaatagtagcaccacttgcatcaataccctggtcattgatgttacggtcatccagcagaggaacatattcatataccttgatggtcttaccgtaatgcttcggcatgttagttacagaggccagtggcatgaagtactgctctttacgggcagtgatgattgctttcttcagccagaagaaggtttgcatctggtcagagttagcaccatcaatactagatttttctgtcttacgcggtgtaacccgtgatggggatgccgctgctgcctgttgagtattagtgatttcagacttaggtgttgcaacacgagttgctactggctgaaccactggttcaggttgttcaacaggtttctgcttaatcaaatcattaaaaccaccattagcagcaaggtagttaccgacttgattataagcatccaggaatgctgtaccgattgggatttggcctaagattttgagtcgttcaatttcagaaacaatacggtcgtaaataccgttagctttctgttcaacgatggtattaaccagaccacgattttccagcaatgcctgtttgctgtggtcatcccacgtagtcgaaattaactgaagagtagcttgtccttctggagtggatttagcatcttccagttcggttgcaaatgctgcttcagcatctgacacacggtgattaccagcttggtatttaacttcctcttctggattaatatccagaacatcaataccagattctttaaccaacttcttaatagcatcaggattccctttaactaaatcgatagcataagagagttgcccttcatctaataatccgttgttttctaacatcaggagatacttacgatacggctgaatctcctgcattttacgggtatagttagctcccatttgcatcaagctaatgacctcttcaggactctgaggagtaatcattttgccgttagctttaaacggagccattatccgttcataaccagccttatagtcgaagtcagttttctggtctgatacctgcttgtcttctactacttttgcttggccttgctcagtagtagaaggtgcattatcagtagcaggcttactgttgctgtcaaccttatttgggtcaactgtagcactatcattaccagttgtgaatgcatctgaattgctttctgattcagaagtattttctacttcagttggttcagtagttacttctggttcatcagtttgttcaacttcaacaattgggtctggttgtgcaggagtattattttctaccggttccgggttgttctgaatgcttgatggaccaggcatgttcagaatctcttcatccgacattttaaaaatgtcggaagctgtttttgcagcttccgtagtcatgggggtatcacgagcaacatccaatgcattctcaatatctgattggacacctaccagtgtttctgctttctgaagagtaatttccagataacgttttaaacaaccagcagcttgagccatagcaagagcatcagcacgttgacggtcttcaagcaatgggtcacaggattcttgtacataacgagcacagtctaatctaattcctgggttaagagctgggtcacgggttgggtcaaactgactggaaccaagtgaataagcagggttggcttcagcagctatatcccgttcagatacagattgaatacctgtatcctccccattagtcaatgcattatacccaattgcagcagataagttagggggaagttctccttccttacgtggcttggttaatgctttagtaatttctaattgctgattaccttgtgattgagctttcatcttctcaaggtcacgagcatgtttagtgccagattcttgttccagataatccagattcttattgtctcgttctgccatagctttttgagcttgtgcatcattaagacgaattttagaacgtaactcttcattctcaagctgtgctttctcaacagccaattgtttgagttgttcctgtactgggtctggttgaggttgccatgtacgtaaatcatgagccagtttaggcatacgtttcaagtcagcaatctctgcaagaatattcaaagtgatttgctggtctacgtttggaccaatagtctgaagcataaagcctaagtcttgggacttttggttgtctacttcagcagtagaaatatctacttcaaggtcaaagttacctttcaggtcttcacgtttaatagtgacaaattcttcattggtaatacgtactacttcatgctctgccaagaacacagcattcatagcaataatcttattaccaatttcagacatgcctttagctaaacgacgaaggatagccatctcacgtttagaagcagcatctaatacaccacgaataccagcagctacatcaccataagactcaccagttaccccaccagcaaatgctttaacaccagtaagagattctgcttcctggttctgaagagtagccatagtcagtgctgattgtggcaattcagggaacttatgctcaataatcatttgagcagggttttgtgtaggattgtattcataatcctcaccttccctgtaacgacgactattcagggcatcaagcatacctttaggcataccacgttgaccattggcactacgtccaagtaagtcaatcatcccacgcattacagcaccaagtactgcttggttatcacctaataactctgcatctggttcgccatacatatcccgtttaacaggcatatacggaattaatacaaatgggagtttgccgtcaggataaggattcttctctaaacgaataagggtagaaccaatccaagtagcaacgataggctctaatacaccattcccttcaatatcccagaatccccaatattcataagcaactacacgcttacgcatagggtcactaatctgaaattcttgaggagtagtggttgcatggtctggttcattaacgggagcagagctttgccaatcaatcttatttagattgtgataacggtctttctctttaagcaggtctgccttacaagtttcaaaagagacaatggcaaacattgccttattaatatcaccctgacatgaagggtcgataataatgttctctgggtttagcatttccaccgtaggatggtttgctaaaggaacttcaacttcagttgtagttgtcccagtttgtactgcatacgttgcttgtcccgtttcatcaaagaaacgtactgattccttaatagcttcatctacattctcttcataaccgcgagggttatctgtacgaagttgtagagcctgttgtaaagcatcagcttgttcttgtgtttgaatagggaacaaactaaatacaggaacttcttgcttctctttacgaatttccctgttccaaccaacacgaacaataccagtaccatcatcaacaactgaacgaacatagttatcaatgaaacttacacgatttagtttggtacggaattggtagttaagaaccagttcattctggcgtgcaccttgtacatcttcccaagttacaggagtaactttgaataacttattagaaccaaggaaaggttcagttaaagcagaataacgccattcagcttgacgacgtacaagtttaggctgtacctgtgaacgtcctttgactttaggtggcttggctttgccttcaatacgcataaggtcattccattctttgaccttaatcatcatggcagtatgagatggctttgctgcatccaagtctgctttaagtgcttgcaaggaaggttcattcttccagctagttaacttagtagcttggcttgggtctggcaatggaaccatagaatcagtgttttgttccatagtaattcggtcagaacgaatctggttccccagttcaatcagttggttatcacggagtctaacagttgccctgagttcttcaaccaaacgtctgccttcttcaagacttgagtcgagtctggctgcatggcttgcaagattgaggcattgagtggttccggttgaggcttgacgtttataactctcggctcgtttttctgactggagcaaccgactattgtactggttagtaatagaatcaataacgacttcataagactctttggctttatcaagtcgaagggtaagttgcccgacttcataactgtgttcccgattcttttggtcataagccagttttactctatcaagttcttttgagtactccttcttatcttcatcccatagtgcttgaactttcttttcaccatgttgtgaaccaagaagaaaaaggtagctcccagagctacccctctccagagggacattaccaatacgattagcaatccatcctgtagtgtactcaggcatattaagagataaatagtagtttaactgtttaccatctagagacttcaaaatgagcttacaggcttctactttgcctcgtttattctgaaggcttttatatgcacttagagttccagaaccgactttaccatcaacttgtattttagggtagtctttgccatttctggagaaagcattaagagattcttgtaaccaacgagatggtcttgcaggtccagtattaacaccagcatctactagtttttctgttaccgctggtgatacatctgcaaacttaacaaagccaggcttcaagatgtaatcgttgtaataaatacttgatgccatttcctgagttaagttcttcattgaaccatcccagttatacatcgactctagttcttgcttatgcttttgagcaacctgaatagttacaccatgattagtttcacctcctgggtctttggggtcattaacgtatccaccctcaacagcaaatacagcagcaatgattgctgcaataacccctccaacaccgccaaccttcttcttacttattgccacaccaatcctccatgcaaaaatctcccgtctggcagcagccagtataccaataatgatacctgatccagcccatacccatttaccaaacaatccagcaccaacaactttgtgtttgatggtaatgaactcttcaatagtagggacagactcagccagagacttttctacattctccagtcgagtgtccatcttattaatagacagttgaaggttacgtacagcatcatctaaatcttgccgagatttagcatcacgggcattattttcgaagagtgtcttcatacgttcctccattcgagctaggagcacctctacggattcatgactcatgctaaatcctgcctctagtgccaatccccacgccttatcaacatcagcccagattttcttagcatcttcaggtaacagtacgaatcctatgaagtagtgaactacattcaatggataccctagtctattcacggcagcatcaaatgtcagtggaaccaggtcaagtcttccatcaataatccaatcatagtcttcaatctgaacaaagtcatagttagggaatacccactctgactcagggaagtttaatcgacctgttagttcagatgcaggggacataatctgtggtgtaaagaacagaagggttgcctgtgcatcagggaacttaccttttacatagtcacgtatgtagttagtggattgacccagtttggtgcatagccaatctacataaggccactgatgttcttctactggagcaaagatgtctttaatccatggagtaggtacatcattacctgtctcttctttgtataaagccatagtcttagggtcataaatacaaggggcattcttaccctcacctgtattgtatgaaccatcccaccaccaaggctcaccaatctggaagtacagctccattcccaagttctggcattctttcaaaatctgacattgggctttacttacaaaatccagagcatctttgttagtaggtaatggataaacaggaaccagtctaagaacagacttagcaaggtctaaacaaacctttctggaagtctcaacattgaaatgaatctgtcctattcctggttcgaaggtaaagtcatccggcatgtactgtgccgtcaatgcccccatatgaacatcagtcatctcattaataagctgtaattgaatctccctaatgttagatgccccatctgcacgataaggtcttactcgccaaaccatatggtcagtcaggtaaccatactcggctgtaatttcttcagccgtccaagtgattgtaggtgctacaacaatctctgttttaacaacagtagagttctcagcattgataatctcaacctgccattggacagcatcacctacttcccatgacatagtacagttacctacagagtctttcttagcaaagccctgtccaactgttcctgctgtttccggtacagcaacatactcagtagtaagacccaatgcacctgattcaatatcatgttcttgagcacgaacagatacgcttgaagcagtaaagccataagcagctacctgttcttctcgtgtgaacacaagattgttatcagatacaaactggtcactaatagttgcactggacgttacatgcatatttcgaatacgaacatcacgtccaccaacagaaggtttatcccacataatcttaatattagagttacctgggtcaccggtgaacactgcatacaatccagcaacaggattcattggattagatggctgctctgtttgaccagtaacttgagcaccaatagatactaatccgttacttgggtcatactcagataccatgaagatgacatgagtagcaccaccttcttccaggccgtagaactcgttctgttctgcaacagtccatgttagagattcactagaccattctttagagaagataacagtcttagaatcattaacactggtattcactacccagaagtgttgccatgaaggacgtcctacccaagtgaagataatgtcaccattaagctgtttagcagctttcagttgagtaggagtctgcatataggaaccattctggactacccctacaaaggaagaagatgcacctactgcaccagaatcagcagcatactcagaaacagagaaactcatattaagagtgtccccgttataagcattttgctggtcattcagggtaaacacatactcgggactggtgaggataccagaagagatttctgcccctgtggtgacatgacggttagcatacttccagtgggtaatcccagcacggttatcccatgtcatcttaatatcacgagtagctaacttacgaccttgcagatttgctggtgggcgcaagtaagaccaatcaggtggattagtagcacggttaacattaagagccagtgcttcacctagctcaatggctgtggcatggaatgcttctaccgtgtagtaaatccaactggattccacattacggtacgcagtgtacaggttagaaccaggaacaaaggaacccagtttaaagcctatattagctgtagccatctgaatctgtttatcacgtacagtaacagtagcttcagagttaaggtcattaggtggagcaacaccaaaccaaacagtagtagccccctggaaccaaatctccagattagggttgccccagttggttctcatccatgcaagcattgctttgttagacgattcaaaagcagtcattaaagcaggccatgtagaagaattaacatccttcatatacatggtttcccacggattagcttcaatgaagtaatcaggtttaacacccaaacctttaaccatatcgttaatagccagtagtgcatcacctggggaattactggaagtattccaccatttgtgagtacctaccgtcatacctgcactatcagcagctacgttaataggcattacctgaataggacgtaatccagctttctctgcaaaagtcagacgtaacgtagaagcagataccttgtctttacgaccaattgcaccattagctgtggtagcagttgggtcagacatatcagtaaagtgtccaccaccaaactggttaatacctaccagaatggtcttcttaacaagccctgcattatccaaaggaatgttatctgaccaaggtgctgaaggaatttctctttcctgatacagacaaactactcgccacttcatgaactcccacggattaggagaaccaaccgcttccatcattacaggaatccagtcttctacagtgaagtcagcatatacataaccatttgcttcttgagtacctgatactacaaatgagtgaagtatctggttcaaattagaagggttatagatttcaatacgatattgagctaatgcagggtctaatccgtaagacttccaacggaactcaatatctccccatgtattacgacgggctgccaggaaagaaggtaatcctgtacgaataggtacattaggttcatcagtgttagtgatgccccatgcatagctcagttcctgaatgaagataggaatctgtccatacaaactacgaagatactcaaataccttcttagtagcttgcttggttctggttaatgatggtgctgggtcacggtcacctggatatgccaaagcagtggcatcttggtcaccttgcccccaaataatagctttaggcttgagcttacctacttgctctacacaatatagtaatgcaggaccgggtttatctgcttctaaatcccaccaccaaagaccacctgcatcggatgattgggtagggtcaaatacttcagaatcaggattaactgcacatgcacggtctacagcagtagaaccagttgtcccattaatagggcgtacacctgcatagttaatgccccaagtttcagtcatgtacttctggaatacatcatagccacggtcagggtatgcaccagacatgaagtgaatagcaacctgagattcaccagcaaatagaattgggtaatctaatacagtctgttctgtgattaactcacccgtttctttatcctgacgctcaggagtaaggttatagccatcatcaaagcctgaagtcatgcccatacccatcactacttgtggatatttacgttgacccagttgcttacgaccggaaccagatacagtaaggttagtaaaccatttaacagagtctacttgtttaataggaccatctgttacttcgaactcattctctgctgctggagcattaccattaacatccaagtatctccagatgcattggagtttatccccagcagctaaagcagcattagtatgaatacccccaatttccatctggaaagtagcaccatcgtcattgttatacatggcggcaatgtaagcatctttccctagaccatgatgtgcttcagtacagtcgaaagaaatcattgtgatattacgagggttaatagttaccccattaaatgccacacctgtacgtaaatcagcaaagtccagaatgaagatatagtccttagtgccatagacttctgtcatttcagattcaggaatatcttcatcagtagctacaaagatgtcagcctgatacgttctcttggttccatactttgtatccaaacactcccatcgacgggttttattattgaatccatatggagccagacgatacgtatatgctttttcaggagtctgaatagtaactgtgaatttatctggttcatcagggttatgacgaaaagccagaatcagacctaagtaattagggtctgtttcataacgatacagatgatggtcaaaggtatcctccgtcatccaacggacacctaagaagtctttgttagtacgccactgacaaggaactttaaaagacttagaaccatacggaatgatggtggctaccattaaggcattgtaatcaactacccaatactcagggtcgaaacgatttagtttagtgttataagtccgattacgacgagtgttgaccaacgtcagatgttccctgtctttcttaaattgagggaggtcttctctccaagaagagtgctggtcatccgggtcataattaggagaagctaggcaattcttgcctttgaggtaatcttcaatggacataactgctccagtaataaggccggtttcccggccttccgtggtgttaaattcactgaatttaacctgaacacgaccgacatctacgattagagaaccataaggtactttatagattccgtgcataccacgagagtacatgatacccataccttccaatggggcatcaagtaaagaaccatctggtttagcaatcttcaatacgaaggaactatcagtatgactcttcagttgtgccgtaagctgagtaccatcggtaggtaacagtaagctaaatgtaacagtagaatctttgataagagtactgtgatataccgttaactcaccagatactgtatcgaatgcacaataagtacccgaatcccaatcagatacagcagcccaaccaccacctgaatatttcagttgtgcttctgcttcaccaaccataaccagtacagcagcccctgccgtaacactggagaatcgtggggtcagtggagccttgcctgtaggggtaatgaaagtcatcactggttctacagtctgaaggctaggtggatatccaagagtgatgccaccatatgcatctacattcagagtcactgcactggaaggcatgatacgggtattcacaccggagattgctttagcagttaggtctgctttaaaacggagtggggcagtaacagatacagtagctgtattgtcagtagtagatgcacccataatcaggccatccaatgccatttgttgactaggtgctaccaacaaaccactaactttaccggctttataattaagaaccaggttagctactgcaccagcagtaggggcattcatgttgatggaaccagtagctaacgaccatactccaccagtagaggtcagtttacctgctacagcataaccacctttgtcattatccatagtaataacctgacggagcattgcacctactgtattagctgcataagtctgtgcctgattaaagccaatcagacctgcaccttcagcagtagcatacttttcatggtcagcaatgattgtgtctagctgctctgcaatggtaactaagtcacctaatctggcatgtacagctaatagttcagtcatgtgattatccaaatcaagcagtgctgccatattggtattcacattcttaatcgcattgatattagtacttactgtattaacagcatcaatggaaccagcaacggtattcacgttggtaatgctattagcaacagtaattactttatcaatttgagcagaaacaataattactttagcaatatcagttgctactgtattaactgcgtcaatgttagaagctacagtattgattggagtcaggttgtcatagaccctcagcaatgcctgaagattgtcatatagaccagtcagtttagataattgattgtagagttcctgtaacttatccagattattatgaataagttgtagttcatctagcttagtgtagatagcagatagctcagttaacttgttatggatagcaagtagctgagtcatattatcactgacatttttaataaaggtcattcgtaatgctacgaacttaacaacgtagtaagcattaccaatcatcttatcaacgattgggtcattaagtgtttcgcagcaataacagatgctgtcataaaaggacagatactctgctgcctttgctgaactctctggggtattcagagaagtgtaataacggtaagcaatgtaggcatccaaagctgggtcaagggtatcaggaatgtctatctcattatagccatcctctgctgtagacagtttaggatgtttagcctgatacattacgttcaatacttcccatgcttttggagcattgttctgtagaacgtttggccttggggtgaacaaactgtgaggattatttcggtcattcaacggacgtctacgacccttatcgtcatacacttccagaatacgaataacatcctcagcaaacttctcacctgctaagtccataatgaagggacacttcacttcatttgggtcataagactgaacagcatacttagctagtaatgggtagttggttctaccttcttgcatctcaacaaccacgttgttgttacgcatgttgaagcgaccatgcagacgagtcagtgcctcattagcagctacgataatgaaaggcttactatcatcttcaatgtcacctttgtcatctgtaacgatacctgcttgtggtttccacgggttcaggtagccaagcattgaaatggtatcaatacagtcatccttacctttaagaccattgatagtggctaaacgaatttgccccataaagagtgtcatgattgggctatctttcatttcagcaggaaaatacatcttaccagctttgaaccagggaaccacgaggttaaaccttgatagcttactggttacaggatgaatacccggttggcctccacgactggatgcaaagttaaagaacacattacggttaagcatttccttctgaagaagagaaataaaaccaccttgctgtccagtagtttctacaccaacttgttgtggttggtattcctgaaccagacggaataagtcatcaaagttcttatccat

SEQ ID NO: 137472 - DNA, 1574 bp, Homo sapiens
caccagaagacctgtcaggtctgcctcgttttaaagaaaatggtcgtgctgaatttgctccatttgatgagctattcccattggaaggggatgctgtacctgaaggatttaatggctggcttctctttctcgatgagtttaactccgctcgtaaagagattcaggctgctgcttataaattggtactcgaccgtatgactggtcagaagaagctacatccttatgtagctatcgtatgtgctggtaacaaagcaactgaccgtgccattactaataacctgtctacagctatgcaatcacgtcttattcatctggaaatggagactgattttgatgtcttcatggaagatgtagccatccctaataagtgggatgagcgtgtaattgcattcctgaatgctaacccaaataaactgaatgattttgaaccagaccatcaagagaagactttctgttgttctcgtacatgggagttcgttaacaagattgtttccattctcccaccaggaccaattaatagtgaaatgactctactgttagcaggcactatcacttctggtgtagcaacatcattcgtccagtttactcaggtctatagcaacatggtgtctttgaatgagattttggataatcctaagaaagctcgtatgcctgaagacaataacctgttgtgggctgtagtcacttcactgattaacaatactgacgaagataatcattcgaaaatctttgattacgttgaacgtatgccatttacgttcaaggttttgtactaccgttccgtagagctatctaaagaacgccaactatggctatctcctaataaaacaatgattcaggcagatctggcagaagtacaacgtatgctggatgaatggtctgaagaccaaatgttcattgatggcaatgcagaagcaataaccgatgacatggcctctgatatggctgtgtttgtattacaagcaatggctgaaaagcgtgctcaagatgctatggccttcggtatttctgaagacccagcattcttccaaatactcagtgctaacctctattctaatcagaaactggcaatggtacgtgagacattgtgcaatagctgggatgctcatattgaggggaataaaacagatattcctatccatgtaaccattgataaagatggtttccttatcttccgtgactatggttctggtattcctaaagataagattcaagaggtctatggggtatatggtgcatctaccaagaaagctaatactgcttccactggtggctttggcttaggatgtaaatcccctatggcctatacagacagttttactgtcacatctatgtgtgacggaaccaagactgtctatcacattgctaaatcttctgttgagactaacggtaaaccagggattattcctattgttagcgtacctactgaagaatccgggcttgaagttaaaattcagcttcagtcagaagatattttagaaattgattcatatattcgagccattgtattacatgtaagcaatatgctcatctgtgtaagaaatggggaaatatggaaattgaccgtcaactag

SEQ ID NO: 137473 - DNA, 9159 bp, Homo sapiens
ttaaccggaaacgttttcttcatcagtatggcgtttggttgtatatgtcatgaatcggtattctttcatcaattcatggcacacgtccaaactacacgtaccatccacatcaatgacaatcatatcgaagccagcaatagcattctcttcagcacgatgccctgcttgctgggtcagtacatgtaactggtcaaatggaactttctctgcaatatagtcataagcaaagttctcaccataagaaacaatcatttcgttagtatcagtctctttcagtgtttcaccacggaagaactcaataccttcgttgtatgtcttcttaatgatgatatgctgcttatagccccatgcagtagctaaagtcatcatctcattacgtgcagcattcccactcttatagaatggtaaagcttcaagcaaatctgcatgagtaacttcagtaccaacagatgcaatatacttggctaatttaacgtaggctttttcacgattgaggatagtctggaatgcaacaccagactcttccaccagaagaattgcttgcttcagatgttccatctctaccatgatactgttatcaacaaatgcaaatgcacctgccaatttcagtgccttaaaatagcgatgttccagttctgctttacgaatctcttcgtggtcagctaaagctgctgcttgtttttcacactgaatcttgtagtcgattagtgcaataccaacatcatcttcaactgtcattttccaaccaaacttggatgcatctgcaaggctatgaaagtggttagcccacttattcacaacagcattgttatcctgcttaatcagattacgatagatttcttcagcactctggctcagatatgcacgtttatctgcctgacctacagcaaacagacaacgacgagaatagccagtatcaaggaagtcatagaagagttcctcagtctggctcccattgagaagtttgctcggtgtaccaaacagaagaaggttagctggagttttaccatcaacttcctcactacgaatactttcagcagtattcttagtaagtttctgtttaatcttgccttggtcgtacaactcaaggaacacagttaatacatcagcattagcgagaaggtttgaaccaatctcatcaatctgtaagttaatagcaccacatccagctaataagagtttatgacgtaactgtttcacagcaggaggtgtacctgagtcaaacgtaaatggataagcaccagtacgtctgtattcagcttccaccttgtcaaactcttccttctggtcagtagcattacgagcagaacgttcgttagcaattttccacagacggtcttctgctaaagcaggcatggtgtcttccataaaccgcttcttaaagccagccataaaaccgtcttcaacaatgttgaccgaatggcctttaccgaagcctgaagtagcaagagccactgcatagatgtttactggaatttcaccacggtctttagtgatgatagttgcacccatacatgaagccattttcgcaaggaaataggccacttcaggaacatgaagaatagtgcctttgcctttctctgccatgaacttccgagcctcaaagagagtagggaagtttttggtagaacgagcaccaggttgctttgccttctctgggtcagcaaagtatttaaacactgggtcagaacgccataactcttcatcagtacattctggaatctcgctttcaggagcatcccagtacttatcaatgagagccagcttggctttaatccattcttcagtcgcttcataagacatcaatggaatgtctttatgcagcacacgatgctttggatagttttcttgagatgtagctaatgctttcatccagtcagtgaagatgtagttaatacgaatcacatcttcggtaatcttgtcgtcatgtaaccaacgatacattgacccctgaagtctatgttcttcatcacgtccaccctttacccatgtgtaagtggaggtggattttacatcctgaagaagaccttcagtaacaatgtcgaacttgcccccaatagtccaaccagcaatctttttagttgctcgttgttctatccatacaggaattaagtttggatttgatgcaatctgctcaggggtagggttgatgacaacattctgaacgacacgctcaggataccctaacttgcgtaatgcattgtggtgtccgttatgccatgccttctcaatagaatcatgtaagcctgtacccatagaagtggacaccaaatccatgatgtccatactttctacagaaaggtctacacgatgcttcatgacaatgtgcttaattggcttaagcagggtagtcacagaaagatactttttatccttcacataatcatactcgtcatgcaaaagccagacagcacctaaatcaataacttcagtgtttgtagtggaaccagtagatacagtaccagtctgtacctgggtcattgtagtcttacgaataatgattaagcctacttcacttggttcacgaaattctttctcgtaaacatctgagaagttagtccaactaacctgttcttcttcagtattggtactttcctcatcaggtctgccatcagagaatacactcttaatatgagtaactgtcttcagggtagctgacttaggagtatggttctgagatacctgagtccattcagaagtagaaggtaagtcatcagcagatggtacagatacagcaggatgaaccactgggtctgcaacactagtaggctgtatgtagtaatagttcacatacagatacattgcatcctgactgtaattctctggataaaaggataactcactaccatcagtagcagtgagtacaatcctgtcatcatccatgatgtctatttcaaactcttcagtaatacggtctggataattctcatagaggaatttatcagcccattcctcaaaatcaccaaatccaatcctactgctctgaacctgtacctcataacctgctttttgaggaacttgccatttaactacttcagggtctatctgagacagtattgacaagttcccataagcaataccaattgaagggtcatagttagttgcagcccaaccagggaatcccaatgcgttgttattcttcaatgcagtaagaatgctatccagactggtgttagtgaagccattaggaggagacagaccctcatcaatggttttctgagtgacccatgcatcagtaaacagtttggcagctttaacttcagcatcacgtttataagacgtaatctgttggtcatagagttctttctgtttacctacagaaccagctacacgagtaccatcagtacgagtatcagaagtctgagcacgttgtgcttccttctgctctttcgtcatattgatttgttcagtagttaacttagtctgttcagcaacctgagtggtctggttcttcaacatcagtaattgttgaggaagcatagaggatagattgtattgagcagtacagtaagttactgactcattagacagcttcagcttagtaagggcatattcagctttagtagccagagcctgaatcttagctgtaacaaagttagctttgataataccaagattagcacgagcagtaattgcagctacctgagcagtaacagcattccaataagcctggtgagtagttagttgttctgtggttagcttctctatctctgcatagatagggcgagtaatgactccaggaatatcatactcactgccagacatgtcgatgtcaggaagcgtaagatcatcaccaggcaggtctttcttcttagggtcaaggttctgaatacgtactcgaaccagctttaattgttctaagcgttgctggtgacgtaaagaagttgccgtagttactgtacctgcatcaatagcaccagccaatgcagcactacgaagagtatttgctggaacaactgctttacccagtaaagatgcaccccttaatacaggaccagcacctaatagagaacctaccccttctgctaacccatcagaaataatggagtcagtttgggcagcgttctcaattgaacctacaaaatcacgtccaaatttagataaggaagctactatgtcattagtgccttctttcttatctgtttgatactgacgttcactctctacttcactcattaagttacgagcagcaaagagcttacgtttatcttgtaatgcttggctttgggtagcatggacagcatcattaaacttactcaattgttgagcaacaacagcacctgcatcatcgttgagtaagcctgccccaagagcaccaatgcccccaagggtattaacaaaaccaagaccaacaccagtagcaatatcccccagttcttccccaggagttcttgtagtaactgaatcattgaatacctggttcccagtacgggcagcttgcatttgataagcagcatcaggagaaacaagaggagtagtgacaccttgttcagctttcttctgggcggttgcagtagagacgtcaacttgctttgcattggttacgctgtccaatcgacgtccggcatctctgcctaaacttctccggtttgcctcgctctcttcctgtttaatattttgtaggctcttaatatccaaattctgagggtcagcagctacagcactacgagcaccatcaagaagacgtttagcagtgttaactcgctcctgatagcgaggtagtacacttctaaggttttcctgaccggtctgaatacgacgctgtacttcacgtaaatcagcaagtgcagtatctaacgtattctgtgctgcatagatgtttgattgaatttgtgcagtaagctgattacgagcattctgttcaatagcagtaccagtagttgcaagttttgcatttgcttctacggctgctttatccagttggtaatcaccacccaaatcaataacatcagtatcaaaggcatttcgaataccactaaaccatccctctggtttaccggtgatactacgttgaatgattgctcctgccatagcgggagaaatagcattctgttttgctacctcattgatttgtcgaaccagtgcaccttggttaatgcctttcagttcattgctatcaataatacgtttagccacctgaccagtcgtagaagggtcaacagtagcagcttggtattctggcagcagagtattaccaatattctgcatattacgagtaccaacagtattaccagcaacagaagtgaatgcttgttcctgtaatggattaatagaattacctgtttctgcttgagcaatgtaatccttcatttcatcccatgacaagttcttataagcaccaggagtatcatccggtaaagcagcccatgtactcttcagattgccattcttacgggcattaaaaatagcttcacccagtttgtcttggttctccggagacataggaatgttctgccaatcttcaccaaatacctttggagcaaagtctttaagagtatcttggttaatctggtatgcaccaacaggagaagcacctagtgtcttcttcatagtgtcttgatgctgaaccacctcacctaagttcatctgagtaataggtacatcagttggtgtgaacttataggtagtgtcatatgcagaaccattccgagtaccctgagtaccaggaggagatagggatgcagaaccagttcccggagtatatgcacctggatatgctctatctaactgagatagtgcacgacttactgctcctggtgacatttggtcgaacgtaccctctgcaagcatacgagcatcgtcagcactgtatgcaccacgacgaatattattcagtaactgcatagcagcctgagtatccgcatcgttacgtatatcaacacctaagttgaataagctgcgacgttgaccaataccagcagtaccctgtccttgaaggttgttcatgtagtccataacaacaccagcaggaagggtttttaatacatccccatactgagcctgtgctgcctgaacctttcttgggtcaccagattgataagcagatcgtttcttcttcagaatctggttctgtttttctacccattcttcattaagaagacgggtaaaatctttgattactttactgtcagcaattgtttttaacgcattgttatagtcttgggttaatgcctcttctacctccaatactgtcctcatattgataggcataccagttaactgcatttgaataatatcttcacatgcaggtttaaagatgtttgtataaacatctaactgttggtcattaaccagagtatcccaatgcttttcatagacataccaggtacataatccatccactaagttgtattccaacaactctgctaatgggattctggtaatgtcattgatttcttcttgagcatagttaccagcatattcctgagcctggtctttaagacttagcttattaccggcacaagagttagtagccagataggtaattaacttagtgcaatcccagtttcttagcatgatactcatgccatgcaacaacccttccgtatccagaaggtctgtcataaataactggtaaatgagtgcgtatacgtcaaaggcaatattgtgatacatctgcctgttcagatacttaataaaaaagtccctgagcatagaacgaacaagcatgttgtgaacttgtctaccataaggagcttcagtagccccctcaattggttcataatccacagggaatgcaatcccttcgtgcttgttccagcagaatgtaatagtgcctataccacagtcataatgcttcagactgaaggtttctatatctactgctaatggaacatccatctccagtaacttatctaaccacttagatatagcttctggagttaatgggtaatcagcataatggataatcttagttcctggctcaacataagaaccagagacataatcaatcagagcctgcatggataaagcaatcttagtctttatcttatctgggtcataaaagatttgtctgtaattgggaacgtaaataactttctggttcccataagcacaatccattacatagccaatattggcatcagctttaccttgtttggttagctgtttgtaatattcagaatcaccacagatgatatactgagtttgtgctgcttcgaatgctggcactaattcttgggtaataaactcctgcatctctttagcaggagttttctttttccctggggctgtatgaagttcaagaatcattactgaatctttatctacatcccagggttccatgtatgctttgacaatatcatccttacgtaacgttgtagtaaggatagcaatagggtagataccctcattgttgaatgtaatgtaacgcatacagacctcaaaagataagatgggttcccgcatagtattcgataatcggcaagattttctcatatgacggagagccatagcatcattatccagagtaaatgctgcctttctggttctctgtaaggatttcagatgaccttgtttatccatagcaatgaggcattctggcaatgcatcacgaacgtcttgataagtcttacagccctgaaccagacgaaagaccatctgattcaccatatggacttctagcagaagtttacctgcttgttccagatactcccgcatatcatccagtaggtgattagcaccaaatttctctgccaaagagccatagaacacaacacgatgacgagcacgagatactgctacgtaaagcagacgtgctactacatcaggctgacggcaagtagataaatcagtagcatcaataaagatggtgtcgtaggtagaaccttgagacttatgcacagtagaagcatgtaatgctcgaagttcagggaatgtttctttcaaatagaagtgacgttcccagttcttttggtgtgcatagtacttttgcaaacgaatgaaataatccatatctaccggaatagggataccttcaaagacaccaccataaccagtatccagggtgcaatcacgtacttctaattcgatgccagaggaatcaatcagaatcttacgagtagcagaatcctggtcaacaatctggcattcctgttcaatactaaggcggtcaccagcaccaatctgaatagcagagttacttactaactcttcaccaatacagaactctccgtggaatccattcatggctcgaatgaaggtgttatagttaacaacctgttggttggtataggcaacaatacgagtgtcagtcttagtcatgaaatgaccttcgacttcttttctcatttcatcaccatctttaatccagtcgataatacctggaactgctttaataggcaggaatccgtgcttaccttcaatggttccacgaagctgttcatgcagtgcatggagttcagggacatcagtacgcatctgttgggtcagcataaactctttaatgctactgtcattgtagacaggggaagaagttcctttcattactttcttattctcattgaaaacaggctcaccgtcttcaaattttgaataattagaacggttcacttcagtgagtgctccgggtacgttcatacccaagaaagtaccgatgccagttgctgtaacaatctggtctgccagtgcatccagaatagctaagcgattgctgttaggtgcataaacttctttatcagaggacttcattaattctgacaattcagtcaaagctgcaatggcattatgaagtgtatcgtatgcttcttcagaatttggagccaattcttccagcatctcaactacttcttccagatgacaaccaatttgggtactaatgtttttactcgttgggctgggtactgccttcagaaaccagttctgagtttgtaccaacgtatctggttccagagtcttagcaaattccatcagttgatctaacaaatcgttctgtgcacaacgcattgcacggaagtcttcgttagaggaattggttggcagatgttcctgagtatccagtggaataccagtaggcagagagatgaaacgttcatcttcagtgccttcattagctacatagccaacgttaatccagaattgagctttcgggcgagaaccattgttggattcagttttagtagaagcctgaccaaaagttttagcaaaagtagtgatagccat

SEQ ID NO: 137474 - DNA, 17727 bp, Homo sapiens
atggctagtattgattctattgccgtatgtaatccacggcaggtacgtaaatttgttgaacactgtatccgttcaggattggttccatttatcacttcatctcctggtatgggtaaatctgcaattgttcgtcagattgcagaagattttggcctgaaactgattgaccatcgtctgtctacttcagcaccagaagacctgtcaggtctgcctcgttttaaagaaaatggtcgtgctgaatttgctccatttgatgagctattcccattggaagaggatgctgtacctgaaggatttaatggctggcttctctttctcgatgagtttaactccgctcgtaaagagattcaggctgctgcttataaattggtactcgaccgtatgactggtcagaagaagctacatccttatgtagctatcgtatgtgctggtaacaaagcaactgaccgtgccattactaataacctgtctacagctatgcaatcacgtcttattcatctggaaatggagactgattttgatgtcttcatggaagatgtagccatccctaataagtgggatgagcgtgtaattgcattcctgaatgctaacccaaataaactgaatgattttgaaccagaccatcaagagaagactttctgttgttctcgtacatgggagttcgttaacaagattgtttccattctcccaccaggaccaattaatagtgaaatgactctactgttagcaggcactatcacttctggtgtagcaacatcattcgtccagtttactcaggtctatagcaacatggtgtctttgaatgagattttggataatcctaagaaagctcgtatgcctgaagacaataacctgttgtgggctgtagtcacttcactgattaacaatactgacgaagataatcattcgaaaatctttgattacgttgaacgtatgccatttacgttcaaggttttgtactaccgttccaggaaaactgatatgtccatgacagatgctcaattaacccgtgaatatgacagatgtcaggctaaagcctttatgggcaaaactgctgcattctttggttcactgttatgttctctgaagttccgttgggtaaaagatggctgtgatacagcacaaaccgatggtgagcatctcgaatggaatcctgattggtttgaaagtctattacctgaatctcgtgtaacagtacttatgcatgaactatggcatgttggcttactgcattctgttcgtatgggttctcgtgacccagaagtatggaattatgcctgcgatatttatatcaacaatcagcttattcaggatggctacagctttataggaatcgaaaattgctggaaagaccctaagtatgctggttgggctgaagaacaaatctatgatgacctcatgagcaaacagatacgtcctcctaaagcatcaggtgcttttgggactggctcaggtggtgacatgaaaccttccacttcgaaggctagtcaggtgaatattgtcaataatgtagtaagagccatgcaccaacagaaactatctggtggctctttgcctggggtattacctggaaaaatggaagaagttattactcaattcctgaaaccagtagtaccgtggcaggttttacttgaacgcttcttcaatgacctgcaagaaacttactactcatggcaacggcctaatcgtagataccctgatatgtacctaccatctcctatggatgatgacggtagactggaacatctggcttatttcctcgatacatctggctccattaaacctaaagatgctttacgctttagctctgaagtggcctatgtaaaagagaaatatcagcctcagaagatgactctagttcagttcactacagagattgtagatgaacaagtcattgaagatggtgataagtttactgatgtcactatcaaaggacggggtggtactagtctggttcctggcatggttaacagtaaactcagttcaggtgagactacatttggactgggagaagctggttatgacatccgtattaaacaggatgttaccttctaccgatttcttggtttgattccctgcatcaagattaaagatgaaggaaagaccaagtggaagtttggcactttcacattagcttctgcaatggaacgtttcaatgtacctgctggcctagtaggtattgtccatgacaaatctacatgggcaaggcgtacattatctgtattcaataccgttattgaaccaggatggtcaggctatctgactttagaactggtttatcacggtcgtaaaaaacttcatatccctgctggttcaggtattgctcaggttaatggtcagaaagttactgttgttgctcgtaacgtagcttacgttactgaaaacagtgaaggccgtggtgtaattacttttactaacggtgattccattgatacccaggtaggttatgactctatccgtcgtaacgtagctaaagcacttgatggtgctaaagacatcgcagaaaaacgaacaccaaagctgtatcaaaagacttcagaagacggtttagccttgaaccagaaagctattaaggctgttagtgccctggttcaaggtaaacaggatgctgttgctttacgtcttgttgttgagcaaatcttagttgctctgacactggctcaagtagctaaacaagaaggtaaacaagaaacctgtaaaacagcattaggtgctttgtactggttgtataaagaccttgctgacaactttgaaatgtctatggataagtggcagggcatttcttgtgtacttgctcttagagaagggcaggaattactgtctactctaccaaaagcagaatttaaactagcctacactggagcacataagattgttcttggttccataaggacatctttaaccacctcaagctattcaaggctttctatgattaatgcaaaaatcctcgctgatagtattactctttctggtgaccgcctggtaacaatggaactggtttatccgcgtttcattcattcagaatttatgactcaccgagcacttaatcgtaatgcttccagtagtcgtgctattcctacccaacgccttattgagcaagttcgcaatgaaccagtaatgccagtacattggggtaagaaccagaaaggaatgcaggcaagtgaagaactcactcctatggagattaaggatgctgagttcatttgggaaaatgctgcctctgctgctgctgtatatgctgaacaacttcgtcgcggacaagtacataagcagattgttaatcgtattctggaaccattcacgcatatccgtgtagtagtgacagctactcaatggaataacttctttggtttacgcattcatcccgatgctcaaccagagatttgtgaattggctactaagatgaaggaacagtatgaccaatcaaaaccccgtaccctgttggctggggaatggcatttgccgtacattactaatagtgattacctcgatgcttacgattattgcaaacatcaacgaattactcgtgatgaaccaagtagtgatgagattaattgcctgttagtaaaaatctctgctgctcgttgtgcccgtgcttcctataacaactttaaaggtactccttctactatcgaagaagacttgcgtttgttctctaaattggttgaaagtaagcctgttcacgcaagtcctactgaacatcaagcaactcctcagcatgtaatgagtaaaggcttaaatgagcctactgacccatctacatgggaaaatggcattagccacatggacagaaatttacgtttatactcaggaggccatatggctaaaccacgtaaattccgtattaaggataagcctgtaatgggtagtgctgctggtcagtcacatgagaaaggagacattgtttatgaatgccttcagtatgattacggcgttgctcatgatgacactcgtgctactgagctatctaaagaacgccaactatggctatctcctaataaaacaatgattcaggcagatctggcagaagtacaacgtatgctggatgaatggtctgaagaccaaatgttcattgatggcaatgcagaagcaataaccgatgacatggcctctgatatggctgtgtttgtattacaagcaatggctgaaaagcctgactctactgaactgaccacatcagcaacgttaggtgctcaagatgctatggccttcggtatttctgaagacccagcattcttccaaatactcagtgctaacctctattctaatcagaaactggcaatggtacgtgagacattgtgcaatagctgggatgctcatattgaggggaataaaacagatattcctatccatgtaaccattgataaagatggtttccttatcttccgtgactatggttctggtattcctaaagataagattcaagaggtctatggggtatatggtgcatctaccaagaaagctaatactgcttccactggtggctttggcttaggatgtaaatcccctatggcctatacagacagttttactgtcacatctatgtgtgacggaaccaagactgtctatcacattgctaaatcttctgttgagactaacggtaaaccagggattattcctattgttagcgtacctactgaagaatccgggcttgaagttaaaattcagcttcagtcagaagatattttagaaattgattcatatattcgagccattgtattacatggtgagattaaatgtatttactgcaatcagtatacaggaccaaatacagtagaattactgcctgtactgggtatgtcttttgaaccaggtagctataacctagaccatagcacatggcataaatattacatgggcagtcattcaatatttatccgttatggtaatgttatgtaccctgctttggatacccctgctacacatgaagcattaaaactggttaaacagtttatgcaggttattaactgtagccgtatcgttgttcaagctgccccatcatcactagctgtagcacctagccgtgaaacactgtcatctcaaaaaatgaccgaagacggtatcgtaaatttggctgtagctttagtagataaaatggaagcagatattaaagctcgtcttccaaatgctattgaatatattgggaaggctattaaagaatatagtcctcaccgttttgaagtaaatagttatttgccttacaccaatttagtgcctgatgttattgtcagtcgttatatgtcctctactttattcagtaagcaatatgctcatctgtgtaagaaatggggaaatatggaaattgaccgtcaactagaacatcctgcactggctcatttctctggttctcaaaaagcccatctccgtaagcatttaaagagggctaaggatttacgtaattacagggaattaactaaagtatttactgatatggctattaagccaatgttcaaaacctttgctaaattggggattactaaaggtatttccctatttcattatcaatatggtgttgaactgtggcgtaataatattgttaatagtgtccgtagaatacactcattaaacttcatgacttatagttctaagaagtgccgtgtatttgttaccccacgtattaccaatattgaagatagtctggctgggtatccagagtttgataatctttctactgagacactggtaaaatataactcaatcattgtcaaagttggaaccaagaaaggtgaagcagaggctatgactaatctgctcactaaagcaggatacgaagtcattaatatggctgaatatcatgagtgggattgtatagctcgcagacgtaaagaggaacaagaggctaaattagccatttccaaattacaagctaagaaggctactaataagaaaaaggttagtcctaatcgtcttattagtatgaatatccttgaaataccaaaagagcatcgtagctattcaagtgaggtatgtggttctcactacgcttctcgttctcatgaccgaatggttgatgtagatactccccagtattacatcatgcaggaagatattaataactacacaggaaggcttggtgttctttctatgtggcaattaacccctgctaccattaaagctgtaactgttgtttgtcgtaataaaattgaacgtaataaagctattaagcgaggtgctgttcatttggatgaatggactgctccgtatattgcttcagttcttacatccaaacaattcattaagtatgtcactaaagaacgtcagaaaacgttaagtgatattggtatttactccaaacacctcagattactgagagaactggatattacatatgccccattgaaaggtctgcgttatgacccagaactggagaatgcttatctcttcttacaaagtagtagctatcctaagctacgtgcattgttagggaagggtctgattactgaagaagagtatcacttcctcagtgatgttgatgtgcattgcaagactttcaacagtcgtaacctcaccttatggcaaccagatggttctactatggtcatcccccaaggggatgcccgtgtaccacgtattgttgctgaagcaaaagaaaagaatcttaccccaggtaagattatcgaagtggatgtcactatcgaagctcagattcgtcaggagtttctggacgctgaacgtgatacaggtggctttgttaaattcttccgtattaccaagaagaagctacaagagttcttcttaggagaagaggaagaacaagtccctcatgtatcacctgtagagttaggtgctaaacccactgctttcaatgcttttattgctaatgctgggggcaaaactcttgctgtacaacatgcatcattaaaagcacctgaaccagaaatgacagttactcatgagcgtttttacggtaactatgctgtatggattacagatgtagacccacggaatcatcgtattgaggttattcatgttatccgtgaaatctcaggaagaaccagtgaatatgtcaataacctgctggctcaaccaaccccattcaaagtatttgattggctcacagagacgcaggctaaagagtttgtaagacgtctgaataacactcagggtgttatctctgtctataacaaactggaagacggtattcctgttaaggttgctgtaaaggccacagagccaaccaataaggaaaagctggaagctgcatcaactaagctgaaagctatgggtgctgtcgctactgatgcttatgagtttcatactgacttgaatgagaatgaagagactattgtagctgtagtgaatgataaggtggttcctgacgttcagaacctacaccgtcacatccgtcaatctgcaaacctgaaagactataaaggctttactaagttccttgaacgtctgtctactgtaattgataaacgtcgccactctgttgaagacctgatgaagtttatggaaaaaggtgacctgcccattgcagatgatggctccattgttatcttcaaacgtctggaaagcaaagacaatcctgaacatctcaaagacgtaatggatgatgtatttgttgattgccattctaagaagattgagcaatgcgttggtatgcgtgtaatggttaaagaaaaccttgtagaccagaaccgtcgtaaagactgttctcatggtctgcacgtagcttctctgcaatacattcgtaatttctcaggcaacgtaaccattattggtaaagttgctccagaggatgtatttgcagtaccagaatacgatgttactaagatgcgtgtatctgcttatcacatcattaccaagctacctgatgctattcgtgaccatgttaataatggcaatccaatctccaccattgagggtggtacggaaatcctgaacatggttctcagtggtaatcaccctgaaccttcccgtcaggtactagttggtggtcattatggaaccaatctgacttattcagaactcactcgtaattatctggatgatgatgaagacagcgttattccagatgaaccagtaattaagaaaactgccttgaatatggaagagagctttacggcaactaatcctaaagctgaaccagtgaaggcaacggatgttaaacctattaagaagactaagatggaaattcttaaagacctttggaaccagttcctgaaagcagagacttctaatgaagctattacactggctgatgaaatcattgctgctaagggcaaatgtaagaaatcatgggcttctttaggcttcagtggtgacatggttcagaaactgattgatgctcgtgctaataaacctaagccagaaaaagcagtcaaacaggataaaaccgttgcacctaagaaaactacagtcactcgtagtcggaatgctgatgttattcgtagttatctaaatgacaaaggtatgtctgattactgtaaagctcatgccattcacgatgtgaaacgtgctgctaagaaatcttatgctgcactgggtctgactcctgaagaatgcagccaaattgataaactgaagcatcacctgaagatacatactatggccaaagtttatcgtgctaaccgtaaagcccatgatgacgatattattcgtatgaatgcagtcggtttatcattgggaaccattgctaaaacactgggtgttcaccccactacagttaccttacgattacgctctcttggtattgaaccagccgacacacgtcgaacatttatggagaacgtactagcaccattacctactcacgtagctgattggttatcagaacaagtaggaccaaaatatgagattcgacaatacgttcgagacttattactggaagcctacaataatcgtcataatcataaggaaactgctcatgaacgattcctcaaaagatacgttgaagtagttgagatgctggaagaattggctccaaattctgaagaagcatacgatacacttcataatgccattgcagctttaactgaattgtcagaattaatgaagtcctctgataaagaagtttatgcacctaacagcaatcgcttagctattctggatgcactggcagaccagattgttacagcaactggcatcggtactttcttgggtatgaacgtacccggagcactcactgaagtgaaccgttctaattattcaaaatttgaagacggtgagcctgttttcaatgagaataagaaagtaatgaaagaggcagcggcagaaggtttcttcgactttctgctcgaccccaatgcttctgaacttcgtattagtggacctggtggtacaggcaagacatttacaatggctcatatgattgacgagattatgcctcgttatcatgagacatgtagtctgatgggaatccctgctctctataacgaagttattatgactgctactactaataaggcagcagaagtattagcccgtgcaacaggacgtcctacgtctacctatcattcctttcaaggtctgacagtacggaataacctgaagactggggaagcagacctgattccatctaagtccttcagtatcaaaaagaataaggtcatttttattgatgaagcatcaatgattgaccgtaaactgaagaagtttattaacgaaggtactcaccaaagtaagattgtttacttaggcgataaatgccaattgttacctgtaaaggaaacttcttcccctgtctacaatgacagtagcattaaagagtttatgctgacccaacagatgcgtactgatgtccctgaactccatgcactgcatgaacagcttcgtggaaccattgaaggtaagcacggattcctgcctattaaagcagttccaggtattatcgactggattaaagatggtgatgaaatgagaaaagaagtcgaaggtcatttcatgactaagactgacactcgtattgttgcctataccaaccaacaggttgttaactataacaccttcattcgagccatgaatggattccacggagagttctgtattggtgaagagttagtaagtaactctgctattcagattggtgctggtgaccgccttagtattgaacaggaatgccagattgttgaccaggattctgctactcgtaagattctgattgattcctctggcatcgaattagaagtacgtgattgcaccctggatactggttatggtggtgtctttgaaggtatccctattccgaaagaaccattccctgaacttcgagcattacatgcttctactgtgcataagtctcaaggttctacctacgacaccatctttattgatgctactgatttatctacttgccgtcagcctgatgtagtagcacgtctgctttacgtagcagtatctcgtgctcgtcatcgggttgtgttctatggctctttggcagagaaatttgggggggagttctattcgagttcccgttcatcacaacaacctccttctggtcatcgtctggctctagctaatcacctactggatgatatgcgggagtatctggaacaagcaggtaaacttctgctagaagtccatatggtgaatcagatggtctttcgtctggttcagggctgtaagacttatcaagacgttcgtgatgcattgccagaatgcctcattgctatggataaacaaggtcatctgaaatccttacagagaaccagaaaggcagcatttactctggataatgatgctatggctctccgtcatatgagaaaatcttgccgattatcgaatactatgcgggaacccatcttatcttttgaggtctgtatgcgttacattacattcaacaatgagggtatctaccctattgctatccttactacaacgttacgtaaggatgatattgtcaaagcatacatggaaccctgggatgtagataaagattcagtaatgattcttgaacttcatacagccccagggaaaaagaaaactcctgctaaagagatgcaggagtttattacccaagaattagtgccagcattcgaagcagcacaaactcagtatatcatctgtggtgattctgaatattacaaacagctaaccaaacaaggtaaagctgatgccaatattggctatgtaatggattgtgcttatgggaaccagaaagttatttacgttcccaattacagacaaatcttttatgacccagataagataaagactaagattgctttatccatgcaggctctgattgattatgtctctggttcttatgttgagccaggaactaagattatccattatgctgattacccattaactccagaagctatatctaagtggttagataagttactggagatggatgttccattagcagtagatatagaaaccttcagtctgaagcattatgactgtggtataggcactattacattctgctggaacaagcacgaagggattgcattccctgtggattatgaaccaattgagggggctactgaagctccttatggtagacaagttcacaacatgcttgttcgttctatgctcagggacttttttattaagtatctgaacaggcagatgtatcacaatattgcctttgacgtatacgcactcatttaccagttatttatgacagaccttctggatacggaagggttgttgcatggcatgagtatcatgctaagaaactgggattgcactaagttaattacctatctggctactaactcttgtgccggtaataagctaagtcttaaagaccaggctcaggaatatgctggtaactatgctcaagaagaaatcaatgacattaccagaatcccattagcagagttgttggaatacaacttagtggatggattatgtacctggtatgtctatgaaaagcattgggatactctggttaatgaccaacagttagatgtttatacaaacatctttaaacctgcatgtgaagatattattcaaatgcagttaactggtatgcctatcaatatgaggacagtattggaggtagaagaggcattaacccaagactataacaatgcgttaaaaacaattgctgacagtaaagtaatcaaagattttacccgtcttcttaatgaagaatgggtagaaaaacagaaccagattctgaagaagaaacgagtgactttagctgatgctaaagagcagtttaatccaaactcaggtattcaattacagaagctactttttgagtttctggggttacctgtactgggtctgactgcaagtaaactacctgctactggtagtggcatactcaagtctttgaagaaccatactcaagataccagtattctggaaattcttgatgctctgattgattacaaagctgtagataaaattctgacagcatttattccagcattaaaaaatgccagacaaggaccagatggttggcattatctctttggtaatctgaacttaggtgggactgtatcaggccgtctatccagtagtgaaccaaacctacagaacctaccttctggttccagatatgccaagatgattaaaaaatgttttgaggctcctcctggatggatattttgtgggctagactttgcttctctcgaagaccgtatatctgctttaacaaccaaagaccctaataaactaaaggtgtataccgatggttacgacgggcatagtctacgtgcatatgcttacttcggtgagatgatgcctgacattgaagatacggtagagtctgttaattctattcaggagaagtacaaagcatatcgtcaggattctaaagcacctacctttgctcttacctatcagggcacgtacatcactttgatgaagaactgtggtttccctgaacagaaagctcgaatggttgaggaacgttatcacacactttataaggtaagtgatgactgggttcaggctaaactagaccaagctgcaaaagatggttatgtaaccgtagcatttggcctgagagtcagaacccccttacttcaacaagttatccgtggaaccagtaaaactccttatgaagctgaagctgaaggacgtactgctggtaatgcattaggccaaagttggtgtcttctgaataaccgtgctggttcagagttcatgcgtaaggtacggaatagtaagcatcgtcttgatattcgtccaagtacccatatccatgatgctcagtatttccttatccgtgatgatatggatgttgtgatatataccaatactcatttggtgaaagcagtacaatggcaagaccatcctgatattgctcatccagatgttcatttggatggtcaggaaggtgctgttattgttcagaacactatgctgcttactgaagagaaacaggtaactttccgtgacctgggacgtgctcagtctgctctgtttcagaatctgaatgaccgttttggtcaagtggtagatgtacgggatattgtattcctgaacgtcagctacttgggtcatatgagccagcctgactttcagcaaaatctggtaaccaaccctcaacgtatggaacagcctccatatcaggccgagtgtgaggatattatccaagcactgaatatgacctttgatgaagggtgtctgttcaaggcattgtggcgtaatgctgctgctcgtttaggtaatggtaaaccaggtaacaatgccgtttatgatgcagagaagatggttcattatgctaaccgcatttttattaaagaatccggtgggcagaaaaaagaagcagaagaaccagtttctgcggctctgaagaagggtgaagagattcatatgtctctgtctgaattattcaccctgttaactggtgaagcagcagaaggtgaagtaatgagccttgccggttggcatactcacgtaccaaaccgtttgggtgttatgcctattgctgttgcaatgagcaaagcagaacaagttgatgtagtacgtgccgatggaacgactattactcatgtatttcctcatgagattgactggtctgataagattgccccctttgctcgaatcactgcatggcgtttcactgtctggcttttgcatgacgagtatgattatgtgaaggataaaaagtatctttctgtgactaccctgcttaagccaattaagcacattgtcatgaagcatcgtgtagacctttctgtagaaagtatggacatcatggatttggtgtccacttctatgggtacaggcttacatgattctattgagaaggcatggcataacggacaccacaatgcattacgcaagttagggtatcctgagcgtgtcgttcagaatgttgtcatcaaccctacccctgagcagattgcatcaaatccaaacttaattcctgtatggatagaacaacgagcaactaaaaagattgctggttggactattgggggcaagttcgacattgttactgaaggtcttcttcaggatgtaaaatccacctccacttacacatgggtaaagggtggacgtgatgaagaacatagacttcaggggtcaatgtatcgttggttacatgacgacaagattaccgaagatgtgattcgtattaactacatcttcactgactggatgaaagcattagctacatctcaagaaaactatccaaagcatcgtgtgctgcataaagacattccattgatgtcttatgaagcgactgaagaatggattaaagccaagctggctctcattgataagtactgggatgctcctgaaagcgagattccagaatgtactgatgaagagttatggcgttctgacccagtgtttaaatactttgctgacccagagaaggcaaagcaacctggtgctcgttctaccaaaaacttccctactctctttgaggctcggaagttcatggcagagaaaggcaaaggcactattcttcatgttcctgagatatttcccatgattgacctgaccggagtctcacatcatccggcgattgaagaaatcgttgatgtgttatgtaacaagacgcaaaacactgaccgtggttttttccgtgtagaagtggcctatttccttgcgaaaatggcttcatgtatgggtgcaactatcatcactaaagaccgtggtgaaattccagtaaacatctatgcagtggctcttgctacttcaggcttcggtaaaggccattcggtcaacattgttgaagacggttttatggctggctttaagaagcggtttatggaagacaccatgcctgctttagcagaagaccgtctgtggaaaattgctaacgaacgttctgctcgtaatgctactgaccagaaggaagagtttgacaaggtggaagctgaatacagacgtactggtgcttatccatttacgtttgactcaggtacacctcctgctgtgaaacagttacgtcataaactcttattagctggatgtggtgctattaacttacagattgatgagattggttcaaaccttctcgctaatgctgatgtattaactgtgttccttgagttgtacgaccaaggcaagattaaacagaaacttactaagaatactgctgaaagtattcgtagtgaggaagttgatggtaaaactccagctaacctttttctgtttggtacaccgagcaaacttctcaatgggagccagactgaggaacttttctatgacttccttgatactggctattctcgtcgttgtctgtttgctgtaggtcaggcagataaacgtgcatatctgagccagagtgctgaagaaatctatcgtaatctgattaagcaggataacaatgctgttgtgaataagtgggctaaccactttcatagccttgcagatgcatccaagtttggttggaaaatgacagttgaagatgatgttggtattgcactaatcgactacaagattcagtgtgaaaaacaagcagcagctttagctgaccacgaagagattcgtaaagcagaactggaacatcgctattttaaggcactgaaattggcaggtgcatttgcatttgttgataacagtatcatggtagagatggaacatctgaagcaagcaattcttctggtggaagagtctggtgttgcattccagactatcctcaatcgtgaaaaagcctacgttaaattagccaagtatattgcatctgttggtactgaagttactcatgcagatttgcttgaagctttaccattctataagagtgggaatgctgcacagaaagttccatttgaccagttacatgtactgacccagcaagcaggttatcactgggctaaccaccatttccgtcgagggcatcgtgctgaagagaatgctattgctggcttcaatatgattgtcattgatgtggatgtccttttcttggttgaagaggactgtcagttaaaagaggaaactatgtcagaagaatttgaacatggcgaaatgaatgaccagctaatcctgattgtaggattttctgctgctggtaaatcggcctcacttcgtaacatccgtaaccaggaacgttgggtatatctgaatacagaagctggtaaacgtctgccatttaaaaataacttcaatggtgttcgtattactgacccataccaaatcctggaatactttgaccaatgcattgaacatcgtgatgacgtggacggaatcattgtagattccctgactttcatgatggatatgctggaaactcagtatgtactcactgctgcaaacactcagaaggcttggggtgaatttgcacagttcttcaaaattctccttcaggagaaagtagttaaatttgccaagccagttatcttcactgctcacgtcaaagacgaagtagatgaacgtgcaatggaactgaagactttcgttccagtaaaaggttctctgaagaacaatggcattgaagcatacttctctactgttgtatcagcagaacgtatcgaccttaaagaacttgaaaagtattccaatggaatgttggaaattactgaggatgagcaagagttggggtacaaacacgtattccagactcgacctactaagaaaacagtaggtaaacgtattcgttctcctatgggtatgttcagtaagcaagagacttatatggacaatgatgcccaaaaacttctcgaccatctggcagagtattactctaccggtcaggcagctaaagcagagaaagcaacggataacctgggtggtggatttggtgcaaaagaatctgatatttatctggctaatctgaaagtagcttatgcaggtaaagcagcttctggtgctaacttcattcagattattgcagacctgactgaccttgatggacacagtgctggtgaatatcgtgagcaactgtacatcacttctggtactgaaaaaggctgcaagtgtacttatgaaaagaatggtaaggaatacttcctgccaggctacactgtaatcaatgacatcctggtaatgacttctggtgagactattcctgaagcagtcttcgaagagaaagtcgttaacgtatatgacttcgatgagaagaaagaagttgccaaatctgtcatggttccagtcaatgctatcggtggtaagtttgctgtagctattctgaaatctgaagaagataagcagactaaagatggctccggtaactatgtgtctactggtgaaactcgtttcactaataccatcgaaaaagtattccaccctgacctgcatctgactgttgttgaagcaaaagaactgactgaacgtggtaaagaactgaccgttgaagaagcagtcttttgggacacaatggctggaaaaaacaaaggcgttacccgtgacaaaacactaaaggcg

SEQ ID NO: 137475 - DNA, 6789 bp, Homo sapiens
atgggcaaaactgctgcattctttggttcactgttatgttctctgaagttccgttgggtaaaagatggctgtgatacagcacaaaccgatggtgagcatctcgaatggaatcctgattggtttgaaagtctattacctgaatctcgtgtaacagtacttatgcatgaactatggcatgttggcttactgcattctgttcgtatgggttctcgtgacccagaagtatggaattatgcctgcgatatttatatcaacaatcagcttattcaggatggctacagctttataggaatcgaaaattgctggaaagaccctaagtatgctggttgggctgaagaacaaatctatgatgacctcatgagcaaacagatacgtcctcctaaagcatcaggtgcttttgggactggctcaggtggtgacatgaaaccttccacttcgaaggctagtcaggtgaatattgtcaataatgtagtaagagccatgcaccaacagaaactatctggtggctctttgcctggggtattacctggaaaaatggaagaagttattactcaattcctgaaaccagtagtaccgtggcaggttttacttgaacgcttcttcaatgacctgcaagaaacttactactcatggcaacggcctaatcgtagataccctgatatgtacctaccatctcctatggatgatgacggtagactggaacatctggcttatttcctcgatacatctggctccattaaacctaaagatgctttacgctttagctctgaagtggcctatgtaaaagagaaatatcagcctcagaagatgactctagttcagttcactacagagattgtagatgaacaagtcattgaagatggtgataagtttactgatgtcactatcaaagacggggtggtactagtctggttcctgtacggcatggttaacagtaaactcagttcaggtgagactacatttggactgggagaagctggttatgacatccgtattaaacaggatgttaccttctaccgatttcttggtttgattccctgcatcaagattaaagatgaaggaaagaccaagtggaagtttggcactttcacattagcttctgcaatggaacgtttcaatgtacctgctggcctagtagtatggaaaaaatcttgccgattatcgaatactatgcgggaacccatcttatcttttgaggtctgtatgcgttacattacattcaacaatgagggtatctaccctattgctatccttactacaacgttacgtaaggatgatattgtcaaagcatacatggaaccctgggatgtagataaagattcagtaatgattcttgaacttaatccagccccagggaaaaagaaaactcctgctaaagagatgcaggagtttattacccaagaattagtgccagcattcgaagcagcacaaactcagtatatcatctgtggtgattctgaatattacaaacagctaaccaaacaaggtaaagctgatgccaatattggctatgtaatggattgtgcttatgggaaccagaaagttatttacgttcccaattacagacaaatcttttatgacccagataagataaagactaagattgctttatccatgcaggctctgattgattatgtctctggttcttatgttgagccaggaactaagattatccattatgctgattacccattaactccagaagctatatctaagtggttagataagttactggagatggatgttccattagcagtagatatagaaaccttcagtctgaagcattatgactgtggtataggcactattacattctgctggaacaagcacgaagggattgcattccctgtggattatgaaccaattgagggggctactgaagctccttatggtagacaagttcacaacatgcttgttcgttctatgctcagggacttttttattaagtatctgaacaggcagatgtatcacaatattgcctttgacgtatacgcactcatttaccagttatttatgacagaccttctggatacggaagggttgttgcatggcatgagtatcatgctaagaaactgggattgcactaagttaattacctatctggctactaactcttgtgccggtaataagctaagtcttaaagaccaggctcaggaatatgctggtaactatgctcaagaagaaatcaatgacattaccagaatcccattagcagagttgttggaatacaacttagtggatggattatgtacctggtatgtctatgaaaagcattgggatactctggttaatgaccaacagttagatgtttatacaaacatctttaaacctgcatgtgaagatattattcaaatgcagttaactgactataacaatgcgttaaaaacaattgctgacagtaaagtaatcaaagattttacccgtcttcttaatgaagaatgggtagaaaaacagaaccagattctgaagaagaaacgagtgactttagctgatgctaaagagcagtttaatccaaactcaggtattcaattacagaagctactttttgagtttctggggttacctgtactgggtctgactgcaagtaaactacctgctactggtagtggcatactcaagtctttgaagaaccatactcaagataccagtattctggaaattcttgatgctctgattgattacaaagctgtagataaaattctgacagcatttattccagcattaaaaaatgccagacaaggaccagatggttggcattatctctttggtaatctgaacttagtgtttgggcatctacctagcttgggtaaagtagaaggaatgatttatgtatctgactctatggataacggtgttaagtctgcccgtaagaacattgagtttcgatacaacaattcaccattcctgcaacaatggattcctaaagctaccttcacagataactaccttgagtttgtaaatgctgaaggtcaccgtcttggtgtgaagatgtttggtgctaagacaggtcttcgtggtactaagattttggaattgatgttacgtatcagctctgaagatgaacgtctgattcaagattcagagattaaatggtattcccgtacgcagctattacgtctacgttcttgttataacttctatatcaccactgactttgctaccagcgagaagcaggtatctgactactctgtaatatcagtatgggcatatggttctaacggtgactggttctgggtagatggtattgcttgccgtcaaactatggataagaactttgatgacttattccgtctggttcaggaataccaaccacaacaagttggtgtagaaactactggacagcaaggtggttttatttctcttcttcagaaggaaatgcttaaccgtaatgtgttctttaactttgcatccagtcgtggaggccaaccgggtattcatcctgtaaccagtaagctatcaaggtttaacctcgtggttccctggttcaaagctggtaagatgtattttcctgctgaaatgaaagatagcccaatcatgacactctttatggggcaaattcgtttagccactatcaatggtcttaaaggtaaggatgactgtattgataccatttcaatgcttggctacctgaacccgtggaaaccacaagcaggtatcgttacagatgacaaaggtgacattgaagatgatagtaagcctttcattatcgtagctgctaatgaggcactgactcgtctgcatggtcgcttcaacatgcgtaacaacaacgtggttgttgagatgcaagaaggtagaaccaactacccattactagctaagtatgctgttcagtcttatgacccaaatgaagtgaagtgtcccttcattatggacttagcaggtgagaagtttgctgaggatgttattcgtattctggaagtgtatgacgataagggtcgtagacgtccgttgaatgaccgaaataatcctcacagtttgttcaccccaaggccaaacgttctacagaacaatgctccaaaagcatgggaagtattgaacgtaatgtatcaggctaaacatcctaaactgtctacagcagaggatggctataatgagatagacattcctgatacccttgacccagctttggatgcctacattgcttaccgttattacacttctctgaataccccagagagttcagcaaaggcagcagagtatctgtccttttatgacagcatctgttattgctgcgaaacacttaatgacccaatcgttgataagatgattggtaatgcttactacgttgttaagttcgtagcattacgaatgacctttattaaaaatgtcagtgataatatgactcagctacttgctatccataacaagttaactgagctatctgctatctacactaagctagatgaactacaacttattcataataatctggataagttacaggaactctacaatcaattatctaaactgactggtctatatgacaatcttcaggcattgctgagggtctatgacaacctgactccaatcaatactgtagcttctaacattgacgcagttaatacagtagcaactgatattgctaaagtaattattgtttctgctcaaattgataaagtaattactgttgctaatagcattaccaacgtgaataccgttgctggttccattgatgctgttaatacagtaagtactaatatcaatgcgattaagaatgtgaataccaatatggcagcactgcttgatttggataatcacatgactgaactattagctgtacatgccagattaggtgacttagttaccattgcagagcagctagacacaatcattgctgaccatgaaaagtatgctactgctgaaggtgcaggtctgattggctttaatcaggcacagacttatgcagctaatacagtaggtgcaatgctccgtcaggttattactatggataatgacaaaggtggttatgctgtagcaggtaaactgacctctactggtggagtatggtcgttagctactggttccatcaacatgaatgcccctactgctggtgcagtagctaacctggttcttaattataaagccggtaaagttagtggtttgttggtagcacctagtcaacaaatggcattggatggcctgattatgggtgcatctactactgacaatacagctactgtatctgttactgccccactccgttttaaagcagacctaactgctaaagcaatctccggtgtgaatacccgtatcatgccttccagtgcagtgactctgaatgtagatgcatatggtggcatcactcttggatatccacctagccttcagactgtagaaccagtgatgactttcattacccctacaggcaaggctccactgaccccacgattctccagtgttacggcaggggctgctgtactggttatggttggtgaagcagaagcacaactgaaatattcaggtggtggttgggctgctgtatctgattgggattcgggtacttattgtgcattcgatacagtatctggtgagttaacggtatatcacagtactcttatcaaagattctactgttacatttagcttactgttacctaccgatggtactcagcttacggcacaactgaagagtcatactgatagttccttcgtattgaagattgctaaaccagatggttctttacttgatgccccattggaaggtatgggtatcatgtactctcgtggtatgcacggaatctataaagtaccttatggttctctaatcgtagatgtcggtcgtgttcaggttaaattcagtgaatttaacaccacggaaggccgggaaaccggccttattactggagcagttatgtccattgaagattacctcaaaggcaagaattgcctagcttctcctaattatgacccggatgaccagcactcttcttggagagaagacctccctcaatttaagaaagacagggaacatctgacgttggtcaacactcgtcgtaatcggacttataacactaaactaaatcgtttcgaccctgagtattgggtagttgattacaatgccttaatggtagccaccatcattccgtatggttctaagtcttttaaagttccttttactattcagactcctgaaaaagcatatacgtatcgtctggctccatatggattcaataataaaacccgtcgatgggagtgtttggatacaaagtatggaaccaagagaacgtatcaggctgacatctttgtagctactgatgaagatattcctgaatctgaaatgacagaagtctatggcactaaggactatatcttcattctggactttgctgatttacgtacaggtgtggcatttaatggggtaactattaaccctcgtaatatcacaatgatttctttcgactgtactgaagcacatcatggtctagggaaagatgcttacattgccgccatgtataacaatgacgatggtgctactttccagatggaaattgggggtattcatactaatgctgctttagctgctggggataaactccaatgcatctggagatacttggatgttaatggtaatgctcaagcagcagagaatgagttcgaagtaagcaaactattcatggaaggatttagaagcctaaaagaaggagaaccagtggaattcacatttaaaaaatcttccaaaggccttgagtcaatacgggtaacaggacctggtgggagcccctgtttaggaagtgaaagaagacccaaagggaagacactacagaaaagaaaaccaaagggagataggtaa

SEQ ID NO: 137476 - DNA, 2859 bp, Homo sapiens
atggaaattgaccgtcaactagaacatcctgcactggctcatttctctggttctcaaaaagcccatctccgtaagcatttaaagagggctaaggatttacgtaattacagggaattaactaaagtatttactgatatggctattaagccaatgttcaaaacctttgctaaattggggattactaaaggtatttccctatttcattatcaatatggtgttgaactgtggcgtaataatattgttaatagtgtccgtagaatacactcattaaacttcatgacttatagttctaagaagtgccgtgtatttgttaccccacgtattaccaatattgaagatagtctggctgggtatccagagtttgataatctttctactgagacactggtaaaatataactcaatcattgtcaaagttggaaccaagaaaggtgaagcagaggctatgactaatctgctcactaaagcaggatacgaagtcattaatatggctgaatatcatgagtgggattgtatagctcgcagacgtaaagaggaacaagaggctaaattagccatttccaaattacaagctaagaaggctactaataagaaaaaggttagtcctaatcgtcttattagtatgaatatccttgaaataccaaaagagcatcgtagctattcaagtgaggtatgtggttctcactacgcttctcgttctcatgaccgaatggttgatgtagatactccccagtattacatcatgcaggaagatattaataactacacaggaaggcttggtgttctttctatgtggcaattaacccctgctaccattaaagctgtaactgttgtttgtcgtaataaaattgaacgtaataaagctattaagcgaggtgctgttcatttggatgaatggactgctccgtatattgcttcagttcttacatccaaacaattcattaagtatgtcactaaagaacgtcagaaaacgttaagtgatattgtatcaggtactcaagaagcaaatggttatgtatatgctgacttcactgtagaagactggattcctgtaatgatggaagcggttggttctcctaatccgtgggagttcatgaagtggcgagtagtttgtctgtatcaggaaagagaaattccttcagcaccttggtcagataacattcctttggataatgcagggcttgttaagaagaccattctggtaggtattaaccagtttggtggtggacactttactgatatgtctgacccaactgctaccacagctaatggtgcaattggtcgtaaagacaaggtatctgcttctacgttacgtctgacttttgcagagaaagctggattacgtcctatcagtgcaggtatgacggtaggtactcacaaatggtggaatacttccagtaattccccaggtgatgcactactggctattaacgatatggttaaaggtttgggtgttaaacctgattacttcattgaagctaatccgtgggaaaccatgtatatgaaggatgttaattcttctacatggcctgctttaatgactgcttttgaatcgtctaacaaagcaatgcttgcatggatgagaaccaactggggcaaccctaatctggagatttggttccagggggctactactgtttggtttggtgttgctccacctaatgaccttaactctgaagctactgttactgtacgtgataaacagattcagatggctacagctaatataggctttaaactgggttcctttgttcctggttctaacctgtacactgcgtaccgtaatgtggaatccagttggatttactacacggtagaagcattccatgccacagccattgagctaggtgaagcactggctcttaatgttaaccgtgctactaatccacctgattggtcttacttgcgcccaccagcaaatctgcaaggtcgggtagtccagaatggttcctatatgcagactcctactcaactgaaagctgctaaacagcttaatggtgacattatcttcacttgggtaggacgtccttcatggcaacacttctgggtagtgaataccagtgttaatgattctaagactgttatcttctctaaagaatggtctagtgaatctctaacatggactgttgcagaacagaacgagttctacggcctggaagaaggtggtgctactcatgtcatcttcatggtatctgagtatgacccaagtaacggattagtatctattggtgctcaagttactggtcaaacagagcagccatctaatccaatgaatcctgttgctggattgtatgcagtgttcaccggtgacccaggtaactctaatattaagattatgtgggataaaccttctgttggtggacgtgatgttcgtattcgaaatatgcatgtaacgtccagtgcaactattagtgaccagtttgtatctgataacaatcttgtgttcacacgagaagaacaggtagctgcttatggctttactgcttcaagcgtatctgttcgtgctcaagaacatgatattgaatcaggtgcattgggtcttactactgagtatgttgctgcactggaaacagcaggaacagttggacagggctttgctaagaaagactctgtaggtaactgtactatgtcatgggaagtaggtgatgctgtccaatggcaggttgagattatcaatgctgagaactctactgttgttaaaacagagattgttgtagcacctacaatcacttggacggctgaagaaattacagccgagtatggttacctgactgaccatatggtttggcgagtaagaccttatcgtgcagatggggcatctaacgtagctaaacaatttgatatgacagccactctttaa

SEQ ID NO: 137477 - DNA, 7197 bp, Homo sapiens
atgtatcgttggttacatgacgacaagattaccgaagatgtgattcgtattaactacatcttaactgactggatgaaagcattagctacatctcaagaaaactatccaaagcatcgtgtgctgcataaagacattccattgatgacttatgaagcgactgaagaatggattaaagccaagctggctctcattgataagtactgggatgctcctgaaagcgagattccagaatgtactgatgaagagttatggcgttctgacccagtgtttaaatactttgctgacccagagaaggcaaagcaacctggtgctcgttctaccaaaaacttacctactctgtttgaggctcggaagttcatggcagagaaaggcaaaggcactattcttcatgttcctgagatatttcccatgattgacctgaccggagtctcacatcatccggcgattgaagaaatcgttgatgtgttatgtaacaagacgcaaaacactgaccgtggttttttccgtgtagaagtggcctatttccttgcgaaaatggcttcatgtatgggtgcaactatcatcactaaagaccgtggtgaaattccagtaaacatctatgcagtggctcttgctacttcaggcttcggtaaaggccattcggtcaacattgttgaagacggttttatggctggctttaagaagcggtttatggaagacaccatgcctgctttagcagaagaccgtctgtggaaaattgctaacgaacgttctgctcgtaatgctactgaccagaaggaagagtttgacaaggtggaagctgaatacagacgtactggtgcttatccatttacgtttgactcaggtacacctcctgctgtgaaacagttacgtcataaactcttattagctggatgtggtgctattaacttacagattgatgagattggttcaaaccttctcgctaatgctgatgtattaactgtgttccttgagttcaactttctcaatgggagccagactgaggaactcttctatgactttcttgaaactggctattctcgtcgttgtctgtttgctgtaggtcaggcagataaacgtgcatatctgagccagagtgctgaagaaatctatcgtaatctgattaagcaggataacaatgctgttgtgaataagtgggctaaccactttcatagccttgcagatgcatccaagtttggttggaaaatgacagttgaagatgatgttggtattgcactaatcgactacaagattcagtgtgaaaaacaagcagcagctttagctgaccacgaagagattcgtaaagcagaactggaacatcgctattttaaggcactgaaattggcaggtgcatttgcatttgttgataacagtatcatggtagagatggaacatctgaagcaagcaattcttctggtggaagagtctggtgttgcattccagactatcctcaatcgtgaaaaagcctacgttaaattagccaagtatattgcatctgttggtactgaagttactcatgcagatttgcttgaagctttaccattctataagagtgggaatgctgcacgtaatgagatgatgactttagctactgcatggggctataagcagcatatcatcattaagaagacatacaacgaaggtattgagttcttccgtggtgaaacactgaaagagactgatactaacgaaatgattgtttcttatggtgagaactttgcttatgactatattgcagagaaagttccatttgaccagttacatgtactgacccagcaagcaggttatcactgggctaaccaccatttccgtcgagggcatcgtgctgaagagatgctattgctggcttcatatgatgtcattgatgtggatggtacgtgtaggttggacgtgtgccatgaattgatgaaagaataccgattcatgacatatacaaccaaacgccatactgatgaagaaaaccgtttccggttaattatcccaatgaactatcagcttgaacttgatggtgctgaatataaagagttcatggataacgttatggcatggctcccatttaaaacggacgagtctgctaatcaacgagccaagaaatgggaatcatgtgctaagggtacgtattactacaatatggatgctcccctgctagacgtaagagatttcattcctagaaccagtaagaatgaggcattccagcaagggatgcagaaggttcaaaatctggataatctcgaacgttggtttgcccaacgaattgctacaggcaatcgtaataaccacatgattaagtatgccctggctctggtagatagtggtataggcttcaatgaagttaaacaacgtgtgcatgagttcaataagaaactcagcaatcccctatctgctgatgaactggattccactgtaatgattactgtggctaaacacgaagtagatgaacgtgcaatggaactgaagactttcgttccagtaaaaggttctctgaagaacaatggcattgaagcatacttctctactgttgtatcagcagaacgtatcgaccttaaagaacttgaaaagtattccaatggaatgttggaaattactgaggatgagcaagagttggggtacaaacacgtattccagactcgacctactaagaaaacagtaggtcaggcagctaaagcagagaaagcaacggataacctgggtggtggatttggtgcaaaagaatctgatatttatctggctaatctgaaagtagcttatgcaggtaaagcagcttctggtgctaacttcattcagattattgcagacctgactgaccttgatggacacagtgctggtgaatatcgtgagcaactgtacatcacttctggtactgaaaaaggctgcaagtgtacttatgaaaagaatggtaaggaatacttcctgccaggctacactgtaatcaatgacatcctggtaatgacttctggtgagactattcctgaagcagtcttcgaagagaaagtcgttaacgtatatgacttcgatgagaagaaagaagttgccaaatctgtcatggttccagtcaatgctatcggtggtaagtttgctgtagctattctgaaatctgaagaagataagcagactaaagatggctccggtaactatgtgtctactggtgaaactcgtttcactaataccatcgaaaaagtattccaccctgacctgcatctgactgttgttgaagcagaagaactgactgaacgtggtaaagaactgaccgttgaagaagcagtcttttgggacaaatggctggagaaaaacaaaggcgttacccgtgacaaaaccactaaaggcggtgcttccggtaaagctggtcagccaccaaaaccaggtgctactaatactggtgcgggtgcttctgctgcaaaatctctgttcgaaataatgcagatacctgtgcttggagttgaccccagttttcgtaactggggactagcacggggaatgctcgacttagagacgggaatactctctggattagacctgaagctggtagaaaccaaacctgatggaaccaagcaagtaaggcagaacagcaaagatatgcaagctgctgaggacattactactggtgtcatcgactggttcaaagaagcaaaggtcatctttgtagaggttcccgttggctcacaaagtgccaatggaatgaaatcctatggtgtttgtgtaggcatcttaggagcactcagggcactaggacatgagattattgaagttactcctatcgagaacaaagtagctctgtccggtattaagactgcttctaaagatgtgatgattagagcagctacaggattttatccagaggccaactggctcaaggataccaaagaagttactattcgtgatgctgttgaagcaactgatgctactccggaacagaaagttgcagcacaccagtatgtttctgacttaatgaatgctactcgttttaatcctgaaaattatcaggaagcaccagagcatattcgtaatgctgtagctggttctactgaccaagtacaggttattcaaaagttagcagacctagttaacacattagatgaatctaatcctcaagcactgatggaagctgcatcttatatgtatgatgctgtttcagagtttgagcaattcattaaccgtgaccctgctgcactggatagtattcctaaagattctccggctattgagttactcaatcgttatacaaatctgacagctaatattcagaacacaccaaaagtaattggtgcactgaatgttattaatcgaatgattaatgaatctgcccagaatggttctttggatgtgactgaagaatccagtccacaggaaatgcagaacgtagcattagctgctgaagtagctcctgaaaagctcaatccagaatctgtaaatgttgttcttaaacatgctgctgatggtcgtattaaactgaataatcgccaaattgctgcccttcagaatgctgctgcaatcctgaagggggcacgggaatatgatgcagaagctgcccgtcttggattacgtcctcaagacattgtgagtaaacagattaaaacggatgagagcagaactcaggaaggacaatactctgcgttgcaacatgcgaataggattcggtctgcgtataactctggtaatttcgagttggcctccgcttacctgaacgactttatgcagttcgcccagcacatgcagaataaggttggagcgttgaatgagcatcttgttacggggaatgcggataagaataagtctgtccactaccaagctcttactgctgacagagaatgggttcgtagccgtaccggattgggggtcaatccctatgacactaagtcggttaaatttgcccagcaagttgctcttgaagcgaaaacggtagcggatattgctaatgccctcgcttcggcttacccggaactgaaggtcagtcatataaaagttactccattggattcacgtcttaacgcccctgctgctgaggtggtcaaggcattccgtcaaggcaatcgagacgttgctttttctcaacagaaagctgactccgtgaatcaggttaaagaaactcctgttacaaaacaggaaccagttacatctactgtacagactaagactcctgttagtgaacctgttaaaacagaacctactactaaagagtctagaccacaggctataaaagaacctgtgagccagtctgaaaaacgggatgttaaccttactaatgaggacaccatcaagcaacctactgaatctgttaaagaaactgaaacttctgcaaaagaaagcacagttacagaagaattaagagaaggtatcgatgctgtttacccctcattggtaggtactgctgattctaaagcagagggtattaagaactatttcaaattgtcctttaccttaccggaagaacagaaatcccgtactgttggttcagaagcacctctaaaagaggtgtataccgatggttacgacgggcatagtctacgtgcatatgcttacttcggtgagatgatgcctgacattgaagatacggtagagtctgttaattctattcaggagaagtacaaagcatatcgtcaggattctaaagcacctacctttgctcttacctatcagggcacgtacatcactttgatgaagaactgtggtttccctgaacagaaagctcgaatggttgaggaacgttatcacacactttataaggtaagtgatgactgggttcaggctaaactagaccaagctgcaaaagatggttatgtaaccgtagcatttggcctgagagtcagaacccccttacttcaacaagttatccgtggaaccagtaaaactccttatgaagctgaagctgaaggacgtactgctggtaatgcattaggccaaagttggtgtcttctgaataaccgtgctggttcagaggtcatgcgtaagaaaccggagatattgatgacaagaataccatttttaaaacctagaaaacgaacaccaaagctgtatcaaaagacttcagaagacggtttagccttgaaccagaaagctattaaggctgttagtgccctggttcaaggtaaacaggatgctgttgctttacgtcttgttgttgagcaaatcttagttgctctgacactggctcaagtagctaaacaagaaggtaaacaagaaacctgtaaaacagcattaggtgctttgtactggttgtataaagaccttgctgacaactttgaaatgtctatggataagtggcagggcatttcttgtgtacttgctcttagagaagggcaggaattactgtctactctaccaaaagcagaatttaaactagcctacactggagcacataagattgttcttggttccataaggacatctttaaccacctcaagctattcaaggctttctatgattaatgcaaaaatcctcgctgatagtattactctttctggtgaccgcctggtaacaatggaactggtttatccgcgtttcattcattcagaatttatgactcaccgagcacttaatcgtaatgcttccagtagtcgtgctattcctacccaacgccttattgagcaagttcgcaatgaaccagtaatgccagtacattggggtaagaaccagaaaggaatgcaggcaagtgaagaactcactcctatggagattaaggatgctgagttcatttgggaaaatgctgcctctgctgctgctgtatatgctgaacaacttcgtcgcggacaagtacataagcagattgttaatcgtattctggaaccattcacgcatatccgtgtagtagtgacagctactcaatggaataacttctttggtttacgcattcatcccgatgctcaaccagagatttgtgaattggctactaagatgaaggaacagtatgaccaatcaaaaccccgtaccctgttggctggggaatggcatttgccgtacattactaatagtgattacctcgatgcttacgattattgcaaacatcaacgaattactcgtgatgaaccaagtagtgatgagattaattgcctgttagtaaaaatctctgctgctcgttgtgcccgtgcttcctataacaactttaaaggtactccttctactatcgaagaagacttgcgtttgttctctaaattggttgaaaagcagaaagcaggctttacaagtggcccaaggaaaagataa

SEQ ID NO: 137478 - DNA, 7731 bp, Homo sapiens
ttattctagggtttttctggttttaggtccaacattgaagtctttaatccatcttgaattaatttttgtataaggtgtaaggaggggatccagtttcagctttctacatatggctagccagttttcccagcaccatttattaaatagagaatcctttccccatttcttgtttttgtcaggtttgtcaaagatcagatactggtagatatgtggcattatttctgagggctctgttctgttccactgttctatatctctgttttggtaccagtaccatgctgttttggttactgtagccttgtagtatactttgcagtcaggtagcatgatgcctccagctttgttcatttggcttaggattgacttggaaatgcaggctcttttttggttccatatgaactttaaagtagttttttccaactctgtgaagaaagtcattggtagcttgatgggcaaggcattgaatctataaattaccttgggcagtatggccattttcacgatattggttcttcctacacatgagcagggaatgttcttccatttgtttgtatcctctattatttcattgagcagtggtttgtagttctccttgaagaggtccttcacatcccttgtaagttggattcctaggtatttgattctctttgaagcaattgtgaatgggagttcactcatgatttggctctctgtttgtctgttattggtgtataggaatgcttgtgatttttgcacactgattttgtatcctgagactatgctgaagttccttatcagcttaaggagattttgaggtttcaagtcagcaatctctgcaagaatattcaaagtgatttgctggtctacgtttggaccaatagtctgaagcataaagcctaagtcttgggacttttggttgtctacttcagcagtagaaatatctacttcaaggtcaaagttacctttcaggtcttcacgtttaatagtgacaaattcttcattggtaatacgtactacttcatgctctgccaagaacacagcattcatagcaataatcttattaccaatttcagacatgcctttagctaaacgacgaaggatagccatctcacgtttagaagcagcatctaatacaccacgaataccagcagctacatcaccataagactcaccagttaccccaccagcaaatgctttaacaccagtaagagattctgcttcctggttctgaagggtagccatagtcagtgctgattgtggcaattcacggaacttatgctcaataatcatttgagcagggttttgtgtaggattgtattcataatcctcaccttccctgtaacgacgactattcagggcatcaagcatacctttaggcataccacgttgaccattggcactacgtccaagtaagtcaatcatcccacgcattacagcaccaagtactgcttggttatcacctaataactctgcatctggttcgccatacatatcccgtttaacaggcatatacggaattaatacaaatgggagtttgccgtcaggataaggattcttctctaaacgaataagggtagaaccaatccaagtagcaacgataggctctaatacaccattcccttcaatatcccagaatccccaatattcataagcaactacacgcttacgcatagggtcactaatctgaaattcttgaggagtagtggttgcatggtctggttcattaacgggagcagagctttgccaatcaatcttatttagattgtgataacggtctttctctttaagcaggtctgccttacaagtttcaaaagagacaatggcaaacattgccttattaatatcaccctgacatgaagggtcgataataatgttctctgggtttagcatttccaccgtaggatggtttgctaaaggaacttcaacttcagttgtagttgtcccagtttgtactgcatacgttgcttgtcccgtttcatcaaagaaacgtactgattccttaatagcttcatctacattctcttcataaccgcgagggttatctgtacgaagttgtagagcctgttgtaaagcatcagcttgttcttgtgtttgaatagggaacaaactaaatacaggaacttcttgcttctctttacgaatttccctgttccaaccaacacgaacaataccagtaccatcatcaacaactgaacgaacatagttatcaatgaaacttacacgatttagtttggtacggaattggtagttaagaaccagttcattctggcgtgcaccttgtacatcttcccaagttacaggagtaactttgaataacttattagaaccaaggaaaggttcagttaaagcagaataacgccattcagcttgacgacgtacaagtttaggctgtacctgtgaacgtcctttgactttaggtggcttggctttgccttcaatacgcataaggtcattccattctttgaccttaatcatcatggcagtatgagatggctttgctgcatccaagtctgctttaagtgcttgcaaggaaggttcattcttccagctagttaacttagtagcttggcttgggtctggcaatggaaccatagaatcagtgttttgttccatagtaattcctaacgtctcatagaattgaaccattggagtgtgtacatagaactctgtagcctgttctgctttcaatgcagccttctgttctggagtattacgaacagcagggttacgaagctgagtattagctacaggaggaatgtcatcaccaaagaacatcttctctgtaggatttactaaaacagcttcttcaatagcagtagggaagctattaattgggtcgaaggaatccagttcagtaatggtgtacagaccaatcgtcttcttattatctgggtcaatttctgacatatccacgatgttctctacaacatcagtagactctacaaatgcagccagaatttcagcagccattgctgtagggatacctttggtataacccaatggagcatttggattacgagataatccccagtaagactcaattttctgagccagggaactaactgcttcagtgagtgtcataccagtatcaaattgctctactaaaccttctggcagcagggcttggtcaataccagtaatagcagcaacatcttttgcatctttgatagcagtattgctggtagcagtaagtctccactgaagacccgctaatacagcagtctgtagcaattgctcattgtacttaaaggtatccccatcctgttcaacgatgttaagtaacttaccgcctacccaacggttggcttctgtaccctgagcaaaacgtttaccaacatccttagtgttaaggaacttagccagacgggaacgaagaatatcagcaataccttccccatgttccatgagttctttatatcgcttaataacttccccattaaaagcaggattagcaacttctttctcagtaaagagttcataacgagcacgagaagacagagcttgagctacctcttttagaggtgcttctgaaccaacagtacgggatttctgttcttccggtaaggtaaaggacaatttgaaatagttcttaataccctctgctttagaatcagcagtacctaccaatgaggggtaaacagcatcgataccttctcttaattcttctgtaactgtgctttcttttgcagaagtttcagtttctttaacagattcagtaggttgcttgatggtgtcctcattagtaaggttaacatcccgtttttcagactggctcacaggttcttttatagcctgtggtctagactctttagtagtaggttctgttttaacaggttcactaacaggagtcttagtctgtacagtagatgtaactggttcctgttttgtaacaggagtttctttaacctgattcacggagtcagctttctgttgagaaaaagcaacgtctcgattgccttgacggaatgccttgaccacctcagcagcaggggcgttaagacgtgaatccaatggagtaacttttatatgactgaccttcagttccgggtaagccgaagcgagggcattagcaatatccgctaccgttttcgcttcaagagcaacttgctgggcaaatttaaccgacttagtgtcatagggattgacccccaatccggtacggctacgaacccattctctgtcagcagtaagagcttggtagtggacagacttattcttatccgcattccccgtaacaagatgctcattcaacgctccaaccttattctgcatgtgctgggcgaactgcataaagtcgttcaggtaagcggaggccaactcgaaattaccagagttatacgcagaccgaatcctattcgcatgttgcaacgcagagtattgtccttcctgagttctgctctcatccgttttaatctgtttactcacaatgtcttgaggacgtaatccaagacgggcagcttctgcatcatattcccgtgcccccttcaggattgcagcagcattctgaagggcagcaatttggcgattattcagtttaatacgaccatcagcagcatgtttaagaacaacatttacagattctggattgagcttttcaggagctacttcagcagctaatgctacgttctgcatttcctgtgcactggattcttcagtcacatccaaagaaccattctgggacgtgctcagtctgctctgtttcagaatctgaatgaccgttttggtcaagtggtagatgtacgggatattgtattcctgaacgtcagctacttgggtcatatgagccagcctgactttcagcaaaatctggtaactaaagatactgctgcgaagaaagctaaactgaaagcaccaaagaccacctgcatcggatgattgggtagggtcaaatacttcagaatcaggattaactgcacatgcacggtctacagcagtagaaccagttgtcccattaatagggcgtacacctgcatagttaatgccccaagtttcagtcatgtacttctggaatacatcatagccacggtcagggtatgcaccagacatgaagtgaatagcaacctgacgctcaggagtaagggtatagccatcatcaaagcctgaagtcatgcccatacccatcactacttgtggatatttacgttgacccagttgcttacgaccggaaccagatacagtaaggttagtaaaccatttaacagagtctgggagcatacctttgcatttaccagagaagttagaagtaccaaagccttcatagcttactacttcgaactcattctctgctgcttgagcattaccattaacatccaagtatctccagatgcattggagtttatccccagcagctaaagcagcattagtatgaatacccccaatttccatctggaaagtagcaccatcgtcattgttatacatggcggcaatgtaagcatctttccctagaccatgatgtgcttcagtacagtcgaaagaaatcattgtgatattacgagggttaatagttaccccattaaatgccacacctgtacgtaaatcagcaaagtccagaatgaagatatagtccttagtgccatagacttctgtcatttcagattcaggaatatcttcatcagtagctacaaagatgtcagcctgatacgttctcttggttccatactttgtatccaaacactcccatcgacgggttttattattgaatccatatggagccagacgatacgtatatgctttttcaggagtctgaatagtaactgtgaatttatctggttcatcagggttatgacgaaaagccagaatcagacctaagtaattagggtctgtttcataacgatacagatgatggtcaaaggtatcctccgtcatccaacggacacctaagaagtctttgttagtacgccactgacaaggaactttaaaagacttagaaccatacggaatgatggtggctaccattaaggcattgtaatcaactacccaatactcagggtcgaaacgatttagtttagtgttataagtccgattacgacgagtgttgaccaacgtcagatgttccctgtctttcttaaattgagggaggtcttctctccaagaagagtgctggtcatccgggtcataattaggagaagctaggcaattcttgcctttgaggtaatcttcaatggacatacgtgccctgataggaggagcaaaggtagggggtgtggaatcctgacaatatgctttgtacttctcctgaatagaattaacagactctaccgtatcttcaatgtcaggcatcatctcaccgaagtaagcatatgcacgtagactatgcccgtcgtaaccatcggtatacacctttagtttattagggtctttggttgttaaagcagatatacggtcttcgagagaagcaaagtctagcccacaaaatatccatccaggaggagcctcaaaacattttttaatcatcttggcatatctggaaccagaaggtaggttctgtaggtttggttcactactggatagacggcctgatacagtcccacctaagttcagattaccaaagagataatgccaaccatctggtccttgtctggcattttttaatgctggaataaatgctgtcagaattttatctacagctttgtaatcaatcagagcatcaagaatttccagaatactggtatcttgagtatggttcttcaaagacttgagtatgccactaccagtagcaggtagtttacttgcagtcagacccagtacaggtaaccccagaaactcaaaaagtagcttctgtaattgaatacctgagtttggattaaactgctctttagcatcagctaaagtcactcgtttcttcttcagaatctggttctgtttttctacccattcttcattaagaagacgggtaaaatctttgattactttactgtcagcaattgtttttaacgcattgttatagtcttgggttaatgcctcttctacctccaatactgtcctcatattgataggcataccagttaactgcatttgaataatatcttcacatgcaggtttaaagatgtttgtataaacatctaactgttggtcattaaccagagtatcccaatgcttttcatagacataccaggtacataatccatccactaagttgtattccaacaactctgctaatgggattctggtaatgtcattgatttcttcttgagcatagttaccagcatattcctgagcctggtctttaagacttagcttattaccggcacaagagttagtagccagataggtaattaacttagtgcaatcccagtttcttagcatgatactcatgccatgcaacaacccttccgtatccagaaggtctgtcataaataactggtaaatgagtgcgtatacgtcaaaggcaatattgtgatacatctgcctgttcagatacttaataaaaaagtccctgagcatagaacgaacaagcatgttgtgaacttgtctaccataaggagcttcagtagccccctcaattggttcataatccacagggaatgcaatcccttcgtgcttgttccagcagaatgtaatagtgcctataccacagtcataatgcttcagactgaaggtttctatatctactgctaatggaacatccatctccagtaacttatctaaccacttagatatagcttctggagctaatgtgtaatcagcatactggatgatcttagttcctggctcaacataaggaccagagacataagcactcagagcctgcat

SEQ ID NO: 137479 - DNA, 2703 bp, Homo sapiens
ttagaaatctctgggatgagcatccacagtgaagatggacgcatagtcatgttcagaccacagagaggaaattcccgggcaccggggcgtcttgtgggccacggcagtgccgctgatgggcctcccgttgggcgtgacgcaccagcagtatcccgtgtagctgtgacactggacctgactgtaggtgccgtcgtcattgcactcaggaatgaacacttgctgaaactccttccgggcttgctcctgggtatacttcctttcggccacacacctggacacgtctttgcagtttcctcgatatgcaatctctagctggggatctttgcacttggcacgttgaaattcacaacgggaaaggaaggtccttccgtcagatgcgcagagaggtttctggggcgaacccgcacagtccaagctacaatccttgtctttatcttgatccactctcaaaaacagaaatccaggcggggtcctcagagctcctgacaggtacttgaggatctcagcagcctcgttctcgcagcacacagctggctggggcagcacagctttgcactcctcggggggtagagaagcttgtgcacccacatggccttggagtccagcagtgtctggccagagctgcagctcagtgaagagtgttgtcttcagagccacattcgcgtagccacccggggtccggagatgggctttttgagaaccagagaaatgagccagtgcaggatgttctagttgacggtcaatttccatatttccccatttcttacacagatgagcatattgcttactgaataaagtagaggacatataacgactgacaataacatcaggcactaaattggtgtaaggcaaataactatttacttcaaaacggtgaggactatattctttaatagccttcccaatatattcaatagcatttggaagacgagctttaatatctgcttccattttatctactaaagctacagccaaatttacgataccgtcttcggtcattttttgagatgacagtgtttcacggctaggtgctacagcatgtaatacaatggctcgaatatatgaatcaatttctaaaatatcttctgactgaagctgaattttaacttcaagcccggattcttcaagtagtacgcgtgcagcattcccactcttatagaatggtaaagcttcaagcaaatctgcatgagtaacttcagtaccaacagatgcaatatacttggctaatttaacgtaggctttttcacgattgaggatagtctggaatgcaacaccagactcttccaccagaagaattgcttgcttcagatgttccatctctaccatgatactgttatcaacaaatgcaaatgcacctgccaatttcagtgccttaaaatagcgatgttccagttctgctttacgaatctcttcgtggtcagctaaagctgctgcttgtttttcacactgaatcttgtagtcgattagtgcaataccaacatcatcttcaactgtcattttccaaccaaacttggatgcatctgcaaggctatgaaagtggttagcccacttattcacaacagcattgttatcctgcttaatcagattacgatagatttcttcagcactctggctcagatatgcacgtttatctgcctgacctacagcaaacagacaacgacgagaatagccagtatcaaggaagtcatagaagagttcctcagtctggctcccattgagaagtttgctcggtgtaccaaacagaagaaggttagctggagttttaccatcaacttcctcactacgaatactttcagcagtattcttagtaagtttctgtttaatcttgccttggtcgtacaactcaaggaacacagttaatacatcagcattagcgagaaggtttgaaccaatctcatcaatctgtaagttaatagcaccacatccagctaataagagtttatgacgtaactgtttcacagcaggaggtgtacctgagtcaaacgtaaatggataagcaccagtacgtctgtattcagcttccaccttgtcaaactcttccttctggtcagtagcattacgagcagaacgttcgttagcaattttccacagacggtcttctgctaaagcaggcatggtgtcttccataaaccgcttcttaaagccagccataaaaccgtcttcaacaatgttgaccgaatggcctttaccgaagcctgaagtagcaagagccactgcatagatgtttactggaatttcaccacggtctttagtgatgatagttgcacccatacatgaagccattttcgcaaggaaataggccacttcaggaacatgaagaatagtgcctttgcctttctctgccatgaacttccgagcctcaaagagagtagggaagtttttggtagaacgagcaccaggttgctttgccttctctgggtcagcaaagtatttaaacactgggtcagaacgccataactcttcatcagtacattctggaatctcgctttcaggagcatcccagtacttatcaatgagagccagcttggctttaatccattcttcagtcgcttcataagacatcaatggaatgtctttatgcagcacacgatgctttggatagttttcttgagatgtagctaatgctttcatccagtcagtgaagatgtagttaatacgaatcccatcttcggtaatcttgtcgtcatgtaaccaacgatacat

SEQ ID NO: 137480 - DNA, 2271 bp, Homo sapiens
atggaaccagtggggattgatattattgctatctcctggattggtgctcctgaataccctgataacgttaaacgtgccattaatgccaaagtagaagctactcagaaaactctgcaacgtgagcaagagattcagcaacgtgtggctgaagctaatatggaacgtgaacaagctaagggtgtagcagatgctattcgtttacgtggtgaagcactcaccgagaacccaaatgtaatgcaactggaagccattaataagtggaatggattggttccatttatcacttcatctcctggtatgggtaaatctgcaattgttcgtcagattgcagaagattttggcctgaaactgattgaccatcgtctgtctacttcagcaccagaagacctgtcaggtctgcctcgttttaaagaaaatggtcgtgctgaatttgctccatttgatgagctattcccattggaaggggatgctgtacctgaaggatttaatggctggcttctctttctcgatgagtttaactccgctcgtaaagagattcaggctgctgcttataaattggtactcgaccgtatgactggtcagaagaagctacatccttatgtagctatcgtatgtgctggtaacaaagcaactgaccgtgccattactaataacctgtctacagctatgcaatcacgtcttattcatctggaaatggagactgattttgatgtcttcatggaagatgtagccatccctaataagtgggatgagcgtgtaattgcattcttgaatgctaacccaaataaactgaatgattttgaaccagaccatcaagagaagactttctgttgttctcgtacatgggagttcgttaacaagattgtttccattctcccaccaggaccaattaatagtgaaatgactctactgttagcaggcactatcacttctggtgtagcaacatcattcgtccagtttactcaggtctatagcaacatggtgtctttgaatgagattttggataatcctaagaaagctcgtatgcctgaagacaataacctgttgtgggctgtagtcacttcactgattaacaatactgacgaagataatcattcgaaaatctttgattacgttgaacgtatgccatttacgttcaaggttttgtactaccgttccaggaaaactgatatgtccatgacagatgctcaattaacccgtgaatatgacagatgtcaggctaaagcctttatgggcaaaactgctgcattctttggttcactgttatgttctctgaagttccgttgggtaaaagatggctgtgatacagcacaaaccgatggtgagcatctcgaatggaatcctgattggtttgaaagtctattacctgaatctcgtgtaacagtacttatgcatgaactatggcatgttggcttactgcattctgttcgtatgggttctcgtgacccagaagtatggaattatgcctgcgatatttatatcaacaatcagcttattcaggatggctacagctttataggaatcgaaaattgctggaaagaccctaagtatgctggttgggctgaagaacaaatctatcatgacctcatgagcaaacacccacgtcctcctaaagcatcaggtgcttttgggactggctcaggtggtgacatgaaaccttccacttcgaaggctagtctgaaactatctggtggctctttgcctggggtattacctggaaaaatggaagaagttattactcaattcctgaaaccagtagtaccgtggcaggttttacttgaacgcttcttcaatgacctgcaagaaacttactactcatggcaacggcctaatcgtagataccctgatatgtacctaccatcttctatggatgatgactgtagactggaacatctggcttattttctcgatacatctggcttcattaaacctaaagatgctttacgctttagctctgaagtggcctatgtaaaagagaaatatcagcctcagaagatgactctagttcagttcactacagagattgtagatgaacaagtcattgaagatggtgataagtttactgatgtcactatcaaaggacggggtggtactagtctggttcctgtacgtgagtggattattaagcataagcctactgctgccattatctttactgacttagaagtcagaccgatggagccattgccatttgacattcctgtcatatgggtagttattcgtaaccctggtgcacaagttccatttgggaaagttattaacattacatga

SEQ ID NO: 137481 - DNA, 4890 bp, Homo sapiens
tcatgtgcaggcaatgttgagaacagggttagatctgctgccaggacctgcaataccacgagcaccagaaccatagatggtaatagtcagcgggttcttagcaataccacgtttaagttctaaagcaccattctcaccaagattaatatccggtaggaacaaatccatcagagaaagaagactgtctatctgggactgaataggcatattagaagcatagttactacgtaacttacccaacgattccatcaaagcattagtggatgcttgatataaatcattattgtcagcagtagaacgatgctcattcatggtcttatttggagaaccaatgaacaagccccctttggcaatattacgaatccagtcaggagtaaacaggccacctgtcattagcatcatggcattgattggaccattagtaacaccatctgcttctacatacagtggggttacaaatgcagatttatcctctgctactaagtaacgggaatactccataagagccatcaatgctacgaatgacttcctatctcctaatgctgtattcagaacatcaactgcattttctggtaaggaaccagtggtattaaactcaaccatcatatcaatggctggtttcagattaccttccagtaatttagtcaactcgtcagacataacctcacgagtcatagtatggactttaatgtccaatgcctgagccagacctaactggaatgcagagaagtcttcattgttctggttcgataaatccaaagtagctttagtaggtaggatagcctcacgaaccagtttggctgattgaggattgtatttacctaacatctgcatacgaccaacacgggtcatattgtatgcatagtgaataggcacagtagagatgtcttcactctgtgctcttacctgctcaatgacggagaacagttggttgtaagagtcctctactgaacggttcttaccttccagagatttagcatgattatcattaagtaactctttattcagagtaccagcacccatcagttcgagaatacggtctttacctaacgtctcatagaattgaaccattggagtgtgtacatagaactctgtagcctgttctgctttcaatgcagccttctgttctggagtattacgaacagcagggttacgaagctgagtattagctacaggaggaatgtcatcaccaaagaacatcttctctgtaggatttactaaaacagcttcaatcgtcttcttattatctgggtcaatttctgacatatccccgatgttctctacaacatcagtagactctacaaatgcagccagaatttcagcagccattgctgtagggatacatttggtataacccaatggagcatttggattacgagataatccccagtaagactcaattttctgagccagggaactaactgcttcagtgagtgtcataccagtatcaaattgctctactaaaccttctggcagcagggcttggtcaataccagtaatagcagcaacatcttttgcatctttgatagcagtattgctggtagcagtaagtctccactgaagacccgctaatacagcagtctgtagcaattgctcattgtacttaaaggtatccccatcctgttcaacgatgttaagtaacttaccgcctacccaacggttggcttctgtaccctgagcaaaacgtttaccaacatccttagtgttaaggaacttagccagacgggaacgaagaatatcagcaataccttccccatgttccatgagttctttatatcgcttaataacttccccattaaaagcaggattagcaacttctttctcagtaaagagttcataacgagcacgagaagacagagcttgagctacctcttttagaggtgcttctgaaccaacagtacgggatttctgttcttccggtaaggtaaaggacaatttgaaatagttcttaataccctctgctttagaatcagcagtacctaccaatgaggggtaaacagcatcgataccttctcttaattcttctgtaactgtgctttcttttgcagaagtttcagtttctttaacagattcagtaggttgcttgatggtgtcctcattagtaaggttaacatcccgtttttcagactggctcacaggttcttttatagcctgtggtctagactctttagtagtaggttctgttttaacaggttcactaacaggagtcttagtctgtacagtagatgtaactggttcctgttttgtaacaggagtttctttaacctgattcacggagtcagctttctgttgagaaaaagcaacgtctcgattgccttgacggaatgccttgaccacctcagcagcaggggcgttaagacgtgaatccaatggagtaacttttatatgactgaccttcagttccgggtaagccgaagcgagggcattagcaatatccgctaccgttttcgcttcaagagcaacttgctgggcaaatttaaccgacttagtgtcatagggattgacccccaatccggtacggctacgaacccattctctgtcagcagtaagagcttggtagtggacagacttattcttatccgcattccccgtaacaagatgctcattcaacgctccaaccttattctgcatgtgcttggcgaactgggacgtgctcagtctgctctgtttcagaatctgaatgaccgttttggtcaagtggtagatgtacgggatattgtattcctgaacgtcagctacttgggtcatatgagccagcctgactttcagcaaaatctggtaacttaagatactgctgcgaagaaagctcaactgataggtaccaaaccgtttgggtgttatgcctattgctgatgcaatgagcaaagcagaacaagttgatgtagtacgtgccgatggaacgagtgcagcattcccactcttatagaatggtaaagcttcaagcaaatctgcatgagtaacttcagtaccaacagatgcaatatacttggctaatttaacgtaggctttttcacgattgaggatagtctggaatgcaacaccagactcttccaccagaagaattgcttgcttcagatgttccatctctaccatgatactgttatcaacaaatgcaaatgcacctgccaatttcagtgccttaaaatagcgatgttccagttctgctttacgaatctcttcgtggtcagctaaagctgctgcttgtttttcacactgaatcttgtagtcgattagtgcaataccaacatcatcttcaactgtcattttccaaccaaacttggatgcatctgcaaggctatgaaagtggttagcccacttattcacaacagcattgttatcctgcttaatcagattacgatagatttcttcagcactctggctcagatatgcacgtttatctgcctgacctacagcaaacagacaacgacgagaatagccagtatcaaggaagtcatagaagagttcctcagtctggctcccattgagaagtttgctcggtgtaccaaacagaagaaggttagctggagttttaccatcaacttcctcactacgaatactttcagcagtattcttagtaagtttctgtttaatcttgccttggtcgtacaactcaaggaacacagttaatacatcagcattagcgagaaggtttgaaccaatctcatcaatctgtaagttaatagcaccacatccagctaataagagtttatgacgtaactgtttcacagcaggaggtgtacctgagtcaaacgtaaatggataagcaccagtacgtctgtattcagcttccaccttgtcaaactcttccttctggtcagtagcattacgagcagaacgttcgttagcaattttccacagacggtcttctgctaaagcaggcatggtgtcttccataaaccgcttcttaaagccagccataaaaccgtcttcaacaatgttgaccgaatggcctttaccgaagcctgaagtagcaagagccactgcatagatgtttactggaatttcaccacggtctttagtgatgatagttgcacccatacatgaagccattttcgcaaggaaataggccacttctacacggaaaaaaccacggtcagtgttttgcgtcttgttacataacacatcaacgatttcttcaatcgccggatgatgtgagactccggtcaggtcaatcatgggaaatatctcaggaacatgaagaatagtgcctttgcctttctctgccatgaacttccgagcctcaaagagagtagggaagtttttggtagaacgagcaccaggttgctttgccttctctgggtcagcaaagtatttaaacactgggtcagaacgccataactcttcatcagtacattctggaatctcgctttcaggagcatcccagtacttatcaatgagagccagcttggctttaatccattcttcagtcgcttcataagacatcaatggaatgtctttatgcagcacacgatgctttggatagttttcttgagatgtagctaatgctttcatccagtcagtgaagatgtagttaatacgaatcacatcttcggtaatcttgtcgtcatgtaaccaacgatacattgacccctgaagtctatgttcttcatcacgtccaccctttacccatgtgtaagtggaggtggattttacatcctgaagaagaccttcagtaacaatgtcgaacttgcccccaatagtccaaccagcaatctttttagttgctcgttgttctatccatacaggaattaagtttggatttgatgcaatctgctcaggggtagggttgatgacaacattctgaacgacacgctcaggataccccatagaagtggacaccaaatccatgatgtccatactttctacagaaaggtccacacgatgcttcat

SEQ ID NO: 137482 - DNA, 9630 bp, Homo sapiens
  misc_feature (1)...(9630): n = a,t,c or g
atgttgaactataacgctcctattgacggtcagaaatctagtattgatggtgctaactctgaccagatgcaaaccttcttctggctgaagaaagcaatcatcactgcccgtaaagagcagtacttcatgccactggcctctgtaactaacatgccgaagcattacggtaagaccatcaaggtatatgaatatgttcctctgctggatgaccgtaacatcaatgaccagggtattgatgcaagtggtgctactattgttaacggtaacctgtatggttccagcaaagacatcggtaacattacttccaaactgcctctactgactgaaaacggtggtcgagttaaccgtgttggttttactcgtattgctcgtgaaggttctattcacaagtttggcttcttctatgagttcactcaggaatctattgacttcgattctgatgatggcctgatggaacacctgtcccgtgaactgatgaatggtgctactcagattactgaagctgtactgcaaaaagacctgctggctgctgctggtactgttctgtatgctggtgctgctacttctgatgccaccatcactggtgaaggttctactccgtctatcgtttcttataagaacctgatgcgtcttgaccagattctgacagagaaccgtactcctactcagactaccattatcactggttcccgtatgattgatactaaagtcatcggtgctactcgtgttatgtatgtaggttctgaactggttccagaactgaaagcaatgaaagacctgttctgtaataaagcctttatcgaaactcagcactatgctgatgcacgtactatcatgaatggtgaagtcggttctattgataagttccgtatcattcaggttccagaaatgctgcactgggcaggtgctggtgcacaggctactgtagctaaccctggttaccgtacctctatggtatctggccaagagcactatgacgtttacccaatgctggtagtaggtgatgattcctttacctccattggcttccagactgacggatatatacacatgagcattaacgataaaccgaccgctgatttaactcagggcaacgatgacaccgttgatgaagttaaggttgatgaactttctctgctgaaacaacgagctaatatgatgggtatttcatactcaaataatattagtgctgaaactcttcgtaagaagattgaagcagctcaggaaccagtagaacctcagcctaatcctctggctctgtctacaggtacagtaactacggcaacttctttacgtcaccagcaacgcttagaacaattaaagctggttcgagtacgtattcagaaccttgaccctaagaagaaagacctgcctggtgagattattacagtagctaacgaatatattggtactgttcgtaaattcgttccatttggtgaagctactgatgagggctatcacatcccttactgtatttataacttcctcaaagaacgtaagttcctgaacattcgagttaccaaaggtaagaatggtcagcctaatattacgtctgcatgggtacgtgagtttgccattgaagttctgcctccactgactaaggaagaattacaaactctggctgctgctcagattgctgctggtgaggattttacgcttcctgacatcgacatgtctggcagtgagtatgatattcctggtggcattaatagccctatctatgcagagatagagaagataaccacagaacaactaactactcgtgaggttgggggttctggtgtatttgacgctttaatgcaatcagcaagcaatcatctactggcagaatttaagaataaccgaattactggtggtgattacgttaaggcatacattgctactatggaagcataccaggcttattggaatgctgttactgctcaggtagctgcaattactgctcgtgctaatcttggtattatcaaagctaactttgttacagctaagattcaggctctggctactaaagctgaatatgcccttactaagctgaagctgtctaatgagtcagtaacttactgtactgctcaatacaatctatcctctatgcttcctcaacaattactgatgttgaagaaccagaccactcaggttgctgaacagactaagttaactactgaacaaatcaatatgacgaaagagcagaaggaagcacaacgtgctcagacttctgatactcgtactgatggtactcgtgtagctggttctgtaggtaaacagaaagaactctatgaccaacagattacgtcttataaacgtgatgctgaagttaaagctgccaaactgtttactgatgcatgggtcactcagaaaaccattgatgagggtctgtctcctcctaatggcttcactaacaccagtctggatagcattcttactgcattgaagaataacaacgcattgggattccctggttgggctgcaactaactatgacccttcaattggtattgcttatgggaacttgtcaatactgtctcagatagaccctgaagtagttaaatggcaagttcctcaaaaagcaggttatgaggtacaggttcagagcagtaggattggatttggtgattttgaggaatgggctgataaattcctctatgagaattatccagaccgtattactggagagtttgaaatagacatcatggatgatgacaggattgtactcactgctactgatggtaaaggtgaagcagaggctatgactaatctgctcactaaagcaggatacgaagtcattaatatggctgaatatcatgagtgggattgtatagctcgcagacgtaaagaggaacaagaggctaaattagccatttccaaattacaagctaagaaggctactaataagaaaaaggttagtcctaatcgtcttattagtatgaatatccttgaaataccaaaagagcatcgtagctattcaagtgaggtatgtggttctcactacgcttctcgttctcatgaccgaatggttgatgtagatactccccagtattacatcatgcaggaagatattaataactacacaggaaggcttggtgttctttctatgtggcaattaacccctgctaccattaaagctgtaactgttgtttgtcgtaataaaattgaacgtaataaagctattaagcgaggtgctgttcatttggatgaatggactgctccgtatattgcttcagttcttacatccaaacaattcattaagtatgtcactaaagaacgtcagaaaacgttaagtgatattggtatttactccaaacacctcagattactgagagaactggatattacatatgccccattgaaaggtctgcgttatgacccagaactggagaatgcttatctcttcttacaaagtagtagctatcctaagctacgtgcattgttagggaagggtctgattactgaagaagagtatcacttcctcagtgatgttgatgtgcattgcaagactttcaacagtcgtaacctcaccttatggcaaccagatgggtctactatggtcatcccccaaggggatgcccgtgtaccacgtattgttgctgaagcaaaagaaaagaatcttaccccaggtaagattatcgaagtggatgtcactatcgaagctcagattcgtcaggagtttctggacgctgaacgtgatacaggtggctttgttaaattcttccgtattaccaagaagaagctacaagagttcttcttaggagaagaggaagaacaagtccctcatgtatcacctgtagagttaggtgctaaacccactgctttcaatgcttttattgctaatgctgtgggcaaaactcttgctgtacaacatgcatcattaaaagcacctgaaccagaaatgacagttactcatgagcgtttttacggtaactatgctgtatggattacagatgtagacccacggaatcatcgtattgaggttattcatgttatccgtgaaatctcaggaagaaccagtgaatatgtcaataacctgctggctcaaccaaccccattcaaagtatttgattggctcacagagacgcaggctaaagagtttgtaagacgtctgaataacactcagggtgttatctctgtctataacaaactggaagacggtattcctgttaaggttgctgtaaaggccacagagccaaccaataaggaaaagctggaagctgcatcaactaagctgaaagctatgggtgctgtcgctactgatgcttatgagtttcatactgacttgaatgagaatgaagagactattgtagctgtagtgaatgataaggtggttcctgacgttcagaacctacaccgtcacatccgtcaatctgcaaacctgaaagactataaaggctttactaagttccttgaacgtctgtctactgtaattgataaacgtcgccactctgttgaagacctgatgaagtttatggaaaaaggtgacctgcccattgcagatgatggctccattgttatcttcaaacgtctggaaagcaaagacaatcctgaacatctcaaagacgtaatggatgatgtatttgttgattgccattctaagaagattgagcaatgcgttggtatgcgtgtaatggttaaagaaaaccttgtagaccagaaccgtcgtaaagactgttctcatggtctgcacgtagcttctctgcaatacattcgtaatttctcaggcaacgtaaccattattggtaaagttgctccagaggatgtatttgcagtaccagaatacgatgttactaagatgcgtgtatctgcttatcacatcattaccaagctacctgatgctattcgtgaccatgttaatantggcaatccaatctccaccattgagggtggtacggaaatcctgaacatggttctcagtggtattcaccctgaaccttcccgtcaggtactagttggtggtcattatggaaccaatctgacttattcagaactcactcgtaattatctggatgatgatgaagacagcgttattccagatgaaccagtaattaagaaaactgccttgaatatggaagagagctttacggcaactaatcctaaagctgaaccagtgaaggcaacggatgttaaacctattaagaagactaagatggaaattcttaaagacctttggaaccagttcctgaaagcagagacttctaatgaagctattacactggctgatgaaatcattgctgctaagggcaaatgtaagaaatcatgggcttctttaggcttcagtggtgacatggatcagaaactgattgatgctcgtgctaataaacctaagccagaaaaagcagtcaaacaggataaaaccgttgcacctaagaaaactacagtcactcgtagtcggaatgctgatgttattcgtagttatctaaatgacaaaggtatgtctgattactgtaaagctcatgccattcacgatgtgaaacgtgctgctaagaaatcttatgctgcactgggtctgactcctgaagaatgcagccaaattgataaactgaagcatcacctgaagatacatactatggccaaagtttatcgtgctaaccgtaaagcccatgatgacgatattattcgtatgaatgcagtcggtttatcattgggaaccattgctaaaacactgggtgttcaccccactacagttaccttacgattacgctctcttggtattgaaccagccgacacacgtcgaacatttatggagaacgtactagcaccattacctactcacgtagctgattggttatcagaacaagtaggaccaaaatatgagattcgacaatacgttcgagacttattactggaagcctacaataatcgtcataatcataaggaaactgctcatgaacgattcctcaaaagatacgttgaagtagttgagatgctggaagaattggctccaaattctgaagaagcatacgatacacttcataatgccattgcagctttaactgaattgtcagaattaatgaagtcctctgataaagaagtttatgcacctaacagcaatcgcttagctattctggatgcactggcagaccagattgttacagcaactggcatcggtactttcttgggtatgaacgtacccggagcactcactgaagtgaaccgttctaattattcaaaatttgaagacggtgagcctgttttcaatgagaataagaaagtaatgaaaggtgctgtaggtatgaaccttgcccgtgaaacagtggaagaaggtgttcagggtgctacaggccaactggctcagaatattgcacagcaacaaaacattgataagaaccaagacctgcttaaaggtgtcggtacacaagctggtttaggtgctctttatggctttggttctgctggtgttgtacaggctccggctggtgctgctcgtttagcaggtgctgcaactgctcctgtattgcgtaccacaatggctggtgttaaagctgctggtagtgtagcaggtaaggttgtttcccctattaagaacactttggtagctcgtggtgagcgggttatgaagcagaatgaagaagcatctcctgttgctgatgactatgttgcacaggcagcacaagaagctatggctcaagcaccagaagcagaagttactattcgtgatgctgttgaagcaactgatgctactccggaacagaaagttgcagcacaccagtatgtttctgacttaatgaatgctactcgttttaatcctgaaaattatcaggaagcaccagagcatattcgtaatgctgtagctggttctactgaccaagtacaggttattcaaaagttagcagacctagttaacacattagatgaatctaatcctcaagcactgatggaagctgcatcttatatgtatgatgctgtttcagagtttgagcaattcattaaccgtgaccctgctgcactggatagtattcctaaagattctccggctattgagttactcaatcgttatacaaatctgacagctaatattcagaacacaccaaaagtaattggtgcactgaatgttattaatcgaatgattaatgaatctgcccagaatggttctttggatgtgactgaagaatccagtccacaggaaatgcagaacgtagcattagctgctgaagtagctcctgaaaagctcaatccagaatctgtaaatgttcgtcttaaacatgctgctgatggccatagcattgaacggttatctgaaactgttattgagaaggcagataaggtaattgctaatccttctaatgtagctgctaaaggtgttgctcatctggctaaactgactgctgctattgcatctgaaaaacaaggtgaaatagtggctcagggtgttatgactgctatgaaccagggtaaagtatggcaacctttccatgacttagttaatgacattgttggccgtactaagactaatgccaatgtctatgacttaatcaaattggttaagagccagatttctcaagaccgtcaacaattccgtgagcatttacctacagtcattgctggtaagttttcccgtaaactgactgataccgagtggtctgcaatgcatactggtttaggtaaaacagatttagctgttctacgtgaaactatgagcatggctgaaattagagatttactctcttcacctaagaaagtgaaagatgaaatctctactctggaaaaagagattcagaaccaagcaggtagaaactggaatctggttcagaagaaatctaagcaactggctcaatacatgattacaggggaggtaggtaataacctccttcgtaatgcccatgctattagtcgtttattaggtgaacgtattactaatggtcctgtggcagatgtagctgctattgataagctcattactttgtactctctggaattgatgaataagtctgaccgtggccttttgtcagaattggctcaatcagaagtggagggtatggagttctccattgcttatatggtgggtcaacgtactgaagagatgcgtaaagctaaaggtgataaccgtactttgctgaatcactttaagggctatatccctgtagagaaccagcaaggtgtgaatttgattattgctgacgataaagagtttgctaagttaaatagccaatcttttactcgtattggtacttatcagggaagcactggtttacgtactggttctaaaggttattacttcagcccagtagctgcccgtgccccatactctcaaggtattcttcagaacgttcgtaatactgctggtggtgtggatattggtacaggctttacgttaggtactatggttgctggtcgtattactgacaaaccaaccgtagagcgtattaccaaagctctggctaaaggtgaacgtggacgtgaaccgctgatgccaatttataacagcaaaggtcaggtagttgcttatgagcaatccgtcgaccctaatatgttgaagcatctaaaccaagacaatcactttgctaagatggtgggtgtatggcgtggtcgtcaggtggaagaggctaaagcacaacgttttaatgacattctcattgagcaattacatgctatgtatgagaaagacattaaagactccagtgctaataaatctcaatatgtaaacctgttaggtaaaattgatgacccagtactggctgatgcaattaacctgatgaacattgagactcgccataaggccgaagaactctttggtaaagatgagttatgggttcgtagggatatgctgaatgatgcacttggctatcgtgctgcatctattggtgatgtatggactggtaactctcgttggtcacctagcacccttgatactgttaagaagatgttcctcggtgcatttggtaataaggcatatcatgtagtaatgaatgctgaaaataccattcagaacttggtgaaggatgctaagacagtaattgttgttaaatctgttgtagtaccggcagttaacttccttgctaacatctaccagatgattggacgtggtgttcctgttaaggatattgctgtgaatattcctcgtgagttctcttctattgctgatgctggtattagtcgtgatgacctgttagtagctgaatgtaagattcatgagtacatggaaaaacttgctaataaacttccagaaaaagtacttaatgctggccgttatgctcttattgctaaggacactgctctgctccagggtatccagaaaacagtagagtattcggacttcattgctaaagccatcatctatgatgatttagtgaaacgtaagaagaaatcctcttctgaagcattaggtcaagtaactgaagagtttgttaactatgacagattgcctggtcgtttccgtggttatatggaaagcatgggtctgatgtggttctacaactttaagattcgttccattcaagttgctatgagcatgattagaaacaacccagtacattctctgattgctacagtagtacctgctcctgccatgtttggtaatgtaggtctgccaattcaggacaacatgttaaccatgctggctgaaggaagactggattattcattaggcttcggacaaggactaagagcaccaaccctcaatccttggttcaaccttacccactaa

SEQ ID NO: 137483 - DNA, 6819 bp, Homo sapiens
atggatgatgacaggattgtactcactgctactgatggtagtgagttatccttttatccagagaattacagtcaggatgcaatgtatctgtatgtgaactattactacatacagcctactagtgttgcagacccagtggttcatcctgctgtatctgtaccatctgctgatgacttaccttctacttctgaatggactcaggtatctcagaaccatactcctaagtcagctaccctgaagacagttactcatattaagagtgtattctctgatggcagacctgatgaggaaagtaccaatactgaagaagaacaggttagttggactaacttctcagatgtttacgagaaagaatttcgtgaaccaagtgaagtaggcttaatcattattcgtaagactacaatgacccaggtacagactggtactgtatctactggttccactacaaacactgaagttattgatttaggtggtggggttactgaaaccagaactactacagtaactacagatactttaggttatacatggtcttatcagaatacagatgtagttactactatgtctgctggtggtatgcctcaattgtttatttataaacagaacagtggtaatgccatccttgatgctctgtttattaataagacgaccaataacagattctattcattcatccctatccgtagtgataagaactggatttctggttctacatatactctttgtaagaaagcctttaagaaggctacaggggaaggctttgctcaggctaacagagactttgatgcttatcaggaatggtgggaatctcgcagtggtaatagggatattcccatagggaagcctcctaaaagacccgtatatccaacaataccttctaaatccattaatattcgttctaacggtggataccgttacaacatgactattagttggaacttcattgaagaatcagttagttcaggtaaagcattctctggagccaagaaagggcagctcaagtttgcttatgaaggtactgtagtccttatgcagaaagccgttatgtactctgaaaagggtaatgacaaagttgggtttactatctacaggctagataagataacaatgtattggcagaatggggataattcatggaggaagatttctgtctatggcctgaaccataacaataatgtttacaagaataaatctgtaagcatttctggtgtagatgcactaaatgatgatgaagagtccggatttatcatccctcttcataacaacatttatcgtagtatgtctttggtaaatggtactcagttatctactgcatgttgttatctggttcttaactcatataagaaagttaagaagaaatggtatcagtctggcatttttaaagtagtagtggttgttgttgcagtagtagtgtctgtgttctttactcctgctgctggtgctggggtaatgggtactgctgcttctattggtgctgcattaggttttgcagggttagctgctattatcgttggggctgtggctaatgccattgcagctatgattctgatgtccattattcaaacagtctctgttagtctgcttggggataagattggaatcattgttgctactattgcctctatggtagccatgaatgtcggcacagctttatccactggttcatccatgtctacgatgctgggtgaaatgatgaaagcagacaacatcattaaactcacttcatctgtaggaaatggcataagtgattacatcaatgcttctgctatggaaactgtcaaaaagacagagaaattatggcagagtactccttctactatcgaagaagacttgcgtttgttctctaaattggttgaaagtaagcctgttcacgcaagtcctactgaacatcaagcaactcctcagcatgtaatgagtaaaggcttaaatgagcctactgacccatctacatgggaaaatggcattagccacatggacagaaatttacgtttatactcaggaggccatatggctaaaccacgtaaattccgtattaaggataagcctgtaatgggtagtgctgctggtcagtcacatgagaaaggagacattgtttatgaatgccttcagtatgattacggcgttgctcatgatgacactcgtgctactgagctatctaaagaacgccaactatggctatctcctaataaaacaatgattcaggcagatctggcagaagtacaacgtatgctggatgaatggtctgaagaccaaatgttcattgatggcaatgcagaagcaataaccgatgacatggcctctgatatggctgtgtttgtattacaagcaatggctgaaaagcctgactctactgaactgaccacatcagcaacgttaggtgctcaagatgctatggccttcggtatttctgaagacccagcattcttccaaatactcagtgctaacctctattctaatcagaaactggcaatggtacgtgagacattgtgcaatagctgggatgctcatattgaggggaataaaacagatattcctatccatgtaaccattgataaagatggtttccttatcttccgtgactatggttctggtattcctaaagataagattcaagaggtctatggggtatatggtgcatctaccaagaaagctaatactgcttccactggtggctttggcttaggatgtaaatcccctatggcctatacagacagttttactgtcacatctatgtgtgacggaaccaagactgtctatcacattgctaaatcttctgttgagactaacggtaaaccagggattattcctattgttagcgtacctactgaagaatccgggcttgaagttaaaattcagcttcagtcagaagatattttagaaattgattcatatattcgagccattgtattacatggtgagattaaatgtatttactgcaatcagtatacaggaccaaatacagtagaattactgcctgtactgggtatgtcttttgaaccaggtagctataacctagaccatagcacatggcataaatattacatgggcagtcattcaatatttatccgttatggtaatgttatgtaccctgctttggatacccctgctacacatgaagcattaaaactggttaaacagtttatgcaggttattaactgtagccgtatcgttgttcaagctgccccatcatcactagctgtagcacctagccgtgaaacactgtcatctcaaaaaatgaccgaagacggtatcgtaaatttggctgtagctttagtagataaaatggaagcagatattaaagctcgtcttccaaatgctattgaatatattgggaaggctattaaagaatatagtcctcaccgttttgaagtaaatactatgcaatcacgtcttattcatctggaaatggagactgattttgatgtcttcatggaagatgtagccatccctaataagtgggatgagcgtgtaattgcattcctgaatgctaacccaaataaactgaatgattttgaaccagaccatcaagagaagactttctgttgttctcgtacatgggagttcgttaacaagattgtttccattctcccaccaggaccaattaatagtgaaatgactctactgttagcaggcactatcacttctggtgtagcaacatcattcgtccagtttactcaggtctatagcaacatggtgtctttgaatgagattttggataatcctaagaaagctcgtatgcctgaagacaataacctgttgtgggctgtagtcacttcactgattaacaatactgacgaagataatcattcgaaaatctttgattacgttgaacgtatgccatttacgttcaaggttttgtactaccgttccaggaaaactgatatgtccatgacagatgctcaattaacccgtgaatatgacagatgtcaggctaaagcctttatgggcaaaactgctgcattctttggttcactgttatgttctctgaagttccgttgggtaaaagatggctgtgatacagcacaaaccgatggtgagcatctcgaatggaatcctgattggtttgaaagtctattacctgaatctcgtgtaacagtacttatgcatgaactatggcatgttggcttactgcattctgttcgtatgggttctcgtgacccagaagtatggaattatgcctgcgatatttatatcaacaatcagcttattcaggatggctacagctttataggaatcgaaaattgctggaaagaccctaagtatgctggttgggctgaagaacaaatctatgatgacctcatgagcaaacagatacgtcctcctaaagcatcaggtgcttttgggactggttcaggtggtgacatgaaaccttccacttcgaaggctagtcaggtgaatattgtcaataatgtagtaagagccatgcaccaacagaaactatctggtggctctttgcctggggtattacctggaaaaatggaagaagttattactcaattcctgaaaccagtagtaccgtggcaggttttacttgaacgcttcttcaatgacctgcaagaaacttactactcatggcaacggcctaatcgtagataccctgatatgtacctaccatctcctatggatgatgacggtagactggaacatctggcttatttcctcgatacatctggctccattaaacctaaagatgctttacgctttagctctgaagtggcctatgtaaaagagaaatatcagcctcagaagatgactctagttcagttcactacagagattgtagatgaacaagtcattgaagatggtgataagtttactgatgtcactatcaaaggacggggtggtactagtctggttcctgtacgtgagtggattattaagcataagcctactgctgccattatctttactgacttagaagtcagaccgatggagccattgccatttgacattcctgtcatatgggtagttattcgtaaccctggtgcacaagttccatttgggaaaataatttgtaggaagactatgagcacactactgactaagaaagacattgtttctgcattgcctccccagtttaaaagcagtgttactgaccaactggtaaacatgattaacaatgtgacccaagaccagacagcagcagagcaaattagaaataactttgtgacttatgctggggtgatgaaggatggaaagtttaagacccaggattatcttaatgctgttcaatatgttacttacaaacacatggggtatagcaacaaagatgcttacttcaaaacattccccaacagacaagctgaattagtagcaaggggaaccagtgagaaggacatctctgcttatgtatctgcttaccataggggtaagttagtaaacctcattatggaacaatcactgattccagtatggattgtaaatcaggatttgtttcaggaagcattgaaccatcaggcatggctcatgaagaatgctaccagtgagaaggtacagtgtgatgctgccaactctatccttactcacctccagaaaccgaaggatgctgttactaatatcaatctggatttgagagaaaactctggattgactgaactcaagaacacactaacccagttggctgaagctcagaaagcagctattgaagctggtacacctactaaagagttggatgaatggctagaccaagtggactattccgttctgaatacccctacgtatataccaaccgaatttgcactgacctttgctaactttattaagctggttaatggtaaggagggggaatcaaacaaaacccctcctgttcacttaaagatgctggataagataaccagtaagaatcagtacattgctaacttatgtttccgtggtgcagcaaagacaactctgttcatggaatactttactttgttcttagcagtgtttgggcatctacctagcttgggtaaagtagaaggaatgatttatgtatctgactctatggataacggtgttaagtctgcccgtaagaacattgagtttcgatacaacaattcaccattcctgcaacaatggattcctaaagctaccttcacagataactaccttgagtttgtaaatgctgaaggtcaccgtcttggtgtgaagatgtttggtgctaagacaggtcttcgtggtactaagatttttggtaaacgtcctgttctttgtgtactggatgacttagttagtgatgatgatgctcgctcacgtacatcaatggaagccattaaagacacggtatataagggtgtgaaccatgctcttgacccaacaagacgtaaggttgaatctggtgcttgggatgtcaacgtatggcctgtatgtgagaaattcccatgtacgcgagaagaatttcaaggtgcttgggaagaccgtttctcctatgactacatcaatgaccaataccagatggcattgaagacagccagctgcaaattcctctctctcttttgcttcaatgcctgccagcgaggttcagatgattacctggcagcagaattcagccacctgcccatctttggctttggtgagcagagcgctgtacagctagtgagtctacctggcaccatgctagtactgggggtttctgctcagtcctgtgatatgaaccatctatgggtctctcaaccacggataccagtgcctgttccattggaggcggcagaaggtgcaatgaactccatgagggttcttagttttggtgatttaatgctctatttttgtgctggttggcctcctgccaagatgtggcgctttccagagagcatcagcagtagcagtgcagagggatcagca

SEQ ID NO: 137484 - DNA, 4446 bp, Homo sapiens
tcaaacttgaacggatgaggtgcttcttatgaatgagccaagaaagtttcttgagatgacatctacttctggtgaagatgctgtgaacatggttgaaatgtcagcaaaggatttagaatattccataaacttgtttgacaaagcaggggcagggtctgagaggactgactctaatgttgaaggaagttctactgcaggtgaaatgctatcaaacagcgtcataagctgcagagaaattttctgtgaaaggaagagtccattgatgtgacagacttcactctcgtcatattttaagaaactatgtgattgattattaaggtttagtgatccggtctggtacatctcttccaactgcttcctgtttccaaagtataaagcaaggtctgtggcaatgatggctttgcggatgatctcaagcacctgctcatattcactggagctcagagtggagaagatattgtgcccttccaactggaggatggacacagtctgggagaagtggtgctgctccatggtggaagtggagtagagagcggccagagggtggtcgaacttctgcaggtagctgttactgaagcccctgtggtccaggtcatgacacagacacgcaatcagcagtcctttgcgggcctggagataggcctttgctagagaaatgaaactgtcagtgcccatgtggcgtttaaggccacatgactggctgagctcaccaaggttgtagtttgaggttggaggagggtcaaggtctaagctctcaagtactcccaattccttggatctcgcaaggtgtgggtcactggtgacctggagcagggcattttctggggtgttaaggtcagaagcttgatcagagttgttttcagaaagaatgcgaggagaggattttgaaagagtcaatagggtaatgcttacatggggtttaaattcaatttctttgcagagacgcacgggaagggtgaattgcatgagaccttgccactcttctgaagtacaaatgctatggtaggacagcttttccatcgttacccggtaaatgcactctgagtggcgaattctatgatacatattagcacagtgtaaggctaaagcacaaaagacggcaaacattttgaagttgttttcatctgttttagagaaggcactgccactgattttgttgaccatctgcaccacacctatcacgctgcctcggctgacgatgggcatgcacaggatgttccgcgtggtgtagcctgtgtacaagtctacttctctgttaaagcgtgggtctgcataggcatctggaatgttcaggacttcccctgttcttgctacttggccagcaattcctttctcaattgaaaatctacctgggagcactagaaagtttttccaacatgatttccaaaaggaccgcctccggaagacggcatttccaggagtgacgctaaggcttcctaggcgcggtttctcgggcactgcctgcaatgtcattcccagaagtactaccttcaggaggcgggtccttatctctttggtcttcttgaagacaggttttccttccttttcctctccaatatcaaaaaggtctgaatataactccttgttcttatggtccacctggaaaagcgcacaacgatcggcattcaccaggttttttgcatatattgctgtgctggagggaagcatatcagtcgtgtattctgacaccaactgacacttctgttttagttggtaagcagctgctggcctaacttcccagtgcccttctgccatccaaggccctcttccagaacctctcaggccttccctggtgcctagatctgagcctctgtcagcactacgaccaccactcattctgattagttgaagttttgatacgtcgagtaggaagtcattcaattctgtctgtttggcaaggcctctgcatacctgcacctgatgtattgctactgaagcccaggcaagatttgctgttgcaacctcctggtgactaagacagaaggcttctttgccccagtgccgatacagctcgagaataccaatcaagtcaccaattgcagtgacaattggtaagcaaagaacagactggatacgagtccctgattccagtccagtacctcttggaaatcgttcatccttaaaagtggtgagacggaccaaggacggtcctgccaagggcttaccacacttaagactaatttcgggaagggatccgataccgccaagattcgctaaaaaaccaggtaccattccagaagggaagacgcgggccgtgtctttaaagacagcgataagttcgacgccaacgatccgatcctgaaagatcagacgcaagaatggtccggatctgcaacctttacatctgacggtaaaatccgtacattctacactgactattccggtaaacacttcatgtaatacaatggctcgaatatatgaatcaatttctaaaatatcttctggctgaagctgaattttaacttcgagcccggattcttcagtaggtacgctaacaataggaataatccctggtttaccgttagtctcaacagaagatttagcaatgtgatagacagtcttggttccgtcacacatagatgtgacagtaaaactgtctgtataggccataggggatttacatcctaagccaaagccaccagtggaagcagtattagctttcttggtagatgcaccatataccccatagacctcttgaatcttatccttaggaataccagaaccatagtcacggaagataaggaaaccatctttatcaatggttacatggataggaatatctgttttattcccctcaatatgagcatcccagctattgcacaatgtctcacgtaccattgccagtttctgattagaatagaggttagcactgagtatttggaagaatgctgggtcttcagaaataccgaaggccatagcatcttgagcacctaacgttgctgatgtggtcagttcagtagagtcaggcttttcagccattgcttgtaatacaaacacagccatatcagaggccatgtcatcggttattgcttctgcattgccatcaatgaacatttggtcttcagaccattcatcccgcatacgttgtacttctgccagatctgcctgaatcattgttttattaggagatagccctagttggcgttctttagatagctctgagtataaacgtaaatttctgtccatgtggctaatgccattttcccatgtagatgggtcagtaggctcatttaagcctttactcattacatgctgaggagttgcttgatgttcagtaggacttgcgtgaacaggcttactatcattctgctccagggctgcttttgtggctgtcacgagcatcctcagctcttccctggcgagatccatgtccgccgtcttcaccggcctctgccccagcgccttgagttgagccagaagagccttaacttttttcaagagatcaccaaatatcaaagaactgttacaaatatcttcaaagacttttccaaagacgtgcagtctgttgaactgctgggggctgcacgtgcaaattttctggagctccagttcccagaaggcgccctccttcatttcacccaaactgtccccattgaaggtgctaatgctctcggcacctggtacagtgctgcatcctgcctgctgcagctttctctcgtggcccgcggccgccttgctcccagtgaagtcattcttcaggagatcttgcttggcgagcacttccttctggaaacgcaggaacatcctgtacctgtctgcgctggtggctccggccaggtaggagctgacatagtggtgccggtccctggtgcctctggacccggcctcctggtagcacagcaccttcaagtcgggcagccggagttcttccctcctgcgccatccaggagggccccgtccaggagggcctcctttcttttcttccttcccctctctgacagcctccactggaaggaaatcctcctctgaagtgtgggaaagagaggcctgggggttcaggtacctgaacagcggggtgtcctgggcctcactggggaccagggccgtgtggatggtgaagtgggccagggcctccttcatcctcgccaccttccctgcgggcggctctcccacctcagaggcgcgctcccccttgggccggtgggcattgggccagtgctgtaagatcgtctccggaggctggtagagcttgttggggttcaggtgtccagagatgtagaggtagacgtcctcccggtggtctttctgaagccgattcagaagtttcttcagattacacagggtcttcactcctggcgtctcgcagtgcttcagattacacagggtcttcacgcctggcgtctcgcagtgcttccacttcaggtacactcttcctgcagcatccctacagagccaacccccagggcttttgaaccacagttgcctcctctgcaacatcagagtcat

SEQ ID NO: 137485 - DNA, 2189 bp, Homo sapiens
tatgagaaaatcttgccgattatcgaatactatgcgggaacccatcttatcttttgaggtctgtatgcgttacattacattcaacaatgagggtatctaccctattgctatccttactacaacgttacgtaaggatgatattgtcaaagcatacatggaaccctgggatgtagataaagattcagtaatgattcttgaacttcatacagccccagggaaaaagaaaactcctgctaaagagatgcaggagtttattacccaagaattagtgccagcattcgaagcagcacaaactcagtatatcatctgtggtgattctgaatattacaaacagctaaccaaacaaggtaaagctgatgccaatattggctatgtaatggattgtgcttatgggaaccagaaagttatttacgttcccaattacagacaaatcttttatgacccagataagataaagactaagattgctttatccatgcaggctctgattgattatgtctctggttcttatgttgagccaggaactaagattatccattatgctgattacccattaactccagaagctatatctaagtggttagataagttactggagatggatgttccattagcagtagatatagaaaccttcagtctgaagcattatgactgtggtataggcactattacattctgctggaacaagcacgaagggattgcattccctgtggattatgaaccaattgagggggctactgaagctccttatggtagacaagttcacaacatgcttgttcgttctatgctcagggacttttttattaagtatctgaacaggcagatgtatcacaatattgcctttgacgtatacgcactcatttaccagttatttatgacagaccttctggatacggaagggttgttgcatggcatgagtatcatgctaagaaactgggattgcactaagttaattacctatctggctactaactcttgtgccggtaataagctaagtcttaaagaccaggctcaggaatatgctggtaactatgctcaagaagaaatcaatgacattaccagaatcccattagcagagttgttggaatacaacttagtggatggattatgtacctggtatgtctatgaaaagcattgggatactctggttaatgaccaacagttagatgttatacaaacatctttagacctgcataaccatactcaagataccagtattctggaaattcttgatgctctgattgattacaaagctgtagataaaattctgacagcatttattccagcattaaaaaatgccagacaaggaccagatggttggcattatctctttggtaatctgaacttaggtgggactgtatcaggccgtctatccagtagtgaaccaaacctacagaacctaccttctggttccagatatgccaagatgattaaaaaatgttttgaggctcctcctggatggatattttgtgggctagactttgcttctctcgaagaccgtatatctgctttaacaaccaaagaccctaataaactaaaggtgtataccgatggttacgacgggcatagtctacgtgcatatgcttacttcggtgagatgatgcctgacattgaagatacggtagagtctgttaattctattcaggagaagtacaaagcatatcgtcaggattctaaagcacctacctttgctcttacctatcagggcacgtacatcactttgatgaagaactgtggtttccctgaacagaaagctcgaatggttgaggaacgttatcacacactttataaggtaagtgatgactgggttcaggctaaactagaccaagctgcaaaagatggttatgtaaccgtagcatttggcctgagagtcagaacccccttacttcaacaagttatccgtggaaccagtaaaactccttatgaagctgaagctgaaggacgtactgctggtaatgcattaggccaaagttggtgtcttctgaataaccgtgctggttcagagttcatgcgtaaggtacggaatagtaagcatcgtcttgatattcgtccaagtacccatatccatgatgctcagtatttccttatccgtgatgatatggatgttgtgatatataccaatactcatttggtgaaagcagtacaatggcaagaccatcctgatattgctcatccagatgttcatttgg

SEQ ID NO: 137486 - DNA, 1585 bp, Homo sapiens
taagactaaaatctacgtagcatcctctgtctacaatttggcaggggatatacataaacgtccaaattatttaaagactacggtgattggtaacatcgtcagtaaatctgactttagtatgggtgataccatcactaactcttatttaaatggacctggtattcgtttacgtagattccctggttgggctgcaactaactatgacccttcaattggtattgcttatgggaacttgtcaatactgtctcagatagaccctgaagtagttaaatggcaagttcctcaaaaagcaggttatgaggtacaggttcagagcagtaggattggatttggtgattttgaggaatgggctgataaattcctctatgagaattatccagaccgtattactgaagagtttgaaatagacatcatggatgatgacaggattgtactcactgctactgatggtagtgagttatccttttatccagagaattacagtcaggatgcaatgtatctgtatgtgaactattactacatacagcctactagtgttgcagacccagtggttcatcctgctgtatctgtaccatctgctgatgacttaccttctacttctgaatggactcaggtatctcagaaccatactcctaagtcagctaccctgaagacagttactcatattaagagtgtattctctgatggcagacctgatgaggaaagtaccaatactgaagaagaacaggttagttggactaacttctcagatgtttacgagaaagaatttcgtgaaccaagtgaagtaggcttaatcattattcgtaagactacaatgacccaggtacagactggtactgtatctactggttccactacaaacactgaagttattgatttaggtggtggggttactgaaaccagaactactacagtaactacagatactttaggttatacatggtcttatcagaatacagatgtagttactactatgtctgctggtggtatgcctcaattgtttatttataaacagaacagtggtaatgccatccttgatgctctgtttattaataagacgaccaataacagattctattcattcatccctatccgtagtgataagaactggatttctggttctacatatactctttgtaagaaagcctttaagaaggctacagggggtaagatttctgacattatggatgacctgaagaagaacaaagatattggtgatattcagtatatctatgctgtatttggttgttctcttaatagtcctgaaaatacagctaaagagtacatatacagattcttccagttagtgaatcagtcaatgcctgctgacccaaactacccaactatggatgctttggtagaaggctttgctcaggctaacagagactttgatgcttatcaggaatggtgggaatctcgcagtgaagaagtagttgaagtagaaactactactgaaactgttgatgaaactgttgaagtagctgaagaagctgctgctcaggaagaagaaaaagaagtacaggaagaagaggctaaagaaccagtacaagccaaaccttctctgtttgcaggtctgaaacgttaa

SEQ ID NO: 137487 - DNA, 2888 bp, Homo sapiens
ccaatcgacgtccggcatctctgcctaaacttctccggtttgcctcgctctcttcctgtttaatattttgtaggctcttaatatccaaattctgagggtcagcagctacagcactacgagcaccatcaagaagacgtttagcagtgttaactcgctcctgatagcgaggtagtacacttctaaggttttcctgaccggtctgaatacgacgctgtacttcacgtaaatcagcaagtgcagtatctaacgtattctgtgctgcatagatgtttgattgaatttgtgcagtaagctgattacgagcattctgttcaatagcagtaccagtagttgcaagttttgcatttgcttctacggctgctttatccagttggtaatcaccacccaaatcaataacatcagtatcaaaggcatttcgaataccactaaaccatccctctggtttaccggtgatactacgttgaatgattgctcctgccatagcgggagaaatagcattctgttttgctacctcattgatttgtcgaaccagtgcaccttggttaatgcctttcagttcattgctatcaataatacgtttagccacctgaccagtcgtagaagggtcaacagtagcagcttggtattctggcagcagagtattaccaatattctgcatattacgagtaccaacagtattaccagcaacagaagtgaatgcttgttcctgtaatggattaatagaattacctgtttctgcttgagcaatgtaatccttcatttcatcccatgacaagttcttataagcaccaggagtatcatccggtaaagcagcccatgtactcttcagattgccattcttacgggcattaaaaatagcttcacccagtttgtcttggttctccggagacataggaatgttctgccaatcttcaccaaatacctttggagcaaagtctttaagagtatcttggttaatctggtatgcaccaacaggagaagcacctagtgtcttcttcatagtgtcttgatgctgaaccacctcacctaagttcatctgagtaataggtacatcagttggtgtgaacttataggtagtgtcatatgcagaaccattccgagtaccctgagtaccaggaggagatagggatgcagaaccagttcccggagtatatgcacctggatatgctctatctaactgagatagtgcacgacttactgctcctggtgacatttggtcgaacgtaccctctgcaagcatacgagcatcgtcagcactgtatgcaccacgacgaatattattcagtaactgcatagcagcctgagtatccgcatcgttacgtatatcaacacctaagttgaataagctgcgacgttgaccaataccagcagtaccctgtccttgaaggttgttcatgtagtccataacaacaccagcaggaagggtttttaatacatccccatactgagcctgtgctgcctgaacctttcttgggtcaccagattgataagcagatcgtttcttcttcagaatctggttctgtttttctacccattcttcattaagaagacgggtaaaatctttgattactttactgtcagcaattgtttttaacgcattgttatagtcttgggttaatgcctcttctacctccaatactgtcctcatattgataggcataccagttaactgcatttgaataatatcttcacatgcaggtttaaagatgtttgtataaacatctaactgttggtcattaaccagagtatcccaatgcttttcatagacataccaggtacataatccatccactaagttgtattccaacaactctgctaatgggattctggtaatgtcattgatttcttcttgagcatagttaccagcatattcctgagcctggtctttaagacttagcttattaccggcacaagagttagtagccagataggtaattaacttagtgcaatcccagtttcttagcatgatactcatgccatgcaacaacccttccgtatccagaaggtctgtcataaataactggtaaatgagtgcgtatacgtcaaaggcaatattgtgatacatctgcctgttcagatacttaataaaaaagtccctgagcatagaacgaacaagcatgttgtgaacttgtctaccataaggagcttcagtagccccctcaattggttcataatccacagggaatgcaatcccttcgtgcttgttccagcagaatgtaatagtgcctataccacagtcataatgcttcagactgaaggtttctatatctactgctaatggaacatccatctccagtaacttatctaaccacttagatatagcttctggagttaatgggtaatcagcataatggataatcttagttcctggctcaacataagaaccagagacataatcaatcagagcctgcatggataaagcaatcttagtctttatcttatctgggtcataaaagatttgtctgtaattgggaacgtaaataactttctggttcccataagcacaatccattacatagccaatattggcatcagctttaccttgtttggttagctgtttgtaatattcagaatcaccacagatgatatactgagtttgtgctgcttcgaatgctggcactaattcttgggtaataaactcctgcatctctttagcaggagttttctttttccctggggctgtatgaagttcaagaatcattactgaatctttatctacatcccagggttccatgtatgctttgacaatatcatccttacgtaacgttgtagtaaggatagcaatagggtagataccctcattgttgaatgtaatgtaacgcatacagacctcaaaagataagatgggttcccgcatagtattcgataatcggcaagattttctcata

SEQ ID NO: 137488 - DNA, 1188 bp, Homo sapiens
aggcagcggcagaaggtttcttcgactttctgctcgaccccaatgcttctgaacttcgtattagtggacctggtggtacaggcaagacatttacaatggctcatatgattgacgagattatgcctcgttatcatgagacatgtagtctgatgggaatccctgctctctataacgaagttattatgactgctactactaataaggcagcagaagtattagcccgtgcaacaggacgtcctacgtctacctatcattcctttcaaggtctgacagtacggaataacctgaagactggggaagcagacctgattccatctaagtccttcagtatcaaaaagaataaggtcatttttattgatgaagcatcaatgattgaccgtaaactgaagaagtttattaacgaaggtactcaccaaagtaagattgtttacttaggcgataaatgccaattgttacctgtaaaggaaacttcttcccctgtctacaatgacagtagcattaaagagtttatgctgacccaacagatgcgtactgatgtccctgaactccatgcactgcatgaacagcttcgtggaaccattgaaggtaagcacggattcctgcctattaaagcagttccaggtattatcgactggattaaagatggtgatgaaatgagaaaagaagtcgaaggtcatttcatgactaagactgacactcgtattgttgcctataccaaccaacaggttgttaactataacaccttcattcgagccatgaatggattccacggagagttctgtattggtgaagagttagtaagtaactctgctattcagattggtgctggtgaccgccttagtattgaacaggaatgccagattgttgaccaggattctgctactcgtaagattctgattgattcctctggcatcgaattagaagtacgtgattgcaccctggatactggttatggtggtgtctttgaaggtatccctattccgaaagaaccattccctgaacttcgagcattacatgcttctactgtgcataagtctcaaggttctacctacgacaccatctttattgatgctactgatttatctacttgccgtcagcctgatgtagtagcacgtctgctttacgtagcagtatctcgtgctcgtcatcgggttgtgttctatggctctttggcagagaaatttgggg

SEQ ID NO: 137489 - DNA, 1422 bp, Homo sapiens
catccacatcaatgacaatcatattgaagccagcaatagcattctcttcagcacgatgccctcgacggaaatggtggttagcccagtgataacctgcttgctgggtcagtacatgtaactggtcaaatggaactttctgtgcagcattcccactcttatagaatggtaaagcttcaagcaaatctgcatgagtaacttcagtaccaacagatgcaatatacttggctaatttaacgtaggctttttcacgattgaggatagtctggaatgcaacaccagactcttccaccagaagaattgcttgcttcagatgttccatctctaccatgatactgttatcaacaaatgcaaatgcacctgccaatttcagtgccttaaaatagcgatgttccagttctgctttacgaatctcttcgtggtcagctaaagctgctgcttgtttttcacactgaatcttgtagtcgattagtgcaataccaacatcatcttcaactgtcattttccaaccaaacttggatgcatctgcaaggctatgaaagtggttagcccacttattcacaacagcattgttatcctgcttaatcagattacgatagatttcttcagcactctggctcagatatgcacgtttatctgcctgacctacagcaaacagacaacgacgagaatagccagtatcaaggaagtcatagaaaagttcctcagtctggctcccattgagaagtttgctcggtgtaccaaacagaaaaaggttagctggagttttaccatcaacttcctcactacgaatactttcagcagtattcttagtaagtttctgtttaatcttgccttggtcgtacaactcaaggaacacagttaatacatcagcattagcgagaaggtttgaaccaatctcatcaatctgtaagttaatagcaccacatccagctaataagagtttatgacgtaactgtttcacagcaggaggtgtacctgagtcaaacgtaaatggataagcaccagtacgtctgtattcagcttccaccttgtcaaactcttccttctggtcagtagcattacgagcagaacgttcgttagcaattttccacagacggtcttctgctaaagcaggcatggtgtcttccataaaccgcttcttaaagccagccataaaaccgtcttcaacaatgttgaccgaatggcctttaccgaagcctgaagtagcaagagccactgcatagatgtttactggaatttcaccacggtctttagtgatgatagttgcacccatacatgaagccattttcgcaaggaaataggccacttctacacggaaaaaaccacggtcagtgttttgcgtcttgttacataacacatcaacgatttcttcaatcgccggatgatgtgagactccggtcaggtcaatcatgggaaatatct

SEQ ID NO: 137490 - DNA, 1352 bp, Homo sapiens
atggaaattgaccgtcaactagaacatcctgcactggctcatttctctggttctcaaaaagcccatctccgtaagcatttaaagagggctaaggatttacgtaattacagggaattaactaaagtatttactgatatggctattaagccaatgttcaaaacctttgctaaattggggattactaaaggtatttccctatttcattatcaatatggtgttgaactgtggcgtaataatattgttaatagtgtccgtagaatacactcattaaacttcatgacttatagttctaagaagtgccgtgtatttgttaccccacgtattaccaatattgaagatagtctggctgggtatccagagtttgataatctttctactgagacactggtaaaatataactcaatcattgtcaaagttggaaccaagaaaggtgaagcagaggctatgactaatctgctcactaaagcaggatacgaagtcattaatatggctgaatatcatgagtgggattgtatagctcgcagacgtaaagaggaacaagaggctaaattagccatttccaaattacaagctaagaaggctactaataagaaaaaggttagtcctaatcgtcttattagtatgaatatccttgaaataccaaaagagcatcgtagctattcaagtgaggtatgtggttctcactacgcttctcgttctcatgaccgaatggttgatgtagatactccccagtattacatcatgcaggaagatattaataactacacaggaaggcttggtgttctttctatgtggcaattaacccctgctaccattaaagctgtaactgttgtttgtcgtaataaaattgaacgtaataaagctattaagcgaggtgctgttcatttggatgaatggactgctccgtatattgcttcagttcttacatccaaacaattcattaagtatgtcactaaagaacgtcagaaaacgttaagtgatattgtatcaggtactcaagaagcaaatggttatgtatatgctgacttcactgtagaagactggattcctgtaatgatggaagcggttggttctcctaatccgtgggagttcatgaagtggcgagtagtttgtctgtatcaggaaagagaaattccttcagcaccttggtcagataacattcctttggataatgcagggcttgttaagaagaccattctggtaggtattaaccagtttggtggtggacactttactgatatgtctgacccaactgctaccacagctaatggtgcaattggtcgtaaagacaaggtatctgcttctacgttacgtctgacttttgcagagaaagctggattacgtcctatcag

SEQ ID NO: 137491 - DNA, 2228 bp, Homo sapiens
ctttcagtttagctttcttcgcagcagtatctttagttaccagattttgctgaaagtcaggctggctcatatgacccaagtagctgacgttcaggaatacaatatcccgtacatctaccacttgaccaaaacggtcattcagattctgaaacagagcagactgagcacgtcccagaatggttctttggatgtgactgaagaatccagtgcacaggaaatgcagaacgtagcattagctgctgaagtagctcctgaaaagctcaatccagaatctgtaaatgttgttcttaaacatgctgctgatggtcgtattaaactgaataatcgccaaattgctgcccttcagaatgctgctgcaatcctgaagggggcacgggaatatgatgcagaagctgcccgtcttggattacgtcctcaagacattgtgagtaaacagattaaaacggatgagagcagaactcaggaaggacaatactctgcgttgcaacatgcgaataggattcggtctgcgtataactctggtaatttcgagttggcctccgcttacctgaacgactttatgcagttcgcccagcacatgcagaataaggttggagcgttgaatgagcatcttgttacggggaatgcggataagaataagtctgtccactaccaagctcttactgctgacagagaatgggttcgtagccgtaccggattgggggtcaatccctatgacactaagtcggttaaatttgcccagcaagttgctcttgaagcgaaaacggtagcggatattgctaatgccctcgcttcggcttacccggaactgaaggtcagtcatataaaagttactccattggattcacgtcttaacgcccctgctgctgaggtggtcaaggcattccgtcaaggcaatcgagacgttgctttttctcaacagaaagctgactccgtgaatcaggttaaagaaactcctgttacaaaacaggaaccagttacatctactgtacagactaagactcctgttagtgaacctgttaaaacagaacctactactaaagagtctagaccacaggctataaaagaacctgtgagccagtctgaaaaacgggatgttaaccttactaatgaggacaccatcaagcaacctactgaatctgttaaagaaactgaaacttctgcaaaagaaagcacagttacagaagaattaagagaaggtatcgatgctgtttacccctcattggtaggtactgctgattctaaagcagagggtattaagaactatttcaaattgtcctttaccttaccggaagaacagaaatcccgtactgttggttcagaagcacctctaaaagaggtagctcaagctctgtcttctcgtgctcgttatgaactctttactgagaaagaagttgctaatcctgcttttaatggggaagttattaagcgatataaagaactcatggaacatggggaaggtattgctgatattcttcgttcccgtctggctaagttccttaacactaaggatgttggtaaacgttttgctcagggtacagaagccaaccgttgggtaggcggtaagttacttaacatcgttgaacaggatggggatacctttaagtacaatgagcaattgctacagactgctgtattagcgggtcttcagtggagacttactgctaccagcaatactgctatcaaagatgcaaaagatgttgctgctattactggtattgaccaagccctgctgccagaaggtttagtagagcaatttgatactggtatgacactcactgaagcagttagttccctggctcagaaaattgagtcttactggggattatctcgtaatccaaatgctccattgggttataccaaaggtatccctacagcaatggctgctgaaattctggctgcatttgtagagtctactgatgttgtagagaacatcgtggatatgtcagaaattgacccagataataagaagacgattggtctgtacaccattactgaactggattccttcgacccaattaatagcttccctactgctattgaagaagctgttttagtaaatcctacagagaagatgttctttggtgatgacattcctcctgtagctaatactcagcttcgtaaccctgctgttcgtaatactccagaacagaaggctgcattgaaagcagaacaggctacagagttctatgtacacactccaatggttcaattctatgagacgttag

SEQ ID NO: 137492 - DNA, 1589 bp, Homo sapiens
ctatcagttgagctttcttcgcagcagtatcttaagttaccagattttgctgaaagtcaggctggctcatatgacccaagtagctgacgttcaggaatacaatatcccgtacatctaccacttgaccaaaacggtcattcagattctgaaacagagcagactgagcacgtcccagttcgccaagcacatgcagaataaggttggagcgttgaatgagcatcttgttacggggaatgcggataagaataagtctgtccactaccaagctcttactgctgacagagaatgggttcgtagccgtaccggattgggggtcaatccctatgacactaagtcggttaaatttgcccagcaagttgctcttgaagcgaaaacggtagcggatattgctaatgccctcgcttcggcttacccggaactgaaggtcagtcatataaaagttactccattggattcacgtcttaacgcccctgctgctgaggtggtcaaggcattccgtcaaggcaatcgagacgttgctttttctcaacagaaagctgactccgtgaatcaggttaaagaaactcctgttacaaaacaggaaccagttacatctactgtacagactaagactcctgttagtgaacctgttaaaacagaacctactactaaagagtctagaccacaggctataaaagaacctgtgagccagtctgaaaaacgggatgttaaccttactaatgaggacaccatcaagcaacctactgaatctgttaaagaaactgaaacttctgcaaaagaaagcacagttacagaagaattaagagaaggtatcgatgctgtttacccctcattggtaggtactgctgattctaaagcagagggtattaagaactatttcaaattgtcctttaccttaccggaagaacagaaatcccgtactgttggttcagaagcacctctaaaagaggtagctcaagctctgtcttctcgtgctcgttatgaactctttactgagaaagaagttgctaatcctgcttttaatggggaagttattaagcgatataaagaactcatggaacatggggaaggtattgctgatattcttcgttcccgtctggctaagttccttaacactaaggatgttggtaaacgttttgctcagggtacagaagccaaccgttgggtaggcggtaagttacttaacatcgttgaacaggatggggatacctttaagtacaatgagcaattgctacagactgctgtattagcgggtcttcagtggagacttactgctaccagcaatactgctatcaaagatgcaaaagatgttgctgctattactggtattgaccaagccctgctgccagaaggtttagtagagcaatttgatactggtatgacactcactgaagcagttagttccctggctcagaaaattgagtcttactggggattatctcgtaatccaaatgctccattgggttataccaaatgtatccctacagcaatggctgctgaaattctggctgcatttgtagagtctactgatgttgtagagaacatcggggatatgtcagaaattgacccagataataagaagacgattg

SEQ ID NO: 137493 - DNA, 1245 bp, Homo sapiens
aaggctttgctcaggctaacagagactttgatgcttatcaggaatggtgggaatctcgcagtggtaatagggatattcccatagggaagcctcctaaaagacccgtatatccaacaataccttctaaatccattaatattcgttctaacggtggataccgttacaacatgactattagttggaacttcattgaagaatcagttagttcaggtaaagcattctctggagccaagaaagggcagctcaagtttgcttatgaaggtactgtagtccttatgcagaaagccgttatgtactctgaaaagggtaatgacaaagttgggtttactatctacaggctagataagataacaatgtattggcagaatggggataattcatggaggaagatttctgtctatggcctgaaccataacaataatgtttacaagaataaatctgtaagcatttctggtgtagatgcactaaatgatgatgaagagtccggatttatcatccctcttcataacaacatttatcgtagtatgtctttggtaaatggtactcagttatctactgcatgttgttatctggttcttaactcatataagaaagttaagaagaaatggtatcagtctggcatttttaaagtagtagtggttgttgttgcagtagtagtgtctgtgttctttactcctgctgctggtgctggggtaatgggtactgctgcttctattggtgctgcattaggttttgcagggttagctgctattatcgttggggctgtggctaatgccattgcagctatgattctgatgtccattattcaaacagtctctgttagtctgcttggggataagattggaatcattgttgctactattgcctctatggtagccatgaatgtcggcacagctttatccactggttcatccatgtctacgatgctgggtgaaatgatgaaagcagacaacatcattaaactcacttcatctgtaggaaatggcataagtgattacatcaatgcttctgctatggaaactgtcaaaaagacagagaaattatggcagagtactccttctactatcgaagaagacttgcgtttgttctctaaattggttgaaagtaagcctgttcacgcaagtcctactgaacatcaagcaactcctcagcatgtaatgagtaaaggcttaaatgagcctactgacccatctacatgggaaaatggcattagccacatggacagaaatttacgtttatactcag

SEQ ID NO: 137494 - DNA, 1529 bp, Homo sapiens
ctgactctactgaactgaccacatcagcaacgttaggtgctcaagatgctatggccttcggtatttctgaagacccagcattcttccaaatactcagtgctaacctctattctaatcagaaactggcaatggtacgtgagacattgtgcaatagctgggatgctcatattgaggggaataaaacagatattcctatccatgtaaccattgataaagatggtttccttatcttccgtgactatggttctggtattcctaaagataagattcaagaggtctatggggtatatggtgcatctaccaagaaagctaatactgcttccactggtggctttggcttaggatgtaaatcccctatggcctatacagacagttttactgtcacatctatgtgtgacggaaccaagactgtctatcacattgctaaatcttctgttgagactaacggtaaaccagggattattcctattgttagcgtacctactgaagaatccgggcttgaagttaaaattcagcttcagtcagaagatattttagaaattgattcatatattcgagccattgtattacatggtgagattaaatgtatttactgcaatcagtatacaggaccaaatacagtagaattactgcctgtactgggtatgtcttttgaaccaggtagctataacctagaccatagcacatggcataaatattacatgggcagtcattcaatatttatccgttatggtaatgttatgtaccctgctttggatacccctgctacacatgaagcattaaaactggttaaacagtttatgcaggttattaactgtagccgtatcgttgttcaagctgccccatcatcactagctgtagcacctagccgtgaaacactgtcatctcaaaaaatgaccgaagacggtatcgtaaatttggctgtagctttagtagataaaatggaagcagatattaaagctcgtcttccaaatgctattgaatatattgggaaggctattaaagaatatagtcctcaccgttttgaagtaaatactatgcaatcacgtcttattcatctggaaatggagactgattttgatgtcttcatggaagatgtagccatccctaataagtgggatgagcgtgtaattgcattcctgaatgctaacccaaataaactgaatgattttgaaccagaccatcaagagaagactttctgttgttctcgtacatgggagttcgttaacaagattgtttccattctcccaccaggaccaattaatagtgaaatgactctactgttagcaggcactatcacttctggtgtagcaacatcattcgtccagtttactcaggtctatagcaacatggtgtctttgaatgagattttggataatcctaagaaagctcgtatgcctgaagacaataacctgttgtgggctgtagtcacttcactgattaacaatactgacgaagataatcattcgaaaatctttgattacgttgaacgtatgccatttacgttcaaggttttgtactaccgttcc

SEQ ID NO: 137495 - DNA, 1794 bp, Homo sapiens
aggaaaactgatatgtccatgacagatgctcaattaacccgtgaatatgacagatgtcaggctaaagcctttatgggcaaaactgctgcattctttggttcactgttatgttctctgaagttccgttgggtaaaagatggctgtgatacagcacaaaccgatggtgagcatctcgaatggaatcctgattggtttgaaagtctattacctgaatctcgtgtaacagtacttatgcatgaactatggcatgttggcttactgcattctgttcgtatgggttctcgtgacccagaagtatggaattatgcctgcgatatttatatcaacaatcagcttattcaggatggctacagctttataggaatcgaaaattgctggaaagaccctaagtatgctggttgggctgaagaacaaatctatgatgacctcatgagcaaacagatacgtcctcctaaagcatcaggtgcttttgggactggttcaggtggtgacatgaaaccttccacttcgaaggctagtcaggtgaatattgtcaataatgtagtaagagccatgcaccaacagaaactatctggtggctctttgcctggggtattacctggaaaaatggaagaagttattactcaattcctgaaaccagtagtaccgtggcaggttttacttgaacgcttcttcaatgacctgcaagaaacttactactcatggcaacggcctaatcgtagataccctgatatgtacctaccatctcctatggatgatgacggtagactggaacatctggcttatttcctcgatacatctggctccattaaacctaaagatgctttacgctttagctctgaagtggcctatgtaaaagagaaatatcagcctcagaagatgactctagttcagttcactacagagattgtagatgaacaagtcattgaagatggtgataagtttactgatgtcactatcaaaggacggggtggtactagtctggttcctgtacgtgagtggattattaagcataagcctactgctgccattatctttactgacttagaagtcagaccgatggagccattgccatttgacattcctgtcatatgggtagttattcgtaaccctggtgcacaagttccatttgggaaaataatttgtaggaagactatgagcacactactgactaagaaagacattgtttctgcattgcctccccagtttaaaagcagtgttactgaccaactggtaaacatgattaacaatgtgacccaagaccagacagcagcagagcaaattagaaataactttgtgacttatgctggggtgatgaaggatggaaagtttaagacccaggattatcttaatgctgttcaatatgttacttacaaacacatggggtatagcaacaaagatgcttacttcaaaacattccccaacagacaagctgaattagtagcaaggggaaccagtgagaaggacatctctgcttatgtatctgcttaccataggggtaagttagtaaacctcattatggaacaatcactgattccagtatggattgtaaatcaggatttgtttcaggaagcattgaaccatcaggcatggctcatgaagaatgctaccagtgagaaggtacagtgtgatgctgccaactctatccttactcacctccagaaaccgaaggatgctgttactaatatcaatctggatttgagagaaaactctggattgactgaactcaagaacacactaacccagttggctgaagctcagaaagcagctattgaagctggtacacctactaaa

SEQ ID NO: 137496 - DNA, 1974 bp, Homo sapiens
atggccaaagtttatcgtgctaaccgtaaagcccatgatgacgatattattcgtatgaatgcagtcggtttatcattgggaaccattgctaaaacactgggtgttcaccccactacagttaccttacgattacgctctcttggtattgaaccagccgacacacgtcgaacatttatggagaacgtactagcaccattacctactcacgtagctgattggttatcagaacaagtaggaccaaaatatgagattcgacaatacgttcgagacttattactggaagcctacaataatcgtcataatcataaggaaactgctcatgaacgattcctcaaaagatacgttgaagtagttgagatgctggaagaattggctccaaattctgaagaagcatacgatacacttcataatgccattgcagctttaactgaattgtcagaattaatgaagtcctctgataaagaagtttatgcacctaacagcaatcgcttagctattctggatgcactggcagaccagattgttacagcaactggcatcggtactttcttgggtatgaacgtacccggagcactcactgaagtgaaccgttctaattattcaaaattgaagacgagccgcccatatagggcggtttttgtatctggagaactcatgtataaaagtactactaagctgccactaaatcctggtcaagaggcagcggcagaaggtttcttcgactttctgctcgaccccaatgcttctgaacttcgtattagtggacttggtggtacaggcaagacatttacaatggctcatatgattgacgagattatgcctcgttatcatgagacatgtagtctgatgggaatccctgctctctataacgaagttattatgactgctactactaataaggcagcagaagtattagcccgtgcaacaggacgtcctacgtctacctatcattcctttcaaggtctgacagtacggaataacctgaagactggggaagcagacctgattccatctaagtccttcagtatcaaaaagaataaggtcatttttattgatgaagcatcaatgattgaccgtaaactgaagaagtttattaacgaaggtactcaccaaagtaagattgtttacttaggcgataaatgccaattgttacctgtaaaggaaacttcttcccctgtctacaatgacagtagcattaaagagtttatgctgacccaacagatgcgtactgatgtccctgaactccatgcactgcatgaacagcttcgtggaaccattgaaggtaagcacggattcctgcctattaaagcagttccaggtattatcgactggattaaagatggtgatgaaatgagaaaagaagtcgaaggtcatttcatgactaagactgacactcgtattgttgcctataccaaccaacaggttgttaactataacaccttcattcgagccatgaatggattccacggagagttctgtattggtgaagagttagtaagtaactctgctattcagattggtgctggtgaccgccttagtattgaacaggaatgccagattgttgaccaggattctgctactcgtaagattctgattgattcctctggcatcgaattagaagtacgtgattgcaccctggatactggttatggtggtgtctttgaaggtatccctattccggtagatatggattatttcattcgtttgcaaaagtactatgcacaccaaaagaactgggaacgtcacttctatttgaaagaaacattccctgaacttcgagcattacatgcttctactgtgcataagtctcaaggttctacctacgacaccatctttattgatgctactgatttatctacttgccgtcagcctgatgtagtagcacgtctgctttacgtagcagtatctcgtgctcgtcatcgtgttgtgttctatggctctttggcagagaaatttggtggtctggttcgctaa

SEQ ID NO: 137497 - DNA, 8781 bp, Homo sapiens
  misc_feature (1)...(8781): n = a,t,c or g
tcagacccatgctttccatatagccacggaaacgaccaggcaatctgtcatagttacaaactcttcagttacttgacataatgcttcagaagaggatttcttcttacgtttcactaaatcatcatagatgatggctttagcaatgaagtccgaatactctactgttttctggataccctggaacagagcagtgtccttagcaataagagcataacggccagcattacgtactttttctggaagtttattagcaagtttttccatgtactcatgaatcttaccttcagctactaacaggtcatcacgactaataccagcatcagcaatagaagagaactcacctgcttcaatcaaaggccagatgctcatacgacgatggctatcagtaatagattgaatctcggttttaagtttacgaaccagattaggattgccttcagcagcacgtaattctgcttctgcatcaatctgacgtaagcgagatttaatgtactgattaatctctgacgtcttacgaggaatattcacagcaatatccttaacaggaacaccacgtccaatcatctggtagatgttagcaaggaagttaactgccgccactacaacagatttaacaacaattactgtcttagcatccttcaccaagttctgaatggtattttcagcattcattactacatgatatgacttattaccaaatgcaccgaggaacatcttcttaacagtatcaagggtgctaggtgaccaacgagagttaccagtccatacatcaccaatagatgcagcacgatagccaagtgcatcattcagcatatccctacgaacccataactcatctttaccaaagagttcttcggccttatggagagtctcaatgttcatcaggttaattgcatcagccagtactgggtcatcaattttacataacaggtttacatattgagatttattagcactggagtctttaatgtctttctcatacatagcatgtaattgctcaatgagaatgtcattaaaacgttgtgctttagcctcttccacctgacgaccacgccatacacccaccatcttagcaaagtgattgtcttggtttagatgcttcaacatattagggtcgacggattgctcataagcaactacctgacctttgctagatataatgggcatcagcggttcacgtccacgttcacctttagccagagctttggtaatacgctctacggttggtttgtcagtaatacgaccagcaaccatagtacctaacgtaaagcctgtaccaatatccacaccaccagcagtattacgaacgttctgaagaataccttgagagtatggggcacgggcagctactgggctgaagtaataacctttagaaccagtacgtaaaccagtgcttccctgataagtaccaatacgagtaaaagattggctatttaacttagcaaactctttatcgtcagcaataatcaaattcacaccttgctggttctctacagggatatagcccttaaagtgattcagcaaagtacgggtatcacctttagctttacgcatctcttcagtacgttgacccaccatataagcaatggagaactccataccctccacttctgattgagccaattctgacaaaaggccacggtcagacttattcatcaattccagagagtacaaagtaatgagcttatcaatagcagctacatctgccacaggaccattagtaatacgttcacctaataaacgactaatagcatgggcattacgaaggaggttattacctacctcccctgtaatcatgtattgagccaggtgcttagatttcttctgaaccagattccagtttctacctgcttggttctgaatctctttttccagagtagagatttcatctttcactttcttaggtgaagagagggaatctctaatttcagccatgctcatagtttcacgtagaacagctaaatctgttttacctaaaccagtatgcattgcagaccactcggtatcagtcagtttacgggaaaacttaccagcaatgactgtaggtaaatgctcacggaattgttgacggtcttgagaaatctggctcttaaccaatttgattaagtcatagacattggcattagtcttagtacggccaacaatgtcattaactaagtcatggaaaggttgccatactttaccctggttcatagcagtcataacaccctgagccactatttcaccttgtttttcagatgcaatagcagcagtcagtttagccagatgagcaacacctttagcagctacattagaaggattagcaattaccttatctgccttctcaataacagtttcagataaccgttcaatgctatctgttacgtactgattagcacggtcaatgaaattaccggtaggggttgctacagcatcatagaaggactctcgtttcagagcagcagccatgattgtttctgacagagcatcaatactgtcctgaacattagtagctttctggtcaccagccatacgacggttcagagattccattacctgagtgcctgcattggtaagcagagtatctacatcattccctaatttcttatctgctttaggtacaggcatttctttaatgattgaacgtagttcttcattaaccatagccagacccaggaatgtaggtaacagactggttctgcctttggcatctacttcaaccagattagcaccagagatagtgtcatatttctgttgagcgtagtaacggtcagcagggttagtactatcagggtcagccatgaaatgttctaccgtaaggtgtttcattacatgggtataaagttcctgagcacgagccatagcgtgtgggtcaattgcagcttcagttgctaatgcagcagtaaccatctggaatacagattgttcctgagcagtcatattgaagccacgagactgaacatcacgaactagtcgagtagcactcattaatgcattagccacattgccacgacgttctacttctgtaactgggtcagtacgaaggtaatcagttaccagtttatcgaaggtctgattcaactgagacagacgttcattgttaccatatgctttgctatggaacagtgtgccatctttagctactgcctgagttgtaggttggctacgcatcagaattgcagaattaaacagcagattagagaacatatcttctcccaatgcaggagcttgtttacgtccccaaatcaatttcttaatggcctgataaacatctttcaccatttgaaccagtgaagatgttctcttctgtttagcagccagagcacggttagctaacccccaagccataaactcattaagagcagcagctttagaaatagctgggtcaacaaagccattactcaaatgaccttcaatagttgcaatagcatcagcatatgcttctctcatttctggagaatctttggaaatatccagagaacggaactgttccatcagaccttcaaggttctcaatagcctgcttagaagtagggcttacttcattaccctgatagaaggaataaacttcctcgaaggtagaagcatgaaccagttcatgaatgagggtttccatagatgggctaaccagataaatggtcttatcgtcgaagttagtccagccataaatattacctgcctgagcttcttccatttcctgagaagtcaattcagtaacattcttctgacgagcatattctgcaacctgagtaggtgtaccgtagataatcttatagtctntagctgccagtgatttctgaatctctgcaagagtagctgcctgagtagatggcagattactaatcttagccaggttacgaatagcagtagcagacaggatacgaacaccggatgccttatgctcacggcctaccataccaaagtctggatgcactggttctttttcagaaacaatttcttctttgacttcagccttagccttagcgactttttggttacgggcttctaactcttcacggaaaagtttattcagttcatcagcctgttgttcaggagtcatattgctaaggtcaatcttaccgttgttctgataaggagcacctacagcagccatctggtcaatggacagatttaccttatccagtgccttatgacgaatatctacacccagagcaatattacgtaagttacgttcaatcaaagatgcagcattagcaatatcatctacagtagcattctcacgttggtcatattccagagcagatttaccaattgcttccaatgcttcaggggacaacttgctgaaatctacattcttcatgaacttagcatatgattcgtaaacattcttaatagggttaccctgaacacgaccgacatctacgattagagaaccataaggtactttatagattccgtgcataccacgagagtacatgatacccataccttccaatggggcatcaagtaaagaaccatctggtttagcaatcttcaatacgaaggaactatcagtatgactcttcagttgtgccgtaagctgagtaccatcggtaggtaacagtaagctaaatgtaacagtagaatctttgataagagtactgtgatataccgttaactcaccagatactgtatcgaatgcccaataagtacccgaatcccaatcagatacagcagcccaaccaccccccgtaaattttaaatgtgggtttgtgtttcccaacctataccgggcacagaacccggagaatgctttagcagttaggtctgctttaaaccggagtggggcagtaacagatacagtagctgtattgtcagtagtagatgcacccataatcaggccatccaatgccatttgttgactaggtgctaccaacaaaccactaactttaccggctttataattaagaaccaggttagctactgcaccagcagtaggggcattcatgttgatggaaccagtagctaacgaccatactccaccagtagaggtcagtttacctgctacagcataaccacctttgtcattatccatagtaataacctgacggagcattgcacctactgtattagctgcataagtctgtgcctgattaaagccaatcagacctgcaccttcagcagtagcatacttttcatggtcagcaatgattgtgtctagctgctctgcaatggtaactaagtcacctaatctggcatgtacagctaatagttcagtcatgtgattatccaaatcaagcagtgctgccatattggtattcacattcttaatcgcattgatattagtacttactgtattaacagcatcaatggaaccagcaacggtattcacgttggtaatgctattagcaacagtaattactttatcaatttgagcagaaacaataattactttagcaatatcagttgctactgtattaactgcgtcaatgttagaagctacagtattgattggagtcaggttgtcatagaccctcagcaatgcctgaagattgtcatatagaccagtcagtttagataattgattgtagagttcctgtaacttatccagattattatgaataagttgtagttcatctagcttagtgtagatagcagatagctcagttaacttgttatggatagcaagtagctgagtcatattatcactgacatttttaataaaggtcattcgtaatgctacgaacttaacaacgtagtaagcattaccaatcatcttatcaacgattgggtcattaagtgtttcgcagcaataaccaccaaaggacactgccatcggatgattggtagggtcaaatagttcagaatcaggattaactgcacatgcccggtctacagcagtagacccagttgtcccattaatagggcgtacacctgcatagttaatgccccaagtttcagtcatgtacttctggaatacatcatagccacggtcagggtatgcaccagacatgaagtgaatagcaacctgagattcaccagcaaatagaattgggtaatctaatacagtctgttctgtgattaactcacccgtttctttatcctgacgctcaggagtaaggttatagccatcatcaaagcctgaagtcatgcccatacccatcactacttgtggatatttacgttgacccagttgcttacgaccggaaccagatacagtaaggttagtaaaccatttaacagagtctacttgtttaataggaccatctgtctgtaagtatttaccatagaatgcatcacatcctatgaacttacctgggagcatacctttgcatttaccagagaagttagaagtaccaaagccttcatagcttactacttcgaactcattctctgctgcttgagcattaccattaacatccaagtatctccagatgcattggagtttatccccagcagctaaagcagcattagtatgaatacccccaatttccatctggaaagtagcaccatcgtcattgttatacatggcggcaatgtaagcatctttccctagaccatgatgtgcttcagtacagtcgaaagaaatcattgtgatattacgagggttaatagttaccccattaaatgccacacctgtacgtaaatcagcaaagtccagaatgaagatatagtccttagtgccatagacttctgtcatttcagattcaggaatatcttcatcagtagctacaaagatgtcagcctgatacgttctcttggttccatactttgtatccaaacactcccatcgacgggttttattattgaatccatatggagccagacgatacgtatatgctttttcaggagtctgaatagtaactgtgaatttatctggttcatcagggttatgacgaaaagccagaatcagacctaagtaattagggtctgtttcataacgatacagatgatggtcaaaggtatcctccgtcatccaacggacacctaagaagtctttgttagtacgccactgacaaggaactttaaaagacttagaaccatacggaatgatggtggctaccattaaggcattgtaatcaactacccaatactcagggtcgaaacgatttagtttagtgttataagtccgattacgacgagtgttgaccaacgtcagatgttccctgtctttcttaaattgagggaggtcttctctccaagaagagtgctggtcatccgggtcataattaggagaagctaggcaattcttgcctttgaggtaatcttcaatggacatacgtgccctgataggaggagcaaaggtagggggtgtggaatcctgacaatatgctttgtacttctcctgaatagaattaacagactctaccgtatcttcaatgtcaggcatcatctcaccgaagtaagcatatgcacgtagactatgcccgtcgtaaccatcggtatacacctttagtttattagggtctttggttgttaaagcagatatacggtcttcgagagaagcaaagtctagcccacaaaatatccatccaggaggagcctcaaaacattttttaatcatcttggcatatctggaaccagaaggtaggttctgtaggtttggttcactactggatagacggcctgatacagtcccacctaagttcagattaccaaagagataatgccaaccatctggtccttgtctggcattttttaatgctggaataaatgctgtcagaattttatctacagctttgtaatcaatcagagcatcaagaatttccagaatactggtatcttgagtatggttcttcaaagacttgagtatgccactaccagtagcaggtagtttacttgcagtcagacccagtacaggtaaccccagaaactcaaaaagtagcttctgtaattgaatacctgagtttggattaaactgctctttagcatcagctaaagtcactcgtttcttcttcagaatctggttctgtttttctacccattcttcattaagaagacgggtaaaatctttgattactttactgtcagcaattgtttttaacgcattgttatagtcttgggttaatgcctcttctacctccaatactgtcctcatattgataggcataccagttaactgcatttgaataatatcttcacatgcaggtttaaagatgtttgtataaacatctaactgttggtcattaaccagagtatcccaatgcttttcatagacataccaggtacataatccatccactaagttgtattccaacaactctgctaatgggattctggtaatgtcattgatttcttcttgagcatagttaccagcatattcctgagcctggtctttaagacttagcttattaccggcacaagagttagtagccagataggtaattaacttagtgcaatcccagtttcttagcatgatactcatgccatgcaacaacccttccgtatccagaaggtctgtcataaataactggtaaatgagtgcgtatacgtcaaaggcaatattgtgatacatctgcctgttcagatacttaataaaaaagtccctgagcatagaacgaacaagcatgttgtgaacttgtctaccataaggagcttcagtagccccctcaattggttcataatccacagggaatgcaatcccttcgtgcttgttccagcagaatgtaatagtgcctataccacagtcataatgcttcagactgaaggtttctatatctactgctaatggaacatccatctccagtaacttatctaaccacttagatatagcttctggagctaatgtgtaatcagcatactggatgatcttagttcctggctcaacataaggaccagagacataagcactcagagcctgcat

SEQ ID NO: 137498 - DNA, 1363 bp, Homo sapiens
ctgagcaatacctgaaccagcagggatatgaagttttttacgaccgtgataaaccagttctaaagtcagatagcctgaccatcctggttcaataacggtattgaatacagataatgtacgccttgcccatgtagatttgtcatggacaatacctactaggccagcaggtacattgaaacgttccattgcagaagctaatgtgaaagtgccaaacttccacttggtctttccttcatctttaatcttgatgcagggaatcaaaccaagaaatcggtagaaggtaacatcctgtttaatacggatgtcataaccagcttctcccagtccaaatgtagtctcacctgaactgagtttactgttaaccatgccgtacaggaaccagactagtaccaccccgtcctttgatagtgacatcagtaaacttatcaccatcttcaatgacttgttcatctacaatctctgtagtgaactgaactagagtcatcttctgaggctgatatttctcttttacataggccacttcagagctaaagcgtaaagcatctttaggtttaatggagccagatgtatcgaggaaataagccagatgttccagtctaccgtcatcatccataggagatggtaggtacatatcagggtatctacgattaggccgttgccatgagtagtaagtttcttgcaggtcattgaagaagcgttcaagtaaaacctgccacggtactactggtttcaggaattgagtaataacttcttccatttttccaggtaataccccaggcaaagagccaccagatagtttctgttggtgcatggctcttactacattattgacaatattcacctgactagccttcgaagtggaaggtttcatgtcaccacctgagccagtcccaaaagcacctgatgctttaggaggacgtatctgtttgctcatgaggtcatcatagatttgttcttcagcccaaccagcatacttagggtctttccagcaattttcgattcctataaagctgtagccatcctgaataagctgattgttgatataaatatcgcaggcataattccatacttctgggtcacgagaacccatacgaacagaatgcagtaagccaacatgccatagttcatgcataagtactgttacacgagattcaggtaatagactttcaaaccaatcaggattccattcgagatgctcaccatcggtttgtgctgtatcacagccatcttttacccaacggaacttcagagaacataacagtgaaccaaagaatgcagcagttttgcccataaaggctttagcctgacatctgtcatattcacgggttaattgagcatctgtcatggacatatcagttttcct

SEQ ID NO: 137499 - DNA, 1861 bp, Homo sapiens
ggcatggttaacagtaaactcagttcaggtgagactacatttggactgggagaagctggttatgacatccgtattaaacaggatgttaccttctaccgatttcttggtttgattccctgcatcaagattaaagatgaaggaaagaccaagtggaagtttggcactttcacattagcttctgcaatggaacgtttcaatgtacctgctggcctagtagtatggaaaaaatcttgccgattatcgaatactatgcgggaacccatcttatcttttgaggtctgtatgcgttacattacattcaacaatgagggtatctaccctattgctatccttactacaacgttacgtaaggatgatattgtcaaagcatacatggaaccctgggatgtagataaagattcagtaatgattcttgaacttaatccagccccagggaaaaagaaaactcctgctaaagagatgcaggagtttattacccaagaattagtgccagcattcgaagcagcacaaactcagtatatcatctgtggtgattctgaatattacaaacagctaaccaaacaaggtaaagctgatgccaatattggctatgtaatggattgtgcttatgggaaccagaaagttatttacgttcccaattacagacaaatcttttatgacccagataagataaagactaagattgctttatccatgcaggctctgattgattatgtctctggttcttatgttgagccaggaactaagattatccattatgctgattacccattaactccagaagctatatctaagtggttagataagttactggagatggatgttccattagcagtagatatagaaaccttcagtctgaagcattatgactgtggtataggcactattacattctgctggaacaagcacgaagggattgcattccctgtggattatgaaccaattgagggggctactgaagctccttatggtagacaagttcacaacatgcttgttcgttctatgctcagggacttttttattaagtatctgaacaggcagatgtatcacaatattgcctttgacgtatacgcactcatttaccagttatttatgacagaccttctggatacggaagggttgttgcatggcatgagtatcatgctaagaaactgggattgcactaagttaattacctatctggctactaactcttgtgccggtaataagctaagtcttaaagaccaggctcaggaatatgctggtaactatgctcaagaagaaatcaatgacattaccagaatcccattagcagagttgttggaatacaacttagtggatggattatgtacctggtatgtctatgaaaagcattgggatactctggttaatgaccaacagttagatgtttatacaaacatctttaaacctgcatgtgaagatattattcaaatgcagttaactgactataacaatgcgttaaaaacaattgctgacagtaaagtaatcaaagattttacccgtcttcttaatgaagaatgggtagaaaaacagaaccagattctgaagaagaaacgagtgactttagctgatgctaaagagcagtttaatccaaactcaggtattcaattacagaagctactttttgagtttctggggttacctgtactgggtctgactgcaagtaaactacctgctactggtagtggcatactcaagtctttgaagaaccatactcaagataccagtattctggaaattcttgatgctctgattgattacaaagctgtagataaaattctgacagcatttattccagcattaaaaaatgccagacaaggaccagatggttggcattatctctttggtaatctgaacttag

SEQ ID NO: 137500 - DNA, 2286 bp, Homo sapiens
  misc_feature (1)...(2286): n = a,t,c or g
atgactaatagtagtgaactggttcaggaattattcttagccgagttacgtcggctagataaagtgctggatagtatcattacacgtaatggggaaacattcgctgtatacaactcaacagggttcctgtatttaggggagttctattcgagttcccgttcatcacaacaacctccttctggtcatcgtctggctctagctaatcacctactggatgatatgcgggagtatctggaacaagcaggtaaacttctgctagaagtccatatggtgaatcagatggtctttcgtctggttcagggctgtaagacttatcaagacgttcgtgatgcattgccagaatgcctcattgctatggataaacaaggtcatctgaaatccttacagagaaccagaaaggcagcatttactctggataatgatgctatggctctccgtcatatgagaaaatcttgccgattatcgaatactatgcgggaacccatcttatcttttgaggtctgtatgcgttacattacattcaacaatgagggtatctaccctattgctttccttactacaacgttacgtacggatgatattgtcaaagcatacatggaaccctgggatgtagataaagattcagtaatgattcttgaacttcatacagccccagggaaaaagaaaactcctgctaaagagatgcaggagtttattacccaagaattagtgccagcattcgaagcagcacaaactcagtatatcatctgtggtgattctgaatattacaaacagctaaccaaacaaggtaaagctgatgccaatattggctatgtaatggattgtgcttatgggaaccagaaagttatttacgttcccaattacagacaaatcttttatgacccagataagataaagactaagattgctttatccatgcaggctctgattgattatgtctctggttcttatgttgagccaggaactaagattatccattatgctgattacccattaactccagaagctatatctaagtggttagataagttactggagatggatgttccattaacagtagatatagaaaccttcagtctgaaccattatcactgccgcacaggcncggtacgtaaatttgttgaacactgtatccgttcaggattggttccatttatcacttcatctcctggtatgggtaaatctgcaattgttcgtcagattgcagaagattttggcctgaaactgattgaccatcgtctgtctacttcagcaccagaagacctgtcaggtctgcctcgttttaaagaaaatggtcgtgctgaatttgctccatttgatgagctattcccattggaaggggatgctgtacctgaaggatataatggctggcttctctttctctatgagtttaactccgctcgtaaagagattcaggctgctgcttataaattggtactcgaccgtatgactggtcagaagaagctacatccttatgtagctatcgtatgtgctggtaacaaagcaactgaccgtgccattactaataacctgtctacagctatgcaatcacgtcttattcatctggaaatggagactgattttgatgtcttcatggaagatgtagccatccctaataagtgggatgagcgtgtaattgcattcctgaatgctaacccaaataaactgaatgattttgaaccagaccatcaagagaagactttctgttgttctcgtacatgggagttcgttaacaagattgtttccattctcccaccaggaccaattaatagtgaaatgactctactgttagcaggcactatcacttctggtgtagcaacatcattcgtccagtttactcaggtctatagcaacatggtgtctttgaatgagattttggataatcctaagaaagctcgtatgcctgaagacaataacctgttgtgggctgtagtcacttcactgattaacaatactgacgaagataatcattcgaaaatctttgattacgttgaacgtatgccatttacgttcaaggttttgtactaccgttccgtagtctggttccagctttggttaaattaccgaactggcgtgttgctgcaatcacattatctaaatatgttcatggttccaattaacaagaagggagttacagacctcctgtatgttgctggctttaacggtgaagaaattaccgtatatgccccaagtctggctgctgctaaacaaaaggcagttgaatactttcgtccaaagaaacgtgtagcccatactatttgggttcatctcgcagaggaaaactga

SEQ ID NO: 137501 - DNA, 2256 bp, Homo sapiens
ctactgttttcttagtaggtcgagtctggaatacgtgtttgtaccccaactcttgctcatcctcagtaatttccaacattccattggaatacttttcaagttctttaaggtcgatacgttctgctgatacaacagtagagaagtatgcttcaatgccattgttcttcagagaaccttttactggaacgaaagtcttcagttccattgcacgttcatctacttcgtgtttagccacagtaatcattacagtggaatccagttcatcagcagataggggattgctgagtttcttattgaactcatgcacacgttgtttaacttcattgaagcctataccactatctaccagagccagggcatacttaatcatgtggttattacgattgcctgtagcaattcgttgggcaaaccaacgttcgagattatccagattttgaaccttctgcatcccttgctggaatgcctcattcttactggttctaggaatgaaatctcttacgtctagcaggggagcatccatattgtagtaatacgtacccttagcacatgattcccatttcttggctcgttgattagcagactcgtccgttttaaatgggagccatgccataacgttatccatgaactctttatattcagcaccatcaagttcaagctgatagttcattgggataattaaccggaaacggttttcttcatcagtatggcgtttggttgtatatgtcatgaatcggtattctttcatcaattcatggcacacgtccaaactacacgtaccatccacatcaatgacaatcatattgaagccagcaatagcattctcttcagcacgatgccctcgacggaaatggtggttagcccagtgataacctgcttgctgggtcagtacatgtaactggtcaaatggaactttctctgcaatatagtcataagcaaagttctcaccataagaaacaatcatttcgttagtatcagtctctttcagtgtttcaccacggaagaactcaataccttcgttgtatgtcttcttaatgatgatatgctgcttatagccccatgcagtagctaaagtcatcatctcattacgtgcagcattcccactcttatagaatggtaaagcttcaagcaaatctgcatgagtaacttcagtaccaacagatgcaatatacttggctaatttaacgtaggctttttcacgattgaggatagtctggaatgcaacaccagactcttccaccagaagaattgcttgcttcagatgttccatctctaccatgatactgttatcaacaaatgcaaatgcacctgccaatttcagtgccttaaaatagcgatgttccagttctgctttacgaatctcttcgtggtcagctaaagctgctgcttgtttttcacactgaatcttgtagtcgattagtgcaataccaacatcatcttcaactgtcattttccaaccaaacttggatgcatctgcaaggctatgaaagtggttagcccacttattcacaacagcattgttatcctgcttaatcagattacgatagatttcttcagcactctggctcagatatgcacgtttatctgcctgacctacagcaaacagacaacgacgagaatagccagtttcaagaaagtcatagaagagttcctcagtctggctcccattgagaaagttgaactcaaggaacacagttaatacatcagcattagcgagaaggtttgaaccaatctcatcaatctgtaagttaatagcaccacatccagctaataagagtttatgacgtaactgtttcacagcaggaggtgtacctgagtcaaacgtaaatggataagcaccagtacgtctgtattcagcttccaccttgtcaaactcttccttctggtcagtagcattacgagcagaacgttcgttagcaattttccacagacggtcttctgctaaagcaggcatggtgtcttccataaaccgcttcttaaagccagccataaaaccgtcttcaacaatgttgaccgaatggcctttaccgaagcctgaagtagcaagagccactgcatagatgtttactggaatttcaccacggtctttagtgatgatagttgcacccatacatgaagccattttcgcaaggaaataggccacttctacacggaaaaaaccacggtcagtgttttgcgtcttgttacataacacatcaacgatttcttcaatcgccggatgatgtgagactccggtcaggtcaatcatgggaaatatct

SEQ ID NO: 137502 - DNA, 6193 bp, Homo sapiens
atgcaagtagctgactctactgaactgaccacatcagcaacgttaggtgctcaagatgctatggccttcggtatttctgaagacccagcattcttccaaatactcagtgctaacctctattctaatcagaaactggcaatggtacgtgagacattgtgcaatagctgggatgctcatattgaggggaataaaacagatattcctatccatgtaaccattgataaagatggtttccttatcttccgtgactatggttctggtattcctaaagataagattcaagaggtctatggggtatatggtgcatctaccaagaaagctaatactgcttccactggtggctttggcttaggatgtaaatcccctatggcctatacagacagttttactgtcacatctatgtgtgacggaaccaagactgtctatcacattgctaaatcttctgttgagactaacggtaaaccagggattattcctattgttagcgtacctactgaagaatccgggcttgaagttaaaattcagcttcagtcagaagatattttagaaattgattcatatattcgagccattgtattacatggtgagattaaatgtatttactgcaatcagtatacaggaccaaatacagtagaattactgcctgtactgggtatgtcttttgaaccaggtagctataacctagaccatagcacatggcataaatattacatgggcagtcattcaatatttatccgttatggtaatgttatgtaccctgctttggatacccctgctacacatgaagcattaaaactggttaaacagtttatgcaggttattaactgtagccgtatcgttgttcaagctgccccatcatcactagctgtagcacctagccgtgaaacactgtcatctcaaaaaatgaccgaagacggtatcgtaaatttggctgtagctttagtagataaaatggaagcagatattaaagctcgtcttccaaatgctattgaatatattgggaaggctattaaagaatatagtcctcaccgttttgaagtaaatagttatttgccttacaccaatttagtgcctgatgttattgtcagtcgttatatgtcctctactttattcagtaagcaatatgctcatctgtgtaagaaatggggaaatatggaaattgaccgtcaactagaacatcctgcactggctcatttctctggttctcaaaaagcccatctccgtaagcatttaaagagggctaaggatttacgtaattacagggaattaactaaagtatttactgatatggctattaagccaatgttcaaaacctttgctaaattggggattactaaaggtatttccctatttcattatcaatatggtgttgaactgtggcgtaataatattgttaatagtgtccgtagaatacactcattaaacttcatgacttatagttctaagaagtgccgtgtatttgttaccccacgtattaccaatattgaagatagtctggctgggtatccagagtttgataatctttctactgagacactggtaaaatataactcaatcattgtcaaagttggaaccaagaaaggtgaagcagaggctatgactaatctgctcactaaagcaggatacgaagtcattaatatggctgaatatcatgagtgggattgtatagctcgcagacgtaaagaggaacaagaggctaaattagccatttccaaattacaagctaagaaggctactaataagaaaaaggttagtcctaatcgtcttattagtatgaatatccttgaaataccaaaagagcatcgtagctattcaagtgaggtatgtggttctcactacgcttctcgttctcatgaccgaatggttgatgtagatactccccagtattacatcatgcaggaagatattaataactacacaggaaggcttggtgttctttctatgtggcaattaacccctgctaccattaaagctgtaactgttgtttgtcgtaataaaattgaacgtaataaagctattaagcgaggtgctgttcatttggatgaatggactgctccgtatattgcttcagttcttacatccaaacaattcattaagtatgtcactaaagaacgtcagaaaacgttaagtgatattggtatttactccaaacacctcagattactgagagaactggatattacatatgccccattgaaaggtctgcgttatgacccagaactggagaatgcttatctcttcttacaaagtagtagctatcctaagctacgtgcattgttagggaagggtctgattactgaagaagagtatcacttcctcagtgatgttgatgtgcattgcaagactttcagtaagtactcggaacttcgtaggataccgaagatgttccttgatattgatgctgggggttatatgttggctgcatgtactgtagacacattgcttcgtgaaatcgaacaattccctgaatcaatccctgcaatcaaattgcttgtaaaagctgctcttaaacggaatacagactgatgaaacgaaattatctcgccattattgccctgtcagtagacagtcatggttctactatggtcatcccccaagggatgcccgtgtaccacgtattgttgctgaagcaaaagaaaagaatcttaccccaggtaagattatcgaagtggatgtcactatcgaagctcagattcgtcaggagtttctggacgctgaacgtgatacaggtggctttgttaaattcttccgtattaccaagaagaagctacaagagttcttcttaggagaagaggaagaacaagtccctcatgtatcacctgtagagttaggtgctaaacccactgctttcaatgcttttattgctaatgctgtgggcaaaactcttgctgtacaacatgcatcattaaaagcacctgaaccagaaatgacagttactcatgagcgtttttacggtaactatgctgtatggattacagatgtagacccacggaatcatcgtattgaggttattcatgttatccgtgaaatctcaggaagaaccagtgaatatgtcaataacctgctggctcaaccaaccccattcaaagtatttgattggctcacagagacgcaggctaaagagtttgtaagacgtctgaataacactcagggtgttatctctgtctataacaaactggaagacggtattcctgttaaggttgctgtaaaggccacagagccaaccaataaggaaaagctggaagctgcatcaactaagctgaaagctatgggtgctgtcgctactgatgcttatgagtttcatactgacttgaatgagaatgaagagactattgtagctgtagtgaatgataaggtggttcctgacgttcagaacctacaccgtcacatccgtcaatctgcaaacctgaaagactataaaggctttactaagttccttgaacgtctgtctactgtaattgataaacgtcgccactctgttgaagacctgatgaagtttatggaaaaaggtgacctgcccattgcagatgatggctccattgttatcttcaaacgtctggaaagcaaagacaatcctgaacatctcaaagacgtaatggatgatgtatttgttgattgccattctaagaagattgagcaatgcgttggtatgcgtgtaatggttaaagaaaaccttgtagaccagaaccgtcgtaaagactgttctcatggtctgcacgtagcttctctgcaatacattcgtaatttctcaggcaacgtaaccattattggtaaagttgctccagaggatgtatttgcagtaccagaatacgatgttactaagatgcgtgtatctgcttatcacatcattaccaagctacctgatgctattcgtgaccatgttaataatggcaatccaatctccaccattgagggtggtacggaaatcctgaacatggttctcagtggtaatcaccctgaaccttcccgtcaggtactagttggtggtcattatggaaccaatctgacttattcagaactcactcgtaattatctggatgatgatgaagacagcgttattccagatgaaccagtaattaagaaaactgccttgaatatggaagagagctttacggcaactaatcctaaagctgaaccagtgaaggcaacggatgttaaacctattaagaagactaagatggaaattcttaaagacctttggaaccagttcctgaaagcagagacttctaatgaagctattacactggctgatgaaatcattgctgctaagggcaaatgtaagaaatcatgggcttctttaggcttcagtggtgacatggttcagaaactgattgatgctcgtgctaataaacctaagccagaaaaagcagtcaaacaggataaaaccgttgcacctaagaaaactacagtcactcgtagtcggaatgctgatgttattcgtagttatctaaatgacaaaggtatgtctgattactgtaaagctcatgccattcacgatgtgaaacgtgctgctaagaaatcttatgctgcactgggtctgactcctgaagaatgcagccaaattgataaactgaagcatcacctgaaaggatccctagatgaagggcaactctcttatgctatcgatttagttaaagggaatcctgatgctattaagaagttggttaaagaatctggtattgatgttctggatattaatccagaagaggaagttaaataccaagctggtaatcaccgtgtgtcagatgctgaagcagcatttgcaaccgaactggaagatgctaaatccactccagaaggacaagctactcttcagttaatttcgactacgtgggatgaccacagcaaacaggcattgctggaaaatcgtggtctggttaataccatcgttgaacagaaagctaacggtatttacgaccgtattgtttctgaaattgaacgactcaaaatcttaggccaaatcccaatcggtacagcattcctggatgcttataatcaagtcggtaactaccttgctgctaatggtggttttaatgatttgattaagcagaaacctgttgaacaacctgaaccagtggttcagccagtagcaactcgtgttgcaacacctaagtctgaaatcactaatactcaacaggcagcagcggcatccccatcacggaaatctagtattgatggtgctaactctgaccagatgcaaaccttcttctggctgaagaaagcaatcatcactgcccgtaaagagcagtacttcatgccactggcctctgtaactaacatgccgaagcattacggtaagaccatcaaggtatatgaatatgttcctctgctggatgaccgtaacatcaatgaccagggtattgatgcaagtggtgctactattgttaacggtaacctgtatggttccagcaaagacatcggtaacattacttccaaactgcctctactgactgaaaacggtggtcgagttaaccgtgttggttttactcgtattgctcgtgaaggttctattcacaagtttggcttcttctatgagttcactcaggaatctattgacttcgattctgatgatggcctgatggaacacctgtcccgtgaactgatgaatggtgctactcagattactgaagctgtactgcaaaaagacctgctggctgctgctggtactgttctgtatgctggtgctgctacttctgatgccaccatcactggtgaaggttctactccgtctatcgtttcttataagaacctgatgcgtcttgaccagattctgacagagaaccgtactcctactcagactaccattatcactggttcccgtatgattgatactaaagtcatcggtgctactcgtgttatgtatgtaggttctgaactggttccagaactgaaagcaatgaaagacctgttcggtaataaagcctttatcgaaactcagcactatgctgatgcaggtactatcatgaatggtgaagtcggttctattgataagttccgtatcattcaggttccagaaatgctgcactgggcaggtgctggtgcacaggctactgtagctaaccctggttaccgtacctctatggtatctggccaagagcactatgacgtttacccaatgctggtagtaggtgatgattcctttacctccattggcttccagactgacggtaagcacttaaatttaccgttatga

SEQ ID NO: 137503 - DNA, 3199 bp, Homo sapiens
atgcctttagctaaacgacgaaggatagccatctcacgtaagattatcgaagtggatgtcactatcgaagctcagattcgtcaggagtttctggacgctgaacgtgatacaggtggctttgttaaattcttccgtattaccaagaagaagctacaagagttcttcttaggagaagaggaagaacaagtccctcatgtatcacctgtagagttaggtgctaaacccactgctttcaatgcttttattgctaatgctgtgggcaaaactcttgctgtacaacatgcatcattaaaagcacctgaaccagaaatgacagttactcatgagcgtttttacggtaactatgctgtatggattacagatgtagacccacggaatcatcgtattgaggttattcatgttatccgtgaaatctcaggaagaaccagtgaatatgtcaataacctgctggctcaaccaaccccattcaaagtatttgattggctcacagagacgcaggctaaagagtttgtaagacgtctgaataacactcagggtgttatctctgtctataacaaactggaagacggtattcctgttaaggttgctgtaaaggccacagagccaaccaataaggaaaagctggaagctgcatcaactaagctgaaagctatgggtgctgtcgctactgatgcttatgagtttcatactgacttgaatgagaatgaagagactattgtagctgtagtgaatgataaggtggttcctgacgttcagaacctacaccgtcacatccgtcaatctgcaaacctgaaagactataaaggctttactaagttccttgaacgtctgtctactgtaattgataaacgtcgccactctgttgaagacctgatgaagtttatggaaaaaggtgacctgcccattgcagatgatggctccattgttatcttcaaacgtctggaaagcaaagacaatcctgaacatctcaaagacgtaatggatgatgtatttgttgattgccattctaagaagattgagcaatgcgttggtatgcgtgtaatggttaaagaaaaccttgtagaccagaaccgtcgtaaagactgttctcatggtctgcacgtagcttctctgcaatacattcgtaatttctcaggcaacgtaaccattattggtaaagttgctccagaggatgtatttgcagtaccagaatacgatgttactaagatgcgtgtatctgcttatcacatcattaccaagctacctgatgctattcgtgaccatgttaataatggcaatccaatctccaccattgagggtggtacggaaatcctgaacatggttctcagtggtaatcaccctgaaccttcccgtcaggtactagttggtggtcattatggaaccaatctgacttattcagaactcactcgtaattatctggatgatgatgaagacagcgttattccagatgaaccagtaattaagaaaactgccttgaatatggaagagagctttacggcaactaatcctaaagctgaaccagtgaaggcaacggatgttaaacctattaagaagactaagatggaaattcttaaagacctttggaaccagttcctgaaagcagagacttctaatgaagctattacactggctgatgaaatcattgctgctaagggcaaatgtaagaaatcatgggcttctttaggcttcagtggtgacatggttcagaaactgattgatgctcgtgctaataaacctaagccagaaaaagcagtcaaacaggataaaaccgttgcacctaagaaaactacagtcactcgtagtcggaatgctgatgttattcgtagttatctaaatgacaaaggtatgtctgattactgtaaagctcatgccattcacgatgtgaaacgtgctgctaagaaatcttatgctgcactgggtctgactcctgaagaatgcagccaaattgataaactgaagcatcacctgaagaaactgctcatgaacgattcctcaaaagatacgttggtacaaactcagaactggtttctgaaggcagtacccagcccaacgagtaaaaacattagtacccaaattggttgtcatctggaagaagtagttgagatgctggaagaattggctccaaattctgaagaagcatacgatacacttcataatgccattgcagctttgactgaattgtcagaattaatgaagtcctctgataaagaagtttatgcacctaacagcaatcgcttagctattctggatgcactggcagaccagattgttacagcaactggcatcggtactttcttgggtatgaacgtacccggagcactcactgaagtgaaccgttctaattattcaaaatttgaagacggtgagcctgttttcaatgagaataagaaagtaatgaaaggaacttcttcccctgtctacaatgacagtagcattaaagagtttatgctgacccaacagatgcgtactgatgtccctgaactccatgcactgcatgaacagcttcgtggaaccattgaaggtaagcacggattcctgcctattaaagcagttccaggtattatcgactggattaaagatggtgatgaaatgagaaaagaagtcgaaggtcatttcatgactaagactgacactcgtattgttgcctataccaaccaacaggttgttaactataacaccttcattcgagccatgaatggattccacggagagttctgtattggtgaagagttagtaagtaactctgctattcagattggtgctggtgaccgccttagtattgaacaggaatgccagattgttgaccaggattctgctactcgtaagattctgattgattcctctggcatcgaattagaagtacgtgattgcaccctggatactggttatggtggtgtctttgaaggtatccctattccggtagatatggattatttcattcgtttgcaaaagtactatgcacaccaaaagaactgggaacgtcacttctatttgaaagaaacattccctgaacttcgagcattacatgcttctactgtgcataagtctcaaggttctacctacgacaccatctttattgatgctactgatttatctacttgccgtcagcctgatgtagtagcacgtctgctttacgtagcagtatctcgtgctcgtcatcgtgttgtgttctatggctctttggcagagaaatttggtg

SEQ ID NO: 137504 - DNA, 5736 bp, Homo sapiens
atgtctgaaaaactatcaggtggttttaataactactatctggttcaggtaaccaaccctcaacgtatggaacagcctccatatcaggccgagtgtgaggatattatccaagcactgaatatgacctttgatgaagggtgtctgttcaaggcattgtggcgtaatgctgctgctcgtttaggtaatggtaaaccaggtaacaatgccgtttatgatgcagagaagatggttcattatgctaaccgcatttttattaaagaatccggtgggcagaaaaaagaagcagaagaaccagtttctgcggctctgaagaagggtgaagagattcatatgtctctgtctgaattattcaccctgttaactggtgaagcagcagaaggtgaagtaatgagccttgccggttggcatactcacgtaccaaaccgtttgggtgttatgcctattgctgttgcaatgagcaaagcagaacaagttgatgtagtacgtgccgatggaacgactattactcatgtatttcctcatgagattgactggtctgataagattgccccctttgctcgaatcactgcatggcgtttcactgtctggcttttgcatgacgagtatgattatgtgaaggataaaaagtatctttctgtgactaccctgcttaagccaattaagcacattgtcatgaagcatcgtgtagacctttctgtagaaagtatggacatcatggatttggtgtccacttctatgggtacaggcttacatgattctattgagaaggcatggcataacggacaccacaatgcattacgcaagttagggtatcctgagcgtgtcgttcagaatgttgtcatcaaccctacccctgagcagattgcatcaaatccaaacttaattcctgtatggatagaacaacgagcaactaaaaagattgctggttggactattgggggcaagttcgacattgttactgaaggtcttcttcaggatgtaaaatccacctccacttacacatgggtaaagggtggacgtgatgaagaacatagacttcaggggtcaatgtatcgttggttacatgacgacaagattaccgaagatgtgattcgtattaactacatcttcactgactggatgaaagcattagctacatctcaagaaaactatccaaagcatcgtgtgctgcataaagacattccattgatgtcttatgaagcgactgaagaatggattaaagccaagctggctctcattgataagtactgggatgctcctgaaagcgagattccagaatgtactgatgaagagttatggcgttctgacccagtgtttaaatactttgctgacccagagaaggcaaagcaacctggtgctcgttctaccaaaaacttccctactctctttgaggctcggaagttcatggcagagaaaggcaaaggcactattcttcatgttcctgagatatttcccatgattgacctgaccggagtctcacatcatccggcgattgaagaaatcgttgatgtgttatgtaacaagacgcaaaacactgaccgtggttttttccgtgtagaagtggcctatttccttgcgaaaatggcttcatgtatgggtgcaactatcatcactaaagaccgtggtgaaattccagtaaacatctatgcagtggctcttgctacttcaggcttcggtaaaggccattcggtcaacattgttgaagacggttttatggctggctttaagaagcggtttatggaagacaccatgcctgctttagcagaagaccgtctgtggaaaattgctaacgaacgttctgctcgtaatgctactgaccagaaggaagagtttgacaaggtggaagctgaatacagacgtactggtgcttatccatttacgtttgactcaggtacacctcctgctgtgaaacagttacgtcataaactcttattagctggatgtggtgctattaacttacagattgatgagattggttcaaaccttctcgctaatgctgatgtattaactgtgttccttgagttgtacgaccaaggcaagattaaacagaaacttactaagaatactgctgaaagtattcgtagtgaggaagttgatggtaaaactccagctaaccttcttctgtttggtacaccgagcaaacttctcaatgggagccagactgaggaactcttctatgacttacttgatactggctattctcgtcgttgtctgtttgctgtaggtcaggcagataaacgtgcatatctgagccagagtgctgaagaaatctatcgtaatctgattaagcaggataacaatgctgttgtgaataagtgggctaaccactttcatagccttgcagatgcatccaagtttggttggaaaatgacagttgaagatgatgttggtattgcactaatcgactacaagattcagtgtgaaaaacaagcagcagctttagctgaccacgaagagattcgtaaagcagaactggaacatcgctattttaaggcactgaaattggcaggtgcatttgcatttgttgataacagtatcatggtagagatggaacatctgaagcaagcaattcttctggtggaagagtctggtgttgcattccagactatcctcaatcgtgaaaaagcctacgttaaattagccaagtatattgcatctgttggtactgaagttactcatgcagatttgcttgaagctttaccattctataagagtgggaatgctgcacgtaatgagatgatgactttagctactgcatggggctataagcagcatatcatcattaagaagacatacaacgaaggtattgagttcttccgtggtgaaacactgaaagagactgatactaacgaaatgattgtttcttatggtgagaactttgcttatgactatattgcagagaaagttccatttgaccagttacatgtactgacccagcaagcaggttatcactgggctaaccaccatttccgtcgagggcatcgtgctgaagagaatgctattgctggcttcaatatgattgtcattgatgtggatggtacgtgtagtttggacgtgtgccatgaattgatgaaagaataccgattcatgacatatacaaccaaacgccatactgatgaagaaaaccgtttccggttaattatcccaatgaactatcagcttgaactgatggtgctgaatataaagagttcatggataacgttatggcatggctcccatttaaaacggacgagtctgctaatcaacgagccaagaaatgggaatcatgtgctaagggactgtcagttaaaagaggaaactatgtcagaagaatttgaacatggcgaaatgaatgaccagctaatcctgattgtaggattttctgctgctggtaaatcggcctcacttcgtaacatccgtaaccaggaacgttgggtatatctgaatacagaagctggtaaacgtctgccatttaaaaataacttcaatggtgttcgtattactgacccataccaaatcctggaatactttgaccaatgcattgaacatcgtgatgacgtggacggaatcattgtagattccctgactttcatgatggatatgctggaaactcagtatgtactcactgctgcaaacactcagaaggcttggggtgaatttgcacagttcttcaaaattctccttcaggagaaagtagttaaatttgccaagccagttatcttcactgctcacgtcaaagacgaagtagatgaacgtgcaatggaactgaagactttcgttccagtaaaaggttctctgaagaacaatggcattgaagcatacttctctactgttgtatcagcagaacgtatcgaccttaaagaacttgaaaagtattccaatggaatgttggaaattactgaggatgagcaagagttggggtacaaacacgtattccagactcgacctactaagaaaacagtaggtaaacgtattcgttctcctatgggtatgttcagtaagcaagagacttatatggacaatgatgcccaaaaacttctcgaccatctggcagagtattactctaccggtcaggcagctaaagcagagaaagcaacggataacctgggtggtggatttggtgcaaaagaatctgatatttatctggctaatctgaaagtagcttatgcaggtaaagcagcttctggtgctaacttcattcagattattgcagacctgactgaccttgatggacacagtgctggtgaatatcgtgagcaactgtacatcacttctggtactgaaaaaggctgcaagtgtacttatgaaaagaatggtaaggaatacttcctgccaggctacactgtaatcaatgacatcctggtaatgacttctggtgagactattcctgaagcagtcttcgaagagaaagtcgttaacgtatatgacttcgatgagaagaaagaagttgccaaatctgtcatggttccagtcaatgctatcggtggtaagtttgctgtagctattctgaaatctgaagaagataagcagactaaagatggctccggtaactatgtgtctactggtgaaactcgtttcactaataccatcgaaaaagtattccaccctgacctgcatctgactgttgttgaagcagaagaactgactgaacgtggtaaagaactgaccgttgaagaagcagtcttttgggacaaatggctggagaaaaacaaaggcgttacccgtgacaaaaccactaaaggcggtgcttccggtaaagctggtcagccaccaaaaccaggtgctactaatactggtgcgggtgcttctgctgcaaaatctctgttcgaaataatgcagatacctgtgcttggagttgaccccagttttcgtaactggggactagcacggggaatgctcgacttagagacgggaatactctctggattagacctgaagctggtagaaaccaaacctgatggaaccaagcaagtaaggcagaacagcaaagatatgcaagctgctgaggacattactactggtgtcatcgactggttcaaagaagcaaaggtcatctttgtagaggttcccgttggctcacaaagtgccaatggaatgaaatcctatggtgtttgtgtaggcatcttaggagcactcagggcactaggacatgagattattgaagttactcctatcgagaacaaagtagctctgtccggtattaagactgcttctaaagatgtgatgattagagcagctacaggattttatccagaggccaactggctcaaggataccaaagaatttaatgagaattttatcaaaggtataacaatgcaagtaattctgactcaacctgaaatcgaagctgctctgactggttatgtaaacgacctgatgtctgtacgtgaaggcatggaaattaaagtaaccttcaaagctactcgtggtgatgatggtgctactgcaatcgtagatattgtccctgctggttcccaatctgttgaagtggttgaggaaccaaagaaagagtcaaaggaacgcaagcatcgtccagtaacccagaccaatactgctgctgtcagtgctctggcttctgctactggtaagaaaaaagaagaagtagttgaagtagaaactactactgaaactgttgatgaaactgttgaagtagctgaagaagctgctgctcaggaagaagaaaaagaagtacaggaagaagaggctaaagaaccagtacaagccaaaccttctctgtttgcaggtctgaaacgttaa

SEQ ID NO: 137505 - DNA, 3121 bp, Homo sapiens
ttaaccggaaacgttttcttcatcagtatggcgtttggttgtatatgtcatgaatcggtattctttcatcaattcatggcacacgtccaaactacacgtaccatccacatcaatgacaatcatatcgaagccagcaatagcattctcttcagcacgatgccctgcttgctgggtcagtacatgtaactggtcaaatggaactttctctgcaatatagtcataagcaaagttctcaccataagaaacaatcatttcgttagtatcagtctctttcagtgtttcaccacggaagaactcaataccttcgttgtatgtcttcttaatgatgatatgctgcttatagccccatgcagtagctaaagtcatcatctcattacgtgcagcattcccactcttatagaatggtaaagcttcaagcaaatctgcatgagtaacttcagtaccaacagatgcaatatacttggctaatttaacgtaggctttttcacgattgaggatagtctggaatgcaacaccagactcttccaccagaagaattgcttgcttcagatgttccatctctaccatgatactgttatcaacaaatgcaaatgcacctgccaatttcagtgccttaaaatagcgatgttccagttctgctttacgaatctcttcgtggtcagctaaagctgctgcttgtttttcacactgaatcttgtagtcgattagtgcaataccaacatcatcttcaactgtcattttccaaccaaacttggatgcatctgcaaggctatgaaagtggttagcccacttattcacaacagcattgttatcctgcttaatcagattacgatagatttcttcagcactctggctcagatatgcacgtttatctgcctgacctacagcaaacagacaacgacgagaatagccagtatcaaggaagtcatagaagagttcctcagtctggctcccattgagaagtttgctcggtgtaccaaacagaagaaggttagctggagttttaccatcaacttcctcactacgaatactttcagcagtattcttagtaagtttctgtttaatcttgccttggtcgtacaactcaaggaacacagttaatacatcagcattagcgagaaggtttgaaccaatctcatcaatctgtaagttaatagcaccacatccagctaataagagtttatgacgtaactgtttcacagcaggaggtgtacctgagtcaaacgtaaatggataagcaccagtacgtctgtattcagcttccaccttgtcaaactcttccttctggtcagtagcattacgagcagaacgttcgttagcaattttccacagacggtcttctgctaaagcaggcatggtgtcttccataaaccgcttcttaaagccagccataaaaccgtcttcaacaatgttgaccgaatggcctttaccgaagcctgaagtagcaagagccactgcatagatgtttactggaatttcaccacggtctttagtgatgatagttgcacccatacatgaagccattttcgcaaggaaataggccacttcaggaacatgaagaatagtgcctttgcctttctctgccatgaacttccgagcctcaaagagagtagggaagtttttggtagaacgagcaccaggttgctttgccttctctgggtcagcaaagtatttaaacactgggtcagaacgccataactcttcatcagtacattctggaatctcgctttcaggagcatcccagtacttatcaatgagagccagcttggctttaatccattcttcagtcgcttcataagacatcaatggaatgtctttatgcagcacacgatgctttggatagttttcttgagatgtagctaatgctttcatccagtcagtgaagatgtagttaatacgaatcacatcttcggtaatcttgtcgtcatgtaaccaacgatacattgacccctgaagtctatgttcttcatcacgtccaccctttacccatgtgtaagtggaggtggattttacatcctgaagaagaccttcagtaacaatgtcgaacttgcccccaatagtccaaccagcaatctttttagttgctcgttgttctatccatacaggaattaagtttggatttgatgcaatctgctcaggggtagggttgatgacaacattctgaacgacacgctcaggataccctaacttgcgtaatgcattgtggtgtccgttatgccatgccttctcaatagaatcatgtaagcctgtacccatagaagtggacaccaaatccatgatgtccatactttctacagaaaggtctacacgatgcttcatgacaatgtgcttaattggcttaagcagggtagtcacagaaagatactttttatccttcacataatcatactcgtcatgcaaaagccagacagcacctaaatcaataacttcagtgtttgtagtggaaccagtagatacagtaccagtctgtacctgggtcattgtagtcttacgaataatgattaagcctacttcacttggttcacgaaattctttctcgtaaacatctgagaagttagtccaactaacctgttcttcttcagtattggtactttcctcatcaggtctgccatcagagaatacactcttaatatgagtaactgtcttcagggtagctgacttaggagtatggttctgagatacctgagtccattcagaagtagaaggtaagtcatcagcagatggtacagatacagcaggatgaaccactgggtctgcaacactagtaggctgtatgtagtaatagttcacatacagatacattgcatcctgactgtaattctctggataaaaggataactcactaccatcagtagcagtgagtacaatcctgtcatcatccatgatgtctatttcaaactcttcagtaatacggtctggataattctcatagaggaatttatcagcccattcctcaaaatcaccaaatccaatcctactgctctgaacctgtacctcataacctgctttttgaggaacttgccatttaactacttcagggtctatctgagacagtattgacaagttcccataagcaataccaattgaagggtcatagttagttgcagcccaaccagggaat

SEQ ID NO: 137506 - DNA, 11742 bp, Homo sapiens
atgggaatgactcccatgaatgcaaacagacgccgagagtgtatgagaacaggattctcaggtggtgcctactggactcagcccatttacagctggagacaggggaacctggattctgactgtgactcagccgatgccagctgtgtcaccatgggggaatccttttccaaacatgactcatatgtgcaggtggtgaaaggggacacttcggtgatgtctacatttctctccttcctggaagagaggcccctggggaagtcacaggtttgggagagatctggtctactggcaagatactgctttcagagatgcagatgccacctgggtaatgcccatgtctgcagtgcaactgactggtggcaaggggtccaggaagagaatatcaatttaaagcaacgggaaggaggagataaactgacatgcaccagggagctacgggctcacaaatggagagtgcagctctacaccccttatggcagaaaggctttcacagccaccttctgtgatctgtgcaatgagctgggagccttaatggaccctcagtgcacctctgacatgatggaaactgcaaagagatggaatttccacactggacagagaacagaagaatgttatttttctcactgcaaccttggaactggcatgctgcccctgggtgggaaaagagataagattcaagaggtctatggggtatatggtgcatctaccaagaaagctaatactgcttccactggtggctttggcttaggatgtaaatcccctatggcctatacagacagttttactgtcacatctatgtgtgacggaaccaagactgtctatcacattgctaaatcttctgttgagactaacggtaaaccagggattattcctattgttagcgtacctactgaagaatccgggcttgaagttaaaattcagcttcagtcagaagatattttagaaattgattcatatattcgagccattgtattacatggtgagattaaatgtatttactgcaatcagtatacaggaccaaatacagtagaattactgcctgtactgggtatgtcttttgaaccaggtagctataacctagaccatagcacatggcataaatattacatgggcagtcattcaatatttatccgttatggtaatgttatgtaccctgctttggatacccctgctacacatgaagcattaaaactggttaaacagtttatgcaggttattaactgtagccgtatcgttgttcaagctgccccatcatcactagctgtagcacctagccgtgaaacactgtcatctcaaaaaatgaccgaagacggtatcgtaaatttggctgtagctttagtagataaaatggaagcagatattaaagctcgtcttccaaatgctattgaatatattgggaaggctattaaagaatatagtcctcaccgttttgaagtaaatagttatttgccttacaccaatttagtgcctgatgttattgtcagtcgttatatgtcctctactttattcagtaagcaatatgctcatctgtgtaagaaatggggaaatatggaaattgaccgtcaactagaacatcctgcactggctcatttctctggttctcaaaaagcccatctccgtaagcatttaaagagggctaaggatttacgtaattacagggaattaactaaagtatttactgatatggctattaagccaatgttcaaaacctttgctaaattggggattactaaaggtatttccctatttcattatcaatatggtgttgaactgtggcgtaataatattgttaatagtgtccgtagaatacactcattaaacttcatgacttatagttctaagaagtgccgtgtatttgttaccccacgtattaccaatattgaagatagtctggctgggtatccagagtttgataatctttctactgagacactggtaaaatataactcaatcattgtcaaagttggaaccaagaaaggtgaagcagaggctatgactaatctgctcactaaagcaggatacgaagtcattaatatggctgaatatcatgagtgggattgtatagctcgcagacgtaaagaggaacaagaggctaaattagccatttccaaattacaagctaagaaggctactaataagaaaaaggttagtcctaatcgtcttattagtatgaatatccttgaaataccaaaagagcatcgtagctattcaagtgaggtatgtggttctcactacgcttctcgttctcatgaccgaatggttgatgtagatactccccagtattacatcatgcaggaagatattaataactacacaggaaggcttggtgttctttctatgtggcaattaacccctgctaccattaaagctgtaactgttgtttgtcgtaataaaattgaacgtaataaagctattaagcgaggtgctgttcatttggatgaatggactgctccgtatattgcttcagttcttacatccaaacaattcattaagtatgtcactaaagaacgtcagaaaacgttaagtgatattggtatttactccaaacacctcagattactgagagaactggatattacatatgccccattgaaaggtctgcgttatgacccagaactggagaatgcttatctcttcttacaaagtagtagctatcctaagctacgtgcattgttagggaagggtctgattactgaagaagagtatcacttcctcagtgatgttgatgtgcattgcaagactttcaacagtcgtaacctcaccttatggcaaccagatggttctactatggtcatcccccaaggggatgcccgtgtaccacgtattgttgctgaagcaaaagaaaagaatcttaccccaggtaagattatcgaagtggatgtcactatcgaagctcagattcgtcaggagtttctggacgctgaacgtgatacaggtggctttgttaaattcttccgtattaccaagaagaagctacaagagttcttcttaggagaagaggaagaacaagtccctcatgtatcacctgtagagttaggtgctaaacccactgctttcaatgcttttattgctaatgctgtgggcaaaactcttgctgtacaacatgcatcattaaaagcacctgaaccagaaatgacagttactcatgagcgtttttacggtaactatgctgtatggattacagatgtagacccacggaatcatcgtattgaggttattcatgttatccgtgaaatctcaggaagaaccagtgaatatgtcaataacctgctggctcaaccaaccccattcaaagtatttgattggctcacagagacgcaggctaaagagtttgtaagacgtctgaataacactcagggtgttatctctgtctataacaaactggaagacggtattcctgttaaggttgctgtaaaggccacagagccaaccaataaggaaaagctggaagctgcatcaactaagctgaaagctatgggtgctgtcgctactgatgcttatgagtttcatactgacttgaatgagaatgaagagactattgtagctgtagtgaatgataaggtggttcctgacgttcagaacctacaccgtcacatccgtcaatctgcaaacctgaaagactataaaggctttactaagttccttgaacgtctgtctactgtaattgataaacgtcgccactctgttgaagacctgatgaagtttatggaaaaaggtgacctgcccattgcagatgatggctccattgttatcttcaaacgtctggaaagcaaagacaatcctgaacatctcaaagacgtaatggatgatgtatttgttgattgccattctaagaagattgagcaatgcgttggtatgcgtgtaatggttaaagaaaaccttgtagaccagaaccgtcgtaaagactgttctcatggtctgcacgtagcttctctgcaatacattcgtaatttctcaggcaacgtaaccattattggtaaagttgctccagaggatgtatttgcagtaccagaatacgatgttactaagatgcgtgtatctgcttatcacatcattaccaagctacctgatgctattcgtgaccatgttaataatggcaatccaatctccaccattgagggtggtacggaaatcctgaacatggttctcagtggtaatcaccctgaaccttcccgtcaggtactagttggtggtcattatggaaccaatctgacttattcagaactcactcgtaattatctggatgatgatgaagacagcgttattccagatgaaccagtaattaagaaaactgccttgaatatggaagagagctttacggcaactaatcctaaagctgaaccagtgaaggcaacggatgttaaacctattaagaagactaagatggaaattcttaaagacctttggaaccagttcctgaaagcagagacttctaatgaagctattacactggctgatgaaatcattgctgctaagggcaaatgtaagaaatcatgggcttctttaggcttcagtggtgacatggttcagaaactgattgatgctcgtgctaataaacctaagccagaaaaagcagtcaaacaggataaaaccgttgcacctaagaaaactacagtcactcgtagtcggaatgctgatgttattcgtagttatctaaatgacaaaggtatgtctgattactgtaaagctcatgccattcacgatgtgaaacgtgctgctaagaaatcttatgctgcactgggtctgactcctgaagaatgcagccaaattgataaactgaagcatcacctgaagatacatactatggccaaagtttatcgtgctaaccgtaaagcccatgatgacgatattattcgtatgaatgcagtcggtttatcattgggaaccattgctaaaacactgggtgttcaccccactacagttaccttacgattacgctctcttggtattgaaccagccgacacacgtcgaacatttatggagaacgtactagcaccattacctactcacgtagctgattggttatcagaacaagtaggaccaaaatatgagattcgacaatacgttcgagacttattactggaagcctacaataatcgtcataatcataaggaaactgctcatgaacgattcctcaaaagatacgttgaagtagttgagatgctggaagaattggctccaaattctgaagaagcatacgatacacttcataatgccattgcagctttaactgaattgtcagaattaatgaagtcctctgataaagaagtttatgcacctaacagcaatcgcttagctattctggatgcactggcagaccagattgttacagcaactggcatcggtactttcttgggtatgaacgtacccggagcactcactgaagtgaaccgttctaattattcaaaatttgaagacggtgagcctgttttcaatgagaataagaaagtaatgaaagaggcagcggcagaaggtttcttcgactttctgctcgaccccaatgcttctgaacttcgtattagtggacctggtggtacaggcaagacatttacaatggctcatatgattgacgagattatgcctcgttatcatgagacatgtagtctgatgggaatccctgctctctataacgaagttattatgactgctactactaataaggcagcagaagtattagcccgtgcaacaggacgtcctacgtctacctatcattcctttcaaggtctgacagtacggaataacctgaagactggggaagcagacctgattccatctaagtccttcagtatcaaaaagaataaggtcatttttattgatgaagcatcaatgattgaccgtaaactgaagaagtttattaacgaaggtactcaccaaagtaagattgtttacttaggcgataaatgccaattgttacctgtaaaggaaacttcttcccctgtctacaatgacagtagcattaaagagtttatgctgacccaacagatgcgtactgatgtccctgaactccatgcactgcatgaacagcttcgtggaaccattgaaggtaagcacggattcctgcctattaaagcagttccaggtattatcgactggattaaagatggtgatgaaatgagaaaagaagtcgaaggtcatttcatgactaagactgacactcgtattgttgcctataccaaccaacaggttgttaactataacaccttcattcgagccatgaatggattccacggagagttctgtattggtgaagagttagtaagtaactctgctattcagattggtgctggtgaccgccttagtattgaacaggaatgccagattgttgaccaggattctgctactcgtaagattctgattgattcctctggcatcgaattagaagtacgtgattgcaccctggatactggttatggtggtgtctttgaaggtatccctattccggtagatatggattatttcattcgtttgcaaaagtactatgcacaccaaaagaactgggaacgtcacttctatttgaaagaaacattccctgaacttcgagcattacatgcttctactgtgcataagtctcaaggttctacctacgacaccatctttattgatgctactgattatctacttgccgctcagcctgatgtactctggcttatcaatctggtgacccaagaaaaggttcaggcagcacaggctcagtatggggatgtattaaaaacccttcctgctggtgttgttatggactacatgaacaaccttcaaggacagggtactgctggtattggtcaacgtcgcagcttattcaacttaggtgttgatatacgtaacgatgcggatactcaggctgctatgcagttactgaataatattcgtcgtggtgcatacagtgctgacgatgctcgtatgcttgcagagggtacgttcgaccaaatgtcaccaggagcagtaagtcgtgcactatctcagttagatagagcatatccaggtgcatatactccgggaactggttctgcatccctatctcctcctggtactcagggtactcggaatggttctgcatatgacactacctataagttcacaccaactgatgtacctattactcagatgaacttaggtgaggtggttcagcatcaagacactatgaagaagacactaggtgcttctcctgttggtgcataccagattaaccaagatactcttaaagactttgctccaaaggtatttggtgaagattggcagaacattcctatgtctccggagaaccaagacaaactgggtgaagctatttttaatgcccgtaagaatggcaatctgaagagtacatgggctgctttaccggatgatactcctggtgcttataagaacttgtcatgggatgaaatgaaggattacattgctcaagcagaaacaggtaattctattaatccattacaggaacaagcattcacttctgttgctggtaatactgttggtactcgtaatatgcagaatattggtaatactctgctgccagaataccaagctgctactgttgacccttctacgactggtcaggtggctaaacgtattattgatagcaatgaactgaaaggcattaaccaaggtgcactggttcgacaaatcaatgaggtagcaaaacagaatgctatttctcccgctatggcaggagcaatcattcaacgtagtatcaccggtaaaccagagggatggtttagtggtattcgaaatgcctttgatactgatgttattgatttgggtggtgattaccaactggataaagcagccgtagaagcaaatgcaaaacttgcaactactggtactgctattgaacagaatgctcgtaatcagcttactgcacaaattcaatcaaacatctatgcagcacagaatacgttagatactgcacttgctgatttacgtgaagtacagcgtcgtattcagaccggtcaggaaaaccttagaagtgtactacctcgctatcaggagcgagttaacactgctaaacgtcttcttgatggtgctcgtagtgctgtagctgctgaccctcagaatttggatattaagagcctacaaaatattaaacaggaagagagcgaggcaaaccggagaagtttaggcagagatgccggacgtcgattggacagcgtaaccaatgcaaagcaagttgacgtctctactgcaaccgcccagaagaaagctgaacaaggtgtcactactcctcttgtttctcctgatgctgcttatcaaatgcaagctgcccgtactggtaatgttggggctaatgcatttgaaccagggacagtgcaatcagatttcatgaatctgactccaatgcaaatcatgaataagtatggggttgagcaaggcttacaacttatcaacgctcgtgctgatgcagggaaccaggtattcaatgattcagttactacaagaactcctggggaagaactgggggatattgctactggtgttggtcttggttttgttaatacccttgggggcattggtgctcttggggcaggcttactcaacgatgatgcaggtgctgttgttgctcaacaattgagtaagtttaatgatgctgtccatgctacccaaagccaagcattacaagataaacgtaagctctttgctgctcgtaacttaatgagtgaagtagagagtgaacgtcagtatcaaacagataagaaagaaggcactaatgacatagtagcttccttatctaaatttggacgtgattttgtaggttcaattgagaacgctgcccaaactgactccattatttctgatgggttagcagaaggggtaggttctctattaggtgctggtcctgtattaaggggtgcatctttactgggtaaagcagttgttccagcaaatactcttcgtagtgctgcattggctggtgctattgatgcaggtactggtactcagtccctggctcgtattgcttctactgtaggcagagctgcaccaggtatagttggtgttggtgcaatggaagctggtggtgcataccaacaaactgctgatgaaattatgaagatgagtcttaaagacttagagaagtctcctgtttatcaacaacatattaaagatggtatgtctccagaacaggctcgtcgtcagactgcatctgaaactggtcttactgctgctgctattcaattacctattgctgctgcaactggtcctctggtatctcgttttgagatggctcctttccgtgctggttctttaggtgctgtaggtatgaaccttgcccgtgaaacagtggaagaaggtgttcagggtgctacaggccaactggctcagaatattgcacagcaacaaaacattgataagaaccaagacctgcttaaaggtgtcggtacacaagctggtttaggtgctctttatggctttggttctgctggtgttgtacaggctccggctggtgctgctcgtttagcaggtgctgcaactgctcctgtattgcgtaccacaatggctggtgttaaagctgctggtagtgtagcaggtaaggttgtttcccctattaagaacactttggtagctcgtggtgagcgggttatgaagcagaatgaagaagcatctcctgttgctgatgactatgttgcacaggcagcacaagaagctatggctcaagcaccagaagcagaagttactattcgtgatgctgttgaagcaactgatgctactccggaacagaaagttgcagcacaccagtatgtttctgacttaatgaatgctactcgttttaatcctgaaaattatcaggaagcaccagagcatattcgtaatgctgtagctggttctactgaccaagtacaggttattcaaaagttagcagacctagttaacacattagatgaatctaatcctcaagcactgatggaagctgcatcttatatgtatgatgctgtttcagagtttgagcaattcattaaccgtgaccctgctgcactggatagtattcctaaagattctccggctattgagttactcaatcgttatacaaatctgacagctaatattcagaacacaccaaaagtaattggtgcactgaatgttattaatcgaatgattaatgaatctgcccagaatggttctttggatgtgactgaagaatccagtccacaggaaatgcagaacgtagcattagctgctgaagtagctcctgaaaagctcaatccagaatctgtaaatgttgttcttaaacatgctgctgatggtcgtattaaactgaataatcgccaaattgctgcccttcagaatgctgctgcaatcctgaagggggcacgggaatatgatgcagaagctgcccgtcttggattacgtcctcaagacattgtgagtaaacagattaaaacggatgagagcagaactcaggaaggacaatactctgcgttgcaacatgcgaataggattcggtctgcgtataactctggtaatttcgagttggcctccgcttacctgaacgactttatgcagttcgcccagcacatgcagaataaggttggagcgttgaatgagcatcttgttacggggaatgcggataagaataagtctgtccactaccaagctcttactgctgacagagaatgggttcgtagccgtaccggattgggggtcaatccctatgacactaagtcggttaaatttgcccagcaagttgctcttgaagcgaaaacggtagcggatattgctaatgccctcgcttcggcttacccggaactgaaggtcagtcatataaaagttactccattggattcacgtcttaacgcccctgctgctgaggtggtcaaggcattccgtcaaggcaatcgagacgttgctttttctcaacagaaagctgactccgtgaatcaggttaaagaaactcctgttacaaaacaggaaccagttacatctactgtacagactaagactcctgttagtgaacctgttaaaacagaacctactactaaagagtctagaccacaggctataaaagaacctgtgagccagtctgaaaaacgggatgttaaccttactaatgaggacaccatcaagcaacctactgaatctgttaaagaaactgaaacttctgcaaaagaaagcacagttacagaagaattaagagaaggtatcgatgctgtttacccctcattggtaggtactgctgattctaaagcagagggtattaagaactatttcaaattgtcctttaccttaccggaagaacagaaatcccgtactgttggttcagaagcacctctaaaagaggtgtataccgatggttacgacgggcatagtctacgtgcatatgcttacttcggtgagatgatgcctgacattgaagatacggtagagtctgttaattctattcaggagaagtacaaagcatatcgtcaggattctaaagcacctacctttgctcttacctatcagggcacgtacatcactttgatgaagaactgtggtttccctgaacagaaagctcgaatggttgaggaacgttatcacacactttataaggtaagtgatgactgggttcaggctaaactagaccaagctgcaaaagatggttatgtaaccgtagcatttggcctgagagtcagaacccccttacttcaacaagttatccgtggaaccagtaaaactccttatgaagctgaagctgaaggacgtactgctggtaatgcattaggccaaagttggtgtcttctgaataaccgtgctggttcagaggtcatgcgtaag

SEQ ID NO: 137507 - DNA, 4623 bp, Homo sapiens
tcaatcatgaatttcttccaggttatgagtaggaacagtgaagaatgggtagctgccatcttcctcaagtgttactgaggtatgtgggacaccagtagcacgagtgtcatcatgagcaacgccgtaatcatactgaaggcattcataaacaatgtctcctttctcatgtgactgaccagcagcactacccattacaggcttatcctgagtataaacgtaaatttctgtccatgtggctaatgcattttcccatgtagatgggtcagtaggctcatttaagcctttactcattacatgctgaggagttgcttgatgttcagtaggacttgcgtgaacaggcttactttcaaccaatttagagaacaaacgcaagtcttcttcgatagtagaaggagtacctttaaagttgttataggaagcacgggcacaacgagcagcagagatttttactaacaggcaattaatctcatcactacttggttcatcacgagtaattcgttgatgtttgcaataatcgtaagcatcgaggtaatcactattagtaatgtacggcaaatgccattccccagccaacagggtacggggttttgattggtcatactgttccttcatcttagtagccaattcacaaatctctggttgagcatcgggatgaatgcgtaaaccaaagaagttattccattgagtagctgtcactactacacggatatgcgtgaatggttccagaatacgattaacaatctgcttatgtacttgtccgcgacgaagttgttcagcatatacagcagcagcagaggcagcattttcccaaatgaactcagcatccttaatctccataggagtgagttcttcacttgcctgcattcctttctggttcttaccccaatgtactggcattactggttcattgcgaacttgctcaataaggcgttgggtaggaatagcacgactactggaagcattacgattaagtgctcggtgagtcataaattctgaatgaatgaaacgcggataaaccagttccattgttaccaggcggtcaccagaaagagtaatactatcagcgaggatttttgcattaatcatagaaagccttgaatagcttgaggtggttaaagatgtccttatggaaccaagaacaatcttatgtgctccagtgtaggctagtttaaattctgcttttggtagagtagacagtaattcctgcccttctctaagagcaagtacacaagaaatgccctgccacttatccatagacatttcaaagttgtcagcaaggtctttatacaaccagtacaaagcacctaatgctgttttacaggtttcttgtttaccttcttgtttagctacttgagccagtgtcagagcaactaagatttgctcaacaacaagacgtaaagcaacagcatcctgtttaccttgaaccagggcactaacagccttaatagctttctggttcaaggctaaaccgtcttctgaagtcttttgatacagctttggtgttcgtttttctgcgatgtctttagcaccatcaagtgctttagctacgttacgacggatagagtcataacctacctgggtatcaatggaatcaccgttagtaaaagtaattacaccacggccttcactgttttcagtaacgtaagctacgttacgagcaacaacagtaactttctgaccattaacctgagcaatacctgaaccagcagggatatgaagttttttacgaccgtgataaaccagttctaaagtcagatagcctgaccatcctggttcaataacggtattgaatacagataatgtacgccttgcccatgtagatttgtcatggacaatacctactaggccagcaggtacattgaaacgttccattgcagaagctaatgtgaaagtgccaaacttccacttggtctttccttcatctttaatcttgatgcagggaatcaaaccaagaaatcggtagaaggtaacatcctgtttaatacggatgtcataaccagcttctcccagtccaaatgtagtctcacctgaactgagtttactgttaaccatgcctttcccaaatggaacttgtgcaccagggttacgaataactacccatatgacaggaatgtcaaatggcaatggctccatcggtctgacttctaagtcagtaaagataatggcagcagtaggcttatgcttaataatccactcacgtacaggaaccagactagtaccaccccgtcctttgatagtgacatcagtaaacttatcaccatcttcaatgacttgttcatctacaatctctgtagtgaactgaactagagtcatcttctgaggctgatatttctcttttacataggccacttcagagctaaagcgtaaagcatctttaggtttaatggagccagatgtatcgaggaaataagccagatgttccagtctaccgtcatcatccataggagatggtaggtacatatcagggtatctacgattaggccgttgccatgagtagtaagtttcttgcaggtcattgaagaagcgttcaagtaaaacctgccacggtactactggtttcaggaattgagtaataacttcttccatttttccaggtaataccccaggcaaagagccaccagatagtttctgttggtgcatggctcttactacattattgacaatattcacctgactagccttcgaagtggaaggtttcatgtcaccacctgaaccagtcccaaaagcacctgatgctttaggaggacgtatctgtttgctcatgaggtcatcatagatttgttcttcagcccaaccagcatacttagggtctttccagcaattttcgattcctataaagctgtagccatcctgaataagctgattgttgatataaatatcgcaggcataattccatacttctgggtcacgagaacccatacgaacagaatgcagtaagccaacatgccatagttcatgcataagtactgttacacgagattcaggtaatagactttcaaaccaatcaggattccattcgagatgctcaccatcggtttgtgctgtatcacagccatcttttacccaacggaacttcagagaacataacagtgaaccaaagaatgcagcagttttgcccataaaggctttagcctgacatctgtcatattcacgggttaattgagcatctgtcatggacatatcagttttcctggaacggtagtacaaaaccttgaacgtaaatggcatacgttcaacgtaatcaaagattttcgaatgattatcttcgtcagtattgttaatcagtgaagtgactacagcccacaacaggttattgtcttcaggcatacgagctttcttaggattatccaaaatctcattcaaagacaccatgttgctatagacctgagtaaactggacgaatgatgttgctacaccagaagtgatagtgcctgctaacagtagagtcatttcactattaattggtcctggtgggagaatggaaacaatcttgttaacgaactcccatgtacgagaacaacagaaagtcttctcttgatggtctggttcaaaatcattcagtttatttgggttagcattcaggaatgcaattacacgctcatcccacttattagggatggctacatcttccatgaagacatcaaaatcagtctccatttccagatgaataagacgtgattgcatagctgtagacaggttattagtaatggcacggtcagttgctttgttaccagcacatacgatagctacataaggatgtagcttcttctgaccagtcatacggtcgagtaccaatttataagcagcagcctgaatctctttacgagcggagttaaactcatcgagaaagagaagccagccattaaatccttcaggtacagcatccccttccaatgggaatagctcatcaaatggagcaaattcagcacgaccattttctttaaaacgaggcagacctgacaggtcttctggtgctgaagtagacagacgatggtcaatcagtttcaggccaaaatcttctgcaatctgacgaacaattgcagatttacccataccaggagatgaagtgataaatggaaccaatccattccacttattaatggcttccagttgcattacatttgggttctcggtgagtgcttcaccacgtaaacgaatagcatctgctacacccttagcttgttcacgttccatattagcttcagccacacgttgctgaatctcttgctcacgttgcagagttttctgagtagcttctactttggcattaatggcacgtttaacgttatcagggtattcaggagcaccaatccaggagatagcaataatatcaatccccactggttccatctctttacggattgtgtcagtgacactatccagtagcttagatttaccaccatcaataaaggtatcagtgttaatcaggttaccctgtctgttaagtacatcagcaatacgttgtcgtaaatcctgctcggtaatttcattaactcccttacgatacgtctggaagatattagttaccttagtagggttcactttatagctgatagccatctggtggcctatctgagtaccatcagacagttggaagtagaacagaccgtcataggtcttcat

SEQ ID NO: 137508 - DNA, 19861 bp, Homo sapiens
atggctagtattgattctattgccgtatgtaatccacggcaggtacgtaaatttgttgaacactgtatccgttcaggattggttccatttatcacttcatctcctggtatgggtaaatctgcaattgttcgtcagattgcagaagattttggcctgaaactgattgaccatcgtctgtctacttcagcaccagaagacctgtcaggtctgcctcgttttaaagaaaatggtcgtgctgaatttgctccatttgatgagctattcccattggaaggggatgctgtacctgaaggatttaatggctggcttctctttctcgatgagtttaactccgctcgtaaagagattcaggctgctgcttataaattggtactcgaccgtatgactggtcagaagaagctacatccttatgtagctatcgtatgtgctggtaacaaagcaactgaccgtgccattactaataacctgtctacagctatgcaatcacgtcttattcatctggaaatggagactgattttgatgtcttcatggaagatgtagccatccctaataagtgggatgagcgtgtaattgcattcctgaatgctaacccaaataaactgaatgattttgaaccagaccatcaagagaagactttctgttgttctcgtacatgggagttcgttaacaagattgtttccattctcccaccaggaccaattaatagtgaaatgactctactgttagcaggcactatcacttctggtgtagcaacatcattcgtccagtttactcaggtctatagcaacatggtgtctttgaatgagattttggataatcctaagaaagctcgtatgcctgaagacaataacctgttgtgggctgtagtcacttcactgattaacaatactgacgaagataatcattcgaaaatctttgattacgttgaacgtatgccatttacgttcaaggttttgtactaccgttccaggaaaactgatatgtccatgacagatgctcaattaacccgtgaatatgacagatgtcaggctaaagcctttatgggcaaaactgctgcattctttggttcactgttatgttctctgaagttccgttgggtaaaagatggctgtgatacagcacaaaccgatggtgagcatctcgaatggaatcctgattggtttgaaagtctattacctgaatctcgtgtaacagtacttatgcatgaactatggcatgttggcttactgcattctgttcgtatgggttctcgtgacccagaagtatggaattatgcctgcgatatttatatcaacaatcagcttattcaggatggctacagctttataggaatcgaaaattgctggaaagaccctaagtatgctggttgggctgaagaacaaatctatgatgacctcatgagcaaacagatacgtcctcctaaagcatcaggtgcttttgggactggctcaggtggtgacatgaaaccttccacttcgaaggctagtcaggtgaatattgtcaataatgtagtaagagccatgcaccaacagaaactatctggtggctctttgcctggggtattacctggaaaaatggaagaagttattactcaattcctgaaaccagtagtaccgtggcaggttttacttgaacgcttcttcaatgacctgcaagaaacttactactcatggcaacggcctaatcgtagataccctgatatgtacctaccatctcctatggatgatgacggtagactggaacatctggcttatttcctcgatacatctggctccattaaacctaaagatgctttacgctttagctctgaagtggcctatgtaaaagagaaatatcagcctcagaagatgactctagttcagttcactacagagattgtagatgaacaagtcattgaagatggtgataagtttactgatgtcactatcaaaggacggggtggtactagtctggttcctgtacgtgagtggattattaagcataagcctactgctgccattatctttactgacttagaagtcagaccgatggagccattgccatttgacattcctgtcatatgggtagttattcgtaaccctggtgcacaagttccatttgggaaaggcatggttaacagtaaactcagttcaggtgagactacatttggactgggagaagctggttatgacatccgtattaaacaggatgttaccttctaccgatttcttggtttgattccctgcatcaagattaaagatgaaggaaagaccaagtggaagtttggcactttcacattagcttctgcaatggaacgtttcaatgtacctgctggcctagtaggtattgtccatgacaaatctacatgggcaaggcgtacattatctgtattcaataccgttattgaaccaggatggtcaggctatctgactttagaactggtttatcacggtcgtaaaaaacttcatatccctgctggttcaggtattgctcaggttaatggtcagaaagttactgttgttgctcgtaacgtagcttacgttactgaaaacagtgaaggccgtggtgtaattacttttactaacggtgattccattgatacccaggtaggttatgactctatccgtcgtaacgtagctaaagcacttgatggtgctaaagacatcgcagaaaaacgaacaccaaagctgtatcaaaagacttcagaagacggtttagccttgaaccagaaagctattaaggctgttagtgccctggttcaaggtaaacaggatgctgttgctttacgtcttgttgttgagcaaatcttagttgctctgacactggctcaagtagctaaacaagaaggtaaacaagaaacctgtaaaacagcattaggtgctttgtactggttgtataaagaccttgctgacaactttgaaatgtctatggataagtggcagggcatttcttgtgtacttgctcttagagaagggcaggaattactgtctactctaccaaaagcagaatttaaactagcctacactggagcacataagattgttcttggttccataaggacatctttaaccacctcaagctattcaaggctttctatgattaatgcaaaaatcctcgctgatagtattactctttctggtgaccgcctggtaacaatggaactggtttatccgcgtttcattcattcagaatttatgactcaccgagcacttaatcgtaatgcttccagtagtcgtgctattcctacccaacgccttattgagcaagttcgcaatgaaccagtaatgccagtacattggggtaagaaccagaaaggaatgcaggcaagtgaagaactcactcctatggagattaaggatgctgagttcatttgggaaaatgctgcctctgctgctgctgtatatgctgaacaacttcgtcgcggacaagtacataagcagattgttaatcgtattctggaaccattcacgcatatccgtgtagtagtgacagctactcaatggaataacttctttggtttacgcattcatcccgatgctcaaccagagatttgtgaattggctactaagatgaaggaacagtatgaccaatcaaaaccccgtaccctgttggctggggaatggcatttgccgtacattactaatagtgattacctcgatgcttacgattattgcaaacatcaacgaattactcgtgatgaaccaagtagtgatgagattaattgcctgttagtaaaaatctctgctgctcgttgtgcccgtgcttcctataacaactttaaaggtactccttctactatcgaagaagacttgcgtttgttctctaaattggttgaaagtaagcctgttcacgcaagtcctactgaacatcaagcaactcctcagcatgtaatgagtaaaggcttaaatgagcctactgacccatctacatgggaaaatggcattagccacatggacagaaatttacgtttatactcaggaggccatatggctaaaccacgtaaattccgtattaaggataagcctgtaatgggtagtgctgctggtcagtcacatgagaaaggagacattgtttatgaatgccttcagtatgattacggcgttgctcatgatgacactcgtgctactgagctatctaaagaacgccaactatggctatctcctaataaaacaatgattcaggcagatctggcagaagtacaacgtatgctggatgaatggtctgaagaccaaatgttcattgatggcaatgcagaagcaataaccgatgacatggcctctgatatggctgtgtttgtattacaagcaatggctgaaaagcctgactctactgaactgaccacatcagcaacgttaggtgctcaagatgctatggccttcggtatttctgaagacccagcattcttccaaatactcagtgctaacctctattctaatcagaaactggcaatggtacgtgagacattgtgcaatagctgggatgctcatattgaggggaataaaacagatattcctatccatgtaaccattgataaagatggtttccttatcttccgtgactatggttctggtattcctaaagataagattcaagaggtctatggggtatatggtgcatctaccaagaaagctaatactgcttccactggtggctttggcttaggatgtaaatcccctatggcctatacagacagttttactgtcacatctatgtgtgacggaaccaagactgtctatcacattgctaaatcttctgttgagactaacggtaaaccagggattattcctattgttagcgtacctactgaagaatccgggcttgaagttaaaattcagcttcagtcagaagatattttagaaattgattcatatattcgagccattgtattacatggtgagattaaatgtatttactgcaatcagtatacaggaccaaatacagtagaattactgcctgtactgggtatgtcttttgaaccaggtagctataacctagaccatagcacatggcataaatattacatgggcagtcattcaatatttatccgttatggtaatgttatgtaccctgctttggatacccctgctacacatgaagcattaaaactggttaaacagtttatgcaggttattaactgtagccgtatcgttgttcaagctgccccatcatcactagctgtagcacctagccgtgaaacactgtcatctcaaaaaatgaccgaagacggtatcgtaaatttggctgtagctttagtagataaaatggaagcagatattaaagctcgtcttccaaatgctattgaatatattgggaaggctattaaagaatatagtcctcaccgttttgaagtaaatagttatttgccttacaccaatttagtgcctgatgttattgtcagtcgttatatgtcctctactttattcagtaagcaatatgctcatctgtgtaagaaatggggaaatatggaaattgaccgtcaactagaacatcctgcactggctcatttctctggttctcaaaaagcccatctccgtaagcatttaaagagggctaaggatttacgtaattacagggaattaactaaagtatttactgatatggctattaagccaatgttcaaaacctttgctaaattggggattactaaaggtatttccctatttcattatcaatatggtgttgaactgtggcgtaataatattgttaatagtgtccgtagaatacactcattaaacttcatgacttatagttctaagaagtgccgtgtatttgttaccccacgtattaccaatattgaagatagtctggctgggtatccagagtttgataatctttctactgagacactggtaaaatataactcaatcattgtcaaagttggaaccaagaaaggtgaagcagaggctatgactaatctgctcactaaagcaggatacgaagtcattaatatggctgaatatcatgagtgggattgtatagctcgcagacgtaaagaggaacaagaggctaaattagccatttccaaattacaagctaagaaggctactaataagaaaaaggttagtcctaatcgtcttattagtatgaatatccttgaaataccaaaagagcatcgtagctattcaagtgaggtatgtggttctcactacgcttctcgttctcatgaccgaatggttgatgtagatactccccagtattacatcatgcaggaagatattaataactacacaggaaggcttggtgttctttctatgtggcaattaacccctgctaccattaaagctgtaactgttgtttgtcgtaataaaattgaacgtaataaagctattaagcgaggtgctgttcatttggatgaatggactgctccgtatattgcttcagttcttacatccaaacaattcattaagtatgtcactaaagaacgtcagaaaacgttaagtgatattggtatttactccaaacacctcagattactgagagaactggatattacatatgccccattgaaaggtctgcgttatgacccagaactggagaatgcttatctcttcttacaaagtagtagctatcctaagctacgtgcattgttagggaagggtctgattactgaagaagagtatcacttcctcagtgatgttgatgtgcattgcaagactttcaacagtcgtaacctcaccttatggcaaccagatggttctactatggtcatcccccaaggggatgcccgtgtaccacgtattgttgctgaagcaaaagaaaagaatcttaccccaggtaagattatcgaagtggatgtcactatcgaagctcagattcgtcaggagtttctggacgctgaacgtgatacaggtggctttgttaaattcttccgtattaccaagaagaagctacaagagttcttcttaggagaagaggaagaacaagtccctcatgtatcacctgtagagttaggtgctaaacccactgctttcaatgcttttattgctaatgctgtgggcaaaactcttgctgtacaacatgcatcattaaaagcacctgaaccagaaatgacagttactcatgagcgtttttacggtaactatgctgtatggattacagatgtagacccacggaatcatcgtattgaggttattcatgttatccgtgaaatctcaggaagaaccagtgaatatgtcaataacctgctggctcaaccaaccccattcaaagtatttgattggctcacagagacgcaggctaaagagtttgtaagacgtctgaataacactcagggtgttatctctgtctataacaaactggaagacggtattcctgttaaggttgctgtaaaggccacagagccaaccaataaggaaaagctggaagctgcatcaactaagctgaaagctatgggtgctgtcgctactgatgcttatgagtttcatactgacttgaatgagaatgaagagactattgtagctgtagtgaatgataaggtggttcctgacgttcagaacctacaccgtcacatccgtcaatctgcaaacctgaaagactataaaggctttactaagttccttgaacgtctgtctactgtaattgataaacgtcgccactctgttgaagacctgatgaagtttatggaaaaaggtgacctgcccattgcagatgatggctccattgttatcttcaaacgtctggaaagcaaagacaatcctgaacatctcaaagacgtaatggatgatgtatttgttgattgccattctaagaagattgagcaatgcgttggtatgcgtgtaatggttaaagaaaaccttgtagaccagaaccgtcgtaaagactgttctcatggtctgcacgtagcttctctgcaatacattcgtaatttctcaggcaacgtaaccattattggtaaagttgctccagaggatgtatttgcagtaccagaatacgatgttactaagatgcgtgtatctgcttatcacatcattaccaagctacctgatgctattcgtgaccatgttaataatggcaatccaatctccaccattgagggtggtacggaaatcctgaacatggttctcagtggtaatcaccctgaaccttcccgtcaggtactagttggtggtcattatggaaccaatctgacttattcagaactcactcgtaattatctggatgatgatgaagacagcgttattccagatgaaccagtaattaagaaaactgccttgaatatggaagagagctttacggcaactaatcctaaagctgaaccagtgaaggcaacggatgttaaacctattaagaagactaagatggaaattcttaaagacctttggaaccagttcctgaaagcagagacttctaatgaagctattacactggctgatgaaatcattgctgctaagggcaaatgtaagaaatcatgggcttctttaggcttcagtggtgacatggttcagaaactgattgatgctcgtgctaataaacctaagccagaaaaagcagtcaaacaggataaaaccgttgcacctaagaaaactacagtcactcgtagtcggaatgctgatgttattcgtagttatctaaatgacaaaggtatgtctgattactgtaaagctcatgccattcacgatgtgaaacgtgctgctaagaaatcttatgctgcactgggtctgactcctgaagaatgcagccaaattgataaactgaagcatcacctgaagatacatactatggccaaagtttatcgtgctaaccgtaaagcccatgatgacgatattattcgtatgaatgcagtcggtttatcattgggaaccattgctaaaacactgggtgttcaccccactacagttaccttacgattacgctctcttggtattgaaccagccgacacacgtcgaacatttatggagaacgtactagcaccattacctactcacgtagctgattggttatcagaacaagtaggaccaaaatatgagattcgacaatacgttcgagacttattactggaagcctacaataatcgtcataatcataaggaaactgctcatgaacgattcctcaaaagatacgttgaagtagttgagatgctggaagaattggctccaaattctgaagaagcatacgatacacttcataatgccattgcagctttaactgaattgtcagaattaatgaagtcctctgataaagaagtttatgcacctaacagcaatcgcttagctattctggatgcactggcagaccagattgttacagcaactggcatcggtactttcttgggtatgaacgtacccggagcactcactgaagtgaaccgttctaattattcaaaatttgaagacggtgagcctgttttcaatgagaataagaaagtaatgaaagaggcagcggcagaaggtttcttcgactttctgctcgaccccaatgcttctgaacttcgtattagtggacctggtggtacaggcaagacatttacaatggctcatatgattgacgagattatgcctcgttatcatgagacatgtagtctgatgggaatccctgctctctataacgaagttattatgactgctactactaataaggcagcagaagtattagcccgtgcaacaggacgtcctacgtctacctatcattcctttcaaggtctgacagtacggaataacctgaagactggggaagcagacctgattccatctaagtccttcagtatcaaaaagaataaggtcatttttattgatgaagcatcaatgattgaccgtaaactgaagaagtttattaacgaaggtactcaccaaagtaagattgtttacttaggcgataaatgccaattgttacctgtaaaggaaacttcttcccctgtctacaatgacagtagcattaaagagtttatgctgacccaacagatgcgtactgatgtccctgaactccatgcactgcatgaacagcttcgtggaaccattgaaggtaagcacggattcctgcctattaaagcagttccaggtattatcgactggattaaagatggtgatgaaatgagaaaagaagtcgaaggtcatttcatgactaagactgacactcgtattgttgcctataccaaccaacaggttgttaactataacaccttcattcgagccatgaatggattccacggagagttctgtattggtgaagagttagtaagtaactctgctattcagattggtgctggtgaccgccttagtattgaacaggaatgccagattgttgaccaggattctgctactcgtaagattctgattgattcctctggcatcgaattagaagtacgtgattgcaccctggatactggttatggtggtgtctttgaaggtatccctattccggtagatatggattatttcattcgtttgcaaaagtactatgcacaccaaaagaactgggaacgtcacttctatttgaaagaaacattccctgaacttcgagcattacatgcttctactgtgcataagtctcaaggttctacctacgacaccatctttattgatgctactgatttatctacttgccgtcagcctgatgtagtagcacgtctgctttacgtagcagtatctcgtgctcgtcatcgtgttgtgttctatggctctttggcagagaaatttggtggagaacttatgcaactgggtgaaaaacaaatccgtgaaatgactaatagtagtgaactggttcaggaattattcttagccgagttacgtcggctagataaagtgctggatagtatcattacacgtaatggggaaacattcgctgtatacaactcaacagggttcctgtatttaggggagttctattcgagttcccgttcatcacaacaacctccttctggtcatcgtctggctctagctaatcacctactggatgatatgcgggagtatctggaacaagcaggtaaacttctgctagaagtccatatggtgaatcagatggtctttcgtctggttcagggctgtaagacttatcaagacgttcgtgatgcattgccagaatgcctcattgctatggataaacaaggtcatctgaaatccttacagagaaccagaaaggcagcatttactctggataatgatgctatggctctccgtcatatgagaaaatcttgccgattatcgaatactatgcgggaacccatcttatcttttgaggtctgtatgcgttacattacattcaacaatgagggtatctaccctattgctatccttactacaacgttacgtaaggatgatattgtcaaagcatacatggaaccctgggatgtagataaagattcagtaatgattcttgaacttcatacagccccagggaaaaagaaaactcctgctaaagagatgcaggagtttattacccaagaattagtgccagcattcgaagcagcacaaactcagtatatcatctgtggtgattctgaatattacaaacagctaaccaaacaaggtaaagctgatgccaatattggctatgtaatggattgtgcttatgggaaccagaaagttatttacgttcccaattacagacaaatcttttatgacccagataagataaagactaagattgctttatccatgcaggctctgattgattatgtctctggttcttatgttgagccaggaactaagattatccattatgctgattacccattaactccagaagctatatctaagtggttagataagttactggagatggatgttccattagcagtagatatagaaaccttcagtctgaagcattatgactgtggtataggcactattacattctgctggaacaagcacgaagggattgcattccctgtggattatgaaccaattgagggggctactgaagctccttatggtagacaagttcacaacatgcttgttcgttctatgctcagggacttttttattaagtatctgaacaggcagatgtatcacaatattgcctttgacgtatacgcactcatttaccagttatttatgacagaccttctggatacggaagggttgttgcatggcatgagtatcatgctaagaaactgggattgcactaagttaattacctatctggctactaactcttgtgccggtaataagctaagtcttaaagaccaggctcaggaatatgctggtaactatgctcaagaagaaatcaatgacattaccagaatcccattagcagagttgttggaatacaacttagtggatggattatgtacctggtatgtctatgaaaagcattgggatactctggttaatgaccaacagttagatgtttatacaaacatctttaaacctgcatgtgaagatattattcaaatgcagttaactggtatgcctatcaatatgaggacagtattggaggtagaagaggcattaacccaagactataacaatgcgttaaaaacaattgctgacagtaaagtaatcaaagattttacccgtcttcttaatgaagaatgggtagaaaaacagaaccagattctgaagaagaaacgagtgactttagctgatgctaaagagcagtttaatccaaactcaggtattcaattacagaagctactttttgagtttctggggttacctgtactgggtctgactgcaagtaaactacctgctactggtagtggcatactcaagtctttgaagaaccatactcaagataccagtattctggaaattcttgatgctctgattgattacaaagctgtagataaaattctgacagcatttattccagcattaaaaaatgccagacaaggaccagatggttggcattatctctttggtaatctgaacttaggtgggactgtatcaggccgtctatccagtagtgaaccaaacctacagaacctaccttctggttccagatatgccaagatgattaaaaaatgttttgaggctcctcctggatggatattttgtgggctagactttgcttctctcgaagaccgtatatctgctttaacaaccaaagaccctaataaactaaaggtgtataccgatggttacgacgggcatagtctacgtgcatatgcttacttcggtgagatgatgcctgacattgaagatacggtagagtctgttaattctattcaggagaagtacaaagcatatcgtcaggattctaaagcacctacctttgctcttacctatcagggcacgtacatcactttgatgaagaactgtggtttccctgaacagaaagctcgaatggttgaggaacgttatcacacactttataaggtaagtgatgactgggttcaggctaaactagaccaagctgcaaaagatggttatgtaaccgtagcatttggcctgagagtcagaacccccttacttcaacaagttatccgtggaaccagtaaaactccttatgaagctgaagctgaaggacgtactgctggtaatgcattaggccaaagttggtgtcttctgaataaccgtgctggttcagagttcatgcgtaaggtacggaatagtaagcatcgtcttgatattcgtccaagtacccatatccatgatgctcagtatttccttatccgtgatgatatggatgttgtgatatataccaatactcatttggtgaaagcagtacaatggcaagaccatcctgatattgctcatccagatgttcatttggatggtcaggaaggtgctgttattgttcagaacactatgctgcttactgaagagaaacaggtaactttccgtgacctgggacgtgctcagtctgctctgtttcagaatctgaatgaccgttttggtcaagtggtagatgtacgggatattgtattcctgaacgtcagctacttgggtcatatgagccagcctgactttcagcaaaatctggtaaccaaccctcaacgtatggaacagcctccatatcaggccgagtgtgaggatattatccaagcactgaatatgacctttgatgaagggtgtctgttcaaggcattgtggcgtaatgctgctgctcgtttaggtaatggtaaaccaggtaacaatgccgtttatgatgcagagaagatggttcattatgctaaccgcatttttattaaagaatccggtgggcagaaaaaagaagcagaagaaccagtttctgcggctctgaagaagggtgaagagattcatatgtctctgtctgaattattcaccctgttaactggtgaagcagcagaaggtgaagtaatgagccttgccggttggcatactcacgtaccaaaccgtttgggtgttatgcctattgctgttgcaatgagcaaagcagaacaagttgatgtagtacgtgccgatggaacgactattactcatgtatttcctcatgagattgactggtctgataagattgccccctttgctcgaatcactgcatggcgtttcactgtctggcttttgcatgacgagtatgattatgtgaaggataaaaagtatctttctgtgactaccctgcttaagccaattaagcacattgtcatgaagcatcgtgtagacctttctgtagaaagtatggacatcatggatttggtgtccacttctatgggtacaggcttacatgattctattgagaaggcatggcataacggacaccacaatgcattacgcaagttagggtatcctgagcgtgtcgttcagaatgttgtcatcaaccctacccctgagcagattgcatcaaatccaaacttaattcctgtatggatagaacaacgagcaactaaaaagattgctggttggactattgggggcaagttcgacattgttactgaaggtcttcttcaggatgtaaaatccacctccacttacacatgggtaaagggtggacgtgatgaagaacatagacttcaggggtcaatgtatcgttggttacatgacgacaagattaccgaagatgtgattcgtattaactacatcttcactgactggatgaaagcattagctacatctcaagaaaactatccaaagcatcgtgtgctgcataaagacattccattgatgtcttatgaagcgactgaagaatggattaaagccaagctggctctcattgataagtactgggatgctcctgaaagcgagattccagaatgtactgatgaagagttatggcgttctgacccagtgtttaaatactttgctgacccagagaaggcaaagcaacctggtgctcgttctaccaaaaacttccctactctctttgaggctcggaagttcatggcagagaaaggcaaaggcactattcttcatgttcctgagatatttcccatgattgacctgaccggagtctcacatcatccggcgattgaagaaatcgttgatgtgttatgtaacaagacgcaaaacactgaccgtggttttttccgtgtagaagtggcctatttccttgcgaaaatggcttcatgtatgggtgcaactatcatcactaaagaccgtggtgaaattccagtaaacatctatgcagtggctcttgctacttcaggcttcggtaaaggccattcggtcaacattgttgaagacggttttatggctggctttaagaagcggtttatggaagacaccatgcctgctttagcagaagaccgtctgtggaaaattgctaacgaacgttctgctcgtaatgctactgaccagaaggaagagtttgacaaggtggaagctgaatacagacgtactggtgcttatccatttacgtttgactcaggtacacctcctgctgtgaaacagttacgtcataaactcttattagctggatgtggtgctattaacttacagattgatgagattggttcaaaccttctcgctaatgctgatgtattaactgtgttccttgagttgtacgaccaaggcaagattaaacagaaacttactaagaatactgctgaaagtattcgtagtgaggaagttgatggtaaaactccagctaaccttcttctgtttggtacaccgagcaaacttctcaatgggagccagactgaggaactcttctatgacttccttgatactggctattctcgtcgttgtctgtttgctgtaggtcaggcagataaacgtgcatatctgagccagagtgctgaagaaatctatcgtaatctgattaagcaggataacaatgctgttgtgaataagtgggctaaccactttcatagccttgcagatgcatccaagtttggttggaaaatgacagttgaagatgatgttggtattgcactaatcgactacaagattcagtgtgaaaaacaagcagcagctttagctgaccacgaagagattcgtaaagcagaactggaacatcgctattttaaggcactgaaattggcaggtgcatttgcatttgttgataacagtatcatggtagagatggaacatctgaagcaagcaattcttctggtggaagagtctggtgttgcattccagactatcctcaatcgtgaaaaagcctacgttaaattagccaagtatattgcatctgttggtactgaagttactcatgcagatttgcttgaagctttaccattctataagagtgggaatgctgcacgtaatgagatgatgactttagctactgcatggggctataagcagcatatcatcattaagaagacatacaacgaaggtattgagttcttccgtggtgaaacactgaaagagactgatactaacgaaatgattgtttcttatggtgagaactttgcttatgactatattgcagagaaagttccatttgaccagttacatgtactgacccagcaagcaggttatcactgggctaaccaccatttccgtcgagggcatcgtgctgaagagaatgctattgctggcttcaatatgattgtcattgatgtggatggtacgtgtagtttggacgtgtgccatgaattgatgaaagaataccgattcatgacatatacaaccaaacgccatactgatgaagaaaaccgtttccggttaattatcccaatgaactatcagcttgaacttgatggtgctgaatataaagagttcatggataacgttatggcatggctcccatttaaaacggacgagtctgctaatcaacgagccaagaaatgggaatcatgtgctaagggtacgtattactacaatatggatgctcccctgctagacgtaagagatttcattcctagaaccagtaagaatgaggcattccagcaagggatgcagaaggttcaaaatctggataatctcgaacgttggtttgcccaacgaattgctacaggcaatcgtaataaccacatgattaagtatgccctggctctggtagatagtggtataggcttcaatgaagttaaacaacgtgtgcatgagttcaataagaaactcagcaatcccctatctgctgatgaactggattccactgtaatgattactgtggctaaactccttttcttggttgaagaggactgtcagttaaaagaggaaactatgtcagaagaatttgaacatggcgaaatgaatgaccagctaatcctgattgtaggattttctgctgctggtaaatcggcctcacttcgtaacatccgtaaccaggaacgttgggtatatctgaatacagaagctggtaaacgtctgccatttaaaaataacttcaatggtgttcgtattactgacccataccaaatcctggaatactttgaccaatgcattgaacatcgtgatgacgtggacggaatcattgtagattccctgactttcatgatggatatgctggaaactcagtatgtactcactgctgcaaacactcagaaggcttggggtgaatttgcacagttcttcaaaattctccttcaggagaaagtagttaaatttgccaagccagttatcttcactgctcacgtcaaagacgaagtagatgaacgtgcaatggaactgaagactttcgttccagtaaaaggttctctgaagaacaatggcattgaagcatacttctctactgttgtatcagcagaacgtatcgaccttaaagaacttgaaaagtattccaatggaatgttggaaattactgaggatgagcaagagttggggtacaaacacgtattccagactcgacctactaagaaaacagtaggtaaacgtattcgttctcctatgggtatgttcagtaagcaagagacttatatggacaatgatgcccaaaaacttctcgaccatctggcagagtattactctaccggtcaggcagctaaagcagagaaagcaacggataacctgggtggtggatttggtgcaaaagaatctgatatttatctggctaatctgaaagtagcttatgcaggtaaagcagcttctggtgctaacttcattcagattattgcagacctgactgaccttgatggacacagtgctggtgaatatcgtgagcaactgtacatcacttctggtactgaaaaaggctgcaagtgtacttatgaaaagaatggtaaggaatacttcctgccaggctacactgtaatcaatgacatcctggtaatgacttctggtgagactattcctgaagcagtcttcgaagagaaagtcgttaacgtatatgacttcgatgagaagaaagaagttgccaaatctgtcatggttccagtcaatgctatcggtggtaagtttgctgtagctattctgaaatctgaagaagataagcagactaaagatggctccggtaactatgtgtctactggtgaaactcgtttcactaataccatcgaaaaagtattccaccctgacctgcatctgactgttgttgaagcagaagaactgactgaacgtggtaaagaactgaccgttgaagaagcagtcttttgggacacaatggctggagaaaaacaaaggcgttacccgtgacaaaaccactaaaggcggtgcttccggtaaagctggtcagccaccaaaaccaggtgctactaatactggtgcgggtgcttctgctgcaaaatctctgttcgaaataatgcagatacctgtgcttggagttgaccccagttttcgtaactggggactagcacggggaatgctcgacttagagacgggaatactctctggattagacctgaagctggtagaaaccaaacctgatggaaccaagcaagtaaggcagaacagcaaagatatgcaagctgctgaggacattactactggtgtcatcgactggttcaaagaagcaaaggtcatctttgtagaggttcccgttggctcacaaagtgccaatggaatgaaatcctatggtgtttgtgtaggcatcttaggagcactcacggcactaggacatgagattattgaagttactcctatcgagaacaaagtagctctgtccggtattaagactgcttctaaagatgtgatgattagagcagctacaggattttatccagaggccaactggctcaaggataccaaagaatttaatgagaattttatcaaaggtataacaatgcaagtaattctgactcaacctgaaatcgaagctgctctgactggttatgtaaacgacctgatgtctgtacgtgaaggcatggaaattaaagtacccttcaaagctactcgtggtgatgatggtgctactgcaatcgtagatattgtccctgctggttcccaatctgttgaagtggttgaggaaccaaagaaagagtcaaaggaacgcaagcatcgtccagtaacccagaccaatactgctgctgtcagtgctctggcttctgctactggtaagaaaaaagaagaagtagttgaagtagaaactactactgaaactgttgatgaaactgttgaagtagctgaagaagctgctgctcaggaagaagaaaaagaagtacaggaagaagaggctaaagaaccagtacaagccaaaccttctctgtttgcaggtctgaaacgttaa

SEQ ID NO: 137509 - DNA, 414 bp, Homo sapiens
  misc_feature (1)...(414): n = a,t,c or g
agaggtcatctgagcacatccagcgcatcgaccgggacgtaagcgggacattaaggaagcatatattcttcagggatcgatacggaaccaagcagcgggaactactccacatcctcctggcatatgaggagtataacccggaggtgggctactgcagggacctgagccacatcgccgccttgttcctcctctatcttcctgaggaggatgcattctgggcactggtgcagctgctggccagtgagaggcactccctgcagggatttcacagcccaaatggcgggaccgtccaggggctccaagaccaacaggagcatgtggtagccacgtcacaacccaagaccatggggcatcagatctctctcgggctcaccctgcgnctgtgggacgtgtatctggtagaaggcgaacagg

SEQ ID NO: 137510 - DNA, 384 bp, Homo sapiens
cacatcctcctggcatatgaggagtataacccgaggaagcccctccttcagaggaagcctctccagtcacctctgccctctccaatgacatgagtcctcccaggtgacctcagccctcccaggtgatgtccttccatggtgactctggctcttgcaggaggtgggctactgcagggacctgagccacatcgccgccttgttcctcctctatcttcctgaggaggatgcattctgggcactggtgcagctgctggccagtgagaggcactccctgcagggatttcacagcccaaatggcgggaccgtccaggggctccaagaccaacaggagcatgtggtagccacgtcacaacccaagaccatggggcatcaggacaatgtatt

SEQ ID NO: 137511 - DNA, 3270 bp, Homo sapiens
atgccccaacggcttccccatgccaggcagcacacacccctccctctgggatcagcagactacaggcgtgtcgtcagtgtcagaccacaggggccacacagagaccccaaggactccagagatgcagccaaacgcgagcaagggtccttggcacccaggcctgtgccggcttcacgtggtgggaagaccctctgcaaggggtataggcaggcccctccaggcccaccagcccagttccagcggcccatttgctcagcttccccgccatgggcatctcgtttttccacgccctgtcctggtggggctgtccgggaagacacgtaccctgtgggcactcagggtgtgcccagcctggccctggctcagggaggacctcagggttcctggagattcctggagtggaagtcaatgccccggctcccaacggacctggatatagggggcccttggttcccccattatgattttgaacggagctgctgggtccgtgccatatcccaggaggaccagctggccacctgctggcaggctgaacactgcggagaggttcacaacaaagatatgagttggcctgaggagatgtcttttacagcaaatagtagtaaaatagatagacaaaaggttcccacagaaaagggagccacaggtctaagcaacctgggaaacacatgcttcatgaactcaagcatccagtgcgttagtaacacacagccactgacacagtattttatctcagggagacatctttatgaactcaacaggacaaatcccattggtatgaaggggcatatggctaaatgctatggtgatttagtgcaggaactctggagtggaactcagaagagtgttgccccattaaagcttcggcggaccatagcaaaatatgctcccaagtttgatgggtttcagcaacaagactcccaagaacttctggcttttctcttggatggtcttcatgaagatctcaaccgagtccatgaaaagccatatgtggaactgaaggacagtgatggccgaccagactgggaagtagctgcagaggcctgggacaaccatctaagaagaaatagatcaattattgtggatttgttccatgggcagctaagatctcaagtcaaatgcaagacatgtgggcatataagtgtccgatttgaccctttcaattttttgtctttgccactaccaatggacagttacatggacttagaaataacagtgattaagttagatggtactacccctgtacggtatggactaagactgaatatggatgaaaagtacacaggtttaaaaaaacagctgagggatctctgtggacttaattcagaacaaatcctactagcagaagtacatgattccaacataaagaactttcctcaggataaccaaaaagtacaactctcagtgagcggatttttgtgtgcatttgaaattcctgtcccttcatctccaatttcagcttctagtccaacacaaatagatttctcctcttcaccatctacaaatggaatgttcaccctaactaccaatggggacctacccaaaccaatattcatccccaatggaatgccaaacactgttgtgccatgtggaactgagaagaacttcacaaatggaatggttaatggtcacatgccatctcttcctgacagcccctttacaggttacatcattgcagtccaccgaaaaatgatgaggacagaactgtatttcctgtcacctcaggagaatcgccccagcctctttggaatgccattgattgttccatgcactgtgcatacccagaagaaagacctatatgatgcggtttggattcaagtatcctggttagcaagaccactcccacctcaggaagctagtattcatgcccaggatcgtgataactgtatgggctatcaatatccattcactctacgagttgtgcagaaagatgggatctcctgtgcttggtgcccacagtatagattttgcagaggctgtaaaattgattgtggggaagacagagctttcattggaaatgcctatattgctgtggattggcaccccacagcccttcaccttcgctatcaaacatcccaggaaagggttgtagataagcatgagagtgtggagcagagtcggcgagcgcaagccgagcccatcaacctggacagctgtctccgtgctttcaccagtgaggaagagctaggggaaagtgagatgtactactgttccaagtgtaagacccactgcttagcaacaaagaagctggatctctggaggcttccacccttcctgattattcaccttaagcgatttcaatttgtaaatgatcagtggataaaatcacagaaaattgtcagatttcttcgggaaagttttgatccgagtgcttttttggtaccacgagacccggccctctgccagcataaaccactcacaccccagggggatgagctctccaagcccaggattctggcaagagaggtgaagaaagtggatgcgcagagttcggctggaaaagaggacatgctcctaagcaaaagcccatcttcactcagcgctaacatcagcagcagcccaaaaggttctccttcttcatcaagaaaaagtggaaccagctgtccctccagcaaaaacagcagccctaatagcagcccacggactttggggaggagcaaagggaggctccggctgccccagattggcagcaaaaataagccgtcaagtagtaagaagaacttggatgccagcaaagagaatggggctgggcagatctgtgagctggctgacgccttgagccgagggcatatgcgggggggcagccaaccagagctggtcactcctcaggaccatgaggtagctttggccaatggattcctttatgagcatgaagcatgtggcaatggctgtggcgatggctacagcaatggtcagcttggaaaccacagtgaagaagacagcactgatgaccaaagagaagacactcatattaagcctatttataatctatatgcaatttcatgccattcaggaattctgagtgggggccattacatcacttatgccaaaaacccaaactgcaagtggtactgttataatgacagcagctgtgaggaacttcaccctgatgaaattgacaccgactctgcctacattcttttctatgagcagcaggggatagactacgcacaatttctgccaaagattgatggcaaaaagatggcagacacaagcagtacggatgaagactctgagtctgattacgaaaagtactctatgttacagtaa

SEQ ID NO: 137512 - DNA, 550 bp, Homo sapiens
caagaggtcatctgagcacatccagcgcatcgaccgggacgtaagcgggacattaaggaagcatatattcttcagggatcgatacggaaccaagcagcgggaactactccacatcctcctggcatatgaggagtataacccggaggtgggctactgcagggacctgagccacatcgccgccttgttcctcctctatcttcctgaggaggatgcattctgggcactggtgcagctgctggccagtgagaggcactccctgcagggatttcacagcccaaatggcgggaccgtccaggggctccaagaccaacaggagcatgtggtagccacgtcacaacccaagaccatggggcatcaggacaagaaagatctatgtgggcagtgttccccgttaggctgcctcatccggatattgattgacgggatctctctcgggctcaccctgcgctctctgggacgtgtatctggtagaaggcgaacaggcgttcatgccgataacaagaatcgcctttaaggttcagcagaagcgcctcacgaagacgtccagggg

SEQ ID NO: 137513 - DNA, 1420 bp, Homo sapiens
ctggggtggccacaaaaggatccggcaccgcccagtaggagactgaagtggccacggggtatgagctgtgaccattcccaggtaactcccctggcctgatatccaccctgtccctagagcgcctcacgaagacgtccaggtgtggcccgtgggcacgtttttgcaaccggttcgttgatacctgccacccccaggtgggctccggtgccatgtcccctcccatgtcaccctctggggtagtcagtagtaggggagtgcccgggacccgcaaccctactacctgggccttcctcttcaccttttcttcctcctcttcctcctggactctgagttctgactgggggccgtatcccaggcccaacagcctggagatgctgaccgcgtctgttttcctttcagccaaacccgagcaagggtcgtcggcatccaggcctgtgccggcttcacgtggcgggaagaccctctgcaagggggacaggcaggcccctccaggcccaccagcccggttcccgcggcccatttggtcagcttccccgccacgggcacctcgttcttccacaccctgtcctggtggggctgtttgcagagtactagggaaagacaaggtgactttttcatcttcattctgatagttaaatcctgtagcatgtatttccggccccagatcccttcccagcaccagacccaggtctttagccgcgagccctgctgcctccctggcctcaccgtgagatgcccagaacggggccctgcccatcttctcccccgttctcctagggctacagcccccattgtcaccatgccttttcccctcacgggacagtgagggctgtagctttgccgacagaactgctgagcgcccaggggcctgacctagcccagtctccattcccaccggctccctagatgggccccacacctctggcctaacaacctcgggctggacctgcaggggagtcagggaggagttctgtccctggaaaggaggttgacccgacctggtgagacatgtctgtacaatccccaaatgatcgacgttgttgttgtagcttcgaaaaggcttaggccccttgtcctctggcagcccagctcggtgtccaactatgaaggctaagaagcccaaggttgaggagttgcatctggtgagagccttcttgctgatggggactctgaagagtcttttagatggggttgtttttttcttgtaaatttgtttgagttcattgtggattctgaatatcagccctttgtcagatgagtagattgcaaaaattttctcccattctgtaggtttcctgttcactctgatggtagtttgttttgctgtgcggaagctctttagtttaattagatcccatttgtcaattttggcttttgttgccattgcttttggtgttttagacatgaagtccttgcccat

SEQ ID NO: 137514 - DNA, 2838 bp, Homo sapiens; identical to SEQ ID NO: 133982

SEQ ID NO: 137515 - DNA, 2424 bp, Homo sapiens
atgggctggcgggcgcggtggctcatgcctgtaatctcagcgctttgggaggccgaggaccctatcccacctgagctgaccaggctcctgcagcaatcccaggaccccctgctcatggggctgtttcctactaaccccaaagagaagacccaggaggaaccccctggccagagcagggcccctgtgttgaccgtggtgtccaagttcaaggtcctagctggactgctgcaccttggcaatatccagtttgctgcctccgaggatgaagcccagccctgccagccgatggatgatgccaagtgtgagggtcagggtgtaggatgggcaggccctgtcaggaaggcctcactggagcagcttctgcaggtcctacacagcaccacgccccactacattcgctgcatcaagcccaacagccagggccaggcgcagacctttctccaagaggaggcaggagctgggaggaggcggcagcggcggcggcagaaacagcagcggcggcggcggcggcagctgggaggaggtggtgacggtggcaacggcagcgtcggggacgatggcgcgactcgtggcagccgaggctgcgcactggagaaagagtgtgttgcaactcctaggcgaggccttctcttcagcaggccccacaaactcgcctttgcagtgggtggctcggtaacctctgtcggccccaagcccagagctccgatggacgtggtagaggtcgcgggtagttggtgggcacaagagcgagaggacatcattatgaaatacgaaaagggacaccgagctgggctgccagaggacaaggggcctaagccttttcgaagctacaacaacaacgtcgatcatttggggattgtacaggattttgccgatttcggaaccaccatcaaacaggattttcgcctgctggggcaaaccagcgtggaccgcttgctgcaactctctcagggccaggcggtgaagggcaatcagctgttgcccgtctcactggtgaaaagaaaaaccaccctggcgcccaatacgcaaaccgcctctccccgcgcgttggccgattcattaatgcagctggcacgacaggtttcccgactggaaagcgggcacttctatgatgcccacaaccccttcctccctccaccctcaatgtccaagcaggcaaagaagaccggtgtccccagtgaagggctctgcaggccaggcggtgaagggcaatcagctgttgcccgtctcactggtgaaaagaaaaaccaccctggcgcccaatacgcaaaccgcctctccccgcgcgttggccgattcattaatgcagctggcacgacaggtttcccgactggaaagcgggcagtgagcgcaacgcaattaattggtcttcagctcatcctgctgggggaggtgctccagaaagttctaacggcctcctacccagcccagagctcagtgcctctcacttctgggcctgtgcgccagatcatgaaggagaagggcaagaggtcatctgagcacatccagcgcatcgaccgggacataagcgggacattaaggaagcatatgttcttcagggatcgatacggaaccaagcagcgggaactactccacatcctcctggcatatgaggagtataacccggaggtgggctactgcatggacctgagccacatcgccgccttgttcctcctctatcttcctgaggaggatgcattctgggcactggtgcagctgctggccagtgagaggcactccctgcaggctgcccgggctcctgctgccatcggtgcccacgaacgggccgaccaagcccagatctctctcgggctcaccctgcgcctgtgggacgtgtatctggtagaaggcgaacaggcgttgatgccgataacaagaatcgcctttaaggttcagcagaagcgcctcacgaagacgtccaggtgtggcccgtgggcacgtttttgcaaccggttcgttgatacctgggccagggatgaggacactgtgctcaagcatcttagggcctctatgaagaaactaacaagaaagcagggggacctgccacccccagccaaacccgagcaagggtcgtcggcatccaggcctgtgccggcttcacgtggcgggaagaccctctgcaagggggacaggcaggcccctccaggcccaccagcccggttcccgcggcccatttggtcagcttccccgccacgggcacctcgttcttccacaccctgtcctggtggggctgtccgggaagacacctaccctgtgggcactcaggcgtcccgcaaagcaggcgtcaacgccattgttaatgcacggaggaggaacctgactgttagacctgggttttccagggttgcacggcttctgggagacggatgtgaccctgaggacagggcacaggccagtgtaatgccaggatggaatgagctgtga

SEQ ID NO: 137516 - DNA, 908 bp, Homo sapiens
agagctctgaatgtctcaccatggcctggatccctctcctgctccccctcctcattctctgcacagtctctgtggcctcctatgagctgacacagccagcctcagtgtcagtgtctccaggacagacagccagcatcacctgctcaggagatgtattggcaaaaaaaaaatatgctcggtggttccagcagaagccaggccaggcccctgtgctggtgatttataaagacagtgagcggccctcagggatccctgagcgattctccggctccagctcagggaccacagtcaccttgaccatcagcggggcccaggttgaggatgaggctgactattactgttactctgcggctgacaacaatggatgggtgttcggcggaggggaccaagctgacccgtcctcagtcagcccaaggctgcccccctcggtcactctgttcccagccctcctctgaggagcttcaagccaacaaggcccacactggtgtgtctcaataagtgactttctaccccgggagcccgtgacaagtggcctgggaaggcagcatagcagcccccgtcaaggcgggagtggagaccacccacacccctcccaaacaaagcaacaacaaagtacgcggcccagcagctaccttaggcttgacgcctgagcagtgggaagtcccacagaagctacagcttgccagggtcacggcattgaaggggagcaccgtgggagaagacagtgggcccttacagaatgttccataggtttctcaaccccctcactccccccccacgggaaacttagacttccagaatcccaggggaggggtttctctccccatcccaagtcatgccggcccttctccctgcactcaataaaccctcaataaatattctcattgtcaatcagaaaagtcgacgcg

SEQ ID NO: 137517 - DNA, 393 bp, Homo sapiens
  misc_feature (1)...(393): n = a,t,c or g
tttcgttcaggctcagagctggtgaaggctgggttacgagcattctttgaaaatgctgcagaagatttggagaagacttcagaaaacctgaaacttgggaagttcacccattcccgaacgcagattaaaggcgtttctcagaatattaactacactacagtggctctgctccccatcctgacgtccatctttgagcacgtcactcagcatcagtttggaatggatctactcttgggtgatgtgcagatttcatgctaccacatactgtgcagcctctactcccttgggacgggaaagaacatttatgttgaaagttctggggatgccagacacggtagaagacatgtgtcctgacatcccccagctggaatgcctgatgaaggaaatcaacgn

SEQ ID NO: 137518 - DNA, 508 bp, Homo sapiens
ttttttgtggcagagagcgcatggcttgatttttatttgttttattttcaatttaaatgcagtgcataaaaaaatcaaggagcaatgtacaaggaagaaagtcaaaataattgttattttcatcccccagagataaaatattagcagtttactctgtaacaccagcatttgtttttgctttcaagtggcatttaaatgtttaagacaaagaaactgctttaacaaaccaaaaaaaaaaaaacattttttttaaaatactgccaccctgttgggggagaggcggcatttgctgaggttattcttctgagaggtcagtgaatagtaggaggtctccatttccttatcaccaacttgggtggtctctggagaatagggaactgttgtgttctattggacatcgcaatgggcttcaagacactgaggaccattctgtcatctgtaactcacaatggcaaacaggtatggtttctactgatgcagaacagaatggacccactcccttttgtgt

SEQ ID NO: 137519 - DNA, 451 bp, Homo sapiens
gtatcccaaggccaaggtagaaaaagggagttgtcatgtaaaaaacagctccaagcttccagatatggtacttcatgtctatggaacttagccatgacaccagagaagtcgcttctgcctttggtctcttcctactgggctaaagtcaagagcatttttgtcccaaacccagaagttccagcaatgcgttcctgctccgtagagatctcccatacttgttgatcacctttctctttacaaacttgtcccagtagttattaggaaaagatctgaaaaacaaaacgaaaaaggttggttcttcattcttaacatcaaggaaaacacatcaagaaacgtttcagtttgagtgcctggatctggcatctttctggtttgtgtcctgctcaccaaagaattttaagatctgattgaagttcacagtcttctcaggccagtcggtcgtacacgagag

SEQ ID NO: 137520 - DNA, 639 bp, Homo sapiens; identical to SEQ ID NO: 126434

SEQ ID NO: 137521 - DNA, 486 bp, Homo sapiens
atgcatccacagctgtttatgcaacttgaagaatcaaaagaagatttagaaaccctagaaaattgtgccatgaaaccagagaacggaaagaacatacagtttggtgggtgtgtcctgctgcaggttctggatatcctgtgctccctctgtctctgcaatggggttgcagtgagagccaaccagaatctgatctgtgacaacttgctgccccggagaaacctactcctgcagacacgactgattaacgatgtaaccagcggaaacaatcgcacagctgcccccatcaccctgcctatagaagaagtcctgcagaccctacaggacttgatcgcctacttccagcccccagaggaggagatgcgacatgaagacaagcagaacaagctccgctcactcaaaaacagacaaaatcttttcaaggaagagctgtgtgtgaccacagacaagccacaagccttttccagactcggagatgtgatgatttag

SEQ ID NO: 137522 - DNA, 1800 bp, Homo sapiens
atgattggagcagaggatgtgatggagagcgtgctgctggcaggtgaagttagagaggctatggctacatcacatttgtttctctctctcactctgaacgcttctgagaagtttcaaaggaaggcagcacaaggaggtggccacaggaccctgttatacggccatgcagttctcctgaggcactctttcagcggaatgtatctaacatgcttgactacatcaagatcccagacagacaaacttgcctttgatgtaggtctacgggaacatgccacaggtgttgtcgaccttgctggaaattacaaagaggaggttcacacggaatccaacagaagggtcccctgttcctgtctggctagttctctgaatgcacttctggctcagaaaccccttcagagttgtaaacaaaggtccgaaggagagaaagttcgaattggcgatgacctcatcctcgtcagcgtgtcctctgaaagataccttctgaataattcctcaccccagaataaagtgtcccactttgaagctgcttctagatcaggtggagaaatctcccacaggctgtatagaaagaaccagatgacacatctctcagtatcaaatggtaacatacaagtggatgcctcctttatgcaaacactctggaatgtacatcctacgtgctcaggaagtagcatcgaagaaggatacctacttggtgggcatgtagtacgtcttttccatggtcatgatgaatgtttgacgataccatctacagaccagaatgattcccagcacagctggagtggcagtaacatcagatggggccaggctttccgactccggcatctcaccacaggccactacctggccttgacagaagaccaaggccttatactgcaagaccgggcaaagtcagacaccaagtccacagctttctctttccgggcatcaaaggaactcaaggagaaattagactccagtcacaagcgagacatagaaggcatgggagttccagaaatcaagtatggagattctgtctgctttgtgcagcatatagccagtggtctgtgggtgacctacaaagcacaagacgccaaaacttcccgcctgggacctctaaaaagaaaggtcatactccatcaggaaggccacatggatgatggattaacactgcagagatgccagcgtgaggagtcccaggctgctcggatcatccggaacactacagccttattcagccagtttgtcagtcacataattgcaagtaaaacacttctcagcaaatgcaaaagaaatgaaatcataacagtctcagaccacagcaaaatcaaattagaactcaagaaactcgctcaaaatcacacaactacatgggaagtgaacaacctgctcctgaatgactcctgggtaaataatgaaattaaggcagaaatcaagaagttctttgaaaccatgttggaagttcaggccaggtcaatcaggcaagagaaagaaataaagggtattcacacaggaagagaggaagtcaaactgtctctgtttgcagatgacatgatcctgtatctagaaaaccccatcatctcaatccaaaagcttcttaagctgataagcaacttcagcaaagtctcaggatacaaaatcaatgtgcaaaaatcacaagcattcctaaacaccaacagcgaacaagtggagagccaaatcatgaatgaattcccattaatacttgctacaaagagaataaaatacctaggaatacagctaacaagggaagtgaaggacttcttcaaggagaacttaaaaaacactcgtcaaagaaattag

SEQ ID NO: 137523 - DNA, 4278 bp, Homo sapiens
atggttgacacactggtagaatcatctaccaatgtagaaatgatcttgaaattctttgacatgttcttgaaacttaaagacttaaccagctcagacaccttcaaagaatatgacccagatggtaaaggaattatctccaaaaaagaattccagaaggccatggaagggcaaaaacagtacacgcagtcagagattgactttctcctgtcgtgtgcagaagctgatgagaatgacatgtttaattacgttgattttgtagaccggttccatgagccagccaaggacatagggtttaatgtggctgtgttattgacaaatctttctgaacacatgccaaacgattcccgcctgaagtgtctgttggacccagcagaaagtgtgctaaattacttcgaaccctacctaggacgcatcgagatcatgggtggggccaagaagattgagcgtgtttattttgagatcagtgaatccagtcgcactcagtgggagaagccccaggtgaaggaatctaagcgacagttcatttttgatgttgtcaatgaaggtggggagcaggaaaagatggagctgtttgtgaacttctgtgaggacaccatctttgaaatgcagttagcatctcagatctctgaatccgattcagctgacaggccagaagaggaggaagaagatgaagattcttcttacgtgttagaaattgcgggtgatttattaagaagacggaggaatgtcaccgacttcctgaagagagcacccctgaagaacctcaggaagcagtacaggaacgtgaaaaagatgactgcgaaggagctggtgaaggtgctcttctcctttttctggatgctgttcgtggggctattccagttgctcttcaccatcctgggaggaatctttcagatcctctggagcacagtgtttggagggggcctggtagaaggggcaaagaacatcagagtgaccaagatcctgggtgacatgcctgacccaacccaatttggtatccatgatgacactatggaggctgagagggcagaggtgatggagccaggtatcaccactgaactagtacacttcataaagggggagaagggagatacagatatcatgtcagacctctttggactccacccaaagaaagagggcagcttaaagcatgggcctgaagtgggtttgggtgacctctcagaaattattggcaaggatgaaccccctacattagagagtactgtacagaagaagaggaaagctcaggcagcagaaatgaaagcagcaaatgaagcagaaggaaaagtagaatccgagaaggcagacatggaagatggagagaaggaagacaaagacaaagaagaggagcaagctgagtacctgtggacagaagtgacaaaaaagaagaagcggcggtgtggtcagaaggttgagaagccggaagctttcacagccaatttctttaaagggctggaaatctatcagaccaagttactgcattacctggccaggaatttctacaacctgaggttccttgctctgtttgtagccttcgctatcaacttcatcctgcttttttataaggtcactgaagaacctttagaagaagagacagaggatgttgcaaacctatggaattcctttaatgacgaggaagaggaagaagcgatggtattctttgtccttcaggagagcaccgggtatatggcaccaaccctgcgtgccctggccatcatccataccatcatctctctagtctgtgtggtgggctactactgcctgaaggtgcctttggtggttttcaaaagggaaaaagaaatcgccaggaagctggagtttgatggcctatatatcaccgaacagccatctgaagatgacatcaaggggcagtgggaccgcttggtgatcaacacaccgcaacgccctgcccttggagaatgtctggcctcgctggcagctgccataccagtggcattcctggagcccacccttaatcgctacaatccactctcggtcttcaacaccaaaacccccagggagaggtctagtaagtatctcccctcaaaggtcatcaacccatttcatgtgctgagaggagaggagccacacaggcagggagcagcagccctgcagcactgtggctttcttggtctgagaggagccaggagtgcctctccagagtggtatcagaaggtgcacatccacagtaataacccagttatactcttcaagtccatggagaggcgtgcttctaaagatgctgatgacacatttttgtcctcatggaagataagacatagaaaagcaccaaaaggaagagaaagtgtacaagaaagaatatttcttagcaaacatattgacacgctagttgtctgggttttaaaagatattggtccacccctgacatccaaggaggagagatttttagccttctatccaccagaaggctctagtgatagcaacaaaagtcatcactacggaaaggctaatagtgcttcactgggcctattccatagcatagagactgctgggatccattgctttgcaactgcacatcctgtccaggtcacctctgaacacctcagtctcatcctgggcaacattctgaaaatcatcaacaacaacctgggcatcgatgaggcctcctggatgaagcgcattgcagtgtatgcacagcccatcatcagcaaagccaggcccgacctgctgagaagccacttcatcccaactctggagaagctgaagaaaaaggctgtcaagacggtgcaggaggaggagcagttgaaagccgatggcaaaggggacaccccaggaggcagaactcctcatcctggacgagttcgcggtcctctgcagagatctctatgccttctaccccatgctgatccgctacgtggacaacaacagccaaattcagctgtcagatatcaaccaagaataggaaggaagttgcatttaatgagaggtgaggttttgcaaaggaggagcggtaccttgagcaacacttcacttaccaaagagggaaattctgtgtctaacgagagcggcaagtttgcagaacaggctgaagcagaaaagaaagcaattcagaaagtcacagagattaaaggactcacgctttgtatcccccaccccaatgtcccttacactgtgaaacagagagcacagagtggcattctagggagatgcactatgttcctagcaaagaatcctctggtccacactcaggaacatgtgtggttcacactgccttggagaatcatgaaaggtgctctgtcccagggatatgggagttttgtctacaatccggattggggctgcctcctttctttcagagatggcctgcccagagaggaggaatgtagaaaggcagtctggctacagcagctttgccgtgctgtgttcgaacttcctggcagctttgtttatactgtgaggggaaaacggcctactcaagtctcagtaatggcagacacccctcccccaaccaagcccgagtgtcccaggtcgacttcagaccgttgggctggcagcaagaatttcaagccagtggatcttcacttgttgggctccatgggtgtgggatccgctgagcaagtctacttggcttcctggcttcagcctcctttccaggggtgtgaacagttctgtctcgctggtattccaggtgccactgggaattcagcattttatgtggatagtgagttattggttcgagcccttcaagagctgcctctctgcctccgactcaacgttgctgccgaactggtccagggtacagttcctttagaggttcctcaggtgaaaccaaagagaactgatgatggcaagggattagggatgcagttaaaggggcccttggggcctggaggaagggggcccatctttgagctgaaatctgtggctgctggctgccctgtgttgctgggcaaagacaacccaagcccgggtccttcaagggattctcagaaacccacttccccactgcagtcagcaggagaccatttggaagaagaactagatctgttgcttaatttagatgcacctataaaagagggagataacatcttaccagatcagacgtctcaggacctgaaatccaaggaagatggggaggtggtccaagaggaagaaggtatggctttcattttattccccgtgaatcttgattctggtgttttttcaagaacagccccgcccgcatcacatccgcacacatccctctgggtgtctgacattgatccagtgttgtccactgacatctatttctgtgctcacgtctctgcttccccctga

SEQ ID NO: 137524 - DNA, 1851 bp, Homo sapiens
atgatatgcaagaagagcagagtgcttccatatcaagcagcttatgtctcgcagcatggcagtgcctgccaaccttcctcacacctcccctctgttggttctctcagcagcacgggggacgatgaagaggaagaagaaatcgtgcatatgggcaatgcaattatgtcattttattcggcccttatagatctactgggccgctgtgctcctgaaatgcacctcatccagacaggaaagggggaagccatccgcatcaggtccatcctgcgctccctggtccccacagaagacctggttgggatcatcagcatccccttgaaactgccctccctcaacaaagatgggtcggtcagtgagccagatatggcggccaatttctgccctgaccacaaggcacctatggtgctgttcttggaccgcgtttatggcattaaggatcaaacttttctgctccacttgctggaggttggatttttacctgacctaagagcttctgcctctctagatacagtttccctaagcaccacagaggctgcgcttgcactaaataggtatatatgttctgctgtgctcccgctcctcacaagatgtgcccctctctttgccggaacagaacactgcacctctctgattgattccacactgcagacaatatacaggctatccaagggacgttccctcaccaaagcacaaagggacactatagaagaatgtttgcttgccatttgcaaatgtgaaactgctgtaaagtcactggggtgtgagagaggggagagggagcgggcacggggagtgggggcaaggaaacaacgggtagtaattgacgagagaaaatcttcagacccacgacttgcagcccaccatcctctccccatatcagcatcccccaaagatcttccagaattacaagcaaagcttctgacgaatcactatgaacagtgttggaagtattactgcctgccttcaggatgggggagctacgggctagctgtggaagaagagctgcacctaacggagaagcttttctgggggatttttgactcgctctcccataagaaatatgacccagatcttttccgaatggccctgccttgtctcagtgctatagctggggccttgccaccagattatttagataccagaatcacagccacgttggagaaacagatctcagtggatgcggatggcaactttgacccaaaacctattaacaccatgaatttttccttgcctgaaaaattggaatacatcgtcaccaagtatgctgagcattcacatgataaatgggcctgtgacaaggcaaagtgggaagactgtgccaaggatatccaggattcctgtgggcagccagttaaggattggggccatttctcagctgcagcctacgagaataaaatacctaggaatccaaattacaagggatgtgaaggacctcttcaaggagaactacaaaccactgctcaacaaactaaaagaggacacaaacaaatggaggaacgttccatgcccacgggtaggaagaatcagtattgtgaaaatggccatactgcccaagaaattaattcacgatggattaaagacttaactgttagacctaaaaccataaaaaccctagaagaaaacctaggcaataccattcaggacataggcatgggcaaggacttcatggctaaaatgccaaaagcaatggcaacaaaagccaaaatagatgaatgggatctaattaaaccaaagagcttctgcacagcaaaagaaactaccatcagagtgaacaggcaacctacagaatcggagaaaatttttgcaatctacccatctgacaaagggctaatatccagaatctacaaataa

SEQ ID NO: 137525 - DNA, 15820 bp, Homo sapiens
  misc_feature (1)...(15820): n = a,t,c or g
tttcgtcgagaggggtgggcggactgcttggttggcgttggcgctctgcagtgcagtggagtgttagcccagctccctatatggtcggggattagcttggcgctgctgaggctgaggctgagccaggagctggaggaggaggtggaggacgaggacgaaaaggaggaggagaaagagcgcagcagcagtcagcgcacgccgagcggctgccgggggaagcagaggcgccggaggctggggcaccgccgacgcctcgggagccatggccgaagggggagaaggaggcgaggacgagatccagtttctgaggactgaggatgaagtggtactccagtgcatcgccaccattcataaggagcagaggaagttctgcctggcagccgagggacttgggaatcgcctgtgcttcttggaacccacttcagaagccaagtacattcctccagatctctgcgtctgcaattttgtgctggaacagtccctatctgtcagagccctgcaggaaatgcttgccaacacaggtgaaaatggcggcgaaggggcagcacaaggaggtggccacaggaccctgttatacggccatgcagttctcctgaggcactctttcagcggaatgtatctaacatgcttgactacatcaagatcccagacagacaaacttgcctttgatgtaggtctacgggaacatgccacaggagaagcctgttggtggactatacatcctgcttccaaacagaggtccgaaggagagaaagttcgaattggcgatgacctcatcctcgtcagcgtgtcctctgaaagataccttcatctctcagtatcaaatggtaacatacaagtggatgcctcctttatgcaaacactctggaatgtacatcctacgtgctcaggaagtagcatcgaagaaggatacctacttggtgggcatgtagtacgtcttttccatggtcatgatgaatgtttgacgataccatctacagaccagaatgattcccagcacaggaggatattctacgaagctgggggagctgggactcgagccaggtctctttggagagtggaaccccttcggataagctggagtggcagtaacatcagatggggccaggctttccgactccggcatctcaccacaggccactacctggccttgacagaagaccaaggccttatactgcaagaccgggcaaagtcagacaccaagtccacagctttctctttccgggcatcaaaggaactcaaggagaaattagactccagtcacaagcgagacatagaaggcatgggagttccagaaatcaagtatggagattctgtctgctttgtgcagcatatagccagtggtctgtgggtgacctacaaagcacaagacgccaaaacttcccgcctgggacctctaaaaagaaaggtcatactccatcaggaaggccacatggatgatggattaacactgcagagatgccaacgtgaggagtcccaggctgctcggatcatccggaacactacagccttattcagccagtttgtcagtggaaacaatcgcacagctgcccccatcaccctgcctatagaagaagtcctgcagaccctacaggacttgatcgcctacttccagcccccagaggaggagatgcgacatgaagacaagcagaacaagctccgctcactcaaaaacagacaaaatcttttcaaggaagagggaatgttggcccttgtcttaaattgcattgaccgcttaaatgtctacaatagcgtagcacactttgcagggattgcaagggaagagagtggcatggcctggaaagaaattctgaacctcctctacaaattgctggctgctctcattcgcggaaacagaaacaattgcgctcaattctccaataaccttgattggctcatcagtaaattggacagactagaatcttcctcaggtatcttggaagttttgcactgcatcttaactgaaagcccagaagccttaaatctgatagcggagggccacatcaagtcgatcatctccctgttggataagcacgggcggaatcacaaggttctggatatcctgtgctccctctgtctctgcaatggggttgcagtgagagccaaccagaatctgatctgtgacaacttgctgccccggagaaacctactcctgcagacacgactgattaacgatgtaaccagtatccggccaaacatcttcctgggagtcgcggagggctcagcccagtacaagaagtggtacttcgagctgattatcgaccaggtggaccccttcctaacagcagagcccacacatctgcgggtgggctgggcctcttcttcaggctatgccccatacccaggaggtggagaaggatggggaggcaatggtgttggtgacgacctgtactcctatggctttgatggacttcacctttggtcaggccggatacccagagctgtggcttccatcaaccagcacctcctgagatcggatgacgtgggtaagctgctgcctggacctcgggggtgcccagcatctcattccgcatcaatgggcagcccgtgcaggggatgtttggagaacttcaacacagacgggctcttcttccctgtgatgagcttttcagcaggtgtcaaagtacgtttcctgatgggtggacgtcatggagagtttaagttcctgcctccctctggctatgccccttgctatgaagccttacttccaaaagagaagatgagattggagcctgtcaaagaatataaacgtgatgctgatggcattagagatctcttgggtaccacccagttcctctcccaagcctctttcatcccatgccccgtagacaccagtcaggttattttgccacctcacctagaaaagatccgagacagactagctgaaaacatccatgagctttggggaatgaataaaatagaacttggctggactttcggcaagatacgagatgacaataaaagacaacacccttgccttgtggagttttcaaagctcccagaaactgagaagaactataacctgcaaatgtcaactgaaaccttaaaaaccctcttgaccctgggttgccacattgctcatgttaacccagctgctgaggaggatctcaagaaggtcaaactgcccaaaaactatatgatgtccaacggctataagccagcccctttggatttgtctgatgtgaagctgttacctcctcaagaaattttagtggataagcttgcagaaaatgcacacaatgtttgggcaaaagacagaataaaacaaggatggacctatggcatccaacaggatttgaagaacaaaagaaatccccgtctggtgccatatgcattactggatgagcgtaccaagaagtcaaacagggacagcctgcgggaagctgtgcgcacttttgttggttacgggtataacattgagccatcagaccaagaactagctgactcggctgtggagaaggtcagcatagacaagatccgatttttccgggtagagcgatcttatccagtgagatctggaaagtggtattttgagtttgaagtggtgactggaggagacatgcgagtcggctgggcgaggccaggctgtcgacctgatgtcgagctgggggccgatgaccaagcctttgtgtttgaaggcaacaggggccagcgttggcatcaaggaagtgggtattttgggcgtacctggcagccaggggatgtggtcggatgtatgattaacctggatgatgcttcaatgatcttcacactgaatggggagctgctgatcaccaacaaaggctctgaacttgccttcgctgactacgagattgagaatggcttcgtgcccatctgctgtctgggtctatctcagatcggccgcatgaatctcgggacagatgccagtaccttcaagttttataccatgtgcggtctccaagagggctttgagccttttgctgtcaacatgaacagagatgttgctatgtggttcagcaagcgcctcccgacgtttgtcaacgtgccaaaggatcatccacacatagaggtcatgaggattgatggcaccatggacagccctccgtgtctcaaggtgacgcataagacatttggcacacagaatagcaatgccgacatgatctattgccgcttgagcatgcctgtcgagtgccactcctccttcagtcacagcccctgtctggacagtgaagctttccagaaaaggaaacagatgcaagaaatactctctcatacaacaacacagtgctactacgccatccgcatctttggtggacaggatccatcctgtgtctgggtcggatgggtgactccagactatcacttgtacagtgaaaagtttgacctgaataaaaactgcacagtgactgtcaccctaggggatgaaagaggccgggtccatgaaagtgtgaaacgcagcaactgctacatggtctggggtggagacattgtagccagttcccagagatcaaatcggagcaacgtggacctggagatcggctgtctcgtggatctggccatgggcatgttgtccttctcagccaatggaaaggaactgggcacctgctaccaggtggagcctaataccaaagtgtttccagcagtcttcctgcagcctacaagtacttctttgtttcagtttgaacttggaaagctgaagaacgcaatgcccctgtcagcggccatattcaggagtgaagaggagaacccagtcccacagtgtccacctcggctggacgtccaaaccatccagcccgtgctctggagccgcatgcccaacagcttcctgaaggtggagaccgagcgtgtgagcgagcgccacggctgggtggtgcagtgcctggagcccctgcagatgatggcgctccacatccccgaggagaacaggtgtgtggatatcctggagctctgtgagcaggaggacctgatgcggttccattaccacacgctgaggctctacagcgcggtgtgcgccctgggaaacagccgcgtggcctacgccctgtgcagccacgtggacctctcccagctcttctatgccattgacaacaagtacctccccggcctccttcgatctggtttctatgacctgctcatcagcatccacctggccagcgccaaggagaggaagctgatgatgaagaacgagtacatcatccccattaccagcaccaccaggaatatctgcctcttcccggacgagtccaagaggcatggactgcctggggtgggcctgagaacatgtctcaagcccgggttcaggttctccaccccttgctttgttgtgactggtgaggatcaccaaaagcagagccccgagattcccttggagagtctcaggacgaaggctctgagtatgctgacagaggcagtgcagtgcagcggggcccacatccgagaccctgtaggggggtctgtggagttccagtttgtgcctgtgctgaaactcattggaaccctgctggtcatgggcgtgtttgatgatgatgatgttcggcagatcctcctcctgattgatccctctgtgtttggggagcatagtgcggggacagaggagggagcagaaaaggaggaagtgacccaggtggaggagaaggctgtggaggctggggagaaggccggcaaggaggctcctgtcaaaggcttgttgcagactcgattacccgaatccgtcaagctgcagatgtgtgagctcctcagctatctctgcgactgtgagctgcagcaccgagtggaggccattgtggcatttggtgacatttatgtctccaagctgcaggcaaatcagaagttccgctacaatgagctcatgcaggccctgaacatgtctgcggccctgactgcccggaagaccaaggagttccgctcacccccacaggagcagatcaacatgctgcttaactttcaactgggagagaactgcccctgcccagaggagattcgggaggagctgtatgatttccatgaggaccttctccttcactgtggggttcctttggaagaagaggaagaggaggaggaggacacctcctggacaggaaaactctgtgccttggtttacaaaatcaaaggcccacccaagccagagaaggagcagccgacggaggaggaggagagatgccccacaacattgaaggaactcatctcacagacgatgatctgctgggcccaggaggaccagatccaggattcagagctggtccgaatgatgttcaacctcctccggaggcagtatgacagcattggggagctgctgcaggcgctgcggaagacctacaccatcagccacacctctgtaagcgacaccatcaacctgctggctgccctgggccaaatccgctccctcctcagtgtcaggatgggcaaggaagaggagttgctcatgatcaatgggctgggagacataatgaacaacaaggtgttttaccagcatcccaacctcatgagagtcctgggcatgcacgagacggtgatggaggtgatggtgaacgtgttgggtacagagaaatctcagattgcatttccaaagatggttgctagctgctgccgtttcctttgctatttctgtcgaattagccggcaaaatcagaaggccatgtttgagcatctgagttatcttctggagaatagcagtgttggcctagcctccccgtcgatgaggggatccaccccgctggatgtggcagcttcctctgtgatggacaacaatgagttagcgctgagcttagaggaaccagacctcgagaaggtggtgacctacttggcaggctgtggcctacagagctgccccatgcttctggccaaaggataccctgatgtcggctggaaccccattgaaggggaacgctacctgtccttcctgaggtttgctgtcttcgtgaacagtgagagtgtggaagaaaacgccagcgttgtggtcaagctgctcatcagacgcccagagtgcttcggcccggccctgcggggtgaggggggaaacggactcttggcagccatgcagggtgccattaagatctctgagaacccagcgctcgacctcccctctcaaggatacaaaagagaagtcagcacggaggacgatgaagaggaagaagaaatcgtgcatatgggcaatgcaattatgtcattttattcggcccttatagatctactgggccgctgtgctcctgaaatgcacctcatccagacaggaaagggggaagccatccgcatcaggtccatcctgcgctccctggtccccacagaagacctggttgggatcatcagcatccccttgaaactgccctccctcaacaaagatgggtcggtcagtgagccagatatggcgggcaatttctgccctgaccacaaggcacctatggtgctgttcttggaccgcgtttatggcattaaggatcaaacttttctgctccacttgctggaggttggatttttacctgacctaagagcttctgcctctctagatacagtttccctaagcaccacagaggctgcgcttgcactaaataggtatatatgttctgctgtgctcccgctcctcacaagatgtgcccctctctttggcggaacagaacactgcacctctctgattgattccacactgcagacaatatacaggctatccaagggacgttccctcaccaaagcacaaagggacactatagaagaatgtttgcttgccatttgcaatcacttgaggccttccatgttacagcaactcctgcgacgcctcgtttttgatgtgccgcaactcaatgaatactgcaaaatgcctctcaagcttctgacgaatcactatgaacagtgttggaagtattactgcctgccttcaggatgggggagctacgggctagctgtggaagaagagctgcacctaacggagaagcttttctgggggattattgactcgctctcccataagaaatatgacccagatcttttccgaatggccctgccttgtctcagtgctatagctggggccttgccaccagattatttagattccagaatcacagccacgttggagaaacagatctcagtggatgcggatggcaactttgacccaaaacctattaacaccatgaatttttccttgcctgaaaaattggaatacatcgtcaccaagtatgctgagcattcacatgataaatgggcctgtgacaagagtcagagtggatggaaatatgggatttccctggatgaaaatgtgaagacccacccactgataaggcctttcaagacattaacggagaaggagaaggaaatttatcgctggcctgcgcgagagtccctgaaaaccatgctggctgtgggctggactgtggagaggaccaaagagggagaagctttggttcaacagcgggaaaatgagaagcttcgaagtgtgtcccaggccaaccagggcaacagctacagtcctgctcccctcgacctctcaaacgttgtgctctccagagagctccagggaatggtggaggtcgtggctgagaactatcacaatatctgggccaagaagaagaagctggagctggagagcaaaggtggtggcagccaccctcttctggtaccatatgacaccttgactgccaaggaaaagttcaaggaccgggagaaggcacaggacctgtttaagttcctccaagtgaatggcatcatagtttccaggggtatgaaggatatggagctggatgcctcctccatggagaagaggtttggctataagttcttgaagaagatcctgaaatacgttgattctgctcaagaatttattgcccatttagaagccattgtcagcagtgggaaaactgaaaagtctccccgtgaccaggagatcaaattctttgccaaagttctcctcccgctggttgaccagtacttcaccagtcattgcctctacttcttgtcatcccctctgaagccccttagcagcagcggatatgcctcccataaggagaaagaaatggtggccggcctgttctgcaaacttgccgctctcgttagacacagaatttccctctttggtagtgattctactacaatggtgagctgtcttcacatcttagctcagacacttgacacaaggactgtcatgaagtcaggctcagagctggtgaaggctgggttacgagcattctttgaaaatgctgcagaagatttggagaagacttcagaaaacctgaaacttgggaagttcacccattcccgaacgcagattaaaggcgtttctcagaatattaactacactacagtggctctgctccccatcctgacgtccatctttgagcacgtcactcagcatcagtttggaatggatctactcttgggtgatgtgcagatttcatgctaccacatactgtgcagcctctactcccttgggacgggaaagaacatttatgttgaaaggcaacgccctgcccttggagaatgtctggcctcgctggcagctgccataccagtggcattcctggagcccacccttaatcgctacaatccactctcggtcttcaacaccaaaacccccagggagaggtctattctggggatgccagacacggtagaagacatgtgtcctgacatcccccagctggaaggcctgatgaaggaaatcaacgacctggccgagtcaggggcccggtacacagagatgccccatgtcatcgaggtgatcttacccatgctctgcaactacttgtcctactggtgggagcggggtcctgagaacctgccccccagcacagggccatgctgcaccaaggtcacctctgaacacctcagtctcatcctgggcaacattctgaaaatcatcaacaacaacctgggcatcgatgaggcctcctggatgaagcgcattgcagtgtatgcacagcccatcatcagcaaagccaggcccgacctgctgagaagccacttcatcccaactctggagaagctgaagaaaaaggctgtcaagacggtgcaggaggaggagcagttgaaagccgatggcaaaggggacacccaggaggcagaactcctcatcctggacgagttcgcggtcctctgcagagatctctatgccttctaccccatgctgatccgctacgtggacaacaacagatctaactggctgaaaagtcctgatgctgattctgaccagctcttccgcatggtggcagaagtcttcattctgtggtgtaaatctcataacttcaagagagaagagcaaaattttgtgattcagaatgaaattaataatttggcatttttaactggagacagcaaaagcaagatgtcaaaagccatgcaagtaaagtctggaggacaagaccaggagcggaagaagacaaagcggcggggagacttgtattccatccagacctccctcatcgtggctgcactcaagaaaatgctgcccattggtttgaatatgtgtactccaggcgaccaggagctgatctccctcgcaaaatcgcgatacagccatagggacacagatgaagaggtcagagaacatctgcggaacaacttgcacttgcaggaaaagtctgatgacccagctgtaaaatggcaactgaacctctacaaggatgttctgaagagtgaagaacctttcaatccggaaaagacagtggagcgtgtgcagagaatttcagcagctgtcttccacctggaacaggtggaacagcctttgaggtccaagaaggccgtctggcacaaactgttatcaaagcaacggaaacgggcagtggtggcctgtttcaggatggcccctctctacaacctgcccaggcaccgctctattaacctcttcctccatggctatcagagattttggatagaaacagaggagtattcctttgaagagaaactagtacaggatttggctaaatctccaaaggtggaagaggaggaggaggaagagacagaaaaacaacctgacccactacatcagatcattctctattttagccgcaacgctctcacggagaggagagttgtgtttattagatttccctttaatttgattgtctgtcttctcccttccctgctccatgaaatccagagttgtcaaagtggtgaggatgaagaagaagatgaagacaaggaaaaaacattcgaagagaaagagatggagaagcaaaaaaccctctatcagcaagctcggctgcatgagcgtggtgctgcagagatggtccttcagatgataagcgctagcaaaggtgagatgagccccatggtggttgagacgctgaagctggggatcgccattctgaacggaggcaatgctggtgtgcaacagaaaatgctagattacctaaaggagaaaaaggatgctggattctttcaaagccttcctggtcttatgcagtcttgcagcgtccttgatttgaatgcatctgagaggcagaataaagctgaaggcctggggatggtgactgaagaaggaacactcattgttcgggaacgtggtgaaaaagtactccagaatgacgagttcacgcgtgatctctttagattcctacagttactttgtgagggacataacagtgactttcagaacttcctgcggactcagatgggcaacaccaccaccgtgaatgtcatcatcagcactgtggactaccttctgcgtctgcaggaatcaatcagtgatttctactggtattattcagggaaggacatcattgatgaatctggacagcacaatttttccaaagctctggcagtcaccaagcagattttcaattctcttacagaatacatccagggcccttgcattggtaatcaacagagcctggctcacagcaggctgtgggacgcagtggttggcttcctccatgtctttgctaatatgcagatgaaactctctcaggattccagtcagatcgagctgctgaaggaactcttggatctccttcaggacatggtggtgatgcttctgtccctcctggaagggaatgtggtaaatggcaccattggcaagcagatggttgacacactggtagaatcatctaccaatgtagaaatgatcttgaaattctttgacatgttcttgaaacttaaagacttaaccagctcagacaccttcaaagaatatgacccagatggtaaaggaattatctccaaaaaagaattccagaaggccatggaagggcaaaaacagtacacgcagtcagagattgactttctcctgtcgtgtgcagaagctgatgagaatgacatgtttaattacgttgattttgtagaccggttccatgagccagccaaggacatagggtttaatgtggctgtgttattgacaaatctttctgaacacatgccaaacgattcccgcctgaagtgtctgttggacccagcagaaagtgtgctaaattacttcggaccctacctaggacgcatcgagatcatgggtggggccaagaagattgagcgtgtttattttgagatcagtgaatccagtcgcactcagtgggagaagccccaggtgaaggaatctaagcgacagttcatttttgatgttgtcaatgaaggtggggagcaggaaaagatggggctgtttgtgaacttctgtgaggacaccatctttgaaatgcagttagcatctcagatctctgaatccgattcagctgacaggccagaagaggaggaagaagatgaagattcttcttacgtgttagaaattgcgggtgaagaggaagaagacgggtctcttgagccggcctctgcatttgctatggcctgtgcctctgtgaagaggaatgtcaccgacttcctgaagagagcaaccctgaagaacctcaggaagcagtacaggaacgtgaaaaagatgactgcgaaggagctggtgaaggtgctcttctcctttttctggatgctgttcgtggggctattccagttgctcttcaccatcctgggaggaatctttcagatcctctggagcacagtgtttggagggggcctggtagaaggggcaaagaacatcagagtgaccaagatcctgggtgacatgcctgacccaacccaatttggtatccatgatgacactatggaggctgagagggcagaggtgatggagccaggtatcaccactgaactagtacacttcataaagggggagaagggagatacagatatcatgtcagacctctttggactccacccaaagaaagagggcagcttaaagcatgggcctgaagtgggtttgggtgacctctcagaaattattggcaaggatgaaccccctacattagagagtactgtacagaagaagaggaaagctcaggcagcagaaatgaaagcagcaaatgaagcagaaggaaaagtagaatccgagaaggcagacatggaagatggagagaaggaagacaaagacaaagaagaggagcaagctgagtacctgtggacagaagtgacaaaaaagaagaagcggcggtgtggtcagaaggttgagaagccggaagctttcacagccaatttctttaaagggctggaaatctatcagaccaagttactgcattacctggccaggaatttctacaacctgaggttccttgctctgtttgtagccttcgctatcaacttcatcctgcttttttataaggtcactgaagaacctttagaagaagagacagaggatgttgcaaacctatggaattcctttaatgacgaggaagaggaagaagcgatggtattctttgtccttcaggagagcaccgggtatatggcaccaaccctgcgtgccctggccatcatccataccatcatctctctagtctgtgtggtgggctactactgcctgaaggtgcctttggtggttttcaaaagggaaaaagaaatcgccaggaagctggagtttgatggcctatatatcaccgaacagccatctgaagatgacatcaaggggcagtgggaccccttggtgatcaacacaccatcttttcctaataactactgggacaagtttgtaaagagaaaggtgatcaacaagtatggagatctctacggagcagaacgcattgctgaacttctgggtttggacaaaaatgctcttgactttagcccagtagaagagaccaaagcagaagcggcttctctggtgtcatggctaagttccttagacatgaagtaccatatctggaagcttggagttgtttttactgacaactcctttctctaccttgcctggtatacaaccatgtcagtcctgggccactacaataacttcttctttgctgctcacctattggacatcgcaatgggcttcaagacactgaggaccattctgtcatctgtaactcacaatggcaaacagttggttctgactgtcggtctcctggccgtggtggtttatctctatactgtggtggctttcaacttcttccgcaagttctacaacaaaagcgaagacgatgacgagcccgatatgaagtgcgacgacatgatgacgtgttaccttttccacatgtacgtgggtagtgagagcaggaggtggcattggtgatgaaattgaagaccctgctggtgatccttatgaaatgtatcgcattgtctttgacattacctttttcttcttcgtcattgtcatcttgctggccatcattcaagattgctttgtctttgtatttaacattccaggtcttattattgatgctttcggagagctaagagaccagcaggaacaagtacgagaagatatggagactaaatgtttcatctgtgggattggcaatgactactttgacacaacccctcatggttttgaaacacatacattacaagagcacaacttagccaactacttgttctttctgatgtatttgattaataaagatgaaacagagcacacgggtcaggaatcttatgtctggaagatgtaccaagaaaggtgttgggatttcttcccagccggtgactgctttcgtaaacaatatgaagatcagcttggataaatctgaatcaaaganngaagcgcgacaattctggacagtcaacttcccatgaaataaagtccccttttttacagttctgcaacatatctgaaatgtgacattttctaaatgcctcccttaaaaaaaaaactgctgaaaatctgtgctattttagaaattgatttaggctttttgtgcctaatgggacatacactgtgggagagaacctgtcaaaatgtcgaaaaaggaaggcgaagaatcaagtaatctctaggcaaatgccttcaagttttccagttctgaggtaactagttcagtttgttgggatggaagcatgaaggaaagggctagagaagtatgaaatctcgaatgtgtaataccctgaaaatttaaaccactggaatgtcatcatggtatcccaacttgtgactcatagggtctgaactcactccaaaagataataactgccagtctaatttttcccatggtacttgctagtgactgtatccagaaaagctttaagcagttaaagaaacagaaaaaaaccgacactttgtcgacactgaaatatcgattaagtgccttaaaacctctttagacatagctatgcaagttttttatgtttgtgttccagaaggacagttccattcattagttgtgatcttccgtcttactttatgaaactgcacttgaaggttattcatacaagtttttttagtaacagctgtcagtcaactgctgttattagaagaaaagtactgtactgaaaattcagaaaaaaaaatctcaaccttatgccaaaatggagtaatgctttatggtcccttgtaagtagtggagctgctctgtttaggtgaatctcctcaaatacaatgaagtgcccactgcaataaagtaatacgtaccaataaaaa

SEQ ID NO: 137526 - DNA, 1957 bp, Homo sapiens
atggcctccgcgggcagcaccgctcggcgggcgggctccggaagctggcactcagaaaggggagaagggagaggtgctcggccgcagccaactccaagtggctccatgcagcaggcgaacaaagtctccttgaaggccacctggactgacgcggagtccaagcagcccagccccagcaaggagtccgaccagacggcaatcgaccagacggcgatcgggagctactaccagctgttcgcagcggctgtgggcaacgtggaatggctgcgattctgtctgaaccagagcctcagggaaatccccaccgacgacaagggcttcactgccatccacttcgccgcccaatggggcaagcttgcatgcctgcaggtcctggtagaggagtacaagtttcccgtggacctgctgaccaacaatagccagacacccctgcacctcgtcatccacagggacaacaccaccgtggccctcccctgcatctactacctgctggagaaaggcgcagacctcaatgctcagacatgcaacggctccacgcccctgcacctggcagcccgtgacggcttgctggactgtgtgaaggtcctggtgcagagtggcgccaacgtccatgcccaagatgccatgggctacaaacccattgacttctgcaaaatatggaaccaccgtgcctgtgcccggttcttgaaggatgccatgtggaaaaaggacaagaaggactttgcccgtgagatgacgaaaatgaagatgttcaagagccagctgaccctcatggagcacaactacctgattgagtatcaaaaagagcacaaaattctcagagaagctgctatcagaaagtggctccacggcaagctgcacccaggccactctctggtctccaataccaagcaagcccgggccaccgccctctccaagaccccagagcaacgggaatcgcagcgttccaggagcttccacccctctgtggatgcacgcctgcaatgcattccacagcccacggagatgcccaagcccatctacaggaagcccacggtcaagcggccccacaatgtggaatgttagcaacaaccccgccagaccccccaccacccagatcagccactcgcagggcatccgcctgggcgtgcatccaagaccccattccggagcacgacttcagcagcttcctggaggtgaggcctgatgggcaacggcggtgcgcggctgcacacagtggacggccactgggtggcgcccgtgccgcggctgccttttgaggtgctgctgcgcatgctgtacccacgtgtatggccatacagaatgaaggtgccccagggcttttaccccatcagcatgagggaagtgcccaggaagcggcacctgggtgacaacaccttctggaccgacactctggccatgaacctgcgtgacacattcgatgaagccttcctggcagctgtgcgatctcatcaaggactccccaccctgccctccccacaaaccaacccataaagttattatggctacctctccccctgaggcagcccagtgaaggctgaagtgtggcaattcacgttgtgggtggcgaggaaagggggaggggctcctatgggcttcccactcccaagctcgaggagtcacccttcccaatcaaaagcccagaccccaggcctcccttttctctgcaaataaatctcttggcacccccccccccgccgccaggaaatccaagttaggttgagagtggggggtcagacactattcttccccttggcattgtaaaagttgtcacattttggcacccccactgccctcccagccctaagggcccaggcttccaggatggaaggaccccctgggaaattttgtttcttgttcagattaagcccttcctgctgcaggctctaagctgagacccagaatggggtggagggcaactaatatgtccccctggcatgggcttccctgctaaaaa

SEQ ID NO: 137527 - DNA, 1282 bp, Homo sapiens
atggccggcctggggttttggggccaccctgctggacctctcctgctgctgctgctgctggtgctgccaccccgggccctgccagaaggacccctggtgttcgtggctctggtattccgccatggcgaccgggccccgctggcctcctaccccatggacccacacaaggaggtggcctccaccctgtggccacgaggcctgggccagctgaccacggagggggtccgccagcagctggagctgggccgcttcctgaggagccgctacgaggccttcctgagtccggagtaccggcgggaggaggtgtacatccgcagcacggactttgaccgcacgctggagagtgcccaggccaaccttgccgggctgtttcccgaggctgctccagggagccccgaggcccgctggaggccgatcccggtgcacacggtgcccgtggctgaggataagctgctgaggttccccatgcgcagctgtccccgataccacgagctgctgcgggaggccaccgaggccgccgagtaccaggaggccctggagggctggacgggcttcctgagtcgcctggagaacttcacgggactgtcgctggttggagagccactgcgcagggcatggaaggttctggacaccctcatgtgccagcaagcccacggtcttccactaccagcctgggcctccccagatgtcctgcggactcttgcccagatctcggctttggatattggagcccacgtgggcccaccccgggcagcagagaaggcccagctgacaggggggatcctgctgaatgctatccttgcaaacttctcccgggtccagcgcctggggctgcccctcaagatggtcatgtactcagctcatgacagcaccctgctggccctccagggggccctgggcctctatgatggacacaccccgccatatgctgcctgcctcggctttgagttccggaagcacctggggaatcccgccaaagatggagggaatgtcaccgtctccctcttctaccgcaatgactccgcccacctgcccctgcctctcagcctccccgggtgcccggcccccctgtccactaggccgcttctaccagctgactgccccggcccggcctcccgcccatggggtcacctgccatggcccctatgaggctgccatccccccagctccagtggtgcccctgctggccggagctgtagctgtgctggtggcactcagcttggggctgggcctgctggcctggagaccagggtgcctgcgggccttggggggccccgtgtga

SEQ ID NO: 137528 - DNA, 1137 bp, Homo sapiens
atcccaacactttgggaggctgaggcaagatgattgcttgagcccaggtggggtccccctcctgcccagggcagccccggagatggaggcctccagggtgagtgtcagactcagactcccctgtgggaatgagcagtgggttgggaatcggggaagtgggattctggtcggggccagggtgggggtcaagagcagatgtggagctgccagtctgatatgctttaccccccagaccaagtcggtgcttgggggcttcccgggcccaccggccccaagggagatgccggcagtcggggcccaatggggatgagaggcccaccaggtgagtgcccgcaatgctgccccacagctcctctggccatcccctccaccaggtgggcccttccctgctcctggccaccagggcctcctggcccccctgggcccccagcccctgttgggccaccccatgcccggatctcccagcatggtgagtccccctgggatcccagcaggtggaggtgggggtggagtagccatcagcacagtgcccgctaccatcaagacccggcggcaggaagtgagtcctgaactcccaaggccacaggcccggcccctcctccaggccctgacgtgcgtccttggcttcttcgccctccagggcccatgggtaagttgagtccaggccaggggtaaagggtgaagttggtagatggcagagggaatagggtttgtggctatcctctcacccatgtgtctgtccatctttccatctatgcatacatccatacatctatccctgcaggatcccttagtcccagattcctcctgtgactccatccctgccttctcagccctacatgctcaagagagtattccctccccttcctgcagcagcaggctcagctggagctcctggccagacgggtcaccctcctggaagccatcatctggccaggtaatggcagggcgggcaggcaggggcagcctcttccaggaagggcctggaaaaggcctgggcatgcagaaggacatgcaaccaactaccggatcgtggcccccaggagccgggacgagagaggctgagggtggtggcggcccctgaggcagaccaggccaggcttcccctcctacctggactcggccagctgcctccag

SEQ ID NO: 137529 - DNA, 1137 bp, Homo sapiens
taatcccaacactttgggaggctgaggcaagatgattgcttgagcccatctggggtccccctcctgcccagggcagccccggagatggaggcctccagggtgagtgtcagactcagactcccctgtgggaatgagcagtgggttgggaatcggggaagtgggattctggctggggccagggtgggggtcaagagcagatgtggagctgccagtctgatatgctttaccccccagaccaagtcggtgcttgggggcttcccgggcccaccggccccaagggagatgccggcagtcggggcccaatggggatgagaggcccaccaggtgagtgcccgcaatgctgccccacagctcctctggccatcccctccaccaggtgggcccttccctgctctgggccaccagggcctcctggcccccctgggcccccagcccctgttgggccaccccatgcccggatctcccagcatggtgagtccccctgggatcccagcaggtggaggtgggggtggagtagccatcagcacagtgcccgctaccaaaaagacccggcggcaggaagtgagtcctgaactcccaaggccacaggcccggcccctcctccaggccctgacgtgcgtccttggcttctaggccctccagggcccatgggtaagttgagtccaggccaggggtaaagggtgaagttggtagatggcagagggaatagggtttgtggctatactctcacccatgtgtctgtccatctttccatctatgcatacatccatacattcatccctgcaggatcccttagtcccagattcctcctgtgactccctccctgccttctcagccctacatgctcaagagagtattccctccgcttcctgcagcagcaggctcagctggagctcctggccagacgggtcaccctcctggaagccatcatctggccaggtaatggcagggcgggcaggcaggggcagcctcttccaggaagggcctggaaaaggcctgggcatgcagacggacatgcaaccaactaccggatcgtggcccccaggagccgggacgagagaggctgagggtggtggcggcccctgaggcagaccaggccaggcttcccctcctacctggactcggccagctgcctcc

SEQ ID NO: 137530 - DNA, 972 bp, Homo sapiens
gaagagatgtgtcctcttgaggagccactcatcagtgtcccggggccgggccagccctgccagtctcagattacagagctgctgagtggttagcttgggaatttggaggccgaggactgtggagaggctttgcagggcctacagactccgaaatggcaggtgcgggtctatgtgggcacgcgcatttctcaagggaggtctgtgacttataaacattgaactgtgatccagaggacaggactccacagtgtgggcccaggggaccctcaacaagggctcagggaagcaaagttaggaacaatggtcaggctggtgctccttccaactcccaggagaacaacagaagtgaggacaggcccagagagggagctgtctatggtcctagaagccattctggggtccttgttagagacagcctgcgaccacagacaaacaccgccctcctccaagccccaggcagaagcagcaggctgcgagaggggaccagtgctggccaaccttgcagccccgtctcagactggggcccagagctgggggcaggcgctgctgcagggatatagagagatcttccagcagctcggtctgtggaaggaaatgcaaaagaaagaaaagaaagcgtggaatgtgccagagcagacacaagcacgggtgcaggaggccacaggaagggccccgctgcaacgatgggagggcgctatgctcaccaaggccacaaaccacgcctgggcccctgagcacagcctgaaccagccaaagcccaagccccgccaagagtactgctgggtgaaacagatgaatgacataaataaactacctggaagcaaagaggaggaagacaaggtggaaacccaggaggccttggggcctgatgtcagaacaggctcgtggtcacctccacccatgcaatgtccaaaggaagttgcacagtcagtcgcagggtcaaaggatgtggaccaacacacagaggagtga

SEQ ID NO: 137531 - DNA, 2436 bp, Homo sapiens
atggcatggccaactgttgctcaggtgagagaagcttcatttgggctaatgtttctggatgaagaacctggttcagctcggttgccattttctcctccctcaattgcccaactggagccaagtgccatcctgactccccagacacctggtgccttgatctccatcaccctactttacaaaggactttgtgtggtatctcgatcagaatgggagcctgtgaaaacaaggaggcactttattaattcttataatgacctgcttcctgcctgcaggctgaagaagagctcagagttccgacaagctaagtttgattctgtgacaagctggctctgggcattaggtccacgaggaaatgacatgtgcagcagtgtcagcctccaaaacttccacctggccttgatcaccccaggtctccagacacttgtgcgtattcagcttgggatgcaacccagctgctggcttctgaggcatctcagtaactatggagacaggaatataaacatcatctccctggaggcctttcggttttcagatgacacaaatcctcagcagctgttgtcaccatcaagaggctctatgccactgtgcctagaaaaaagtttccttctcaacagtgtagcaactcagctcaagcagagaaacacaaattgccaggtgcacggccaatcttcggtgcaatctagtggctctctggctgttagagcccttgacgagagagggattcacagcaagaagctggctcttcagaatgcaatggctcctacaggagggaacagaaccggagcctctagaaatcattgtgtgagtacagggctaggcactgtggacacagaggggcaggttagtaggctcctgggcctgccatctgaggatgttctcctcatctcactactgggtttgggggatgaggatcaaggaagctcctcgaaatattcacaatctaatgaagaaatattcattgaggaagagctctatggcctgggaggaggaaaagaaaaacaacaacaacctttgtatacaaatatgccagcccaacttggttctcttgtatttggctgcagatcaagaacaaactttcaagtggcatttcgagagaatccaggaaagcagtttcaatctggaaatttgctctccttaaatatttcaaaaacacatttagaagatgaaattgtgaaattggccttgaaaactttattttcgctttcctcaattcaaagggacaattgtggaaggaaagaactgagctgcttgccagacccagcgcactcctttttctctggacagctgctgctttgcagagggtcgtgggaggagttatttttagcacacgcagccaacagagctcagcaggcccgtggaggcgctaacatgtcccccagttcatctccttctgcaaaggtgcatttgaagcatgaaaaaataaaaaataaaaaatacgtgcggacccaaagaggtgatgatttagaagccagtgctgaaattgtaggcatcccacaggccaaagctttgtctgagatgagagaaagcctgatcctgagcctggcagtcctccagaaacagtgcatctcagagatccttgaactaacatccagtcatgcaaaacgatatcttatagtctctcgtctctccaggaggaaggtcacgcctcaaggattccttgtgaatccaggtagcatcagtgactatacttccacagacttgagaacccatgtggaggaggatgaatggagagcggaagcgagagagagacacgagtggccaggcccagccgcagccgcagcagcagccgccgcggcggcacggaggagccagacacaaagagaggggctgtttgcggggtggggtggggggttcgctatgtcggatgacgattcgagggccagcaccagctcctcctcatcttcgtcttccaaccagcaaaccgagaaagaaacaaacacccccaagaagaaggagagtaaagtcagcatgagcaaaaactccaaactcctctccaccagcgccaagagaattcagaaggagctggcggacatcactttagaccctccacctaattgcagatgctccaagttagcactttgtatacttccacgtagtttctgtgaatttacattgtgtttttctggcattccaatacctcctcgaattggtggtaatggtaatgagatgtcagttcagaagtcccaggctgctcatcatggttcacaatggaaagagatccttttcttgcaacagtggagtgttacatacctcgtccagaaaatagtggaaattgctggggaaattgctgtcacattttacagctgtccattgctggcagtctttctgagttggcacccaagcagttttggcaattttgaccttcctgcaatcacagagaagctctggacgtcagtgtggcaaaaaagatgtgatctctgctgcaggctcgattga

SEQ ID NO: 137532 - DNA, 1572 bp, Homo sapiens
aattcccgggtcgacgatttcgtgtgcgagcgtgtgtggctgggggaagccattgcctgtttaatagttgctgttgctgcacttccgcttctctcccagcgagagagagacacgagtggccaggcccagccgcagccgcagcagcagccgccgcggcggcacggaggagccagacacaaagagaggggctgtttgcggggtggggtggggggttcgctatgtcggatgacgattcgagggccagcaccagctcctcctcatcttcgtcttccaaccagcaaaccgagaaagaaacaaacacccccaagaagaaggagagtaaagtcagcatgagcaaaaactccaaactccttttcgcccagggccaagggaattcagaaggagcttggcggacatcactttagaccctccacctaattgcagtgctggtcccaaaggcgataacatctatgaatggagatcaaccattctagggcctccaggatccgtgtatgagggtggtgtattctttctcgatatcacttttacaccagaatatcccttcaagcctccaaaggttacatttcggacaagaatctatcattgtaatattaacagtcaaaggtgttatttgcttggacatattgaaagataattggagtccagcactaaccatttctaaagtcctcctttctatctgctcacttcttacagactgtaatcctgccgaccccttggtgggaagtattgccactcagtatatgaccaacagagcagaacatgacagaatggccagacagtggaccaagagatacgctacataaattggggtttcacaattcttacattatttgtctggtccacagaagagagctgcttatggttttggaagggggtcagggatgggtggggagttgggtaaagagtagggtatttctataacagatattattcagtcttatttcctaagattttgttgtaacttaaggtatcttgctacagtagacagaattggtaatagcaacttttaaaattgtcattacgttctgcaatattagctgaaatgtagtaccagaaaagaatgtaccatttggacatttcgggttcagttgcttgtagtccggtaaatttaaaacgggcttaaatttggtaccaggttaccacatatggcccatttatgtaaaagtccctctaagacctacatacttttttgtttaaaaccaaaattgggaatttgttttccctttcttgggaaggggaaccattgatatttaacaggagtttttaggaggttgtcatcctcatatatatataaaatgggacaccgtgggctattaaaacacccttataaggagatgagtagttgcgtttttatttttattatggcccattctactttggtttaaaaaaggtctgaatcaggacttgtgaaaacctgtagtgaaataccttaagctgttaactaactgtaaggccgtggaataggagttgctcagtggattggttctatgttgtggactacttaagtctgcatttgttactgtgctaataaacaatattaaaaaccacctaataaacaaaaaaaaaaaaaaa

SEQ ID NO: 137533 - DNA, 1842 bp, Homo sapiens
atggaatctactggtgaagatgttgtggacactgttgaaatgacaacaaaggatttagaatattatgtaaactttattgacaaggcagcagtaggatttgtgtggactgactccaattttgaaagaagttctaccaatgaggaagcggcggcacgtgcttccagccgccctgcacctaccctgggtcagaacgacgcagctgcgcggcaaccagagagggcggcggggtcttctgtgttggaagatgagcccgccagaggcataccctcggccttaactcgctgcaggcgctggaagaagggctctggcgtcttgttcccgaccctccgagtttttgaaaacgccaatactggaaacaggccgacagttaaggagaggcgggcgggactgaagcagagcccgagaacggggctggaggtcccagggtcccgggttggtgggggtggagcagcacttcatcgccgcgggggtgctgggactccggccgcagtgccgccgccatcatggacttcctgtgggacaagcgcacgggcctggccgccagaaagatgcctcatcctcgaaggtaccattcctcagagcgaggcagccgggggagttactgtgaacactatcggagccgaaaacaagcaacgaagaagccgttcctggtcaagtagtagtgaccggacacgacggcgccggcgagaggacagctaccatgtccggaggaggtgcagccggacatttagccgctcgtcttcgcagcacagcagccggaaagccaagagtgtagaggacgacactgagggccacctcatctaccatgtcggggactggctacaagagcgatatgaaatcgtcagcaccttaggaaaggggaccttcggccgagttgtacaatgtgttgaccatcgcaggcgtggggctcgagttgccctgaagatcattaagaatgtggagaagtataaggaagcagctcgacttgagatcaaagtgctggagaaaatcaacgagaaagaccctggcaagaacctctgtgtccagatgtttgactggttcgactaccatggccacatgtgtatctccttggagcttctgggccttagcaccttcgatttcctcaaagacaacaaccacctgccctaccccatccaccaagtgcaccacatggcctcccagctgtgccaggctgtcaagttcctccatgataacaagctgacacatacagacctcaagcctgaaaatattctgtttgtgaattcagactatgagctcacctacaacctagagaagaagcgacatgagcgcagtgtgaagagcacagctgtgcgggtgggagactttggcagtgccacctttgaccatgagcaccatagcaccattgtctccactcgccattaccgagcaccagaagtcatccttgagttgggttggtcacagccttgtgatgtgtggagtataggctgcatcatctttgagtactatgtgggcttcaccctcttccagacccatgacaacagacagcatctagccacgatggaaaggatcttgggtcctatcccttcccggatgatccgaaagacaagaaaacagaaatatttttaccggggtcgcctggattgggatgagaacacatcagctggacgctatgttcgtgagaactgcaaaccgctgcggcagtatctgacctcagaggcagaggaagaccaccagctcttcgatctgattgaaagcatgctagagtatgaaccagctcagcggctgaccttgggtgaagcccttcagcatcctttcttctcccgcctttgggctgagccacccaacaagttgtgggactccagtcaggatatcagtccgtga

SEQ ID NO: 137534 - DNA, 1248 bp, Homo sapiens
ggggatgagcccgaactagggatgtgacagagcgcgagacccagcctaaagagagcccggagccagcgtgggaggccgctgccgtcgcgcgccttggtttttctgttccttttttttttttttttttttaacttcctgcctatacacacgcagccatcagcccacaaagacatgactaccaacgcgggccccttgcacccatacgggcctcagcacctaaagactggacaactttgtacctaatggaccgccccacctgggcatatactgggctgggcctcttctctgtcacagggggtcttaggtcgtggaccacatgggctgttgttcagggtcgtgctgcgggttgtcccattggggactttgggcgggcgactgttccctgttgctgggttttgcagtgtgtggggttcattcacctggtgatcgaggggctggttccgttctctaactacgaaagaccttgctttggagaccaaagccttcttaatctcaaactctgggaaagagtatggccaaggggagacagcccgattacatcctgggggtgacaaatttcacagtgttgcattgggaaccatcacaagctttgcctgtgggggaaccattcagcctgtgggtggtgatcgcctcttctcctacagcatccccttccgcttcattcttacagcttgtggtctctgtggggccagatctatgggggatgtgttctaatttcctgaaagagcacccccgacgggattccaagcacggaaaacctgggcccacccctctcctacttcctggattttcctttgtcttccatgaaatgcccctgtggctggtgcctgcccctggaagtcccttgtgccttgatgcctgtgaaagcaccctcaactcatgccccagagcacgcctggaatgccaagggcccacaaaagcccaagagcaagaagaactgaggagtggtggccccaggctcgaacactggcccgagagggagctctctgcactgcccagaaagagtctagtcctgctcccacagtttggagggacaaagtctaattgatctgtcacactcaggctcgatgggcaggcacaagaaggggaataaaggggctgtgtgaaggcactgctgggagccattagaacacagatacaagagaagccaggaggtctatgatggtgacgatttttaaaatcaggaaataaaagatcttgactccgaaaaaaaaaaaaaaaaaaaaaaaaaaaaagtcgtatcgatgt

SEQ ID NO: 137535 - DNA, 1389 bp, Homo sapiens
atgtggagaaatttgaaacttcctagagacttgttgaatggttttgaccaaaatgctgatagtgatatggacaatgaagtccaggctgaggtggtcacagatggagatgaggaacttattgggaactggagtaaaggtcactcgtgctatattttagcaaagagattggcagcatttttcccctgccctaaagatctatggaaatttgaacttgagagagatgatttagggtatctggcggaagaaatttctagcagtgaagcattcaagagcgtgagctatgagaaagcgcacgcttggaatcctctagagtcgacctgcaggcatgcaagcttggcactggccgtcgttttacaacgtcgtgactgggaaaacccttggcgttacccaactgtaatcgccttgcagcacatccccctttcgccagctgggcgtaatagcgaagaggcccgcaccgatcgcccttcccaacagttgcgcagcctgaatggcgaatggcgcctgatgcggtattttctccttacgcatctgtgcgaaacgctggtgaaagtaaaagatgctgaagatcagttgggtgcacgagtttgtgtgctggagaggcaaatatttgacttccttggatatcagtgggcacctatcctggcaaattttgtacatattattatcgtcattcttggtttgtttggaactattcaatatagacctcgttacataacaggaatcctctctttcccaaagcaccaggagtccctttctctgaagttcacttgtctaactgaggcagaaagagacactgatgctctgttacatctggaaaatgcctgtagggagtctactgctactcagagaatccaaggcttctttctgaaggacaagaagagaaagaagcagcagccacagcagcagaaacagcagcagtgggccaaggtacagctcgggccatggcttcagagggtgcaagccccaagccttggcagcttccatggggtgttgagcctacgggtgcacagaagtaaagaattgaggttcaggaactgctgcctagatttcagaggatgtatggaaatgcctggatgtccaggtagaggtgtcctgcaggcgcagaaccctcgtggggaacctctgctagggcagtgcagaagggaaatgtgtggtggaagcccctacattgtccccactggggcactgcctagtggagctgtgagaagaaggccaccatcctccagaccccacaatggtagacccactgacagcttgcactgtgtacctggaaaagctgcagacactcaacaccagcccctgaaagcggctaggagggctgctgtaccctgcaaagccacagggtcagagctgcccaagaatgagaacccacctattgtatcagtatga

SEQ ID NO: 137536 - DNA, 735 bp, Homo sapiens
tctctccgctcaccccgactgcaacgtctggaaatccctccaaagccagcagccccggagggctcgggtccctggtatccacggcgtcgagtcttccagccggagagaaaaactcacctaggaccggacctgggcctcgccgcgctgggagctggcattcccaattcaggaccagacacggtggaggggccctacaacttgtgtgggagacaagggagatggggtgggctcatcatctcgctggcttcagaaatgaaactgcagactctccagacaagtgttacaactgctaaggcgacgcttctggagttgttcgttcctctcggtgggctcgtggcttcgctggcttcagaagtgagactacagatcttcccgcgtggtgggcatctccaaagcgccaaatgtggcttgttactccatttctctcttcccacatcaaggtctggtagaaggaaggccaaccgccccatggccgttaccgttctactcgtcctcatccgggactgcgctgaccttctggccgttaaagccgttatccactgttatcaggaccagtggcctctgcgcggttcttcccgacccgcaaacacgccgccacccaaagcctctgtgtcccggcggccacccggtcaccgaggtgtgaggagaggttccccgctgcttcaagtcggggcccgacgggttggagccgaggccccggctctgctggagctccagagcccgagtctttcttaa

SEQ ID NO: 137537 - DNA, 234 bp, Homo sapiens
aagtcagaatcaagcttgctggtagaagagcaggtcctcagagtacagagaggcttctgtagggtctatgtccatggccctatcaaccagggtatttttccactttcatacattcgaagacatctttgggaagctggagacaacagccagttctgctggaggaacctcttttcctgcatcaacctcctgaggctgctcaataaactgaccaaatggaaacattcccggaccatg

SEQ ID NO: 137538 - DNA, 270 bp, Homo sapiens
atgctgaacttgcagggcaaggaatggctggagttggaagaagatgcccaaaaggcctatataatgggactcttggaccggctagaggtggtcagtagggaacggcggctgaaggtggcccgggctgttctctacctggcccaagatggagagaagttttgccccaagagggactgtaccaacaactcacctatattcaatttaaatgatacagatgatgagatttgggactttagagctgatgagacttcactgacattttggacttga

SEQ ID NO: 137539 - DNA, 3336 bp, Homo sapiens; identical to SEQ ID NO: 126146

SEQ ID NO: 137540 - DNA, 2664 bp, Homo sapiens
atggaggaccccgccgcgcctgggaccgggggcccgcccgcaaatggcaatggcaacggcggcggcaaagggaagcaggcggcgcccaagggccgcgaagcgttccgaagccagcggcgggagtcagaggtgaggagcccggaaagcttcggctggggcccggagacgcccgccggcgggaagcggcggctgaggactccttttacctgccagtacatcccctattaccacagtacccagggctctgtggactgtcccactctggagtttgagtatggagatgcagatgggcatgcagccgagttgtcagaattgtatagttacactgagaacctggaattcaccaataacaggaggtgctttgaagaagatttcaagactcaagtgcagggcaaggaatggctggagttggaagaagatgcccaaaaggcctatataatgggactcttggaccggctagaggtggtcagtagggaacggcggctgaaggtggcccgggctgttctctacctggcccaaggtacttttggggaatgtgattcagaggtcgatgtgctacactggtccaggtacaactgcttcctgctgtatcagatggggaccttctccaccttcctggagctactccacatggaaattgacaacagccaggcctgtagcagtgcccttcggaaaccagctgtctccatagctgatagcacagagctcagggtgctgctgagtgttatgtacctaatggtggaaaatattcgcctggagcgagagacagacccctgtgggtggagaacagcccgggagaccttccgcactgaattaagcttctccatgcataatgaggagccttttgcccttttactcttctccatggttaccaagttctgcagtggcctggctcctcacttccccataaagaaggtcctgctcctgctctggaaggtggtcatgtttaccctcggtggatttgagcatctgcagactctcaaagtacagaagcgggcagaattgggcctgcctccactggctgaagacagtatccaggtggtgaagagcatgcgtgctgcctccccgccctcttacactcttgacctgggagagtctcagctggcacccccaccctccaagctgcgaggccgccgtggctctcgaaggcaactcctcactaagcaggacagcctggacatctacaatgaaagggatctcttcaagactgaggagcccgccacagaggaggaagaggagtctgctggtgatggagaacgaaccttggatggagagctagacctgctagagcaggaccctctggtgccacctccaccctcacaggcacccctctctgctgagcgggtggcttttcccaagggcctgccctgggccccaaaggtcagacagaaggacattgagcacttcttggagatgagcaggaacaagttcatcggattcaccctggggcaggacacagatacattggttggattacccaggcccatccatgagagtgtgaagaccctaaagcagcacaagtatatctccatcgcagatgtgcagatcaagaatgaagaggagctggagaagtgccctatgtctttgggggaagaggtggtaccagagacgccatgtgaaatcctctaccagggaatgctgtacagccttccgcagtatatgctcagaactctggatctggagggtgacaccagtgccagcgactggctgcccagcatcactgttctccagagcatgaagctgggcatcgatgtgaacaggcacaaggagattattgtaaagagtatctctaccctgcttctgctactcctcaaacacttcaaactcaaccatatctaccagaagtcagaatcaagcttgctggtagaagagcaggtcctcagagtacagagaggcttctgtagggtctatgtccatggccctatcaaccagggtatttttccactttcatacattcgaagacatctttggatacagccaattcctgctgttgccatttacctaaagcctgtccttatctctgcatcttacagcatctcagtcctggattatccttgctgtaccatccaggatttgccggagcttactactgaaagtctggaagctggagacaacagccagttctgctggaggaacctcttttcctgcatcaacctcctgaggctgctcaataaactgaccaaatggaaacattcccggaccatgatgctggtagtgtttaaatcggcaccaatcttaaagcgggccctcaaggtcaaacaggccatgctgcaactttatgtcctaaagctactaaagttacagaccaagtacctggggcgccaatggaggaaaagcaacatgaaaaccatgtcagccatttaccagaaagtgcgtcaccgcatgaacgatgactgggcttacgggaatgacatcgatgccagaccatgggacttccaagcagaagaatgtaccttgagggccaacattgaggcttttaacagccgtcgctatgacagaccccaggactctgagttttcacctgtggataactgcttgcagagcgtactggggcagaggttggatctgcctgaagatttccactattcatatgagctctggctcgagagagagatcaatgctaaggctttcttccgtgcaaaggctgaagatccatttggttga

SEQ ID NO: 137541 - DNA, 2526 bp, Homo sapiens
tttcgtcgctgaccagcagcatggaggaccccgccgctcctgggaccgggggcccgcccgcaaatggcaatggcaacgtgtggcggcaaagggaagcaggcggcgcccaagggccgcgaagcgttccgaagccagcggcgggagtcagagggctctgtggactgtcccactctggagtttgagtatggagatgcagatgggcatgcagccgagttgtcagaattgtatagttacactgagaacctggaattcaccaataacaggaggtgctttgaagaagatttcaagactcaagtgcagggcaaggaatggctggagttggaagaagatgcccaaaaggcctatataatgggactcttggaccggctagaggtggtcagtagggaacggcggctgaaggcggcccgggctgttctctacctggcccaaggtacttttggggaatgtgattcagaggtcgatgtgctacactggtccaggtacaactgcttcctgctgtatcagatggggaccttctccaccttcctggagctactccacatggaaattgacaacagccaggcctgtagcagtgcccttcggaaaccagctgtctccatagctgatagcacagagctcagggtgctgctgagtgttatgtacctaatggtggaaaatattcgcctggagcgagagacagacccctgtgggtggagaacagcccgggagaccttccgcactgaattaagcttctccatgcataatgaggagccttttgcccttttactcttctccatggttaccaagttctgcagtggcctggctcctcacttccccataaagaaggtcctgctcctgctctggaaggtggtcatgtttaccctcggtggatttgagcatctgcagactctcaaagtacagaagcgggcagaattgggcctgcctccactggctgaagacagtatccaggtggtgaagagcatgcgtgctgcctccccgccctcttacactcttgacctgggagagtctcagctggcacccccaccctccaagctgcgaggccgccgtggctctcgaaggcaactcctcactaagcaggacagcctggacatctacaatgaaagggatctcttcaagactgaggagcccgccacagaggaggaagaggagtctgctggtgatggagaacgaaccttggatggagagctagacctgctagagcaggaccctctggtgccacctccaccctcacaggcacccctctctgctgagcgggtggcttttcccaagggcctgccctgggccccaaaggtcagacagaaggacattgagcacttcttggagatgagcaggaacaagttcatcggattcaccctggggcaggacacagatacattggttggattacccaggcccatccatgagagtgtgaagaccctaaagcagcacaagtatatctccatcgcagatgtgcagatcaagaatgaagaggagctggagaagtgccctatgtctttgggggaagaggtggtaccagagacgccatgtgaaatcctctaccagggaatgctgtacagccttccgcagtatatgatcgctctgcttaagattctgctggctgcagctcccacctctaaggctaagacagactctatcaatatcctggcagatgtcctacctgaggagatgcccatcactgttctccagagcatgaagctgggcatcgatgtgaacaggcacaaggagattattgtaaagagtatctctaccctgcttctgctactcctcaaacacttcaaactcaaccatatctaccagtttgaatatgtatcgcaacatttggtatttgccaactgcatccccttgatcctgaagttcttcaatcaaaatatcttgtcatacatcactgccaaaaacagcatctcagtcctggattatccttgctgtaccatccaggatttgccggagcttactactgaaagtctggaagctggagacaacagccagttctgctggaggaacctcttttcctgcatcaacctcctgaggctgctcaataaactgaccaaatggaaacattcccggaccatgatgctggtagtgtttaaatcggcaccaatcttaaagcgggccctcaaggtcaaacaggccatgctgcaactttatgtcctaaagctactaaagttacagaccaagtacctggggcgccaatggaggaaaagcaacatgaaaaccatgtcagccatttaccagaaagtgcgtcaccgcatgaacgatgactgggcttacgggaatgacatcgatgccagaccatgggacttccaagcagaagaatgtaccttgagggccaacattgaggcttttaacagccgtcgctatgacagaccccaggactctgagttttcacctgtggataactgcttgcagagcgtactggggcagaggttggatctgcctgaagatttccactattcatatgagctctggctcgagagagaggtgttttcacagcccatctgttgggaggagctgctccagaatcactga

SEQ ID NO: 137542 - DNA, 433 bp, Homo sapiens
  misc_feature (1)...(433): n = a,t,c or g
tttcgtgcgaggcgggcgggaaggagccagcagcggactcggccccggggcccagcgctgcattccgcctcatggtgactcggcgggagccggccgtgaagctgcagtatgcggtgagcggcctggaaccgctggcttggtccgaggaccaccgcgtgtctgtgtccacggcccgcagcatcgctgtgctggagctcatctgcgacgtgcacaacccgggccaggacctggttatccaccgcacctcggtgcccgcaccgctcaacagctgtctcctcaaagttggctcaaaaacagaagttgctgagtgcaaggagaaattcgccgcctccaaggaccccacggtgctgattggacatatctcaaagaagatgaacaaacagactttccctgagcactgtagtttgtgtaaagagatcttgccattcacagn

SEQ ID NO: 137543 - DNA, 2631 bp, Homo sapiens
gagagaagatgaacacggccgaccaggcccgggtggggcccgcggacgacgggcctgcgccgtctggggaggaggagggagaggggggcggcgaggcgggcgggaaggagccagcagcggacgcggccccggggcccagcgctgcattccgcctcatggtgactcggcgggagccggccgtgaagctgcagtatgcggtgagcggcctggaaccgctggcttggtccgaggaccaccgcgtgtctgtgtccacggcccgcagcatcgctgtgctggagctcatctgcgacgtgcacaacccgggccaggacctggttatccaccgcacctcggtgcccgcaccgctcaacagctgtctcctcaaagttggctcaaaaacagaagttgctgagtgcaaggagaaattcgccgcctccaaggaccccacggtcagtcagactttcatgttggatagggtgttcaaccctgaggggaaggctttaccaccaatgagaggattcaagtacaccagctggtctcccatgggttgcgatgctaatggcaggtgcctcttggcagcactgaccatggacaatcgcctgaccatccaggcaaatctcaacagactgcagtgggtccagctggttgacctgactgagatctatggagaacgtctttatgagaccagttacaggctctctaaaaatgaggccccggaaggaaatctcggggattttgctgagtttcagaggagacacagcatgcagaccccagtcagaatggagtggtcgggcatctgtaccacccagcaggtcaagcataacaacgaaagccgggacgttggcagtgtgctcctggctgtcctctttgaaaacggtaatatcgccgtgtggcagtttcagctgccgtttgtaggaaaagaatccatctcttcatgcaacacaattgagtcaggaatcacctctcccagtgtattgttttggtgggaatatgagcacaataatcgaaaaatgagtggccttattgtggggagtgcttttggacccataaaaattcttcctgtcaatctcaaagcagtcaaaggctatttcactttaaggcagcctgttatcttgtggaaagaaatggaccagttacctgtgcacagtatcaaatgtgtgccactttatcatccttaccagaagtgtagttgcagcttagtagtggctgcaagaggctcttatgtattttggcgtcttcttctgatctccaaagcagggctgaatcttcacaattcccatgtcacaggccttcactcactgccaattgtctccatgactgcagacaaacagaatggaacagtctatacttgctccagtgacggaaaggtgaggcaggtgattccgattttcacagatgttgcattgaagtttgaacaccagttgattaaactctcagatgtgtttggctcagtgaggactcacgggatagcagtgaagccctgcggtgcatacctggccatcatcaccactgagggcatgatcaacggcctccaccctgttaacaaaaactaccaggtccaatttgttactctcaaaacctttgaagaagcagctgctcagctcctggaatcttcagttcaaaacctttttaagcaggtagatttaatagacctagtacgctggaagattttaaaagataaacatatccctcaatttttacaagaagctttggaaaaaaagattgaaagcagtggagtcacctatttttggcgttttaagcttttcctcctgaggattttatatcagtcaatgcagaaaaccccttcagaagccttgtggaaacccacccatgaggactcaaaaatcttactagtggattcgcctggggatgggcaatgctgacgatgaacagcaggaagaaggcacttcttccaaacaggtggtgaagcaaggcctgcaggagaggagcaaggaaggagatgtagaggagcccactgattgactcgctccccacgactgggagatgctgggaggccgtgagccaatgggaaggagaaactcctggggaaattccaaggggaaaattcgaagctgttgggagatgcgcttgaccagggaacacatgaagcgagtcttaagaaaagtgtatctgcacacctggatcacagaaaacactatcatccccacccgcggactctgtaactttttaatgtgtgatgaagagtatgatgacagaactgcacgggtgctgattggacatatctcaaagaagatgaacaaacagactttccctgagcactgtagtttgtgtaaagagatcttgccattcacagatcgcaaacagggagtctgttccaatggccacatttggctccgcgtttctgagattaagatggaagatattttgtgtgttctgacaagagatgattgttttaaagggaaacgatggggagcccagcgagtgggctacggtccattctggaagcctgccagacagcagcaggctccccagaaaggaggtccaggccagaatgagtctggaggcagtgccacacgctcagccccggtggtccctgtccagattctcagcaaggacggctgcctagacctgcctatcccagacagcatggaagaaataagtatctctgtgtctcctttcagacacagttag

SEQ ID NO: 137544 - DNA, 1449 bp, Homo sapiens
atgatgatagaagaagaactaagccacagtgtccaaaggtttaaggcaagtttgactgatattacaaaggatccagactttaatgaaatctatgatgaagacgtgaatgaagatccaacatatgatcccaacagccctgaagaaacagctgtatttatgaaatatgctgaaaatattatgctaaagttaacattcagtaccacacaaattcaacagtatgaaaatgtctttatatttgaaacaggctattggcttactaatgctataaaatataatcaggattatcttgatatctgtacctaccagagactacagcaaagattatatcttcaaaaaaagattattcaaaaacactttgagaagaaaaaagatatcagaagagggataggatacctaaagttaatatgttttctgattccatttctactgagtttaaagaagaaaatgaaagttccatatttaagtagtctgcttcagcctttttcagaaaaaatacgagattgtgctgctaatacatttatagaagattcaggatataaagaatattactcaataccagtcatggaatttcatggaaaaagctactatgtgatctattttgaactagaaactttctatcagcaactatataagacacagtggtggggagccataaatgaaatagtgaacaatctgagactgaaaagacttccactgacagatgctcaattacatgaacaatttaagaaaaagcttggtttcaaaagagctatgaaatgcaagagtattccatttggtatgaagtccgctgttgaaagagggttgtctgcagttttccacacatttagccgtaaaacctcaagctcaacaatcaatgtttcagatgaagcaggttatactatttttcatcatgctgccctgcacaacagagtttctattatatgtcaactgtgcaatgctaacttcaaggtcaaccagaggcgctttgttacgttcagccaagaggaggagcacagcaaacctgagatgacctcagagagggagcccgacctcattcttcctcctccaatctcctgccagagctatccattggcagatactgacaaggagccagaggacacaggttgctttttctgcaggtgcaggagagccagggtggtaaaggagccaacttcactttggagctcttgtgcagggctgaaacaggatgtggtgagtgtggtagggtgcaaatttgaagatgcactgactctcaggtcctgcagtccaacacctctacaccttgctgcacaggcttgctcattagaaacaacagtttgtctactgtgttccaaagctgattacacgctttctgaaaaaagaggctggatgccgattcactttgccgctttctatgacaacgtttgcatcattattgctctctgtaggaaggatcctagtttgctagaagctgaggcaacagctgagtaa

SEQ ID NO: 137545 - DNA, 893 bp, Homo sapiens
taatatggcgaagacctacgattacctgttcaagctgctgctgatcggggactcgggggtggggaagacctgtgtccttgttccgcttctccgaaggacgccttcaactccacttttatcttcaccataagaattgactttaaaattaggaccatagagctcgatggcaagagaattaaactgcagatatgggacacagccggtcaagaacggtttcggacgatcacaacggcctactacaggggtgcaatgggcatcatgctggtctacgacatcaccaacgagaagtccttcgacaacatccggaactggattcgcaacactgaggagcacgcctctgcagacgtcgaaaagatgatacttgggaacaagtgtgatgtgaatgacaagagacaagtttccaagggatccgggagaataagctggccctcgactatggaatcaagttcatggagaccagcgcgaaggccaacatcaatgtggaaaatgcatttttcactctcgccagagatatcaaagcaaaaatggacaaaaaattggatggcaacagccccccaggggagcaaccagggagtcaaaatcacaccggaccagcagaagaggagcagctttttccgatgtgttcttctgtgaggaacaccgccttactttgagcctcgctcagcccagctgactgtgcctgttttgagtgagcccctcactcagccggggccctcccacctccaacgccccgcccacgccgcggccaccgggcccccggccaccagaatgcaattgagaaatcgtttattttagtaactgtctgatctttttcaactttggagatggaataagttaaaaatttgctatttttcctgtaacatctgctgaacgggcccacccacacgtgtatt

SEQ ID NO: 137546 - DNA, 1019 bp, Homo sapiens
atggtgttttaccatgttggccaggctggtctggaactcctgacctcaggcccccactgccccgactcgcaggccgcagacaaggctgagagcgctaccttgctttcccgcgctcgcctcggtgcctactgcgcctgcgcgagcttggagaggcgctggccgcacttcccgtcggggagagagtgtaatatggcgaagacctacgattacctgttcaagctgctgctgaatcggggactcgggggtggggaagacctgtgtcctgttccgcttctccgaggacgccttcaactccacttttatctccaccataggaattgactttaaaattaggaccatagagctcgatggcaagagaattaaacctgcagatatgggacacagccggtcaggaacggtttcggaccgatcacaaccggcctacctacaggggtgcaatgggcatcaatgcctggtctacgacatcaccaacgaagaagtccttccgacaacatccggaacttggattccgcaacattgaggagcacgcctctgcagaccgtcgaaaaagatgatactcgggaacaagtgtgatgtgaatgacaagagacaagtttccaaggaacggggagaaaagctggccctcgactaatggaatcaagttcatggagaccagcgcgaaggccaacatcaatgtggaaaatgcatttttcactctcgccagagatatcaaagcaaaaatggacaaaaaattgggcccagccagaccccatgggacattgctgggaaagggggaagagtttgcaggtgtggctggggcatcagcatcaggcagtgccagcctggggacgctgcccaagcagacaaggccgtgcccggtgaatccccaggctagcagggagcacacggccttttccattccactcaagggccagaaagacaacatggaaggcaacagcccccaggggagcaaccagggagtcaaaatcacaccggaccagcagaagaggagcagctttttccgatgtgttcttctgtga

SEQ ID NO: 137547 - DNA, 400 bp, Homo sapiens
gggaaggtggcgagcctgaggcgaacaatggcggagctgttcgataccgatgaagcggagttgcagcgcctgggggccgccgagcagcagaaggggcagtttactgcacaggtgcggggacggggagggtgaagggaaaggaagtttcaccttccttggtggtcctgggcacgctcggaggtctgtacactggcggctcactggtgctcgatcccggctgcatcccattcccctcacgaaagacaaagttatggctctcctgtccctggtgaccggtagtgctcaagtgccaggtatataagcgtagcgtggagaaaagaaaaggtgtaaagcagggaagatttgggcgacgcaagggtacgggagactatttagccggcgacatgactgggctggcatt

SEQ ID NO: 137548 - DNA, 1395 bp, Homo sapiens
atgtcccggattccactggggaaggtcctcctgaggaatgtcatccggcacacagatgctcacaataaggtgggagattcaggaggaatcagatatgtggaaaataagagaactggaaaaacagatggaagatgcttaccgggggaccaaaaggaaaatgctacccagcagttcaaggatgccttgcagcagagattgactcagcaggacacatctgttcttcagctcaaacaagagctactgagggcaaatatggacaaagatgagctgcacaaccagaatgtggatctgcagaggaagctagatgagaggaaccggctcttgggagaatataaaaaagagctggggcagaaggatcgccttcttcagcagcaccaggccaagttagaagaagcactccggaaactctctgatgtcagttaccaccagaccagcgacctgcagcttgttcgagatgctctccgcagcctgcgcaacagcttcagtggccacgatcctcagcaccacactattgacagcttggagcagggcatttctagcctcatggagcgcctgcatgttatggagacgcagaagaaacaagaaagaaaggttcgggtcaagtcacccagaactcaagtaggtagtgaataccgggagtcctggccccctaactcaaggtgggagcgagtggggagcattctagggacagtgaacggggagaaaacagaactgctatgtggattagcctcatcaggactgcgacttccagagggagctctctttctgattattccctcaactcgtcagctcacagcaagtgaaatataccttcggagatctcccacccggcagatgagtcctcacttccatccccttccctggctggaggctacgctaagcacctcagggtgggaagacccctcacctcggcctcctagggcaccgcaaacggcactcagcctccagagaaccgccatctcgttcctgagggctcaaggtcatccaccaacccggaaccacttaggcgacaattcccacccacgacgacgaaagaaaacagggaagaggaaatgctgggtgaaccggaagtcgagaggcggtgcacacccgtcgcgcatgcgcaaacacagctgtcggaaggtggcgagcctgaggcgaacaatggcggagctgggcgaagccgatgaagcggagttgcagcgcctggtggccgccgagcagcagaaggcgcagtttactgcacaggtgcatcacttcatggagttatgttgggataaatgtgtggagaagccagggaatcgcctagactctcgcactgaaaattgtctctccagctgtgtagaccgcttcattgacaccactcttgccatcaccagtcggtttgcccagattgtacagaaaggagggcagtag

SEQ ID NO: 137549 - DNA, 1394 bp, Homo sapiens
  misc_feature (1)...(1394): n = a,t,c or g
aaggtggcgagcctgaggcgaacaatggcggagctgggcgaagccgatgaagcggagttgcagcgcctggtggccgccgagcatgcacaaggcgcagtttactgcacaggccacgtgcccgtagaaaagatactcatccactgtgggttttggattagccgtcaccccactgcctcactggattgtgaggatcatatgcgacaatgtatttgaaaacgactagaacattatcggaggaaggtggactctgaagtagtcgctgtagactatgggatgtaggaacaagggttttggaagccctttcgggacatggtttctaacgcggccttgacttctttgctggctacattgaccttggganttaccttaattcacgcctctttaaatggggaggtgatgacagcttatcctttgaggacccttagagagaactgatttccttagtaccccagcctcacaaatagtaagctcttggtgcatcaccttcatggagttatgtttgggataaatgtgtggagaagccccagggaatcgccctagactctcgcactgaaaattgtctctcccagctgtggtagaccgcttcattgacacccactcttgccatcaccagtcggtttgcccagattgtacagaaaggagggcagtaggccatcccccaggaggaatgacagaagcaagggacttgttacttaagcagatttaagggtcagtgggggaagggctatcaacccattgttcagatcagcatcaggcttgttatcaagtcttgtggggtgctaaaaaagtaaaaagatgaaatgttcaaagagtgaaatttatttatttggaattcagaaattccaggttgtatgacatcagttactcaataagtgtgaattctccaactcttcttttaatcccattttagaatttaatatagagatctctgattggcaggaacactagaaataaatgttccatggccagtagtgcaaatggggggattgtaggttttgaaaaaccaccctaagccatattaagggggttgggaaggacccatcgaagcctaaggcataggaagaaaatttggggggttaaggaaagatgaaggaaccaaaaaccagctttatttgctttatacatgaccaagaaaaggaaaacatggcaaaaaaaaaaaaaaaaaaaaggcaagatgtgtattccttggcgaaagaacaagcctgctaacttggggaggaagggaaggtcaggacccaaataggagccaatttcctggagatggcctgttctactgggcacattttcctgagtctgtgcttaaaacctttcaggtactttcagggcacagaaacaatgcatgctaaaaaatatatggccaaagctccttccaacaaagatttaacttgctccag

SEQ ID NO: 137550 - DNA, 397 bp, Homo sapiens
tccgtaagcaggctccaaggtgccaccaccaagcccagaagtatctttcccactttgcagatttcctacagacccagtattctctcttccatgggttgagtttctaaaatcacatgactgtatttttcttttaatacagaaaagcataataaaggcataaaagcccatgcccctctgcagagcaccctgttgacattttctgaaagtaagtcatctatgcacctgggaagaaagcacagaggactcagaaaggccaaaaacaaaaacaaaaaagccccacctcagcccctgcccctctcccggagaagccggagttgtcagcccatgcagcagagttggtcaggagctcaagttcacatcccccaaccgccacatactacctgtatcacctgggcag

SEQ ID NO: 137551 - DNA, 460 bp, Homo sapiens
ccggctcgaacagaggcccgggtttccacgggagacagcagagccacggtgtagcaggcatccagctctcccccgatcagttccgtgacttgtcggaaggccctccctcccggtcagacgaagaaaggactggtggcctctggggatcctgagcctgtctccatgggaaccagctcacccaccccctctctggcaccagaacattcttccagagcttcactggagccttcctcttcagcatgaccgtccctggccacctgatccagagctggcggctcccaggcatagcccatccctgctgcggctctgcactgccccagtcctcacctgcatgcaggggactattcacatgctgaccgtctgtccatctcccgtaagaacgtcggctccttccacgtctgctgggcgtggaggatccctcacagcctccccgacctcagagccatgagagacttgcaag

SEQ ID NO: 137552 - DNA, 1092 bp, Homo sapiens
atgggctatgcctgggagccgccagctctggatcaggtggccagggacggtcatgctgaagaggaaggctccagtgaagctctggaagaatgttctggtgccttcctggggaccctcatggcccttggtgagcccacattgaaggagaagaaccaagaggcggcagagaatctagattcaggctgcagaaagtcttgctactgcagaggtcagaggaagaaagtactggtggcctctggggatccagaaaggactggtggcctccaggtgtccaagagtcttctcttcaacgaacatgaaaagcataataaaggcataaaagcccatgcccctctgcagagcaccctgttgacattttctgaaaagctggaagagggcaagcagagaacgcccccgcctccaggccccgagcactgtgagctgtctgcctgcacagggctgcctgaccccaccctcctgaccacgtccccactcctggggacggttcccggcctccacggcatcccggggaaggcaacagagatggactggagggcacgggaggacacgcattcactgaccgtccagcccagcaaagcaagaaaccgtcaaaaactaaaaattccatttgtaaacaagatcgaattatttgattgtgaaaccaggaatgggaacaatcccagtccctacttcctggctgttgtgagggtcggaaatcattcacgtgcagccctctgggagcccgtgtccctgacagacagtggtgctccaggtggagcacgaggcaccgctggcgctgacaggcgatgcatgggcggtcacctggggtcactgtcagagcatctggactacgaaatgaaggggatgggccacttggcagtgtccctacgcaagccagagctacaggagcacctgggcatagcgccacccccagccctgcctggcgagcctggagactccagcagcaaggcttcatgctcccagacgctgcaggtccccctactccgccctggtcagggccctccccaccgacatcctggtaacttagacattgcaagccacagctgccgcagtgtgccagaaaacgtccctccaaagacacaggatttatga

SEQ ID NO: 137553 - DNA, 809 bp, Homo sapiens
atgggacgcccccgacctcgtgcggccaagacgtggatgttcctgctcttgctggggggagcctgggcaggacactccagggcacaggaggacaaggtgctggggggtcatgagtgccaaccccattcgcagccttggcaggcggccttgttccagggccagcaactactctgtggcggtgtccttgtaggtggcaactgggtccttacagctgcccactgtaaaaaaccgaaatacacagtacgcctgggagaccacagcctacagaataaagatggcccagagcaagaaatacctgtggttcagtccatcccacacccctgctacaacagcagcgatgtggaggaccacaaccatgatctgatgcttcttcaactgcgtgaccaggcatccctggggtccaaagtgaagcccatcagcctggcagatcattgcacccagcctggccagaagtgcaccgtctcaggctggggcactgtcaccagtccccgagagaattttcctgacactctcaactgtgcagaagtaaaaatctttccccagaagaagtgtgaggatgcttacccggggcagatcacagatggcatggtctgtgcaggcagcagcaaaggggctgacacgtgccagggcgattctggaggccccctggtgtgtgatggtgcactccagggcatcacatcctggggctcagacccctgtgggaggtccgacaaacctggcgtctataccaacatctgccgctacctggactggatcaagaagatcataggcagcaagggctgattctaggataagcactagatctccct

SEQ ID NO: 137554 - DNA, 906 bp, Homo sapiens
tcaacacgtatgccagcattgtttataggtcacggtagtccgatgaacgtgatggaagataatttctatacccgcagctggcagaagttggggatgacattgccacgcccgcaagcgattgtggtggtttcggctcactggtttaccagtggaacaggagtgaccgcgatggagacgccgcccacgattcatgactctggtggcttcccgcagacgctgtacgatacgcattatcctgctccgggtacgcctgcgcggcacagcgtctggatgagcgaccagtttcgccagttcatccatccgaatctgtaataactgctttaccttgctttcgttgtcgagaatcaggcgcagcatcgggcggagctgctcctgcatcgtggtggacgggtcaacctcttcagtcaaatgtgcaatctcctgcaccgcattcacatacgccatttcgctggcgatgagttcgtcccattgttcttccgttgccaggcgtaacatgagctggcttttttcgacgagttgttgccaggcgaaatataaatgcggtgcatggttcatcagactgggtcctgaatcaaagaaggggagagtaacgactctttccaggcatcggcaatattgcgcattaatgcttccacttcttcgactgcggagacatcgttgcgtaaattggcttgcagcaagcgcctgaccatatagccgcagtccgttctcaatgatgttgatcgcttttgacaaagagacgcctttgccttgctgattgttgtcctgcataaacaggctcgctctaaccagtgcgctcagcactccatcaaatagcatggtgaccagctgctgctggctggcgctcattacggcgctttcgacgccaatttgtgcataggcctgggtgccttttgccgcgtacat

SEQ ID NO: 137555 - DNA, 2274 bp, Homo sapiens
atgctgacattcattgagctccttattggggttgtggttattgtgggtgtagctcgctacatcattaaagggtattccggcactgcccagcttcaacaagctacagcagcacggatatcgagaatacggaaaaatatactaatgaccgggggcgaatccgtatcatcgccctgtgctctaaacgagcgttttaagccggggctaatcttgctcgataactatcttcctgacggtagagggattaatttactgcatgaactggtgcaggcgcattatcccggcgacgtggtgtttaccactgcagccagcgatatggaaacggtgtctgaagccgtacgttgtggtgtatttgattatctcattaagcccattgcctatgaacggctggggcaaacgctaacccgtttccgccagcgtaaacatatgctggaaagtattgatagcgccagccagaagcaaattgatgagatgtttaatgcttatgctcgcggtgaacctaaggacgagctaccgaccggcattgaccccttgacgctaaacgcggtgcgaaaactgtttaaagagcctggtgtgcaacatacggcagaaacggtggcgcaggcactgaccatcagccgcaccactgccaggcgttatcttgaatattgcgccagccgccatctgattattgctgaaattgttcacggcaaagttggcagaccacaacgcatataccacatgggtgacatgataaagccggaggaaacttgcctccggcattactatttacttgcctgtgaccgctgctgccgttcctggcaccatcagctctgtagcaacgattacaatcaccaaaccaacaagcaccggtaccggagtgcgttttacgacttcaacagcgagatcttcgccatccggccaccgcaacgactacgccagaacggcgaaagggtcccgtcaaggtttgacgcctgcaccatcgggatagtcaaaagagtgaccgcgatggagacgccgcccacgattcatgactttggtggcttcccgcaggcgctgtacgatacgcattatcctgctccgggttcgcctgcgctggcacagcgtctggttgagctgttagcgccgatcccggtgacgctggataaagaagcctggggctttgaccacggctcgtggggcgtgctgattaagatgtatcctgacgctgatatcccgatggtgcagttgagtatcgacagtagcaaacctgccgcctggcatttcgaaatggggcgcaaactggcagcgctgcgagatgaaggaataatgttggtcgccagcggtaacgtggtgcataacctgcgcacagcgaagtggcacggtgatagttcaccgtatccgggggcgacgtcgtttaatgagtatgtgaaagcgaatctgacgtggcgagggccagtggaacaacatcctctggtgaattacctcgaccatgagaggggcacgttatcgaacccaacggccagacattatttgccggtgttgtatgtgttacgggctatcttatgggcaaggaccccattacccattccgggacgtaccacagtatctaaagtcaagatgaagaaaagaatcttaagagccatgagacaaaagcagcaggtgctgccgttgctggtcggcttagggctggatgaactcagcatgagcgcaccatcaattccggcggcgaaagctcggatggcgcaacttgatagccgtgagtgccgcaagttgctcaaccaggcaatggcctgccgtacttcgctggaagtagaacacctgctggcgcaattccgcatgacccaacaagacgcaccgctggtcaccgccgagtgcatcacactggaaagcgactggcgcagcaaagaagaagtgctcaaaggcatgaccgataacctgctgctggcgggccgctgccgctatccgcgtaaactggaagccgacttgtgggcgcgcgaggccgttttctctaccggtctgggctttagttttgccattccacacagcaaatcagaacacattgagcaatccaccatcagcgtggcgcgtctgcaagcgccggtgcgctggggcgatgatgaagcgcaattcatcattatgttaaccctgaacaaacacgctgcgggcgatcagcatatgcgcattttctcgcgcctcgctcgccgcatcatgcacgaagaattccgtaacgcgctggttaacgccgcctctgccgacgctatcgccagcctgctgaacatgaactggactgtaaaggaacatcatgaactgttctga

SEQ ID NO: 137556 - DNA, 2607 bp, Homo sapiens
atggacgcagagtggggaataacagaccttgtagactcagaagtgtgggagattgggaaggaaaatgtgggctttacccaggaaaaatgcggcaatttcgacgccaaacgttatctcggtacctggtatgagattgcccgttttgatcaccgctttgaacgtggactggaaaaagtcaccgcaacatacagcctgcgtgatgacggcggcctgaatgtcattaataaaggctataaccctgacagaggaatgtggcagcagagtgaagggaaagcgtactttaccggcgcaccaactcgcgctgcgctgaaagtgtcattctttggtcctttctatggcggttataacgttattgcactcgatcgggaataccgccatgcgctggtttgcggcccggaccgcgactacctgtggatactctcccgcacgccaaccatttctgacgaagtgaaacaggagatgctggcagtcgcgacccgggaagggtttgatgtcagtaaatttatttgggcaagtagcgccatactgacaatcatcgccgtcacagtaataacactcggcgtcaaacgactaaagccgtgggtatatttcaggccaacggcccataccacttccagcagaccagcaataactaagataatccaggacatatcaggctccggagaattggggccgtccccggtgaaaagaggcgtttgcaggcagatcgtcaaaataactgatgatcatcatcattgttatccgggttcttactccgccgaacaagcgtattgtgaggatatcaaaatgacacctttagttaaggatatcatcatgtcttcaacacgtatgccagcattgtttttaggtcacggtagtccgatgaacgtgctggaagataatttgtatacccgcagctggcagaagttggggatgacattgccacgcccgcaagcgattgtggtggtttcggctcactggtttacccgtggaacaggagtgaccgcgatggagacgccgcccacgattcatgactttggtggcttcccgcaggcgctgtacgatacgcattatcctgctccgggttcgcctgcgctggcacagcgtctggttgagctgttagcgccgatcccggtgacgctggataaagaagcctggggctttgaccacggctcgtggggcgtgctgattaagatgtatcctgacgctgatatcccgatgttgaacaagaacattatgaattcagttggagcgcccccgtttttcggtttggggacaccgtctaccgtttacgggacacttgccgggcaaaaaccttggcgtccccttcgcgtagcgccagtacaggaatataacgtgtgtcccatcgattacgcttttggccttctctttagggtcagactcaccgtgccccgattaacgttggacaggaaccgtggtcttccggcgagcgggcttttcacccgctttatcgttacttatgtcagcattcgcacttctgatacctccagcatgcctcacagcacaccttcgcaggcttacagaacgctcccctacccaacaacgcataagcgtcgctgccgcagcttcggtgcatggtttagccccgttacatcttccgcgcaggccgactcgaccaatgaattcacgaggcgctacctaaatagctttcggggagaaccagctatctcccggtttgattggcctttcacccccagccacaagtcatccgctaatttttcaacattagtcggttcggtcctccagtatacggttccgtacgcacagggtaattacgcaaacacgagccgacagccagtaaaacggccgctcggttcgcgtaccaggacccggcagagattgaatccagtgcaagtaatcgaaaaaaagttcagagaagcgcgtctcgtattccagtacgcgggagagaagttcgttgatgtacagaccgctgtaaagcgacaaatgcgcgctgccagccttccatcggagttactcttaaagatcgtcaacgtaaccgagactgcgcagtgcgcgttcgtcgtcggcccaaccggatttcacttttacccacagttcaaggtgaacaggcgcttcgaacatttcctgcatgtctttacgcgcttcaatcccgatggttttgatcttggcccctttgttgccaatgaccatcttcttctgcccttcacgctcaacgagaatcaaaccgttgatgtcataaccaccgcgaggagaccgccccagtcaaactacccaccagacactgtccgcaacccggatcacgggtccacgttagaacatcaaacattaaagggtggtatttcaaggtcggctccatgcagactggcgtccacacttcaaagcctcccacctatcctacacatcaaggctcaatgttcagtgtcaagctatagtaaaggttcacggggtctttccgtcttgccgcgggtacactgcatcttcacagcgagttcaatttcactgagtctcgggtggagacagcctggccatcattacgccattcgtgcaggtcggaacttacccgacaaggaatttcgctaccttaggaccgttatagttacggccgccgtttaccggggcttcgatcaagagcttcgcttgcgctga

SEQ ID NO: 137557 - DNA, 1826 bp, Homo sapiens
atgtctgggctcactttccttgggtgggtcttgctgtggttgctgtggggggtggggtctccgcatcttagcacatcgttcatccagagcgtgatttctgccgagcgtgatcagatcggcatttctttaatcttttgtttgcatatttttaacacaaaatacacacttcgactcatctggtacgaccagatcaccttgcggattcaggagactgacatgctttacaaaggcgacaccctgtaccttgactggctggaagatggcattgccgaactggtatttgatgccccaggttcagttaataaactcgacactgcgaccgtcgccagcctcggcgaggccatcggcgtgctggaacagcaatcagatctaaaagggctgctgctgcgttcgaacaaagcagcctttatcgtcggtgctgatatcaccgaatttttgtccctgttcctcgttcctgaagaacagttaagtcagtggctgcactttgccaatagcgtgtttaatcgcctggaagatctgccggtgccgaccattgctgccgtcaatggctatgcgctgggcggtggctgcgaatgcgtgctggcgaccgattatcgtctggcgacgccggatctgcgcatcggtctgccggaaaccagactgggcatcatggcctggcttggcggtctgtacgtatgcacgtatgctgggcgcgacagtgcgctggaatcattgcggcggttgaacagaaacggatggacaaatcgtgttcgtggacgttatcgaggccccgtgatacgtctccatcagctcggtacccgctgcagatcgggatgcgttacgcatatgttcccgctgaaccgcagcacagatggctgtcgggaacgtccgttaagaaaatacgcgcgcatttccaacaatgggagtgcgaaacagaacgccgagttgtaccagattcaaccgggatccaactatccaattatctgtcgctggattgtgcctttcaatgttttgaccaaacgtcgctacacccgggaaaatgcgctcgaccgcgcttatgcctcctttaacgccaaccgtaacagcaacgggcaaaatagctggctggcaggtgtaggtgggaccttactggaaggccacaacctgagttatcacgtaagccagggtgatacctcgaataatgggtacacgggcagcgccacggcaaactggcaggccgcttacggtacgctggggggcgggtataactacgaccgcgatcaacatgacgttaactggcagctgtctggcggtgtggtcgggcatgaaaatggcataacgctgagccagcctttaggggataccaatgttttgattaaagcgcctggcgcaggcggtgtacgcattgaaaatcaaactggcattttaaccgactggcgcggctatgcggtgatgctgtatgccacggtttatcggtataaccgtatcgcgcttgataccaatacgatggggaattccatcgatgttgaaaaaaatattagcagcgttgtgccgacgcaaggcgcgttggttcgtgccaattttgatacccgcataggcgtgcgggcagctcatttaccggttacccaggggcggaaaaaccggtgccgttgggatcactggtacgggaaaacagtaccggaataaccagtatggtgggtgatgacgggcaagtttatttaagtggtgcgccattgtctggtgaattactggttcagtggggagacggcgcgaactcacgctgcattgcgcactatgtattgccgaagcaaagcttacagcaagccgtcactgttatttcggcagtttgcacacatcctggctcataa

SEQ ID NO: 137558 - DNA, 509 bp, Homo sapiens
cccacgcgtccgctgtgtgccagcccaagtcggaacttggatcacatcagatcctctcgagctccagcaggagaggcccttcctcgcctggcagcccctgagcggctcagcagggcaccatggcaagatcccttctcctgcccctgcagatcctactgctatccttagccttggaaactgcaggagaagaagcccagggtgacaagattattgatggcgccccatgtgcaagaggctcccacccatggcaggtggccctgctcagtggcaatcagctccactgcggaggcgtcctggtcaatgagcgctgggtgctcactgccgcccactgcaagatgaatgagtacaccgtgcacctgggcagtgatacgctggggcgacaggaaagctcaaaggatcaagccctcgaagtcattccgccaccccggctacttcacacagacccatgttaatgacctcatgctcgtgaagctcaatagccaggccaggctgtcatccatggtgaagac

SEQ ID NO: 137559 - DNA, 2421 bp, Homo sapiens
atgatgcaggcgactgttggctttgaagatggagatgcggccaccagccaagtttctccatctgtcaacaaagttcatagcagcatctacttcttagatttttttgaggaatacattgttattgcatttaaaatacttagaagagggccagacataagctgcagccaaatcataaacggcgaggactgcagcccgcactcgcagccctggcaggcggcactggtcatggaaaacgaattttctgctcgggcgtcctggtgcatccgcagtgggtgctgtcagccgcacctgtttccagaaagtacaacagacccttgctcgctaacgacctcatgctcatcaagttggacgaatccgtgtccgagtctgacaccatccggagcatcagcattgcttcgcagtgccctaccgcggggaactcttgcctcgtttctggctggggtctgctggcgaacgacccaacatcgaggactcccccctcccttggaatgtaggaatccagtcccccagctcctccttcctccagagaagcccagaacagccccagatactctcggctcctccccagtgcccaaatccagaactgggagctcaggctcctccttccttttaccggccccgccctctccatttcccagacctcaccatgggacgcccccgacctcgtgcggccaagacgtggatgttcctgctcttgctggggggagcctgggcagcccagcaggagaggcccttcctcgcctggcagcccctgagcggctcagcaggcaccatggcaagatcccttctcctgcccctgcagatcttactgctatcttagccttggaaactgcaggagaagaagtacctttccctctgacctcatgtgcgtggatgtcaagctcatctccccccggactgcacgaaggtttacaaggacttactggaaaattccatgctgtgcgctggcatccccgactccaagaaaaacgcctgcaatctgttccttcccccgactcaagaatccccggagcccggaggcctgcagcgaggtgagatcacagacatcacagaacacctgaagcacacacatacacattcatagacacagatttggacataagagctcaaacctaaattcataccctccagtgtggctctggtctgatcccaaagggagccagcgacagcgtctggacacctgagccaggccctgtccttattctgtccagcaccatccacagctcctgactcctcagaggaaaagcagtgtcctcctgtggcccagagcccgatcacttcctgacaccctcagcatttccatgttgggtccactgttcctgccagtgcccctcaccagcagggggctgcaggagggagaggctgctctctacctgttcactgctgcttccagggtctacggcaatgctggtcacgtagcaggtgcccatgcaccccacagacaaggcgatggagagaaccaggtccacatgctgacacaggtgtccacggccaggtgggccctggtagtccctgttacaagatgtggtacagatgaagctgatgctggcacagtcctcgtatctgggagactcacttgggaggacagtggagtggggcaaaccgatctttatcggacaccaggccccggcctggcaccacgcaggccacatccaccaggggacgcacgtccacagctccatggttgggacgatacacatttatagtttctgcaaagagttaggtactgtggctacacctggccagctggagatggactgggaagagtgggcaccccaggcttctttatccagcgtccccgggatcggcgtaacagctcaaccagacgctgtgccagcgcaggcgaacccggagcaggaaatgcgtatcgtacagcgcctgcgggaagccaccaaagtcatgaatcgtggcggcgtctccatcgcggtcactcctgttccacggattctaatgcaaaaatcggtgcagccgttgccaaaatcgatcaagcgacagccattctgctcactctcggcatcagtctgcataacttcccggaagtgtgccacctttgtcacggcgagcagcaacctggagctgggatttggcacgcactggccgtcgcgggccgatagatccctgaagccggtgtacgcattgaaaatcaaacggcattttaaccgactggcgcggctatgcggtgatgctgtatgccacggttatcggtataaccgtatcgcgcttgataccaatacgatggggaattcctcgatgttgaaaaaaatattagcagcgttgtgccgacgcaggcgcgttgttcgtgccaattttgatacccgcataggcgtgcgggcgctcattaccgtacccagggcggaaaaccggtgccgtttggatcactggtacgggaaaacataccggaataaccagtatggtgggtga

SEQ ID NO: 137560 - DNA, 448 bp, Homo sapiens
taccatctagacttattttaattattttttgcagttgcaagatttaatagagtgaaaacagggctcccatacaaagggaggggacccaaagagggtagccgttgctggctcgaatgcctgggtttatatcccgatcattgtccctcttgctgtgctctcaggcgatagatgactggctatttctttacctcctgtttttgcttaattagcattttagtgagctctctgattggtcgggtgtgagctaagttgcaagccccgtgtttaaaggtggacgcggtcaccttcccagctaggcttagggattcttagtcggcctaggaaatccagctagtcctgtctctcagtaccccctctcaacaggaaaacccaagtgctgctggggaggttgactgacgaccgctctacctgcttcctgctgaaatggggcatggtaggggttgtgcag

SEQ ID NO: 137561 - DNA, 1478 bp, Homo sapiens
gcctgtatcccgtgctgtttccctggcagacacacaggcgctcacgagtctctccttgccagcctgcagggcggcgacccccaaaacccagctccgggtcccaacctaggcaagaagctgcttctctgccaacagctcctcttcggcctccgtcacagccacctggaccctaccctttcgcgactgctgctgctgctgcccggacgtggaagcagcaagaggcgcttggtcaagacacactgacggtacctacagaatactggacatacggattcagaatccataaggctttatcaccttgaatcaaggatttatttgatatcatcctcggtctttacttcctatcaagtaacattgttttgaaaaatagagttaacacatttgccataagggagttttttttttttttttaaatacttcgcatactctccaatgcccaaaaatagcaaggtggtaaaaagagaattagatgatgatgttactgagtctgtcaaagaccttctttccaatgaagacgcagctgatgatgcttttaagacaagtgaactaattgttgatggccaggaagagaaagatacagatgttgaagggaagttctgaagtcgaagatgaaagaccagcttggaacagtaaactacaatacatcctggcccaagttggattttctgtaggtttaggaaatgtgtggcgatttccatacctatgtcagaagaatgggggcgttgtagaaccagaatgtgaacaaagttctgccaccacctattactggtacagggaagcactgaatatttcaagttccatttctgaaagtgggggcttaaactggaagatgaccatctgcttgttggctgcctgggtcatggtttgcttggctatgatcaaaggcattcagtcttctggaaaagttaatacatatgatagagttactatgtcagcaactgtgttagccttgcaggaacaatggcaaacctttagcccgatcaggagtggcaatgggcaccttactggatcaggagcacagcggacaccctgccggatccggaggggtggaagtcagttacgggtctgcgatggcggcaaacagcagtggtggactgtcagccaaagctcagctcgagccataacaaacacggaccagaagagtgtgcagttgcaagatttaatagagtgaaaacagagctcccatacaaagggaggtgacccagagagggtagccgttgccagctcgaatgcctgggtttaaatcccggtcattgtccctcccgctgtgctctcagacaatagatgattggctatttctttacctcctgtttttgcctaatgagcgttttagtgagctctctttactacctgattggtcgggtgtgagctaagttgcaagccctgtgtttaaaggtggatgcagtcaccttcccagctaggcttagggatttttagtcagcctaggacatccagctggtcctgtctttcaatatgtt

SEQ ID NO: 137562 - DNA, 753 bp, Homo sapiens
gcacgttgcccacatagaagtaaagcagagggcaagagaagtgagagggaggggggtcgcgttcactctggttccgggagctgattggacagccagtccagtccttcatagagcccgtcgccgctggtggcgcagttgccttaaatgtacaagttcctgtggcgtagtgagtgcagccccagcttgtctgtgatctcgcccgcattcatggcgttggggaggtcctgcttgttggcgaacaccaggaggacagcatcccggagctcgtcctcggccagcatcctcatgagctcctcacgggcctcgttcacacgctctctgtcattgctgtccacccataaagatcagggccttgtgtgttctggaagtagtggcgccacaggggccggatcttgtcctggccacccacgtcccacacagtgaagctgatgttcttgtactccacggtttccacgttgaagcctatggtgggaatggtggtcacgatctcacccagcttaagcttgtagaggatcgtggtcttccctgcagcatccaggcccaccatgaggatgcgcatttctttttttgccaaaaaggcccttgaagaggttggcgaagatgttccccatgcttgtggacaggtggaaggacactggccagggacacctcagaggctgctgctccgagccaggcgttggttttgctcccacaagatggcggctctgacggcggccacgtcaacgcctccgggcgcggggcacgccgggtaag

SEQ ID NO: 137563 - DNA, 2142 bp, Homo sapiens
atgtctgtcaagtcgctaacaaggtcatctgacccacctgagaatgtgaaactacctatctggacggtgcggcagctgcgcagctgtgcgcacggctgtccagccccaatctcacacgccgtaaccacccaggctgtgctccgagagagcgctggggccggcctctgcggcctagagtctgcgagcaggtcgttccgcaggcaggttaaagattcagcctcagcccggcccgtctgcgtccgcccccggcccggccctgtcgccgccgccgccgcgggggtcgacgtgcccttcgcgaacctcaagtcgccccgaggccagtccccagcccccgccggctccaacgtctctgcggcccacaccggcccgcgcccctcgccctcacctcagaggctgctgctccgagccaggcgttggttttgctcccacaagatggcggctctgacggcggccacgtcagcgcctccgggcgcggggcacgccgggctgcgcgggtccacgtgccccggccctgtggaaacctgtggcactcgcggggccacggcggaaggtccgaaggcgggaggcttgctgtgtccccgcactggcctcggcgccccggcggccgcagtgacgcgcgggctcatacctgggcccggagcagacgccggggagctggccgcagatgaagcaaaggaggaggtggcctggggaccccgggacccctacccaaagcctaccctctggctggtcacaccacaggacctggagcacgccacaggaattattacggctatgctgactgcatgggccctgggagaagcccccacctcccagctcagggtggccctgccctgccttctgggcctgggctggggtctggggtcattcgggaagccggtggccagtggttattttggctatttggagacaattacagttccatctgactctgttgtgtcaacaaaagcagaaacccctgacaaaggtgtttgtggtagagaacttggtttccgtggaggctggctgccagaactccagagcctggacgaaatatctatgggctgggccttgtgctccagattgcaaataaaagggcctcgaggggagagagaagctaccagggagtcggcctttgtccacgccattgcctcagccggtgtggcctttgcagtgacacgctcatgtgcagaaggcacggccgccatctgtggctgcagcagccgccaccagggctcaccaggcaagggctggaagtggggtggctgtagcgaggacatcgagtttggtgggatggtgtctcgggagttcgccgacgcccgggagaaccggccagatgcccgctcagccatgaaccgccacaacaacgaggctgggcgccaggtaggttcgccgcccgcaagggtgcttgggaaaaaggagcctcctcagcagggtgtgtgccctggttccttggggcatatggcccggtcgctggctgttgggccacagtattcctccctgggctcgcagcccatcctgtgtgccagcatcccgggcctggtccccaagcagctccgcttctgcaggaactacgtggagatcatgcccagcgtggccgagggcatcaagattggcatccaggagtgccagcaccagttccgcggccgccggtggaactgcaccaccgtccacgacagcctggccatcttcgggcccgtgctggacaaaggttattttggctatttggagacaattacagttccatctgactctgttgtgtcaacaaaagcagaaacccctgacaaaggtgtttgtggtagagaacttggtttccgtggaggctggctgccagaactccagagcctggacgaaatatctatgggctgggccttgtgctccagattgcaaataaaagctaccagggagtcggcctttgtccacgccattgcctcagccggtgtggcctttgcagtgacacgctcatgtgcagaaggcacggccgccatctgtggctgcagcagccgccaccagggctcaccaggcaagggctggaagtggggtggctgtagcgaggacatcgagtttggtgggatggtgtctcgggagttcgccgacgcccgggagaaccggccagatgcccgctcagccatgaaccgccacaacaacgaggctgggcgccag

SEQ ID NO: 137564 - DNA, 3100 bp, Homo sapiens
ctctatgggaggagaccacccggaggatgaagaggatttctacgaggaagagatggactatggagagagtgaggagccaatgggagacgacgactatgacgagtactccaaggagctgaaccagtaccgccgctccaaggacagccgaggccgagggctaagtcgaggccgtggcaggggctcccgaggtcgagggaaaggaatgggtcggggccgaggccgaggtggcagccgaggagggatgaacaagggcggaatgaacgatgacgaagacttctatgatgaggacatgggcgacggtggtggtggaagctaccggagtcgtgaccatgacaagccccaccagcagtcggacaagaaaggcaaagtcatttgcaagtacttcgtggaagggcgctgcacctggggagaccactgtaattttagccatgacatcgaactgccaaagaagcgagaactgtgcaagttttacatcactggattttgcgccagagctgagaactgcccttatatgcacggtgatttcccgtgtaagctgtaccacaccactgggaactgcatcaatggtgacgactgcatgttttcccacgaccctctgaccgaagagacgagggagctcttggataagatgttggccgatgatgcagaagcaggtgccgaggatgagaaggaggtggaggaactgaagaagcagggcatcaaccccctgcccaaaccgccccctggtgtgggcctcctgcccacccctcctcggccccctggcccgcaggctccaacctctcccaacggcaggcccatgcagggtggccccccgcccccgccccctccccctcccccaccgcccgggccccctcagatgcccatgccggtgcatgagccactgtccccgcagcagctgcagcagcaggacatgtacaacaagaagatcccctccttgtttgagatcgtggtgcggcccacgggacagctggctgagaagctgggtgtgaggttccctggacccggtggacccccagggccaatgggccctgggcccaacatgggacccccaggcccaatgggcggtccaatgcatcctgacatgcaccccgacatgcacccggacatgcaccctgacatgcacgcagacatgcacgcagacatgccgatgggccctggcatgaatcctggcccacccatgggccctggcggccctccaatgatgccctacggccctggagactccccacattctggaatgatgccccctatcccgccagcccagaacttctatgaaaacttctaccagcagcaggagggcatggagatggagcccggactcctgggggatgcagaggactacgggcactacgaagagctgccaggggagcctggggagcacctcttccctgagcaccctctggagcccgacagcttctctgagggagggcccccaggccggccgaagccaggcgccggtgtccctgacttcctgccctcagcccagagggccctgtacctgaggatccagcagaagcagcaggaggaggaggagagagcgaggaggctggctgagagcagcaagcaggaccgggagaatgaggaaggtgacaccggaaactggtactcaagtgatgaggatgagggtggaagcagtgtcacctccatcctgaagaccttgaggcagcagacgtccagccgacccccggcttcagttggggagctgagcagcagtgggctgggggacccccgcctccagaagggacaccccacaggaagccggctggctgaccctcgcctcagccgggaccccagactcacccgccatgtggaggcttctggcgggtctggcccaggtgattcgggaccctccgatcctcggctggctcgcgccctgcccacctccaagcccgaaggcagccttcattccagccctgtgggccccagcagttccaaggggtctgggccgcccccaacggaggaggaggaaggggagcgggccctgcgggagaaggccgtgaacattcccctggacccactccccgggcaccctctgcgggacccacggtcacagctgcagcagttcagccacatcaagaaggacgtgaccctgagcaagcccagcttcgcccgcaccgtgctctggaatcccgaggacctgatccccctacccatccccaagcaggacgcagtgccccccgtgcccgcggccctgcaatccatgcccaccctggacccccggctgcaccgcgctgccacggcagggccccccaacgcccggcagcgcccgggcgcctccacggattccagcacacagggcgccaacctccccgactttgaacttctgtctcgcatcctcaagacagtcaatgccaccggctcctcggccgcccccggttccagcgacaaacccagtgacccccgggtgcggaaggcccccaccgaccctcggctgcagaaacccacagactctacggcctcctcccgggctgccaagcccggccctgctgaggcgccctctcccaccgccagcccgagtggggatgcctccccaccagccaccgctccctacgacccccgcgtgctggcggccggtggactgggccagggcggagggggcgggcagagcagtgtgctgagcggtatcagcctctacgacccgaggactcccaacgcggggggcaaagccacagagccggctgctgacacgggtgcccagcccaagggtgctgagggcaatggcaagagctcggcctccaaggctaaggagcccccgttcgtccgcaagtctgccctggaacagccagagacagggaaggccggtgctgatgggggcacccccacggacagatacaacagctacaaccggccccggcccaaggctgctgcagcccccgctgccaccaccgccaccccaccccccgagggtgccccaccccagcccggggtgcacaacctgcccgtgcccaccctcttcgggacggtgaagcagacacccaagacgggctcaggaagcccatttgctgggaacagtccggcccgcgagggtgagcaggatgcggcatccctgaaggatgtttttaaaggcttcgaccccacggcctcccccttttgccagtag

SEQ ID NO: 137565 - DNA, 3317 bp, Homo sapiens
cttgaagtggtttgttgtgcttgaagagaccccatggatgccaccagtcacattgacaacatggaaaacgaacggattccctttgatttaatggataccgtccctgcagaggcactatacgaggcccacttagagaagctgaggaacgaaaggaaaagagttgagatgcgaagggcgtttaaagaaaacctggagacttctcctttcataactcccggaaagccttgggaagaggcccgtagttttattatgaatgaggatttctaccagtggctggaggaatctgtatacacggatatttatggcaaacaccaaaagcaaattatagataaagcaaaggaagaatttcaggagttgcttttggaatattcagaattgttttatgaactggagctggatgctaagcccagcaaggagaagatgggtgttattcaggatgttctgggagaggaacagcgatttaaagccatttacaaaagctccaagcagagcgttgatgcccttattctgaaacacattcattttgtgtaccacccaacaaaggagacatgccccagctgcccagcttgtgtggacgctaagattgagcacttgattagttctcggtttatccggccgtctgaccggaatcagaaaaattcactctctgaccctaacattgatagaatcaacttggttatattgggcaaagacgccttgcccgagagttggccaatggagattagagctctttgtacaaatgatgacaagtatgtgatagatggtaaaatgtatgagctttccctgaggccaatagaggggaatgtcaggcttcctgtgaactctttccagacgccaacatttcagccccacggctgtctctgcctttacaattcaaaggaatcgctatcctatgtagtggaaagtatagagaagagtagagagtccacgctgggccggcgggataatcatttagtccatctcccccttacattaattttggttaacaagagaggagacaccagtggagagactctgcatagcttaatacagcaaggtcaacaaattgctagcaaacttcagtgtgtctttctcgaccctgcttctgctggcattggttacggacgcaacattaatgaaaagcaaatcagtcaagttttgaagggactcctggactctaagcgtaacttaaacctggtcagttctactgctagcatcaaagatttggctgatgttgatctgcgaattgttatgtgtctgatgtgtggagatccttttagtgcagatgatatactttttcctgtccttcagtcccaaacctgtaaatcttcccattgtggaagcaacaactctgttttacttgaactaccaatcggactgcacaagaagcggattgaactgtctgttctttcataccattcctcctttagcatcagaaagagccggttggttcatgggtacattgttttttattcagccaaacgtaaggcctctttggctatgttacgtgcctttctttgtgaagtgcaggatattatccctattcagcttgtagcactcactgatggcgctgtagatgtcctggacaatgacttaagtagggaacagctaactgagggggaggagattgctcaagaaattgacggaaggttcacaagcatcccctgtagccaaccccagcataaacttgagatctttcacccattttttaaagatgtggtggaaaaaaagaacataatcgaggctactcatatgtacgataatgctgccgaggcctgtagcaccaccgaagaggtgtttaactccccccgggcaggatcaccgctctgcaactcaaacctgcaggattcagaagaagatatcgagccatcttacagcctgtttcgagaagacacatcactgccttctctgtccaaagaccattctaagctctctatggaactggagggaaatgatgggctgtctttcattatgagcaattttgagagtaaactgaacaacaaagtacctccgccagtcaaaccaaagcctcctgtccattttgaaattacaaagggggatctatcttatttagaccaaggccatagggatggacagaggaagtctgtgtcttctagcccctggctgcctcaggatgggtttgatccttctgactatgctgaacccatggatgctgtggtgaagccaaggaatgaagaagaaaacatatactccgtgccccatgacagcacccaaggcaaaatcatcaccattcggaatatcaacaaagcccagtccaacggcagcgggaatggttctgacagtgaaatggacaccagctctctagagcgagggcgcaaggtttccatcgtgagcaagccagtgctgtacaggacgagatgcacccggctgggcggtttgctagttaccggaccagcttcagcgtggggagtgatgatgagctggggcccatccggaagaaagaggaggatcaggcatcccagggttataaaggggacaatgctgtcattccatacgaaacagacgaagacccgcggaggaggaatattcttcgcagcctaaggaggaacactaagaaaccaaagcccaaaccccggccatccatcacaaaggccaacctgggagagtaactattttggggtgcccttaacaactgtcgtgactccagagaagccgatccccatttttattgaaagatgtattgagtacattgaagccacaggactgagcacggaaggcatctaccgggtcagcgggaacaagtctgagatggagagtctgcagagacagtttgatcaagaccacaacctggacctggcagagaaagactttacggtgaataccgtggctggtgccatgaagagctttttctcagaactgcctgaccccctggtcccgtataacatgcagatcgacttggtggaagcacacaaaatcaacgaccgggagcagaagttgcatgcccttaaggaggtattaaagaaatttccaaaggaaaaccacgaagtcttcaagtatgtcatctctcacctaaacaaggtcagccacaacaacaaggtgaatctcatgaccagcgagaacctctccatctgcttctggcccaccttgatgagacctgatttcagcactatggacgccctcacagccacgcgcacctaccagacaatcattgaactctttatccagcagtgccccttcttcttctacaatcggcccatcaccgagccccccggcgccaggcccagctccccctctgccgtggcttccaccgtccccttcctcacttccacgcctgtcacaagtcagccgtcgcccccacagtcacctccaccctcaaa

SEQ ID NO: 137566 - DNA, 3097 bp, Homo sapiens
gactgagcacggaaggcatctaccgggtcagcgggaacaagtctgagatggagagtctgcagagacagtttgatcaagaccacaacctggacctggcagagaaagactttacggtgaataccgtggctggtgccatgaagagctttttctcagaactgcctgaccccctggtcccgtataacatgcagatcgacttggtggaagcacacagagcccgagcccccgggcccattagcaatcatctgcgctttaacaggcctctcttcaccacccccacagccgccagctgtgaggtcgctgccatctccttcgtgagaccctcctgtggttcttctgagccctggagtccacgaaggaaacatgggggcatctttccctgcacagagaaatctgtcttagccagctgggctccagaaatcaacgaccgggagcagaagttgcatgcccttaaggaggtattaaagaaatttccaaaggaaaaccacgaagtcttcaagtatgtcatctctcacctaaacaaggtcagccacaacaacaaggtgaatctcatgaccagcgagaacctctccatctgcttctggcccaccttgatgagacctgatttcagcactatggacgccctcacagccacgcgcacctaccagacaatcattgaactctttatccagcagtgccccttcttcttctacaatcggcccatcaccgagccccccggcgccaggcccagctccccctctgccgtggcttccaccgtccccttcctcacttccacgcctgtcacaagtcagcccgtcgcccccacagtcgtctccacccaccccccagtccgcaatgcagccactggtttcctcccagcgttaagccgaacacacgctacttgtgtgctttctaaacacgagcctcacaaccaccagcacccacgttgagagctttggggggcagcttcgcggctcccagataggccaccccaggaggcccaacaagatgccttatgcgtggtccattccccaggatccccccctcaagccagagagagaccctgggggcccccttggggtgtctctctcccttccagtcaaccagtatggagagagtgaggagccaatgggagacgacgactatgacgagtactccaaggagctgaaccagtaccgccgctccaaggacagccgaggccgagggctaagtcgaggccgtggcaggggctcccgaggtcgagggaaaggaatgggtcggggccgaggccgaggtggcagccgaggagggatgaacaagggcggaatgaacgatgacgaagacttctatgacgaggacatgggcgacggtggtggtggaagctaccggagtcgtgaccatgacaagccccaccagcagtcggacaagaaaggcaaagtcatttgcaagtacttcgtggaagggcgctgcacctggctgtaccacaccactgggaactgcatcaatggtgacgactgcatgttttcccacgaccctctgaccgaagagacgagggagctcttggataaggtggagatgacgggcagcagcgtcttcgactacattcaccctggggaccactcagaggtgctggagcaactggggctgcggacgccgacgcccggccccccaaccccgccctccgtctcctcttcctcctcctcttcctcttcgcttgcagatacccccgagatcgaggccagcctcaccaaggtgcccccctcctccctggtccaggagcgctccttctttgtccgcatgaaatccacgctcaccaagagggggctgcacgtcaaggcctcagggtacaaggtcatccacgtgactgggcgccttcgggcccacgccctgggccttgtggccctcgggcacacgttgcccccggcccccctggctgagctgccactccatggacacatgatcgtcttccgtctcagcctgggtctcaccatccttgcttgtgagagcagagtcagcgaccacatggacctggggccctcagagctggtgggccgcagctgctaccagtttgtccacggacaggacgccacgaggatccgccagagccacgtggactgtgagacccacctccacccaccaagcctgcctaccaccccccagacccgagcatcccactccctggtccctggaagtccttcttcagggctgcccacagtccctcctgctgcacctacagctccagggactccgtttagcattggaagagcagcaaggagactgagtgatgcctcaggattgctggacaagggtcaggtgatgactggttactaccgttggctgcagcgtgccgggggcttcgtgtggctgcagtctgtggccacagtggctgggagcgggaagagccccggggagcaccatgtgctttgggtcagccacgtgctcagccaagccgagggtggccaaactcctttggatgccttccagcttccagccagcgtggcctgtgaggaggcatccagcccggggccagagcccacagagccggagcctccgacggaagggaagcaggctgccccagcggagaacgaggccccccagacccagggcaaacgcatcaaagtggagcccggcccgagggaaaccaaaggctccgaggacagtggcgacgaggatccctccagccacccggccacaccgaggcccgagttcacctctgtcatccgggcaggggtcctgaagcaggatccggtgcggccatggggcctggcgcctcccggggaccccccgcccaccctcctgcacgcgggcttcctgccgccggtggtgcggggcctgtgcacacccggcaccatccgctacggccccgcggagctgggcctggtgtacccgcacctgcagaggctgggtccgggccaccgcgctcccggaggccttttacccgcccctgggcctgccctacccggggcccgcgggcaccaggctgccgcggaagggggactgaggacttggcagagctgccggcgccggaccctgcgacaaaccggggtcccccaggacagttaggcccgctctgcccgtagccctgagaattaaacgccggctctccctgcaaaaaaaaaaaaaaaaaaaaaaaaaaaaaaaa

SEQ ID NO: 137567 - DNA, 2214 bp, Homo sapiens
atgaagaaggagaaagaaaatcagttttttacagattttccacctgcgttacaaagcacccaaaacctttcagcttctgggaagtggaaggccatgccttccaggcatgcactgaggtctctggggcatgttacacacatctatctccacacacggttgaagcccctccagattctaacacttccagaatcctctccccagaaagctctcctcaatcagccagtgtctgcagagtccttggcaaaggggttgctgggagttatgactaaagatggggacatgagggtggaaagatacccctttcccatgacaatcctaattagcacacaggatgtgggggctttccaaggaagcagagagactctgctcaaacagctgttcactggggagggcctttccgagtcatcttctctacgtcctccccagcacaccggcctctccaggctcctcggttgcactcttgggaaagccgagccagaattccagaaacaatggccccctccccacctgtcactgacggaggcagaaactcttcccgggtcatcgattaagcaaggaccgagcaaagagaggcagttttgctctcccttgggcagcacccccactccccaccccccaaggccccatcctggaggctcccttcctggctctgacctggaaaggcagtgtgtagcagaggcattcgccaatgccgcggcgtccaggttcccacacccaggacccagctgcggggaggcatcccacacaggagacgcagaggcagtgagatcgggggtgaggggacgtgtggcaagccccagcgtgcctgaagcaaaacagggtcaggcttctctgattctgggcctcttcacaatgctggttcctccccaaaactctggcatcttttccatagctcttcccacaggaagagcttatttcttcaaggaggccccctgggcagtcctggccagcctggatcttccgcatcctgctactgaaaacctggagttggtagggtcaggcatgctgaaaggtacaggggaaagtgatgctgaagtaaagctcttcagtcactgccctacaacagaaaaaggacaacccagtcaagtacccccaaacacagattccacctttgccctttccaatgtgggaaaggggctgagacgtttctgtcacaagggtggttttccaaatgctgtagagatttactctgaaatagaaaagattgtgtcagaagcagaatctgaagtggagcttctagtatccccaggagcactgagtaaacacagaaggtacctgcaggatccacttgtgtccattgatctctcagagcagctgaggatcaaaggtgtatggctctctgtttcacatcaatcacgggaaccccttcaacatggaagtgttggtggactcctggcccgagtatcagatggttattatccgacctcaaaaacagtgagaggagaagaaaaagttcaagggaatgatctgacctttcaccatcctacacaggagatgactgatgacatggattcatacactaatgtatatcgtgtattctccaaagaccctcaaaaatcacaagaagttttgaaaaattctgagatcataaactggaaacagaaactccaaatccaaggttttcaagaaagtttaggtgaggggataagagcagctgcattttcaaattcagtgaaggtagagcattcgagagcactcctctttgttacggaagatatcctgaagctctatgccaccaataaaagcaagcttggaagctgggctgagacaggccacccagatgacgaattggagagcgagactccgaactttaagtatgcccagctgaatgtgtcttattctgggctggtaaatgacaactggaagctagggatgaataagaggagcctgcgttacatcaagcgctgcctaggagccctgccagcagcctgtatgctgggcccagagggggtcccggtctcatgggtaaccatggacccttcttgtgaaataggaatgggctacagtgtggaaaaataccgaaggagaggcaatgggacacggctgatcatgcgatgcatgaagtatctgtgtcagaagaatattccattttacggctctgtgctggaagaaaatcaaggcgtcatcagaaagactagtgcactaggtttccttgaggcctcctgtcagtggcaccaatggaactgctacccacagaatcttgttccattgtag

SEQ ID NO: 137568 - DNA, 858 bp, Homo sapiens
tcaccgtggggcctctgatcttcctcttttggtcaaggcagcacaattcagaagaatcttgccagggaagactggtaaatggacgtcaacgtgatgcctatggctcctggtggatttagatacctcctggtgcttattgatatctttaccagttgcacgggggcttttccatgccagactgtttctgcttccagagttgtctctggcctgcagttctgtgcttcctagcttgatccgttcctctccaggaatctcctctccctccccccccgacccaccaagctgactgttgaagtccttgtggtgctcagggaggatgggtgacactcgctgttgcttcagcttcatcttgagcccacacagcatctccactacccaggtctcctcaggctcaggggcgagctccttctccggctcctcctcagattcatctgaccactccttcttccttttccagccaagggacctacatggggggctgggatctaccccaggggctgatgatcccaacacttcatcatccaccacctcctggagggagtaccccgaggtggtccgctggggactctgctcattctgggggtgaggttgacggctggtcgtgatctttcccttaatctgtcccctcttacggaacctagtctccgttctgtccatggccttcttctggacagcgatcctttcacgggatcgcctccggatgggagccggatgggatcccggacggatcgtctcgctgggagccatgcgggaaaccgcaagagtcagaaacaggcgttgaaggcaggcagcattttccaaaacagctgtgtctcgggagctgccgggctgtagcgtctccccgagtcgcgcgcgcat

SEQ ID NO: 137569 - DNA, 3585 bp, Homo sapiens
atgtctccggcggctgcggcggctggagcaggcgagcggcggcggcccatagcgagtgtcagggacggccggggccggggctgcggcgggccggccagggcggtgctcctgggcctgtcgctggttggcctcttactgtacctcgtgccggctgcggctgcactggcctggctgaccgtgggggctaccgcggcctggtggggactgagccgcgagccccgaggttcgcgccccttgtcctccttcgttcggaaggcgcgtcatcggcgccccttgtcctccttcgttcggaaggcgcgtcatcggcgaacactgttcgcttcgcctctggccaagtcgacagccaacggaaacctcctagagccgcggaccctgctcgaaggacctgaccctgcggaactgctactcatgggcagttacctgggcaagcccgggccgccgcagcccgccgccgctccggagggccaggacctgcgggataggcctggccgccgcccacctgcccgcccggcgccgcgctccccaccgccgcgctccccaccgccgcgctcccccccgccctccccgccgacccatcgcgctcaccacgtttacccctctctgcccactcctcttctccgaccctccaggaggccttccccacgggattgtgggactttaccaaatcggtttgtaataacacctagaagacgctatccgatccatcaggcccagtattcctgtctgggggtacttcccaccgtgtgctggaatggttatcacaagaaggctgtgctgtcccctcgcaactccaggatggtgtgtagcccagtgactgtgaggatcgcccctcctgacagaagattttcgcgttctgcgataccagagcagataatcagctcaacactgtcctcaccatcaagtaacgccccagacccatgtgcaaaggagacagtactgagtgccctcaaagagaaggagaagaaaaggacagtggaggaagaagaccaaatattccttgatggccaggaaaataaaagaaggcgccatgatagcagtggcagtggacattcagcatttgagcccctggtggccaatggagtccccgcttcttttgtgcctaagcctgggtctctgaagagaggcctcaattctcagagctcagatgaccacttgaataagagatcccgaagctcttccatgagctccttgacaggcgcttacgcaagtggcatccctagctccagccgcaatgccattaccagttcctacagctccactcgaggcatctcacagcatgagggatcgggtgcaagcacagaggccatgcagagtggagagcagagagagtcaagtcagcgggcagtcgccttcaggttcttgactcgagctgaccccctagctgcagatacaaccccaaggaagaaacaaaactcgaattctcagtctacacctggcagctctgggcagcgtaagcggaaagttcagctgctgccttctcggcgaggggaacagctgaccttgcctccacctccccagcttggctattcgatcactgccgaggacctagacttagagaagaaggcttcattacagtggttcaaccaggccttggaggacaagagcgcacttcgagggctgctggtgttcccggcccaggccttcacggcactgcgcgcgcacacctctttatcagacgaatctgctggagcagcaaccactgaggccctctcacctccaaagacacccagcctcctacccccgctgggtttatcacagtcagggccgccagggctgctccccagcccctcctttgactccaaacccccgaccactttgctggggctgatccctgctccatccatggtaccagccactgacaccaaggcacctccaacccttcaggcagagacggctaccaaaccccaagccacatctgccccgtcccccgcccccaagcaaagcttcctgtttggaacacagaacacctcaccttccagccctgccgcccctgctgcatcttcagcacctcccatgttcaagcccattttcacggctccacccaagagtgagaaggaaggccccacaccgcctggcccttcagtcacagccacagcgccctccagctcctccctccccacgaccaccagcaccacagccccgaccttccagcctgtctttagcagcatggggccacctgcatctgtgcccttgcctgctcccttcttcaagcagacaactactcccgccactgctcccaccacaactgccccgctcttcactggcctggccagcgccacctctgctgtggctcccatcacctctgccagtccatccacagactctgcttcgaagcctgcgtttggctttggcataaacagtgtgagcagcagcagtgtgagtaccacgaccagcaccgccactgccgcctcacagcctttcctcttcggggcgccccaggcctctgctgccagcttcaccccggccatgggctccatattccagtttggcaaacctcctgccttgcccacaaccaccacagtcaccaccttcagccagtccctgcacactgccgtgccaacggccaccagcagcagcgctgccgactttagtggttttggcagcaccctcgccacctccgccccggccaccagcagccagcccactctgacgttcagtaacacgagcacccccacgttcaacattccctttggctcaagcgccaagtccccgctcccatcatatccgggagccaacccccagcccgcatttggggccgctgaggggcagccaccgggggccgccaagccggcccttgcccccagctttggcagctctttcacttttggaaactctgcagccccggctgctgcacccacacctgcacctccgtccatgatcaaggtcgtgcctgcgtacgtgcctacgcccatccatcctatctttggcggtgccacgcactcggcgtttgggttgaaagccacggcttcggccttcggcgctcccgccagctcacagcccgcctttggcggctccactgctgtcttcttcggtgcagccaccagctccggctttggagccaccacccagaccgccagcagcgggagcagcagctcggtgtttggcagcacaacaccatcacccttcacgtttgggggttcggcagcccccgctggcagtgggagctttgggatcaatgtggccaccccaggctccagcaccaccaccggagctttcagctttggagcaggacagagtgggagcacagccacctccacccccttcgcagggggcttaggtcagaacgccctgggcaccaccggccagagcacaccgtttgccttcaacgtgagcagcacaactgagagcaaacctgtgtttggaggcaccgccacccccacctttggtctgaacacccctgcgcctggagtgggcacatcaggcagcagcctctcctttggggcatcctcagcacccgcccaaggctttgttggtgttgcacctttcggatcggcggccctttcattttccattggtgcgggatccaagaccccaggggctcgacagcgactgcaggcccgaaggcagcacacccgcaaaaagtag

SEQ ID NO: 137570 - DNA, 4257 bp, Homo sapiens
tttgactttttaaacagctttatgaagatataattcacaaaccatacagttgatagggtggtgcaaccgccaacacaatctaattttaaactatgtttatgctgctacgagaaagcctatacccataagcagtcattttctattccccacccccaaacccactacttagccctaggcaaccacttatctactttctcagaccgataactttagcataggtataaatcgatcacagagcctcaaaatccacccgatatctgggccatgatgtgaaatttggtaggtaatcgtcccacgttatcaacttgtaaagtagaaatggaagtggggaggaaaactcagccgccagtggcgtttgtgaaaagcacctggtaacaggctgtgctggaggggagttcagcccctacaaaagatcacggattatgaattacataagcataggtctcgggcccttttattttggacgcgatcctttcacgggatcgcctccggatgggagccggatgggatcccggacgggatcgtctcgctgggagccatgcaggaaaccgcaagagtcagaaacaggcgttgaaggcaggcagcattttccaaaacagctgtgtctcgggagctgccgggctgtagcgtctccccgagtcgcgcgcgcatgacgtggcgggcgccgatgagcgaccgtggccggtgcacgctgggatatttaagtctcctgcggccggagccgcgatgtctccggcggctgcggcggctggagcaggcgagcggcggcggccgatagcgagtgtcagggacggccggggccggggctgcggcgggccggccggggcggcgcttctcggcctgtcgctggtcggcctcctactgtacctcgtgcctgctgcggctgcgctggcctggctggccgtggggactaccgcggcctggtggggactgagccgcgagccccgaggttcgcgccccttgtcctccttcgttcagaaggcgcgacatcggcgaacactgttcgcttcgcctccggccaagtcgacagccaacggaaacctcctagagccgcggaccctgctcgaaggacctgaccctgccgaactgctcctcatgggcagttacctgggcaagcccgggccgccgcagcccgcccccgctccggagggccaggacctgcggaataggcctggccgccgcccacccgcccgcccggcgccgcgctccacaccgccctccccgccgacccatcgcgttcaccacttttacccctctctccccactcctcttctccgaccctccgggaggccttccccacgggatcgtgggactttaccagatcggtttgtaataacacctcgaagacgctatccgatccatcagacccagtattcctgtccgggggtacttcccacagtgtgctggaatggttatcacaagaaggctgtgctgtcccctcgcaactccaggatggtgtgtagcccagtgactgtgaggatcgcccctcctgacagaagattttcacgttctgcgataccagagcagataatcagctcaacactgtcgtcaccatcaagtaatgccccagacccatgtgcaaaggagactgtactgagtgccctcaaagagaagaagaagaaaaggacagtggaggaagaagaccaaatattccttgatggccaggaaaataaaagaaggcgccatgatagcagtggcagtggacattcagcatttgagcccctggtggccagtggagtccccgcttcttttgtgcctaagcctgggtctctgaagagaggcctcaattctcagagctcagatgaccacttgaataagagatcccgaagctcttccatgagctccttgacaggcgcttacacaagtggcatccctagctccagccgcaatgccattaccagttcctacagctccactcgaggcatctcacagcccagcctcatcccgctcccagacaccggagaggccagcaaagaaaataaggtattcggcattctcctgcagttttcatttgctacgtggacagaagggggtgaggaaagagaagaagagctgtgtcatcattccagttcttcaactccattggcagcagacaaggagtcccagggagaaaaggctgcagatacaaccccaaggaagaaacaaaactcgaattctcagtctacacctggcagctctgggcagcgtaagcggaaagttcagctgctgccttctcggcgaggggaacagctgaccttgcctccacctccccagcttggctattcgatcactgccgaggacctagacttagagaagaaggcttcattacagtggttcaaccaggccttggaggacaagagtgaatctgctggagcagcaaccactgaggccctctcacctccaaagacacccagcctcctacccccgctgggtttatcacagtcagggccgccagggctgctccccagcccctcctttgactccaaacccccgaccactttgctggggctgatccctgctccatccatggtaccagccactgacaccaaggcacctccaacccttcaagcagagacggctaccaaaccccaagccacatctgccccgtcccccgcccccaagcaaagcttcctgtttggaacacagaacacctcaccttccagccctgccgcccctgctgcatcttcagcatctcccatgttcaagcccattttcacggctccacccaagagtgagaaggaaggccccacaccgcctggcccttcagtcacagccacagcgccctccagctcctccctccccacgaccaccagcaccacagccccgaccttccagcctgtctttagcagcatggggccacctgcatctgtgcccttgcctgctcccttcttcaagcagacaactactcccgccactgctcccaccacaactgccccgctcttcactggcctggccagcgccacctctgctgtggctcccatcacctctgccagtccatccacagactctgcttcgaagcctgcgtttggctttggcataaacagtgtgagcagcagcagtgtgagtaccacgaccagcaccgccactgccgcctcacagcctttcctcttcggggcgccccaggcctctgctgccagcttcaccccggccatgggctccatattccagtttggcaaacctcctgccttgcccacaaccaccacagtcaccaccttcagccagtccctgcccactgccgtgccaacggccaccagcagcagcgctgccgactttagtggttttggcagcaccctcgccacctccgccccggccaccagcagccagcccactctgacgttcagtaacacgagcacccccacgttcaacattccctttggctcaagcgccaagtccccgctcccatcatatccgggagccaacccccagcccgcatttggggccgctgaggggcagccaccgggggccgccaagccagcccttacccccagctttggcagctctttcacttttggaaactctgcagccccggccccggctactgcacccacacctgcacctgcgtccacgatcaagatcgtgcctgcgcacgtgcctacgcccatccagcctacctttggcggtgccacgcactcggcgtttggattgaaagccacggcttccgccttcggcgctcccgccagctcacagcccgcctttggcggctccactgctgtcttctccttcggtgcagccaccagctccggctttggagccaccacccagaccgccagcagcgggagcagcagctcggtgtttggcagcacaacaccatcacccttcacgtttgggggttcggcagcccccgctggcagtgggagctttgggatcaacgtggccaccccaggctccagcgccaccaccggagctttcagctttggagcaggacagagtgggagcacagccacctccacccccttcacagggggcttaggtcagaacgccctgggcaccaccggccagagcacaccgtttgccttcaacgtgggcagcacaactgagagcaaacctgtgtttggaggcaccgccacccccacctttggtcagaacacccctgcgcctggagtgggcacatcgggcagcagcctctcctttggggcatcttcagcacccgcccaaggctttgttggtgttggaccgttcggatcggcggccccttcattttccattggtgcgggatccaagaccccaggggctcgacagcgactgcaggcccgaaggcagcacacccgcaaaaagtag

SEQ ID NO: 137571 - DNA, 402 bp, Homo sapiens
aaggtgcacatgaatggcctgcgatatgctctatacattatggggcctgcccttacgagaggctgccaccaggtgcttattatgctatgctgcgaagtaatagaacggatcttgacttgatgatgaaggaagcttactttggcgaagtggatatcatggacgacctccctactgagaaatattagcgctaacgtcacaggcaggctatacaagtgtggggtgatcaaccacacagttgacctgcgccgtatgaaaacggaaaatggcagaataatctgcttccatcccgccagtttggtttcattgtactgacaacctcagctggcatcatggaccatgaagaagcaagacgaaaacacacaggagggaaaatcctgggattctttttctagggatgtaata

SEQ ID NO: 137572 - DNA, 408 bp, Homo sapiens
agtagtctttgggaatgggaagcagtgaaggaagggctgtgtgattgtgtggctgggctctctggatttggctctttgggttgcaggagtcatggctcatacgctacatgaggcaccagctcatgtaggcactgtcagttcctatgtgccccacaggaaagcgcccttaaccactgatgagtgttgatgtttttctgcactagaaggcactatgttgaactattaaacttaccagcactttctttttccactccatagtttcattgtactgacaacctcagctggcatcatggaccatgaagaagcaagacgaaaacacacaggagggaaaatcctgggattctttttctagggatgtaatacatatatttacaaataaaatgcctcatggaaaaaaaaaaaaaaaaa

SEQ ID NO: 137573 - DNA, 576 bp, Homo sapiens
catctttccgcgccgccacaatggtgcgcatgaatgtcctggcagatgctctcaagagtatcaacaatgccgaaaagagaggcaaacgccaggtgcttattaggccgtgctccaaagtcatcgtccggtttctcactgtgatgatgaagcatggttacattggcgaatttgaaatcattgatgaccacagagctgggaaaattgttgtgaacctcacaggcaggctaaacaaggttggagtgcagtggcgcgatcttggctactgcaacctctgtctcccaggttcaagcgattcttctgcctcagcctccctagtagctgagattacagtgtggggtgatcagccccagatttgacgtgcaactcaaagacctggaaaaatggcagaataatctgcttccatcccgccagtttggtttcattgtactgacaacctcagctggcatcatggaccatgaagaagcaagacgaaaacacacaggagggaaaatcctgggattctttttctagggatgtaatacatatatttacaaataaaatgcctcatggacaaaaaaaaaaaaaaaaaaaatttca

SEQ ID NO: 137574 - DNA, 877 bp, Homo sapiens
aaaggactcttgagatcttctcagagctctttgagaggaaagattggattattgcacttctttggcacaaagtagtctttgggaatgggaagcagtgaaggaagggtcaaggggaaaatagtttctttcagaattgcaaggtggattgttttgggtattgtctcccaattcttatatgttaggttgtaaaaattagttctgatacagagcaactgtcttccccccaactttttggagaagcagtcactgaggtgatgggagagtgaagaattgagtaggctagagcacagaggtttagctctcaagttgatgtcttttatttaatccagtcagttatcttttgtaggttagcattggccgaatttgaaatcattgatgacccacagagcctgggaaaattgttgtgaaccctcacaggcaggcttaaacaagtctgggggtgatcagccccagattttgacgtgcaactcaaaagaccctggaaaaaatggcatgaaataatcctgcttccaatcccgccaagtttggtttcaattgtactgacaacctcagctgggcttcatgggaccatgaaggaaggcaagaccgaaaacacacaggagggaaaatcctggggattcttttatatagggatgtaatacatatatttacataattaaatgcctcatggactctggtgcttccacttggtcgttttgagcctttacagcagtgtaaccacagcttctgcggcagcatgcagttgcttcgtttatcggtgaatgccaatccctgaagtgagtaatacaccccagggaaaaaaattttatgaaaccccaatgtgcttaaaaaaacaatgcccccctggttgtttcccaaacccgggttttttgacatt

SEQ ID NO: 137575 - DNA, 402 bp, Homo sapiens; identical to SEQ ID NO: 137571

SEQ ID NO: 137576 - DNA, 384 bp, Homo sapiens
gtggactctttttaagcctgtaacactcacccgtgaaggtcccgccagcttcattccctcaaagttagcgagacccacaaaccccatcggcaggaaaaactccctaactcagttacattggcaaatttgaaatcattgatgatcacagagctgggaaaattgttgtgaacctcacaggcgggctaaacaagtgtggagtgatcagcctcagatttgatgtgcaactcaaagatctagaaaaatggcagaataatctgcttccatcctgccagtttggtttcattgcactgacaacctcggctggcatcatggaccataaggaagcaagatgaaaacacacagcagggaaaatcctggaattctttttctagggatgtaatacat

SEQ ID NO: 137577 - DNA, 433 bp, Homo sapiens
aaggagttcccagcctttgttttcagtgcagtttgtttcatggtgtaggcagaagtcagggctgtgtgattgtgtggctgggctctctggatttggctctttgggttgcaggagtcatggctcatacgctacatgaggcaccagctcatgtaggcactgtcagttcctatgtgccccacaggaaagcgcccttaaccactgatgagtgttgatgtttttctgcactagaaggcactatgttgaactattaaacttaccagcactttctttttccactccatagtttcattgtactgacaacctcagctggcatcatggaccatgaagaagcaagacgaaaacacacaggagggaaaatcctgggattctttttctagggatgtaatacatatatttacaaataaaatgcctcatggaaaaaaaaaaaaaaaaa

SEQ ID NO: 137578 - DNA, 586 bp, Homo sapiens
cccacgcgtccgctttccgcgccgccacaatggtgcgcatgaatgtcctggcagatgctctcaagagtatcaacaatgccgaaaagagaggcaaacgccaggtgcttattaggccgtgctccaaagtcatcgtccggtttctcactgtgatgatgaagcatggttacattggcgaatttgaaatcattgatgaccacagagctgggaaaattgttgtgaacctcacaggcaggctaaacaaggttggagtgcagtggcgcgatcttggctactgcaacctctgtctcccaggttcaagcgattcttctgcctcagcctccctagtagctgagattacagtgtggggtgatcagccccagatttgacgtgcaactcaaagacctggaaaaattggcagaataatctgcttccatcccgccagtttggtttcattgtactgacaacctcagctggcatcatggaccatgaagaagcaagacgaaaacacacaggagggaaaatcctgggattctttttctagggatgtaatacatatatttacaaataaaatgcctcatggacaaaaaaaaaaaaaaaaaaaatttca

SEQ ID NO: 137579 - DNA, 889 bp, Homo sapiens
aaaggactcttgagatcttctcagagctctttgagaggaaagattggattattgcacttctttggcacaaagtagtctttgggaatgggaagcagtgaaggaagggtcaaggggaaaatagtttctttcagaattgcaaggtggattgttttgggtattgtctcccaattcttatatgttaggttgtaaaaattagttctgatacagagcaactgtcttccccccaactttttggagaagcagtcactgaggtgatgggagagtgaagaattgagtaggctagagcacagaggtttagctctcaagttgatgtcttttatttaatccagtcagttatcttttgtaggttagcattggcggaattttgaaatccattgatgacccaccagagcttgggaaaatttgttgtgaaccctcacagggcaggcttaaacaagtgtgggggtgatcagcccccagattttgacggtgcaactccaaagaccctggaaaaaatgggcaggattaatcttgcttcccatcccggcaggttttgggtttcaattgtactgacaacctcagctggcattcatggaccatgaagaagcaagaccgaaaacccccaggaggggaaaatcctggggattctttttcttaggggatgttaattacatattattttacaaattaaaatgcctcatggactctggtgcttccacttggtcgttttgagcctttacagcagtgtaaccacagcttctgcggcagcatgcagttgcttcgtttatcggtgaatgccaatccctgaagtgagtaatacaccccagggaaaaaaattttatgaaaccccaatgtgcttaaaaaaacaatgcccccctggttgtttcccaaacccgggttttttgacatt

SEQ ID NO: 137580 - DNA, 567 bp, Homo sapiens
atgggcatccccatcccaatcatccctcaccacccccaggctcgggtcgcgtccccccaggctttgatggacaagtggccatggaaagcatcctcagctgccccagggttctgccatcacccatccactaaatggtccagggaccctgggagatttcagatttccgaggttagcctggaaggaaatagcttatactgtacagctgaagcatggcaaaggaagcaatctccatcaacaggagtctgtgggctggccctgcaaaaatctccagccctgcagagactgagcatcgagtccctgatttctcttttccagaagtatgtgggaaagggtggttataactgcactctctccaagacggagttcctaagcttcatgaatgcagaactggctgccttcacaaagaaccagaaggaccccggggtccttcaccgcatgatgaagaaactgggcaccaacaatgacgggcagctagatttctcagaatttcttaatctgattggcggcctagctatggcttgccatgactccttcctcaaggctgtcccttcccagaagcggacctga

SEQ ID NO: 137581 - DNA, 407 bp, Homo sapiens
tttcgtgagaagcagagccaggagctgagccagtatggagcgatgggggccggacagtcttttaacagccagtttctgcagcatggaggtccccgggggcctagtgtccccgctggcatgaaccctactggcataggaggggtaatgggcccctctggcctctcccccttggctatgaaccccacccgggcagcaggaatgacacccttgtatgcagggcagcgtctgccccaacatgggtatcctgggcctccccaggcccagccactgccccgacagggggtcaagagaacctactctgaggtgtatccagggcagcagtatctgcaaggagcctacccggtccattccgggctatcccagtttcccacttggcaggaaaccccacgccacccatgaacccccac

SEQ ID NO: 137582 - DNA, 544 bp, Homo sapiens
cctctagtccagcgtggtggaattcgtcacttcccagagattgcagaggtgtgtcctgcctaccatctgcctgtccagcttgggggtccgggtcaccatttcctccagtcctgggccccatccttgagggccttcccagccagccagcaggagaggcaagaactgggggaacacaggaacctaggggaggaggggagcgctgggcatcctcaggctggcggccaaggcctgcccctggaggcactagaggagggcatctgtctgtgggagcccagaggctgcagggaggaggaggagggaggtatctggtgtgagcgttgcccctgcgacatttgggaccacacaggtgggcttccttattccctgacaaagcctctgtttccagctcttccgccctctctggatgagggaacagaagtggaggaaacaaaagaagcagcagcacgcacagtcctgtcgctgggtgcggagacagcctggcaaagtcccactcagccatggcctgatgcaggccccaggccctcctttcttgggtgtcaaatga

SEQ ID NO: 137583 - DNA, 801 bp, Homo sapiens
gactatgaggagatcaccatcgaccccacgtgcagctggaagccagtgcccgtgaagcctgacatgcacatcaaggaggagccggatgggccagcactgaagcgctgccgcaccgtgagccccgcccacgtgctcatgcccagcgtgatggagatgatcgccgccctgggccccggcgctgccccctttgcccccctgcagcccccctcagtccctgcccccagcgactaccctggccagggttccagcttcctggggcctggaactttccctgagtccttcccacccaccacgcccagcaccccaacccttgctgagttcaccccgggaccaccccccatctgctaccagtctgacattcccagcagcctcctgacttcagagaagtctaccgcctgcctctccaagccagaaggcaccagcaggtcacctggaccccactcacaatcctgggacaccaggactacacacctccaaccttggggcccctccaggtccccagctgcaccattcaaaccctcccccagcgtcccggcagtccttgggccaagcgagcttaggacctacgggtgaactggccttcagtcctgccacaggcgtgatggggccccccagcatgtctggagccggggaggccccagaaccagctctggacctgctcccggaactgaccaaccctgatgagctactgtcctacttgggcccacccgacctccctacgaacaacaatgacgacctgctttctctgtttgagaacaactgatcctgtggttaccccaagcccggcggggacacgctcac

SEQ ID NO: 137584 - DNA, 3268 bp, Homo sapiens
atggagcggcgcgggccgggggccgccacggcgaggggccgggccaggccgggcggagggccttctgtggggttactggctactggctcctctctaaaccccagtttccacggggtagctaggattgtccctggctttataaggatagccaggcctcgtgatggttcattcgcatatgagtctgtgccttggcaacaaagcgccactcagccggctggatcgctgtctgtggtcactactgtgtggggagttggcaacgcgacacagagccaggttttggggaaccccatgggccctgcagggagtccctctggcagctccatgatgcctggtgtggcagggggcagctccgccttgacctccccacagtgcctgggacagcaggcgtttgctgaaggcggcgccaacaagggctacgtgcagcaaggcgtgtacagccgcgggggctaccctggggcccccggcttcaccaccgggtatgcaggcggcccggggggcctgggcctcccctcacatgctgcaagaccctccactgacttcacgcaagcggcagctgctgcagctgtggctgctgcggcagccactgccaccgccacagccacagccaccgtggctgctctccaggagaagcagagccaggagctgagccagtatggagcgatgggggccggacagtcttttaacagccagtttctgcagcatggaggtccccgggggcctagtgtccccgctggcatgaaccctactggcataggaggggtaatgggcccctctggcctctcccccttggctatgaaccccacccgggcagcaggaatgacacccttgtatgcagggcagcgtctgccccaacatgggtatcctgggcctccccaggcccagccactgccccgacagggggtcaagagaacctactctgaggtgtatccagggcagcagtatctgcaaggaggccagtatgcacccagcaccgcccagtttgcgcccagccctgggcagccccctgccccctccccttcctaccctgggcacaggctgcccctgcagcagggcatgacccagtccctgtccgtgcctggccccacgggactgcattataagcccacagagcagttcaacgggcagggcgccagcttcaacgggggcagcgtcacgtacagccaacctggcctgagtgggcctacccgttccatcccgggctatcccagttccccactgccagggaaccccacgccacccatgaccccaagcagcagcgtcccttacatgtcaccaaaccaagaggtcaagataacccaacttgcctgatctcaagcccaacctcaactccttgcactcatcgccctctggaagcgggccttgtgacgagttgcggctgaccttccctgtgcgcgatggggtggtcctggagcccttccgcctgcagcacaacctgggctgtaagcaaccatgtcttccagctgcgagactcagtctacaagaccctgataatgaggcctgacctggagctgcaattcaagtgctaccaccacgaggaccggcagatgaacaccaactggccagcctcggtgcaggtcagcgtcaatgccacgccgctcaccatcgagcgtggcgacaacaagacctcgcacaagccactctacctgaagcatgtgtgccagccaggccgcaacaccatccagatcaccgtcaccgcctgctgctgctcccacctcttcgtgctgcagctagtgcaccgcccatccgtccgctcggtgctgcagggcctcctcaaaaagcgcctcctgcctgctgagcactgcatcaccaagataaagcggaacttcagcagcggcaccatccctggcacccctgggcccaacggagaggacggggtggagcagacagctatcaaggtgtccctgaagtgccccatcaccttccgcaggatccagctccctgcccgaggtcatgactgtcgccacatacagtgctttgacctggagtcgtacctgcagctcaactgtgagcgggggacttggaggtgtcctgtgtgcaacaagacagctttgctggagggcctggaggtggaccagtacatgctgggcatcctgatttacattcagaactctgactatgaggagatcaccatcgaccccacgtgcagctggaagccagtgcccgtgaagcctgacatgcacatcaaggaggagccggatgggccagcactgaagcgctgccgcaccgtgagccccgcccacgtgctcatgcccagcgtgatggagatgatcgccgccctgggccccggcgctgccccctttgcccccctgcagcccccctcagtccctgcccccagcgactaccctggccagggttccagcttcctggggcctggaactttccctgagtccttcccacccaccacgcccagcaccccaacccttgctgagttcaccccgggaccaccccccatctcctaccagtctgacattcccagcagcctcctgacttcagagaagtctaccgcctgcctcccaagccagatggcaccagcaggtcacctggaccccactcacaatcctgggacaccaggactacacacctccaaccttggggcccctccaggtccccagctgcaccattcaaaccctcccccagcgtcccggcagtccttgggccaagcgagcttaggacctacggctcttccgccctctctggatgaggggaacagaagtggagggaaccaaaggaagcagcagcaacgcacagtcctgtcgctgggtgcggagacagcctggcaaagtcccgactcgagccatggcctggatgcaggccccaggccctacctttttttggggtgtcaaatgactgtgtcctggacatctgatgcaccaccgtgcccgtgcctgttgcaaacgtgatgctcccgggtgcagtggagaaactaggagactgggacaagcaaaaggcttggaaatcaacccagaagcccatcctcagaagactggagaaatgattgaggaatgcatgggcaccgtggccctgtgctccatcacaaacacctctcagaaacaacgtgggatgaaaaagcaagacagttcatacagtatgatgccatttttataaagctcaaaaccaaatatgtgtggaattcatacccaggtgctaaagtcatcagggagggcagggagtcagtacaacacagtgctcaccgtggggaggggacggagctgtgcttagggaagagcagagatgctggaggttttgaacctcagggtcagtggtggct

SEQ ID NO: 137585 - DNA, 580 bp, Homo sapiens
tcagagcagctccagaaggagtgtggattccgagaagctgtagggccaggagctgtagagaggaccccggtacatctgaaagccgggaaatggtgcgtgtgctggccgggagtggtgcgatgggggaggggctgcctggaactggcgggacccgggcctccctgtgggcgactccggggtctgggaccgagtcctcctagagctgctcggccctcggtccccgcggccgctggatgtgggtgggccggcagccgggactccgggcgtcctgtcccgtccctgcccgtcgactgcggccttggccccgaagcccttttgtgcagctccgcgcccgcagcccgacgccccagcttgtgcgggggccacgggagggtcatgcgcggatttcgactcgggtgtggatttcgtccgtaggaggagcagcggtctgtggggcccacagcctccactttctcctttgccttgcgtggccttaggtcttgtttgtaatttggtatcttgttgccacaaggagtctgtttttccagtcagagaatgtctgtttttacatgaatgtgcgtcagttgctgcatgtaaactc

SEQ ID NO: 137586 - DNA, 508 bp, Homo sapiens
cggccgctggatgtgggtgggccggcagccgggactccgggcgtcctgtcccgtccctgcccgtcgactgcggccttggccccgaagcccttttgtgcagctccgcgcccgcagcccgacgccccagcttgtgcgggggccacgggagggtcatgcgcggatttcgactcgggtgtggatttcgtccgtaggaggagcagcggtctgtggggcccacagcctccactttctcctgttaaaaattatactgaggtacgttaacaaaaagttcatttgaggaaacagccattcacgaatgagaaacacccggtcctggcttgtggtttgtcaacggaaaaaaaacagactatgtaaaatacagaagtgtattcagagccgagtaggagagaccttggccgagggaaacacaaccccaagcagcctggagtaagtggtccggaggcggctcaggacagtttggttttattcatttcagagagacaggaattgcagggaaaatgatggatca

SEQ ID NO: 137587 - DNA, 2097 bp, Homo sapiens
cggccgctggatgtgggtgggccggcagccgggactccgggcgtcctgtcccgtccctgcccgtcgactgcggccttggccccgaagcccttttgtgcagctccgcgcccgcagcccgacgccccagcttgtgcgggggccacgggagggtcatgcgcggatttcgactcgggtgtggatttcgtccgtaggaggagcagcggtctgtggggcccacagcctccactttttcctgttaaaaattatactgagatgtttcaggacccagtggcttttaaggatgtggctgtgaacttcacccaggaggagtgggctttgctggatatttcccagaagaatctctacagggaagtgatgctggatactttctggaacctgacctctataggaaaaaagtggaaagaccagaacattgaatatgagtaccaaaaccccaggagaaacttcaggagtgtcacagaagagaaagtcaatgagattaaagaagacagtcattgtggagagacttttaccccagttccagatgacaggctgaacttccagaagaagaaagcttctcctgaagtaaaatcatgtgacagctttgtgtgtggagaagttggcctaggtaactcatcttttaatatgaacatcagaggtgacattggacacaaggcatatgagtatcaggaatatggaccaaagccatgtaagtgtcaacaacctaaaaaagccttcagataccgcccctcctttagaacacaagaaagggatcacactggagagaaaccctatgctttgttaaagaatgatgggaaaaaaccattattttaccattcaagcattcaaagacacatggtagtgcacagtggggatggaccttataaatgtaagttttgtgggaaagcattccattgtctcagtttatatcttatccatgaaagaactcacactggagagaaaccgtatgaatgtaaacaatgtggtaaatcttttagttattctgctacccatcgaatacatgaaagaactcacattggagaaaagccttatgaatgtcaggaatgtgggaaagcattccatagtcccagatcctgtcacagacatgaaaggagtcacatgggagagaaggcttatcaatgtaaggaatgtggaaaagcattcatgtgtccccgttatgttcgtagacatgaaaggacccactctaggaaaaaactttatgaatgtaagcagtgtgggaaagcattatcctctcttacaagttttcaaacacacataaggaatgcactctggagaaagaccttatgaatgtaagacatgtgggaaaggcttttattctgccaagtcatttcaaagacatgaaaaaactcacagtggagagaaaccgtataaatgcaagcaatgtggtaaagccttcactcgttccggttcctttcgatatcatgaaaggactcacactggagagaaaccctatgagtgtaagcaatgtgggaaagcgcatgaaaggactcacacaggagaaaaaccctatgaatgtaaactatatgggaaagcattatctcgccttataagctttcgaagacacatgagaatgcacactggagagaggcctcataaatgtaagatatgtgggaaagccttttacttctcccagttcatttcaaaggcatgaaagaagtcacactggagagaaaccctacaaatgcaagcaatgtgggaaagccttcacttgtttccacttcgtttcaatatcatgaaaggactcacactggagagaaacccgatgggtgtaagcaatgtgggaaagccttcagatctgccaagtacattcgaatacatggaaggactcacactggtgagaaaccctatgaatgtaagcaatgtgggaaagcatttcattgtgtcagctcctttcatagacatgaaaggactcacgctggagaaaaaccttatgaatgtaagcattgtgggaaagccttcacttgttccatatatattagaatacatgaaagaattcacactggagagaaaccttaccaatgtaaggaatgtgggaaagccttcattcgttccagttactgtcgaaaacatgaaagaactcacactattaatatatga

SEQ ID NO: 137588 - DNA, 1656 bp, Homo sapiens
agtcggcccaaaaagcggcggccgttggaggtggctgcggcagctgatgtggcctcatggatgagctggtacacgacttaacctcagccttggagcagacatctgagcagaataagcttggtgaactgtgggaggagatggcgctgagcccccgacagcagaggcggcagcttcggaaacgccgaggtcggaagcgtcgttctgacttcactcacctggcagagcatacctgctgctacagcgaggcctctgagtcaagtctggatgaggccactaaggactgtcgagaagtggctccggtgaccaattttagtgactctgatgacacaatggtagccaaacgacacccagctctcaatgccattgtcaagagtaagcaacattcttggcatgaatctgactcctttactgaaaatgcaccttgtcgaccactcaggcgcaggcgggaaggtgaagcgagtgacatcagaggtggctgctagccttcagcagaagctgaaggtgtcagattggagctatgagagaggctgcaggttcaagtctgctaagaagcagcgtctgtcccgctggaaggagaatactccctggacctcatcaggccacggattgtgtgaatcagcagaaaataggactttcctaagcaaaacaggaaggaaagaaaggatggagtgtgaaacagatgaacaaaaacagggctctgatgagaacatgtcagaatgtgaaaccagcagtgtgtgtagcagcagtgacactgggctctttaccaatgatgaagggcgacaaggtgatgacgaacagagtgattggttctatgaaggagaatgtgtcccaggattcactgtccctaatcttctgcccaagtgggctcctgatcattgttctgaagtagaaagaatggattctggattggataaattttcagattccacattccttttaccttctcggccagctcaaagagggtaccatactcgcttgaatcgtctacctggagctgcagctcgatgcctcagaaaggggcgaagaaggctggttgggaaggagaccagcataaacactttggggactgagaggataagccatatcattagtgaccctcggcagaaagatttctggttaccatcagctgggaaaagagaacgaaatcagttcaatcccctgtctcccctttactccctggatgttcttgccgatgcttctcaccgaaggtgttcaccagcacactgctctgccagacaggcaaatgtacactggggaccaccatgttcacgtgacatcaagcaggaagcggaaaccagtggccacagcatctttgtctagccccagtgcagttcacatggatgcagtggagccaaccacaccagcatcacaagcccccaaatcacccagctctgagtggttggtgaggacctctgcagcagagaaagccacagacgcaactactgctacattttttaaaatgccacaagaaaagagccctggatacagctagagagcaggacttcaccctccaggagctgactgggtgttgctgaagcaaatgttggactttgtgttagatagtcttgcatatcttaatcgacattcccagtcctttcaccaccagaaccaactcctctttcaaacacagcagtggattctttctctcagaaaaaa

SEQ ID NO: 137589 - DNA, 403 bp, Homo sapiens
cgaaggggacgccgggaacagggccagctgaggggcccacggacatagggcacccacaataggcgtgtgtctgctgtgtgtttgtgttcggccgtcctgcttctctgcttccacacgtacacatgcccctgtgttactttggttcatcttctgtactctgtcagttttctgctggtcagaacatctgtgactgtgacagagctgtccaggattgcagtggataggaatttcttcacatggctcctggagaagtgaccatcacagttcgcctcatccgttcctttgaacatcgcaatttcaaacctgtagtgtatcacggagtgaatttggaccaaactgtaaaggaatttatcgtatttctaaagcaagatgcactaaagattattcatcaagcacataaatc

SEQ ID NO: 137590 - DNA, 679 bp, Homo sapiens
cgggaacaggaatttcttcacatggctcctggagaagtgaccatcacagttcgccctcatccgttccttggaacatcgccaatttcaaacctgtagtgtatcacggagtgaatttggaccaaactgtaaaggaatttatcgtatttctaaagcaagatatccctttaaggaccaacctgccaccaccattcagaaattataaatatgatgcactaaagattattcatcaagcacataaatcaaagacaaatgaacttgtgttgagtttggaagatgacgaaagactcctgctgaaagaagacagcactctgaaagcagctggaatcgccagtgaaactgaaattggcatctttctgtgaagaagattataggaactacaaagctaatcccatttcatcctggtgaaaacatctcgagggcttcctttttgcatacctgtattaagctctttattccactgctgagtttttgaaattgacaaacaaatcttaaaaaattaatcccaggctatactctttgagctaaaatctgtttatttctttctcttcaggtctttctttccttctctctttctttttctttgttgttgtaaaataatatattatgagaaaaacatttgatctttttaaagggaaataaattgttattaaaaattattgtggaaaaaaaaaaaaaaaaa

SEQ ID NO: 137591 - DNA, 241 bp, Homo sapiens
gcaaatgttgaatgataagaaacaagctcatatccagttggaaattatgaaggccatggaatctgctgaacaaaaggaacaaggtttatcaagggatgtcacaaccgtgtggaagttgcgtattgtaagctattcaaaaaaagaaaaagattcagaattaccagccacggggagcgccttcacttcatccaaatttttagatccagactttcagccatcttgtgttgaggtggacctataa

SEQ ID NO: 137592 - DNA, 336 bp, Homo sapiens
ttatatgttgacagcaacaggaaatgttactgctttcctattagttttagctgtttctgaacattcatcatgcacagcaccactctcaactgttacctgttgcgatgattggttatcaacagttccaaatgcttcaaataccatcagatttgagttcatgaaaggtgttggggacaagccttcatgggctcctaatcgactgtcattcaagtgatcactgtaatgagggctgtctgtaaaaccccctgtaatcccatcactttgagagactgaggtgggaggctgacttgaggccaggagttcaagaccagcctgggcaacataagagacccccat

SEQ ID NO: 137593 - DNA, 1344 bp, Homo sapiens
atggagaagacatcatctggattatacatatttcgcaatgaaagagaggaagaaaaggaagcagcaaaatatgtggaggcccaacaaaagagactagaagccttattcactaaaattcaggaggaatttgaagaacatgaagaaaacacaacaaaaccatatttaccatcacgtgcactaacaagacagcaagttcgtgctttgcaagatggtgcagagctttatgaagcagtgaagaatgcagcagacccagcttaccttgagggttatttcagtgaagagcagttaagagccttgaataatcacaggcaaatgttgaatgataagaaacaagctcagatccagttggaaattaggaaggccatggaatctgctgaacaaaaggaacaaggtttatcaagggatgtcacaaccgtgtggaagttgcgtattgtaagctattcaaaaaaagaaaaagattcagacccctctgaggagccgattaaatctatggacttctccccaaaaaaatggcacaaaataacccccaaaattttacatacaatttcagaatatggaccttggactacgatctcagaactaaaatgtcttcagttatcacttaaagctcccgaaagcaaaagcatttactttgaaaaaaattgtgagttaccagtggaaaatagaggacatgatcatttaggaagaaaacaaggaacttgggagcaacagagtattggaaggattgcctgtgaggatactgaaatttccaggaaacatgaccatcgtgatgacagaatgacagtgtatatatttatgggggagcctgtgcttgttatggggactgacacagatcagctcttggccccaaggcaaggtgtgtgggagaagaaaaaactggcagaaacccagacttacctggacaaggtagagaacatttgcaagaagttttcaagtcctttctgtcacagaatggaatgtccagagatggactgtgaggaagaacgggccttgctggaatgtggagggaagaattatgaacaggccaaggcctgctttgaaaaggatctggcagtggctgctgaaaaccctgaactcaacactgggtatgaaatcaccgcctgtcgcctggatggctttaaattagcaacgggggatcacaagtcattttctttgcctaccctaaggcaggctgtcaggctaaatgtagatgatagatatagtaaggttcttcttgccctgaagctttgggatgaaggacaggaagctgaaggagaaaagtactttgaaggagctctggccagtacgtccatgcagacctttgtctttggatatgtctttggatatgtcttctcttcttactga

SEQ ID NO: 137594 - DNA, 1680 bp, Homo sapiens
atgacaccaccgcaacactgtgaaagtccattgtcgccctcccatgaaggcaaactgttcctggctgtctggaaaagaagtcccagttccattgtcaagcggtccatcaagtctgtgacagacagcacagctgccaagctgtgcaaaacatccacccccagaatgcattcaggcactggggagagatacacaatgcataagcagagagccaagcggctgatggcaaggtgcaaagatacaggtgcttcagttccatctccacactcacaggggacctgtccactgccacccatgtctccactggagcccatccatgcagcacagctgccaccagttaccacagcccatgatgcagccacattgccgacctgggagtcttgtgggctgaagacccattcatctcattctgccgaggactacaccaaatgtcaggttcagggtcaggttccagcccatgctgaggtccaaaaggaaggggtgaatgggtcacgaatggctgaaaagaacactcgggggaccgtagcagttgaatatggttttattcagcagctctttcatcagcagctcactcacactagctcctcatcagcagctctctcacagcagctctcttacactgtctacctttatctcagctatctgctccagctttgcagctcctgccactcccacacacagctgcattccctgggctacaaggttggctctcccttacaggtattgttaaaaagtaacgaacattcagaccagctcacaaaagaagaaaatactgctatacgtactccagaacatttaatatcccaaaaaggcttttcatataatgtggtaaattcatctgctttctctggatttagtacagcaagtggaaagcaagtttccattttagaaagttccttacacaaagttaagggagtgttagaggaatttgatttaatcagaactgagcatagtcttcactattcacctacgtctagacaaaatgtatcaaaaatacttcctcgtgttgataagagaaacccagagcactgtgtaaactcagaaatggaaaaaacctgcagtaaagaatttaaattatcaaataacttaaatgttgaaggtggttcttcagaaaataatcactctattaaagtttctccatatctctctcaatttcaacaagacaaacaacagttggtattaggaaccaaagtctcacttgttgagaacattcatgttttgggaaaagaacaggcttcacctaaaaacgtaaaaatggaaattggtaaaactgaaactttttctgatgttcctgtgaaaacaaatatagaagtttgttctacttactccaaagattcagaaaactactttgaaacagaagcagtagaaattgctaaagcttttatggaagatgatgaactgacagattctaaactgccaagtcatgccacacattctctttttacatgtcccgaaaatgaggaaatggttttgtcaaattcaagaattggaaaaagaagaggagagccccttatcttagtggccatcagtattgtagacaaacacatacctgtttatgagaacacgcagagggaacttggcctcctactgctgctttcagagagattcgaggcagagtggatgtttttgcaagatacagactgcctggctgtggaaagacgcgttgcctttgtttcttcttaa

SEQ ID NO: 137595 - DNA, 1509 bp, Homo sapiens
atggagcccagtgatgaggctgctgatatagttcacacagaaggagagagtttgatctgggacagaagcgctaggtatggagaggaggaaggaaatatttctgctaacagtactcggcgtgctcgctggtataccaaacttgtattctttcgtgaccatagaccttttcctgtgcccttatcatcgcttttcagtgatggagaaaatgttggttgtgttgatgtaattattcaaagagcataccctatacagctgctgaatatgtacagggaactgagtgacataaagacacacatgaagaaagccagtgcagtcattgcagctgaccctctctattcagacggcgcgtggtcagagcccactttcacgtccagtgaagcagccatacagtccatgctggagtgcatgaagaacaacgaactcggcaaagctttgcggcagatcagagagtgcagaacaccagaagaattgcataacttttcattaaattctgaatcacattctgacataagaaagaacaaaatgcacattctaagttatgaggacacacacatagttacacacaaaatactgaaagagagtgtcccagttggtactggaaatcaaatagtgaccttacaggcacaacccgaacgtgatgaaaagatcaaagaacctactctattgggttttcatacagctagcgggaaaaaagttaaaatctcaaagtgtgacaatctaaaaacttgtcacacttcacatgtatctgtcatggcggaaacagcggttatctatcacaagaaatgtaaaaatagcccgcgtatcgtacagtcaaacgacctcactgaggcggcatatagtctctcccgggatcaaaaacgtatgctgtatctgttcgttgaccagatcagaaaatctgatggcaccctacaggaacatgacggtatctgcgagatccatgttgctaaatatgctgaaatattcggattgacctctgcgaaagccagtaaggatatacggcaggcattgaagagtttcgcggggaagaaagtggttttttatcgccctgaagaggatgccggcgatgaaaaaggctatgaatcttttccttggtttatcaaacgtgcgcacagtccatccagagggctttacagtgtacatatcaacccatatctcattcccttctttatcgggttacagaaccggtttacgcagtttcggcttagtgaaacaaaagaaatcaccaatccgtatgccatgcgtttatacgaatccctgtgtcagtatcgaaggacagtgtgaaaatgatccaaaaagcacaaaagtttcagatataaaagaagaggtcttggctgcagcatgtcacccagtacaacattcaaaagtggaatacagtgatactgactttcaatcccagaaaagtcttttatatgatcatgaaaatgccagcactcttatattaactcctactttcaaggatgttctgtcaaacctagtcatgatttctataggcaaagaatcatacaaaat

SEQ ID NO: 137596 - DNA, 7120 bp, Homo sapiens
atggaggaaaactcattagaattcttaagtgatcttacaccgggagatcaggacccatctcagagtgaagaggaagacattgaaaagaccagaagagaatcagaatatcccttcattgatggtctacaaaatgaagtcggagattttgtgactggatataaagaaaaaagatggaaaaataaagatcctaaagacagtttccaaaacgttatgtctatagttgaattagacaacacaccaaagaattacctctctaaggaaggtgataacttgtttgtaagtttgttactgaggccaaatgaaatctccgttacttgtccaatactgactcaaaacctttcctgtgtaacaactgatgactgctctggcatgaaggtagaaaagcatattagaaataggcataccatagcattagacacccaggacctttctgcggaaacttcatgcttatttatgaagaagagagaaatagtagataaaaatctctcacatgaacccattctgtgccatcaacatggaatcagaatgtcagataaagttttaagagaggaacaagtgtatacaactaaaatcaatcactgggcttttttcacaaccaatttatctgatgaagatttacagctgggctctgacagacagccctattttggtagctggcctgcaggacctcataagtttatatgtgaacagagaccaaagaaagatagagcatgtaagttggctggtcctgacagcagggggcaatggattcaaatgatcttcacttcggtggcagcatcagaaccaggaaacaatccagaaatattgacagacaaactactgataggaaatgaagatttttcacctccacctgaaactatggattcattcatagaaacaaacctcttcagaagctgcttacctcaaccggatataccaaagaatgccttagaatcaacaaaaaataagaaaaggaggaagaaaaggattttcaatttggtaccaaattttgacttattaggacagagtcgtatcggtgtaaaagaaagggagaaatgtgacctgttaacaaaaaaccatggactaaaaattactttgggagaagaaaaagatagaatttcagaaaggaacagtgaagaggagaataaacaaaaacttatgacctttgatcatcatccattgtggttttaccttgatattatcaaagctacccctttaaatattgatggacagcgttattctcattgcctgtcatttaacagactaaggtgctctgcatctttatacaaaaattatattccttcttttgtgctacataatttatctagtatttggaagccatcttttacaaacaagaaactgtttttgactttcgaatctcagacaagagtaggtaataaactaaatgatgcagggtttatttctccagaaattttacatagtcatcctgatacttcgtgctctttgggagtcacttctgattttcactttttaaatgaaaggtttgatagaaagctgaaaagatgggaagaacctaaggaattaccagctgaggacagccaagacttaacaagcactgactaccgttcccttgagctaccattatcacaagggtttgcctttcaattagtaaagctttttggatctccaggcgttccaatggatttaggaccaataagtcttaattggtttgaagaactttcttcagaagctccaccctataattctgaacctgcagaagaatctgaacataaaaacaacaattacgaaccaaacctatttaaaactccacaaaggaaaccatcttataatcagctggcttcaactccaataatattcaaagagcaagggctgactctgccgctgtaccaatctcctgtaaaagaattagataaattcaaattagacttaggtttattgcattcttctgtgaaaagaagctgttcacagaatgattctgaagaaccaactttgtccttaactagctcttttgggacaattctgaggaaatgttctagaaatgaaacatgttctaataatacagtaatctctcaggatcttgattataaagaagcaaaatgtaataaggaaaaactacagttatttattaccccagaagctgattctctgtcatgcctgcaggaaggacagtgtgaaaatgatccaaaaagcaaaaaagtttcagatataaaagaagaggtcttggctgcagcatgtcacccagtacaacattcaaaagtggaatacagtgatactgactttcaatcccagaaaagtcttttatatgatcatgaaaatgccagcactcttattttaactcctacttccaaggatgttctgtcaaacctagtcatgatttctagaggcaaagaatcatacaaaatgtcagacaagctcaaaggtaacaattatgaatctgatgttgaattaaccaaaaatattcccatggaaaagaatcaagatgtatgtgctttaaatgaaaattataaaaacgttgagctgttgccacctgaaaaatacatgagagtagcatcaccttcaagaaaggtacaattcaaccaaaacacaaatctaagagtaatccaaaaaaatcaagaagaaactacttcaatttcaaaaataactgtcaatccagactctgaagaacttttctcagacaatgagaataattttgtcttccaagtagctaatgaaaggaataatcttgctttaggaaatactaaggaacttcatgaaacagacttgacttgtgtaaacgaacccattttcaagaactctaccatggttttatatggagacacaggtgataaacaagcaacccaagtgtcaattaaaaaagatttggtttatgttcttgcagaggagaacaaaaatagtgtaaagcagcatataaaaatgactctaggtcaagatttaaaatcggacatctccttgaatatagataaaataccagaaaaaaataatgattacatgaacaaatgggcaggactcttaggtccaatttcaaatcacagttttggaggtagcttcagaacagcttcaaataaggaaatcaagctctctgaacataacattaagaagagcaaaatgttcttcaaagatattgaagaacaatatcctactagtttagcttgtgttgaaattgtaaataccttggcattagataatcaaaagaaactgagcaagcctcagtcaattaatactgtatctgcacatttacagagtagtgtagttgtttctgattgtaaaaatagtcatataacccctcagatgttattttccaagcaggattttaattcaaaccataatttaacacctagccaaaaggcagaaattacagaactttctactatattagaagaatcaggaagtcagtttgaatttactcagtttagaaaaccaagctacatattgcagaagagtacatttgaagtgcctgaaaaccagatgactatcttaaagaccacttctgaggaatgcagagatgctgatcttcatgtcataatgaatgccccatcgattggtcaggtagacagcagcaagcaatttgaaggtacagttgaaattaaacggaagtttgctggcctgttgaaaaatgactgtaacaaaagtgcttctggttatttaacagatgaaaatgaagtggggtttaggggcttttattctgctcatggcacaaaactgaatgtttctactgaagctctgcaaaaagctgtgaaactgtttagtgatattgagaatattagtgaggaaacttctgcagaggtacatccaataagtttatcttcaagtaaatgtcatgattctgttgtttcaatgtttaagatagaaaatcataatgataaaactgtaagtgaaaaaaataataaatgccaactgatattacaaaataatattgaaatgactactggcacttttgttgaagaaattactgaaaattacaagagaaatactgaaaatgaagataacaaatatactgctgccagtagaaattctcataacttagaatttgatggcagtgattcaagtaaaaatgatactgtttgtattcataaagatgaaacggacttgctatttactgatcagcacaacatatgtcttaaattatctggccagtttatgaaggagggaaacactcagattaaagaagatttgtcagatttaacttttttggaagttgcgaaagctcaagaagcatgtcatggtaatacttcaaataaagaacagttaactgctactaaaacggagcaaaatataaaagattttgagacttctgatacattttttcagactgcaagtgggaaaaatattagtgtcgccaaagagtcatttaataaaattgtaaatttctttgatcagaaaccagaagaattgcataacttttccttaaattctgaattacattctgacataagaaagaacaaaatggacattctaagttatgaggaaacagacatagttaaacacaaaatactgaaagaaagtgtcccagttggtactggaaatcaactagtgaccttccagggacaacccgaacgtgatgaaaagatcaaagaacctactctgttgggttttcatacagctagcgggaaaaaagttaaaattgcaaaggaatctttggacaaagtgaaaaacctttttgatgaaaaagagcaaggtactagtgaaatcaccagttttagccatcaatgggcaaagaccctaaagtacagagaggcctgtaaagaccttgaattagcatgtgagaccattgagatcacagctgccccaaagtgtaaagaaatgcagaattctctcaataatgataaaaaccttgtttctattgagactgtggtgccacctaagctcttaagtgataatttatgtagacaaactgaaaatctcaaaacatcaaaaagtatctttttgaaagttaaagtacatgaaaatgtagaaaaagaaacagcaaaaagtcctgcaacttgttacacaaatcagtccccttattcagtcattgaaaattcagccttagctttttacacaagttgtagtagaaaaacttctgtgagtcagacttcattacttgaagcaaaaaaatggcttagagaaggaatatttgatggtcaaccagaaagaataaatactgcagattatgtaggaaattatttgtatgaaaataattcaaacagtactatagctgaaaatgacaaaaatcatctctccgaaaaacaagatacttatttaagtaacagtagcatgtctaacagctattcctaccattctgatgaggtatataatgattcaggatatctctcaaaaaataaacttgattctggtattgagccagtattgaagaatgttgaagatcaaaaaaacactagtttttccaaagtaatatccaatgtaaaagatgcaaatgcatacccacaaactgtaaatgaagatatttgcgttgaggaacttgtgactagctcttcaccctgcaaaaataaaaatgcagccattaaattgtccatatctaatagtaataattttgaggtttcagatgaaattttatttcagatttaccagccacgggagccccttcacttcagcaaatttttagatccagactttcagccatcttgttctgaggtggacctaataggatttgtcgtttctgttgtgaaaaaaacagtcagaaatgaagaagcatctgaaactgtatttcctcatgatactactgctaatgtgaaaagctatttttccaatcatgatgaaagtctgaagaaaaatgatagatttatcgcttctgtgacagacagtgaaaacacaaatcaaagagaagctgcaagtcatggatttggaaaaacatcagggaattcatttaaagtaaatagctgcaaagaccacattggaaagtcaatgccaaatgtcctagaagatgaagtatatgaaacagttgtagatacctctgaagaagatagtttttcattatgtttttctaaatgtagaacaaaaaatctacaaaaagtaagaactagcaagactaggaaaaaaattttccatgaagcaaacgctgatgaatgtgaaaaatctaaaaaccaagtgaaagaaaaatactcatttgtatctgaagtggaaccaaatgatactgatccattagattcaaatgtagcacatcagaagccctttgagagtggaagtgacaaaatctccaaggaagttgtaccgtctttggcctgtgaatggtctcaactaaccctttcaggtctaaatggagcccagatggagaaaatacccctattgcatatttcttcatgtgaccaaaatatttcagaaaaagacctattagacacagagaacaaaagaaagaaagattttcttacttcagagaattctttgccacgtattttctagcctaccaaatccagaggagccattaaatgaggaaacagtggtaaataagagagatgaagagcagcatcttgattctcatacagactgcattctgcagtaaaagcaggcaatatctggaactttcccagtggcttcttcatttcagggtatcaaaaagtctatattcagaataagagaatcacctaaagagactttcaatgcaagtttttcaggtcatatgactgatccaaactttaaaaaagaaactgaagcctctgaaagtggactggaaatacatactgtttgctcacagaaggaggactccttatgtccaaatttaattgataatggaagctggccagccaccaccacacagaattctgtagctttgaagaatgcaggtttaatatccactttgaaaaagaaaacaaataagtttatttatgctatacatgatgaaacatcttataaaggaaaaaaaataccgaaagaccaaaaatcagaactaattaactgttcagcccagtttgaagcaaatgcttttgaagcaccacttacatttgcaaatgctgattcagttcacttagcaactaaactgtatgtttacaaagtgattttatctccctatgagaagactttagtgaatagctcagtgaatagtagagttgaaaatgtcactgaaacaataaaggacttagcaatttataaaaccactgtcaccgattccacctggagtggatgccatggtgcgggtgcagatccccttcaggaccaaggcatgtga

SEQ ID NO: 137597 - DNA, 11007 bp, Homo sapiens
ggtggcgcgagcttctgaaactaggcggcagaggcggagccgctgtggcactgctgcgcctctgctgcgcctcgggtgtcttttgcggcggtgggtcgccgccgggagaagcgtgaggggacagatttgtgaccggcgcggtttttgtcagcttactccggccaaaaaagaactgcacctctggagcggacttatttaccaagcattggaggaatatcgtaggtaaaaatgcctattggatccaaagagaggccaacattttttgaaatttttaagacacgctgcaacaaagcagatttaggaccaataagtcttaattggtttgaagaactttcttcagaagctccaccctataattctgaacctgcagaagaatctgaacataaaaacaacaattacgaaccaaacctatttaaaactccacaaaggaaaccatcttataatcagctggcttcaactccaataatattcaaagagcaagggctgactctgccgctgtaccaatctcctgtaaaagaattagataaattcaaattagacttaggaaggaatgttcccaatagtagacataaaagtcttcgcacagtgaaaactaaaatggatcaagcagatgatgtttcctgtccacttctaaattcttgtcttagtggaaagtcctgttgttctacaattgtacacatgtaacaccacaaagagataagtcagtggtatgtgggagtttgtttcatacaccaaagtttgtgaagggtcgtcagacaccaaaacatatttctgaaagtctaggagctgaggtggatcctgatatgtcttggtcaagttctttagctacaccacccacccttagttctactgtgctcatagtcagaaatgaagaagcatctgaaactgtatttcctcatgatactactgctaatgtgaaaagctatttttccaatcatgatgaaagtctgaagaaaaatgatagatttatcgcttctgtgacagacagtgaaaacacaaatcaaagagaagctgcaagtcatggatttggaaaaacatcagggaattcatttaaagtaaatagctgcaaagaccacattggaaagtcaatgccaaatgtcctagaagatgaagtatatgaaacagttgtagatacctctgaagaagatagtttttcattatgtttttctaaatgtagaacaaaaaatctacaaaaagtaagaactagcaagactaggaaaaaaattttccatgaagcaaacgctgatgaatgtgaaaaatctaaaaaccaagtgaaagaaaaatactcatttgtatctgaagtggaaccaaatgatactgatccattagattcaaatgtagcacatcagaagccctttgagagtggaagtgacaaaatctccaaggaagttgtaccgtctttggcctgtgaatggtctcaactaaccctttcaggtctaaatggagcccagatggagaaaatacccctattgcatatttcttcatgtgaccaaaatatttcagaaaaagacctattagacacagagaacaaaagaaagaaagattttcttacttcagagaattctttgccacgtatttctagcctaccaaaatcagagaagccattaaatgaggaaacagtggtaaataagagagatgaagagcagcatcttgaatctcatacagactgcattcttgcagtaaagcaggcaatatctggaacttctccagtggcttcttcatttcagggtatcaaaaagtctatattcagaataagagaatcacctaaagagactttcaatgcaagtttttcaggtcatatgactgatccaaactttaaaaaagaaactgaagcctctgaaagtggactggaaatacatactgtttgctcacagaaggaggactccttatgtccaaatttaattgataatggaagctggccagccaccaccacacagaattctgtagctttgaagaatgcaggtttaatatccactttgaaaaagaaaacaaataagtttatttatgctatacatgatgaaacattttataaaggaaaaaaaataccgaaagaccaaaaatcagaactaattaactgttcagcccagtttgaagcaaatgcttttgaagcaccacttacatttgcaaatgctgattcaggtttattgcattcttctgtgaaaagaagctgttcacagaatgattctgaagaaccaactttgtccttaactagctcttttgggacaattctgaggaaatgttctagaaatgaaacatgttctaataatacagtaatctctcaggatcttgattataaagaagcaaaatgtaataaggaaaaactacagttatttattaccccagaagctgattctctgtcatgcctgcaggaaggacagtgtgaaaatgatccaaaaagcaaaaaagtttcagatataaaagaagaggtcttggctgcagcatgtcacccagtacaacattcaaaagtggaatacagtgatactgactttcaatcccagaaaagtcttttatatgatcatgaaaatgccagcactcttattttaactcctacttccaaggatgttctgtcaaacctagtcatgatttctagaggcaaagaatcatacaaaatgtcagacaagctcaaaggtaacaattatgaatctgatgttgaattaaccaaaaatattcccatggaaaagaatcaagatgtatgtgctttaaatgaaaattataaaaacgttgagctgttgccacctgaaaaatacatgagagtagcatcaccttcaagaaaggtacaattcaaccaaaacacaaatctaagagtaatccaaaaaaatcaagaagaaactacttcaatttcaaaaataactgtcaatccagactctgaagaacttttctcagacaatgagaataattttgtcttccaagtagctaatgaaaggaataatcttgctttaggaaatactaaggaacttcatgaaacagacttgacttgtgtaaacgaacccattttcaagaactctaccatggttttatatggagacacaggtgataaacaagcaacccaagtgtcaattaaaaaagatttggtttatgttcttgcagaggagaacaaaaatagtgtaaagcagcatataaaaatgactctaggtcaagatttaaaatcggacatctccttgaatatagataaaataccagaaaaaaataatgattacatgaacaaatgggcaggactcttaggtccaatttcaaatcacagttttggaggtagcttcagaacagcttcaaataaggaaatcaagctctctgaacataacattaagaagagcaaaatgttcttcaaagatattgaagaacaatatcctactagtttagcttgtgttgaaattgtaaataccttggcattagataatcaaaagaaactgagcaagcctcagtcaattaatactgtatctgcacatttacagagtagtgtagttgtttctgattgtaaaaatagtcatataacccctcagatgttattttccaagcaggattttaattcaaaccataatttaacacctagccaaaaggcagaaattacagaactttctactatattagaagaatcaggaagtcagtttgaatttactcagtttagaaaaccaagctacatattgcagaagagtacatttgaagtgcctgaaaaccagatgactatcttaaagaccacttctgaggaatgcagagatgctgatcttcatgtcataatgaatgccccatcgattggtcaggtagacagcagcaagcaatttgaaggtacagttgaaattaaacggaagtttgctggcctgttgaaaaatgactgtaacaaaagtgcttctggttatttaacagatgaaaatgaagtggggtttaggggcttttattctgctcatggcacaaaactgaatgtttctactgaagctctgcaaaaagctgtgaaactgtttagtgatattgagaatattagtgaggaaacttctgcagaggtacatccaataagtttatcttcaagtaaatgtcatgattctgttgtttcaatgtttaagatagaaaatcataatgataaaactgtaagtgaaaaaaataataaatgccaactgatattacaaaataatattgaaatgactactggcacttttgttgaagaaattactgaaaattacaagagaaatactgaaaatgaagataacaaatatactgctgccagtagaaattctcataacttagaatttgatggcagtgattcaagtaaaaatgatactgtttgtattcataaagatgaaacggacttgctatttactgatcagcacaacatatgtcttaaattatctggccagtttatgaaggagggaaacactcagattaaagaagatttgtcagatttaacttttttggaagttgcgaaagctcaagaagcatgtcatggtaatacttcaaataaagaacagttaactgctactaaaacggagcaaaatataaaagattttgagacttctgatacattttttcagactgcaagtgggaaaaatattagtgtcgccaaagagtcatttaataaaattgtaaatttctttgatcagaaaccagaagaattgcataacttttccttaaattctgaattacattctgacataagaaagaacaaaatggacattctaagttatgaggaaacagacatagttaaacacaaaatactgaaagaaagtgtcccagttggtactggaaatcaactagtgaccttccagggacaacccgaacgtgatgaaaagatcaaagaacctactctgttgggttttcatacagctagcgggaaaaaagttaaaattgcaaaggaatctttggacaaagtgaaaaacctttttgatgaaaaagagcaaggtactagtgaaatcaccagttttagccatcaatgggcaaagaccctaaagtacagagaggcctgtaaagaccttgaattagcatgtgagaccattgagatcacagctgccccaaagtgtaaagaaatgcagaattctctcaataatgataaaaaccttgtttctattgagactgtggtgccacctaagctcttaagtgataatttatgtagacaaactgaaaatctcaaaacatcaaaaagtatctttttgaaagttaaagtacatgaaaatgtagaaaaagaaacagcaaaaagtcctgcaacttgttacacaaatcagtccccttattcagtcattgaaaattcagccttagctttttacacaagttgtagtagaaaaacttctgtgagtcagacttcattacttgaagcaaaaaaatggcttagagaaggaatatttgatggtcaaccagaaagaataaatactgcagattatgtaggaaattatttgtatgaaaataattcaaacagtactatagctgaaaatgacaaaaatcatctctccgaaaaacaagatacttatttaagtaacagtagcatgtctaacagctattcctaccattctgatgaggtatataatgattcaggatatctctcaaaaaataaacttgattctggtattgagccagtattgaagaatgttgaagatcaaaaaaacactagtttttccaaagtaatatccaatgtaaaagatgcaaatgcatacccacaaactgtaaatgaagatatttgcgttgaggaacttgtgactagctcttcaccctgcaaaaataaaaatgcagccattaaattgtccatatctaatagtaataattttgaggtagggccacctgcatttaggatagccagtggtaaaatcgtttgtgtttcacatgaaacaattaaaaaagtgaaagacatatttacagacagtttcagtaaagtaattaaggaaaacaacgagaataaatcaaaaatttgccaaacgaaaattatggcaggttgttacgaggcattggatgattcagaggatattcttcataactctctagataatgatgaatgtagcacgcattcacataaggtttttgctgacattcagagtgaagaaattttacaacataaccaaaatatgtctggattggagaaagtttctaaaatatcaccttgtgatgttagtttggaaacttcagatatatgtaaatgtagtatagggaagcttcataagtcagtctcatctgcaaatacttgtgggatttttagcacagcaagtggaaaatctgtccaggtatcagatgcttcattacaaaacgcaagacaagtgttttctgaaatagaagatagtaccaagcaagtcttttccaaagtattgtttaaaagtaacgaacattcagaccagctcacaagagaagaaaatactgctatacgtactccagaacatttaatatcccaaaaaggcttttcatataatgtggtaaattcatctgctttctctggatttagtacagcaagtggaaagcaagtttccattttagaaagttccttacacaaagttaagggagtgttagaggaatttgatttaatcagaactgagcatagtcttcactattcacctacgtctagacaaaatgtatcaaaaatacttcctcgtgttgataagagaaacccagagcactgtgtaaactcagaaatggaaaaaacctgcagtaaagaatttaaattatcaaataacttaaatgttgaaggtggttcttcagaaaataatcactctattaaagtttctccatatctctctcaatttcaacaagacaaacaacagttggtattaggaaccaaagtctcacttgttgagaacattcatgttttgggaaaagaacaggcttcacctaaaaacgtaaaaatggaaattggtaaaactgaaactttttctgatgttcctgtgaaaacaaatatagaagtttgttctacttactccaaagattcagaaaactactttgaaacagaagcagtagaaattgctaaagcttttatggaagatgatgaactgacagattctaaactgccaagtcatgccacacattctctttttacatgtcccgaaaatgaggaaatggttttgtcaaattcaagaattggaaaaagaagaggagagccccttatcttagtgggagaaccctcaatcaaaagaaacttattaaatgaatttgacaggataatagaaaatcaagaaaaatccttaaaggcttcaaaaagcactccagatggcacaataaaagatcgaagattgtttatgcatcatgtttctttagagccgattacctgtgtaccctttcgcacaactaaggaacgtcaagagatacagaatccaaattttaccgcacctggtcaagaatttctgtctaaatctcatttgtatgaacatctgactttggaaaaatcttcaagcaatttagcagtttcaggacatccattttatcaagtttctgctacaagaaatgaaaaaatgagacacttgattactacaggcagaccaaccaaagtctttgttccaccttttaaaactaaatcacattttcacagagttgaacagtgtgttaggaatattaacttggaggaaaacagacaaaagcaaaacattgatggacatggctctgatgatagtaaaaataagattaatgacaatgagattcatcagtttaacaaaaacaactccaatcaagcagcagctgtaactttcacaaagtgtgaagaagaacctttagatttaattacaagtcttcagaatgccagagatatacaggatatgcgaattaagaagaaacaaaggcaacgcgtctttccacagccaggcagtctgtatcttgcaaaaacatccactctgcctcgaatctctctgaaagcagcagtaggaggccaagttccctctgcgtgttctcataaacagctgtatacgtatggcgtttctaaacattgcataaaaattaacagcaaaaatgcagagtcttttcagtttcacactgaagattattttggtaaggaaagtttatggactggaaaaggaatacagttggctgatggtggatggctcataccctccaatgatggaaaggctggaaaagaagaattttatagggctctgtgtgacactccaggtgtggatccaaagcttatttctagaatttgggtttataatcactatagatggatcatatggaaactggcagctatggaatgtgcctttcctaaggaatttgctaatagatgcctaagcccagaaagggtgcttcttcaactaaaatacagatatgatacggaaattgatagaagcagaagatcggctataaaaaagataatggaaagggatgacacagctgcaaaaacacttgttctctgtgtttctgacataatttcattgagcgcaaatatatctgaaacttctagcaataaaactagtagtgcagatacccaaaaagtggccattattgaacttacagatgggtggtatgctgttaaggcccagttagatcccctcgcctcttagctgtcttaaagaatggcagactgacagttggtcagaagattattcttcatggagcagaactggtgggctctcatgatgcctgtacacctcttgaagcgccagaatctcttatgttaaagatttctgctaacagtactcggcctgctcgctggtataccaaacttggattctttcctgaccctagaccttttcttctgcccttatcatcgtttttcagtgatggaggaaatgttggttgtgttgatgtaattattcaaagagcataccttatacagtggatggagaagacatcatttggattatacatatttcgcaatgaaacagaggaagaaaaggaagcagcaaaatatgtggaggcccaacaaaagagactagaagccttattcactaaaattcaggaggaatttgaagaacatgaagaaaacacaacaaaaccatatttaccatcacgtgcactaacaagacagcaagttcgtgctttgcaagatggtgcagagctttatgaagcagtgaagaatgcagcagacccagcttaccttgagggttatttcagtgaagggccgtttagggccttggattatccccggccaaatgttgaatgataagaaacaagctcagatccagttggaaattaggaaggccatggaatctgctgaacaaaaggaacaaggtttatcaagggatgtcacaaccgtgtggaagttgcgtattgtaagctattcaaaaaaagaaaaagattcagttatactgagtatttggcgtccatcatcagatttatattctctgttaacagaaggaaagagatacagaatttatcatcttgcaacttcaaaatctaaaagtaaatctgaaagagctaacatacagttagcagcgacaaaaaaaactcagtatcaacaactaccggtttcagatgaaattttatttcagatttaccagccacgggagccccttcacttcagcaaatttttagatccagactttcagccatcttgttctgaggtggacctaataggatttgtcgtttctgttgtgaaaaaaacaggacttgcccctttcgtctatttgtcagacgaatgttacaatttactggcaataaagttttggatagaccttaatgaggacattattaagcctcatatgttaattgctgcaagcaacctccagtggcgaccagaatccaaatcaggccttcttactttatttgctggagatttttctgtgttttctgctagtccaaaagagggccactttcaagagacattcaacaaaatgaaaaatactgttgagaatattgacatactttgcaatgaagcagaaaacaagcttatgcatatactgcatgcaaatgatcccaagtggtccaccccaactaaagactgtacttcagggccgtacactgctcaaatcattcctggtacaggaaacaagcttctggtaagtatgtcttctcctaattgtgagattatattatcaaagtcctttattcactttgtatgggccaaaggaagtctgtttccacacctgtctcagcccagatgacttcaaagtcttgtaaaggggagaaagagattgatgaccaaaagaactgcaaaaagagaagagccttggatttcttgagtagactgcctttacctccacctgttagcccccatttgtacattggtttctcccggcgccacagaggccatttcagccaacaatggagttgtggcaccaaatacgaaacacccataaagaaaaaagaactgaattctcctcagatgactcgcatttaaaaaatacagtgaaattgctcttttggaaagaaattcactagctgacgaacaacttgccttgataaatacccaagctcttttgtctggttcaacacgagaaaaacaatttatatctgtcagagaatccactaggactgctcccaccaggtcagaagattatctcagactgaaacgacgttgtactacatctctgatcaaagagacaggagagttcccacggccactactgaagaatgtgagaaaaataagccggacacaattacaactaaaaaatatatctaagcatttgcaaaggcgacaataaattattgacgcttaacctttcccagtttataagactggaatataatttcaaaccacacattagtacttatgttgcacaatgagaaaagaaattagtttcaaatttacctcagcgtttgtgtatcgggcaaaaatcgttttgcccgattccgtattggtatacttttgcttcagttgcatatcttaaaactaaatgtaatttattaactaatcaagaaaaacatctttggctgagctcggtggctcatgcctgtaatcccaacactttgagaagctgaggtgggaggagtgcttgaggccaggagttcaagaccagcctgggcaacatagggagacccccatctttacgaagaaaaaaaaaaaggggaaaagaaaatcttttaaatctttggatttgatcactacaagtattattttacaatcaacaaaatggtcatccaaactcaaacttgagaaaatatcttgctttcaaattgacacta

SEQ ID NO: 137598 - DNA, 732 bp, Homo sapiens
  misc_feature (1)...(732): n = a,t,c or g
agctatcagattctgcaaagtactacctgtcngacgttgacngcatcgcccctttgagctacctgcccacccagcagtacgtgctgcgggtcagcgtgccaccaccggcatcatcgagtaccctttcgacctgtagaacatcatcttccggatggtggatgtggggggccagcggtcggagcggaggaagtggatccactgctttgagaacgtgacatccatcatgtttctcgtcgccctcagcgaatacgaccaagtcctggtggagtcggacaacgagaaccggatggaggagagcaaagccctgttccggaccatcatcacctacccctggttccagaactcctccgtcatcctcttcctcaacaagaaggacctgctggaggacaagatcctgtactcgcacctggtggactacttccccgagttcgatggtccccagcgggacgcccaggcggcgcgggagttcatcctgaagatgtcgttggacctgaaccccgacagcgacaagatcatctactcacacttcacgtgtgccaccgacacggagaacatccgcttcgtgttcgcggccgtgaaggacaccatcctgcagctcaacctcaaggagtacaacctgttatcaggggatgtacatctctccctccgtacacttcgcgcaccttctcaccttttgtcaacggcaaaggcagcctttttctggccttgacttatggcacgcttttttctaaa

SEQ ID NO: 137599 - DNA, 1977 bp, Homo sapiens
atgactctggagtccatgatggcgtgttgcctgagcgatgaggtgaaggagtccaagcggatcaacgccgagatcgagaagcagctgcggcgggacaagcgcgacgcccggcgcgagctcaagctgctgctgctcgaacccccgccgccatccctgcatgcacccggtcttctgtgcctgcactttggacttgagattgacacggggttcaaggacgaagtctgccgacaggcgctttcaggacagcactggtgggtgggtcttcgggccacctgcagggcctgggagcagtgtggtgtccggatcagggactgtggggccaggtccacactgtgggatgagtgcagcccccacggctgtggtggggctgggtccacgctgtgggatgaatgcagcccccagggactgtggggccgggtggagatgtccaggccagtgcccacaactgggttagatgggctgcacaaggctggggaccagtctcccaggctgtcggggggcttcagtaatggctgtgggaagacccagcacgtggggccctgtggctctggccttgctcccgacagcggtgccttcttgctgtgtcctcatgcggacgggatccctcctggaaccatcagtgccctcatgaaagagccccccaagagctccgtggcggaagaagctgatcccgcctcccaacaccactgtcttaggggcacgggcgagagcgggaagagcacgttcatcaagcagatgcgcatcatccacggcgccggctactcggaggaggacaagcgcggcttcaccaagctcgtctaccagaacatcttcaccgccatgcaggccatgatccgggccatggagacgctcaagatcctctacaagtacgagcagaacaaggccaatgcgctcctgatccgggaggtggacgtggagaaggtgaccaccttcgagcatcagtacgtcagtgccatcaagaccctgtgggaggacccgggcatccaggaatgctacgaccgcaggcgcgagtaccagctctccgactctgccaagtactacctgaccgacgttgaccgcatcgccaccttgggctacctgcccacccagcaggacgtgctgcgggtccgcgtgcccaccaccggcatcatcgagtaccctttcgacctggagaacatcatcttccggtaccgcccgggccacagcaggcggggagggggcactgagaggctcatttgcccgccgcctctgtccaccacacgctggcagagggccggccaggtgctgtgggatgcagctggaggccttgaaggccggtgggatcgtcccagaggataccggcaactctgccctctgcagccgtcactggagggtccctgcagggagcaactgtggcatcagtgtttactcctgcgagtgacgcttggtgaacatctgtgtccctggcccagtgaggggaaaggcttctgtgctcagggtgacatccagatgccagatgtagggtccctgggcacccatcgcaggatggtggatgtggggggccagcggtcggagcggaggaagtggatccactgctttgagaacgtgacatccatcatgtttctcgtcgccctcagcgaatacgaccaagtcctggtggagtcggacaacgagaaccggatggaggagagcaaagccctgttccggaccatcatcacctacccctggttccagaactcctccgtcatcctcttcctcaacaagaaggacctgctggaggacaagatcctgtactcgcacctggtggactacttccccgagttcgatggtccccagcgggacgcccaggcggcgcgggagttcatcctgaagatgttcgtggacctgaaccccgacagcgacaagatcatctactcacacttcacgtgtgccaccgacacggagaacatccgcttcgtgttcgcggccgtgaaggacaccatcctgcagctcaacctcaaggagtacaacctggtctga

SEQ ID NO: 137600 - DNA, 1622 bp, Homo sapiens
gccctcggccccgggccggcccgccccgcctcggccgccgcctggcgagccgccgggtccccgctcggccggtggccgaggccggagggccgcggcgggcggcggccgaggcggctccggccagggccgggccgggggccggggggcggcggcgggcaggcggccgcgtcggccggggccgggacgatgactctggagtccaatgaatggcgtgttgcctgaggcgatgaggtgaaggagtccaagcggatcaacgccgagatcgagaaggcagctgcggcggagacaaggcgcgacgcccggcgcgagcttcaaggctgctgctgctcggcacgggcgagagcgggaagagcacgttcatcaaggcagatgcgcatcatccacggcgccggctactcggaggaggacaagcgcggcttcaccaagctcgtctaccagaacatcttcaccgccatgcaggccatgatccgggccatgggagacgcttcaagatcctctacaaagtacggagcagaacaagggccaatgcgcttcctgatccggggaggtgggacgttggagaaggtgaccacctttggagcattcagttacgttcagttgccattaaaggacctttttgggagggacccgggcatccaggaattgcttacgaacggcagccgcgaagttaccagctctccgactctgccaagtactacctgaccgacgttgaccgcatcgccaccttgggctacctgcccacccagcaaggacgtgcctgcggggtcccgcgtgcccaccacctggcatcatcgagtaccctttcgacctggagaacatcatctttccggatggttgatgtggggggcccagcggtctggagcggaggaagtggatccactgctttgagaacgtgacatccatcatgtttctcgtcgccctcagcgaatacgaccaagtcctggtggagtcggacaacgagaaccggatggaggagagcaaagccctgttccggaccatcatcacctacccctggtttccagaactcctccgtcatcctcttcctcaacaagaaggacctgctggaggacaagattcctgtactcgcacctggtggactactttccccgaagttcgatgggtccccagcggggacgccaaggcggcgcgggagttcatcctgaagatgttcgtggacctgaacccgaacagcgacaagatcatctaacttcacacttcacgtgtccccaccgacaccggagaacatcccgcttcgtgttcccggccgtgaaggacaccatcctgcagctcaacctcgaggagtacaaacctggtctgagcgccccaggcccagggagacgggatggagacacggggcaggaccttccttccacggagcctgcggctgcccgggcgggtggcgctgccgagtccgggccggggcctctgcccgcgggaggagattttttttttttcatatttttaacaaatggtttttatttcacagttatcaggggatgtacatctctccctccgtacacttcgcgcaccttctcaccttttgtcaacggcaaaggcagcctttttctggccttgacttatggctcgcttttttctaaaaaaaaaaaaaaaaagaaagaaag

SEQ ID NO: 137601 - DNA, 401 bp, Homo sapiens; identical to SEQ ID NO: 92439

SEQ ID NO: 137602 - DNA, 1074 bp, Homo sapiens
atgatagaaaaagagagaaaaagaaagaaagagaaaaagagacaaagaaaaagaaagaatgaaagaagaaagaacaaaaaaggagaaagaaaggaagaaagaaagaaaggaaagaaagagaagaaagacagaaagaaagacagacagaaagaaagaaagcaggctatagatcttcagcaaggtttatcttctatagctaacgctgtcctggccctctgccctgtctacctgctcatgcacaccgggggctttaaaaccatccacaggccggccactcccaaacggatgtcttcagccccagatcccctttatccagtcgcctacttggcacccacacttggacagcccctaggctactcaggtggctgcaggctgcagaagcccccaagctctcaggccagctgtggcttctttgctgagatggagctttgtcagttaactgttcctacaaatgaaagacacaagccaataaagccagtgagaaaggagcttaccaaaggcagtgtacgaagaaggttcctgggagactgtcagaaatgtcatgtgtttgctgcccttgtgaatgggacccctcagacaatagccttgcaggctgcctcttcatctgatcctggtcgaggacctgagtttttcactgaacttcaccctgccggcgaacacagtaagtacagcagcccccattcaccaggcaacgcagagaagaccagtgcagaatttacagactgtgggccctctcttggattagcggcgggcataccattgctggtggccacagccctgctggtggctttactatttactttgattcaccgaagaagaagcagcattgaggccatggaggaaagtgacagaccatgtgaaatttcagaaattgatgacaatcccaagatatctgagaatcctaggagatcacccacacatgagaagaatacgatgggagcacaagaggcccacatatatgtgaagactgtagcaggaagcgaggaacctgtgcatgaccgttaccgtcctactatagaaatggaaagaaggaggggattgtggtggcttgtgcccagactgagcctggaatga

SEQ ID NO: 137603 - DNA, 2121 bp, Homo sapiens
tgcctctgcagctttgtcagttaactgttcctacaaatgaaagacacaagcccaataattttcgtgagaaaggagcttaccataaggcagtgtacgaagaaggttcctgggagactgtcagaaatgagtttttcacgtgaacttcaccctgccggcgaacacaacgtcctctcctgtcacaggtgggaaagaaacggactgtgggccctctcttggattagcggcgggcataccattgctggtggccacagccctgctggtggctttactatttactttgattcaccgaagaagaagcagcattgaggccatggaggaaagtgacagaccatgtgaaatttcagaaattgatgacaatcccaagatatctgagaatcctaggagatcacccacacatgagaagaatacgatgggagcacaagaggcccacatatattgtgaagactgtaacaagaaagcgaggaacctgtgcatgaccgttaccgtcctactatagaaatggaaagaaggaggggattgtggtggcttgtgcccagactgagcctgggaatgatgccaacctcaaatcaggggagccaccagacctggcaccttggaacagggttgaaaacccagggttttgtacttggagaggaaagatgccaagctgcttcttaatcaatccaaatttcatttacagctctggaacactttggggctgatttgtctctttagggggacatccccaacatggttaattccaactctcagatctttgggctttagttagaacatgtgactccccagagggggtccttagatcctattcctgctcccagtgggaattgctttttctttgtcattttggaaaaggggcttggtttatgagtgtctcgccttctcatctttttttttcatatcctttttctcaaaagagccatcagatctgactttcatgggaagtgttgctgaggtcagccgggtgcaagttgggatacaaatgaaacttatggcagggtgtgtgagaggaagcagttaattgtttctgaatatctcagggtaggaaccatgtggagccgcacattccctgaccacagggaagcacctggctcaatcatgtcacacagcagtggaaagaatacggactcataagtcacacctaccactgagcagctgtacgactttgagagaagttgtttaacattttcaagcctcagtttttgcttttttaaaggaggggaaatatttgcctcatgtcataattgaaaagattaaataagaaataaagggaagtgtctgctacttagttgccagtcaaaatgttagttctctctctctaccaccttcttcctacctcttcccatattgcttgcctgataaaacagctaatcaccagcatttgttccccatagtcacagggccacacaagggaacatttaggacaaactttctccatggcctatgatccaaattgttatctaaagatgattctaggtgttgctggtagtatgtgaatcttccaatctaggtgtgatcgtgtcctcatatgaatcaggaaaaggcagtttcttacaagttccgaattccaaatacagagactggtggtgttacatttaaccttaaagatgttaatgttgatggaaattcatgtttcatattaaaacaacactttgtctttacaatgaaacattttgcttaatttttaaagtaagacattatgatacctctgatggcagttcctcaaataactttaacttttgtgctttagggatagttgttaaagttacaacttcttttattttattttttaaaggcttcagattaaacaagagcccttaagcccacgcatagcattgccgcttcagcttgctgagggactgtctccaaggaggccaaatgggaaaaggagaggctacttcaagtgggtgttgggcccattgaggcctattggggcaaactattaaccgggttggccttattttggggtgggattactccaggagaggccaccctccagctttctcttatcccagtaactcctcttcccattttccaatccatccccagccatttttttttttcttctgtactcttcttttgccttcaatatgagtttcatttcctctgtgtctttgggcagac

SEQ ID NO: 137604 - DNA, 413 bp, Homo sapiens
  misc_feature (1)...(413): n = a,t,c or g
ggtnnnnnnnnnnnnnnnnnnnnnnnnnnnnnnnnnnnnnnnnnnnnnnnnnnnnnnnnnnnnnnnnnnnnnnnnnnnnnnnnnnnnnnnnnnnnnnnnnnnnnnctcggcgctcaggaagcatggcactctggcgggcataccagcgggccctggccgctcacccgtggaaagtacaggtcctgacagctgacttctggggaggaaggcagcactgctggccccatgccagtagctatacctgccgacccaggcctcctggactgaaggacacgcttcctgctcctcactccaagaagccacttcttgcccctctgccttctgcgcatgaaactcaaaagccacaaaacagctggtggagaggcggggtctgcaggaacaccagagaggccggactctgaccatggtgtccc

SEQ ID NO: 137605 - DNA, 146 bp, Homo sapiens
ggccctgtggtaggaggctggtacaaggttttggatcggttcatccctggcaccaccaaagtggatgcactgaagaagatgttgttggatcagctatggcctgctgtgcagttagccaacttctacctggtcccccttcattacag

SEQ ID NO: 137606 - DNA, 442 bp, Homo sapiens
tgggagggaggctcggcgctcaagaagcatggcactctggcgggcataccagcgggccctggccgctcacccgtggaaagtacaggtcctgacagctgacttctggggaggaaggcagcactgctggccccatgccagtagctatacctgccgacccaggcctcctggactgaaggacacgcttcctgctcctcactccaagaagccacttcttgcccctctgccttctgcgcatgaaactcaaaagccacaaaaggtccctgatgggcctgggtgacattatctcacagcagctggtggagaggcggggtctgcaggaacaccagagaggccggactctgaccatggtgtccctgggctgtggctttgtgggccctgtggtaggaggctggtacaaggttttggatcggttcatccctggcaccaccaaagtggatgcact

SEQ ID NO: 137607 - DNA, 1021 bp, Homo sapiens
ggcggcattcgaggttcggcgctcagggaagcatggcactctggcgggcataccaaacggaccctgtttcgctctcccgtggaaaagtacaggtcctgacagctgggtccctgatgggcctgggtgacattatctcacagcagctggtggagaggcggggtctgcaggaacaccagagaggccggactctcgagccatggtgtccctgggctgtggctttgtgggccctgtggtaggaggctggtacaaggttttggatcggttcatccctggcaccaccaaagtggatgcactgaagaagatgttgttggatcaggggggctttgccccgagttttctaggctgctttctcccactggtaggggcacttaatggactgtcagcccaggacaactggggccaaactacagcgggtgagctgggcaggattatcctgatgcccttatcaccaactactatctatggcctgctgtgcagtttagccaacttctacctggtcccccttcattacagggtgggccgttgtccaatgtgttgctgttatctggaactcctacctgtcctggaaggcacatcgggctctaagcctgcctcactccatcgtttccaccttgcaagtgatgcagcttgacccctggaacgggtcagacaaccctcctcaaaagtgggcatagcgagtttcccacgggggttgggttgccggtcaggagcttaagaggactagcaccctgcaaatgcccctcttcactctaaaatgtacactgactgctttagagcccttgattatagtcttaattcccaccacatactaaggcactccataaatatctgttgaaccttcatgaccttatcaacttttacacccaatatcccagcaaatgccactcatccccactcttcatagacacatttgttactctaaccctgcctaggcttcttgtagctccagctctttagagactcccggaaccctttatatggtgcctcagtaaatatgttattaaatatgtaatccggaaac

SEQ ID NO: 137608 - DNA, 1619 bp, Homo sapiens
atgaaggccttggcggggcgaaggcggcttcccaggccgggaaagtctctggcggccgaacaagcccttgggcccaccacattgacccgggccgggctggacttgccaatttgcccagaactgcaaaaccccggcgtctgcgggtcgcagccaatcagcgccggcctcgcgttgccttcagccaatcagggtccacttcgcaccgtcagccaaccaatcaacgcgctcgcgctcaacttgttttgtccgcgagccccgactgccacgggccgggagacgggcctgggagcggcggcggcggcccgagagctgcgccgggagagctgtgccgcgagcctccgcctcttttttggcaccgcacagtggatccctggaggccgagcgccacgccgcccgggtacccggcagatcgcgaggtggaacgggccgtcgctgcgggggacagcgttccgaggcagttggtcctctccgggatgccgtaggcatcagctgaccggcccagcccacgtgactacaggggcacttgatgggaatcatggcagcatccaggccattgtcccgcttctgggagtggggaaagaacatcgtctgcgtggggaggaactacgcggaccacgtcagggagatgcgcagcgcgggtggttgagcgagcccgtgctgttcctgaagccgtccactggcgtacgcgcccagagggctcgcccaatcctcatgcccgcgtacactcgcaacctgcaccacgagctggagctgggcgttggtgattgggcaagcgctgccgcgcagtccccgagggctgcggccatggactacgtgggcgggctatgccctgtgcctgggatatgaccgcctgggacgtgcaggacgagtgcaagaaagaaggggcttgcctgggactctggcgaagagccttcacggcgtcctgcccggttcagcgcgtttcgttgcccaaggagaagatccctgacccttcacaagctgaaagctctgggcttcaaggtcaacggcgaactcagacaggagggtgagacatcctccatgatttttttccatcccctacatcatcagctatgtttctaagatcataaccttggaagaaggagatattatcttgactgggacgccaaagggagttggaccggttaaagaaaacgatgagatcgaggctggccatacacgggctggtcagtatgaccatttaaaagtggaaaaagcccagaatcattgagttaatttccttaacaagttttcgaaagagaaagggagcaagacaagagccaagcaacggctattaaatgtcacaatcctttaattagaaaccatttattggcccggacgcggtggctcacgccctgtaatcgcagcactttgggaggccgaggcgggcggctcacgacgtcaggagatccagacccatcttggctaacagggtgaaaccccgtctctactaaaaatacaaaaaattagccgggcgtggtggcgggcgcctgtagtcccagctactctggaggctgaggcaggagaatcaattgaacccgggaggcggagcttacagtgagctgagattgcgcccctgtactcctgggcaacagcgagactccgtctcaaaaaaaaaaaaa

SEQ ID NO: 137609 - DNA, 436 bp, Homo sapiens
agaaaatataatccccttggatttattctctgctttcagtctaaaggagaaaaagctccccaggattcctaaataacagagaagtttgtagtgtaggaagaatctagaagttgggatggagagaaatgtgggaaagtcttacttttaaagagacattccctaaagaggggtaagaagttctgaaacagtgacgtaccagtgaccatgaatgtttcagagaaggtcagatttgcagtgtgtgtcttagagaaaggctaaatctcaacccagaggaagcatgtcttctgtctcaagccccctgcatgctgtttgtcttgcagtatctgaacacagtcattccttacgagaagaaagcctctcctccctcagtgggaagacctgcagatgctggacaaacattctctttgccatgaaggaggataatgagaaggtgcct

SEQ ID NO: 137610 - DNA, 1679 bp, Homo sapiens
acgagggtccggctgagccccgggatccgcctccctccgccaggacccgcacagataaactcatcctgaaagtcgctgttgttctcctgctgagcaagaatggaggccccactggtgagtctggatgaagagtttgaggaccttcgaccctcctgctcggaggacccggaggagaagccccagtgtttctatggttcatctccccaccatctcgaggacccctccctctccgagcttgagaatttttcttccgaaataatcagcttcaagtccatggaggacctcgtaaatgaatttgatgagaagctcaatgtctgctttcggaactacaacgccaagaccgagaacctagctcccgtgaagaaccagttacagatccaagaggaggaggagacccttcaggacgaggaggtttgggatgctctgacagacaattacatcccttcactctcagaagactggagggatccaaacatcgaggctctgaatggcaactgctctgacactgagatccatgagaaagaagaggaagagttcaatgagaagagtgaaaatgattccggtatcaacgaggagcctctgctcacagcagatcaggtaattgaggagattgaggaaatgatgcagaactccccagaccctgaggaagaagaggaggttctggaagaagaggatggaggagaaacttcctcccaggcagactcggtcctcctgcaggagatgcaggcattgacacagaccttcaacaacaactggtcctatgaagggctgaggcacatgtctgggtctgagctgaccgagctgctggaccaggtggagggtgccatccgtgacttctgggaaggagctggtgcagcagctggcccgccgggacgagctggagtttgagaaggaagtgaagaactcttttttccacggtgcttaattgaggttcagaacaagcagaagggagcagcgagaactgatgaaaaagaggcggaaagagaaagggctgagcctgcagagcagccggatagagaagggaaaccagatgccttctcaagcgcttcagcatggaaggcatctccaacattctgcagagtggcatccgccagacctttggctcctcaggaactgacaaacagtatctgaacacagtcattccttacgagaagaaaagcctatcctccctcagtggaagcacctgcagatgctgacaaacattctctttgcccatgaaggaggataatgagaaggtgccctactttgcctaaacggaactaacatttttaaaaagtgctcctgccccctaccctaaccttgcccctttggaagcagcctcgcctgcagggaggtcaactgagcaaagagtcattcccatcacagggactgcatgagacccatgtaaccctccgacatgtatttaaacgtgtatagcttaaccctggattaaacaccgagcaaggcgcgcggggtcctttgccgttggcttctagttgctagtaatcattggatgcatgatggggcagggcgggtgaatggtgcctccccctttgctggtgtcaggaagaaggggaaaggcagccgcttttaaccgctcatgtatgtagtctggctacagccctcaaaaacagcttatactcttaagactaattttgaaataaaaccttcatttaattaataaaaaaaaaaaaaaaaaa

SEQ ID NO: 137611 - DNA, 1171 bp, Homo sapiens
gcctgtatcccgtgctgtttccctggcagacacacaggcgctcacgagtctctccttgccagcctgcagggcggcgacccccaaaacccagctccgggtcccaacctaggcaagaagctgcttctctgccaacagctcctcttcggcctccgtcacagccacctggaccctaccctttcgcgactgctgctgctgctgcccggacgtggaagcagcaagaggcgcttggtcaagacacactgacggtacctacagaatactggacatacggattcagaatccataaggctttatcaccttgaatcaaggatttatttgatatcatcctcggtctttacttcctatcaagtaacattgttttgaaaaatagagttaacacatttgccataagggagttttttttttttttttaaatacttcgcatactctccaatgcccaaaaatagcaaggtggtaaaaagagaattagatgatgatgttactgagtctgtcaaagaccttctttccaatgaagacgcagctgatgatgcttttaagacaagtgaactaattgttgatggccaggaagagaaagatacagatgttgaagggaagttctgaagtcgaagatgaaagaccagcttggaacagtaaactacaatacatcctggcccaagttggattttctgtaggtttaggaaatgtgtggcgatttccatacctatgtcagaagaatgggggcgttgtagaaccagaatgtgaacaaagttctgccaccacctattactggtacagggaagcactgaatatttcaagttccatttctgaaagtgggggcttaaactggaagatgaccatctgcttgttggctgcctgggtcatggtttgcttggctatgatcaaaggcattcagtcttctggaaaagttaatacatatgatagagttactatgtcagcaactgtgttagccttgcaggaacaatggcaaacctttagcccgatcaggagtggcaatgggcaccttactggatcaggagcacagcggacaccctgccggatccggaggggtggaagtcagttacgggtctgcgatggcggcaaacagcagtggtggactgtcagccaaagctcagctcgagccataacaaacacggaccagaagagtgtgcagttgcaagatttaatagagtga

SEQ ID NO: 137612 - DNA, 568 bp, Homo sapiens
ggcacgaggcaagagctggttcaggtggcagccacagcagcctcagggacctcagcaactatggcctcctgcccagactctgataatagctgggtgcttgctggctccgagagcctgccagtggagacactgggcccggcatccaggatggacccagaatctgagagagccctgcaggcccctcacagcccctccaagacagatgggaaagaattagctgggaccatggatggagaagggacgctcttccagactgaaagccctcagtctggcagcattctaacagaggagactgaggtcaagggcaccctggaaggtgatgtttgtggtgtggagcctcctggcccaggagacacagtagtccagggagacctgcaggagaccaccgtggtgacaggcctggggaccagacacacaaggacctggaaggccagagccctccacagagcctgccttcaacccccaaagcagcttggatcagggaggagggcccgctgctccagcagttgacgatgacacccgacgtggacatggaggggtctgcggagacggcggggccggggaggcc

SEQ ID NO: 137613 - DNA, 693 bp, Homo sapiens; identical to SEQ ID NO: 134963

SEQ ID NO: 137614 - DNA, 480 bp, Homo sapiens
  misc_feature (1)...(480): n = a,t,c or g
nccttgatatcccctcgccangngcgggaattcgatcgcctcccggctgtagacaaggggcccatcctcaagaccaagccaccagccgcccagaaggacatcctgggcgtgtgctgcgaccccctggtgctggcccagcagctgactcacattgagctggacagggtcagcagcatttaccctgaggacttgatgcagatcgtcagccacatggactccttggacaaccacaggtgccgaggggacctgaccaagacctacagcctggaggcctatgacaactggttcaactgcctgagcatgctggtggccactgaggtgtgccgggtggtgaagaagaaacaccggacccgcatgttggagttcttcattgatgtggcccgggagtgcttcaacatcgggaacttcaactccatgatggccatcatctctggcatgaacctcagtcctgtggcaaggctgaagaaaacttggtccaag

SEQ ID NO: 137615 - DNA, 774 bp, Homo sapiens
tcaggagcctgggctgcgaggctccataggagggctggtggctgggaggtcgcgtccgcacacttctggaagtgagcctttgagtacgggctgtccaaagtttacattttcattttccatggcgcaggacagctgtccttcagaaagcacacggtcaatccacgtggaccgtctccctcgcaggaactccgcatccttgtccctctctgcattcccagtttccgcaggagccttgatcaatggggaagcctgggtgaggatgggccaggtcccaattcccaaagctccctgatttgatgttttggtatttgagatgaactctgagtatgaagctgtaccataatgcaggacgtcagttttggtgtgactggacatacttgcttcaataaaagaatacatcactcccctcccttgcctgctgtgtgtgtacagtgagggggtggccttgctgctggccggagacatgggtccccttatagcctccatgtttttcatctgatcacggctctcttgcagggccgtggtagcagacagagcaggcacctggttcattgtcagcacagtcagtgctcgctgtagactggccttggtgccgaggacgccaagcagcacttctggttcattgtcagcacagtcggtgcttgctatggactggccctggtgctgcggacgccaagcagcacttctgcaaaaggccacagcaccttttgggaaaagtgaagcaaaggcccccttctcaaaggaacacctggggtcctggtcaatacgaagcat

SEQ ID NO: 137616 - DNA, 3011 bp, Homo sapiens
atgaagccgccgcgcgcccgcggccccgcccaggaagctccgccactggcagctgggtaccgattcatcaccgacgtgtttaaagtatccgtgtgtgtgcctccaaaaaccgtttgtggagacagcagagtgcccgaggcaggaaaccgctccggcctggaggcgcccctgcccggactcgtggactgcagcgctgtcccgctcggaagccgatcctgggagtccgagcggggccgcggggcctgcgtggcagccgagtcgagggcttcgggccgcggggctgtggagcgccccttggcgctgggccgccggcagccgcatggctggctgtctggggcactggggaaacaggcccagagggcttcagactcccctaggcttcacaagaactcccagctgcagggtgtggaaactatgccccagacgtccgttgtcttctccagcatccttgggcccagctgtagcggacaggtgcagcctggcatgggggagcgtggaggcggggccggtggcggctccggggacctcatcttccaagatggacacctcatctctgggtccctggaggccctgatggagcaccttgttcccacggtggactattaccccgataggacgtacatcttcacctttctcctgagctcccgggtctttatgccccctcatgacctgctggcccgcgtggggcagatctgcgtggagcagaagcagcagctggaagccgggcctgaaaaggccaagctgaagtctttctcagccaagatcgtgcagctcctgaaggagtggaccgaggccttcccctatgacttccaggatgagaaggccatggccgagctgaaagccatcacacaccgtgtcacccagtgtgatgaggagaatggcacagtgaagaaggccattgcccagatgacacagagcctgttgctgtccctgggctgcccggagccagctccagggaactgcgagagaagctccggccaccggctgtagacaaggggcccatcctcaagaccaagccaccagccgcccagaaggacatcctggggcgtgttctgcggacccctggtgctgggcccagcagcttgattcacatttgagctgggacagggtcagcagcatttaccctgaggactttgatgcagatcgtcagccacatggactccttggacaaccacaggttgccgaggggacctgaccaagacctacagcctggaggcctatgacaactggttcaactgcctgagcatgctggtggccactgaggtgtgccggctcctgctgtcccccggcagcgccatgctgaggtcacctgccaccttccaggtggtgaagaagaaacaccggacccgcatgttggagttcttcattgatgtggcccgggagtgcttcaacatcgggaacttcaactccatgatggccatcatctctggcatgaacctcagtcctgtggcaaggctgaagaaaacttggtccaaggtcaagacagccaagtttgatgtcttggagcatcacatggacccgtccagcaacttctgcaactaccgtacagccctgcagggggccacgcagaggtcccagatggccaacagcagccgtgaaaagatcgtcatccctgtgttcaacctcttcgttaaggacatctacttcctgccacaaaatccataccaaccacctgcccaacgggcacattaactttaagaaattctgggagatctccagacagatccatgagttcatgacatggacacaggtagagtgtcctttcgagaaggacaagaagattccagagttacctgctcacggcgccccatcctacagcgaggaagctctcttcgtcgccctcctttgaaagtgagggtcccgagaaccacatggaaaaagacagctggaagaccctcaggaccacccttctgaacagagcctgaggcggatgcagcccgcgacgccagaggaagcacgtgcactaactgggtttaaattttgactgatgtgggttgagaatgaggagcccctcactggttggggtccattttgtatataacttttatgagaaaaaaatggtaattatttcacgcatcaacctttggcacttacaaagttttttttgttgtattttaaataacagggcaaggccctgctttggggagggggaggggagagtatcatgggagatggtatccatgataacatcttattctaatgagatgtagagtattattttttactttttgattattaacatcttatgaaaaaaatattttaaaaaacccagccaaaaccaacgtgagccctgcctgctcggacgcctttccagccagtgtctctgacgtcggggttagtgccttaaagggtactgggggtctggtcttcctgctctgtggtttgggctgcggtgagtcccactccacctgggcgcctgccctcaggagcctgggctgcgaggctccataggagggctggtggctgggaggtcgcgtccgcacacttctggaagtgagcctttgagtacgggctgtccaaagtttacattttcattttcctttcagggatttgtggggtcagggaggggcagggggcacctggcagcatattttctgtgacaatgtgtccagcaaatcattcttcaactacattttagaaaggaggaaatctaaaataaggtaagggagggaagcatggagttgtcagttttctgggctgtgactgaaagacacactgagctgtgatgaagaaaaatacatggccgactccagggtggtgacatttagagctagtcttgaaacctatcatctacagaggggagggcagccaacagccctcttcccacctgggtaggcagcgccctaattggtattggaaacagaaaattcgccaggccatactgctggagcccattcagataaaactgcccaatactgagaggtgttttctacacccagctagaggagcacactccatttttccatggctgagattccggggggaaagcctgggccttactgaccatggcc

SEQ ID NO: 137617 - DNA, 825 bp, Homo sapiens
ttagcaccgagcagcagcgcaggagcgccagaagggcgggagcacacgggcccttccccacagccagcgcctccgcgggtcccacccctcgagggcggggccgaccgctctttccgggtttgcgagcggaagtggacgaatttgaatcctgtgggccgttgaatgtggctgctcgcggtcggcgtgccccgacgtacagcgggccgggaaaagtggcactgaggctctggaacttctgcccagctctccttggtgagtaaatggggaacgggaagacgcagaacgttccagagagagaagcaggaccgtggggtgggagagggtgtcaggaggccggacgtcgcagccggggcctcgcagtgcttttggggacgtctggtgctggggcccggcctggagactaagggaattcggggcactgggggcgtttgctggaccagcgctctcgacggttgcgcacgccagccagctctcagtgttgaggattcggaggcccttgaaggatttgttcaacaatgctgattcctgcacttcagatctcagattctgaatcagtaggtctggaggatggcattgaacagtctgcatatttaactgaaaggttagaaaatactgtgagttttcaaaacactgatttgatctttcatgattatgtagtgtgaacagtcccattatctgtttgcaaactggagacccaggaaagtcccgcagtgtagtttgaatgtctggagccaaacagctgatggtataggttccagtccggatctgaaggccctcctgcgtcaggtagaccccagtgtctcttgtttccttctttgtgttcat

SEQ ID NO: 137618 - DNA, 1389 bp, Homo sapiens
atgaatgaaagtaaacctggtgactcacagaaccttgcttgtgttttctgtcgaaaacatgatgactgtcctaataaatacggagaaaagaaaactaaggagaaatggaatctcactgtacattactactgtttgttgatgtcaagtggaatttggcagagaggcaaagaagaagaaggagtttatggttttctaatagaagatatcaggaaggaagtgaatagagcttctaaactggttcaagcaataaatgcgggagtgtttttctttaggtgtacaatatgcaataatagtgacatctttcagaaagagatgttgagaatgggaattcatattcctgaaaaagatgcttcctgggaattagaggaaaacgcttatcaagagcttctgcagcactatgagcgttgtgatgttcgaagatgtcgttgcaaagaagggcgagactataatgcacctgatagcaaatgggaaataaagcgctgtcagtgttgtggttccagtggcacacatttagcctgctcctcattacggtcatgggagcaaaattgggagtgtttggaatgtaggggtattatctacaattcagctctgaaagagaatctttactatgaagctggcaaaatgcttgccatttctttagttcacggtggtccttcacctggtttcttttctaaaaccttgtttaactgccttgtttatggaccagaaaatacccagccaattttagatgatgtttcagactttgatgtggcacagattataatcaggataaatactgcaacaactgtagctgacttaaagtcaataataaatgaatgctataactaccttgagttaattggatgtctcagacttataacgacattaagtgataaatatatgttagtaaaagacatacttggctaccatgtaattcagagagtccacacaccctttgaaagttttaagcagggtctgaaaacccttggtgttttggagaaaattcaggcttatccagaagcattttgtagcatcctgtgtcataaacctgagagtctttctgcaaaaatccttagtgagctttttacagtacacacattacctgatgtgaaagctttggggttttggaacagttacttacaggctgttgaagatggtaaatctacaacaacaatggaagacattcttatttttgcaactggttgcagttccattcctccagctggatttaaacccactccttcaattgagtgtctgcatgtggattttcctgttggaaacaagtgtaataactgtttagcaattcccatcaccaatacatataaagagtttcaagaaaatatggacttcaccataagaaacactctaagactagaaaaggaagaaagttctcattacattggacattaa

SEQ ID NO: 137619 - DNA, 1224 bp, Homo sapiens
agcggaagtggacgaatttgaatcctgtgggccgttgaatgtggctgctcgcggtcggcgtgccccgacgtacagcgggccgggaaaagtggcactgaggctctggaacttctgcccagctctccttgtaaaatgaatgaaagtaaacctcggtgactcacagaaccttgcttgtgttttctgtcgaaaacatgatgactgtcctaataaatacggagaaaagaaaactaaggagaaatggaatctcactgtacattactactgtttgttgatgtcaagtggaatttggcagagaggcaaagaagaagaaggagtttatggctttctaatagaagatatcaggaaggaagtgaatagagcttctaaactgaaatgctgtgtttgcaagaaaaatggtgctttcattggatgtgttgcaccccgatgtaaacgaagttattcatttcccatgtggacttcagagagaatgtattttccagtttactggcaattttgcgtcattttgttgggaccatcgacctgttcaaataattacatctaataattatagagagtccttaccatggcaccatttgcttgggaatttatttgagcctattccaagttattaacatattacggagtccttgttgtaaggaacgcttggttttcataggagactgtttacaggtttcaagcattaatgcgggagtgtttttctttaggtgtacaatatgcaataatagtgacatctttcagaaacgagatgttgagaatgggaattcaatatccctgaaaaagatgcttcctgggaattagaggaaaacgcttttacaagagcttctgcagcactatgagccgttgtgatgttcgaagatgtccgttgccaaagaagggccgagacctataatgcaccctgatagcaaatgggaaataaagcgcctgtcagtgttgtggttcccagtggcacacatttagcctgctcctcattacggtcatgggagcaaaattgggagtgtttggaatgtaggggtattatctacaattcaggagagttccaaaaaagccaaaaaacatgtattacccaattctaataatgtggggattacagattgtttgttggaagagtcatcacctaaattacccagacagtcacctggatcccagagttaagatctactgaggcaaggctgcaattttagaagaaatgtatcaacactattaatagagttaggattccaaatt

SEQ ID NO: 137620 - DNA, 491 bp, Homo sapiens
  misc_feature (1)...(491): n = a,t,c or g
gagcgcggcggagccagacgctgaccacgttcctctcctcggtctcctccgcctccagctccgcgctgcccggcagccgggagccatgcgaccccagggccccgccgcctccccgcagcggctccgcggcctcctgctgctcctgctgctgcagctgcccgcgccgtcgagcgcctctgagatccccaaggggaagcaaaaggcgcagctccggcagagggaggtggtggacctgtataatggaatgtgcttacaagggccagcaggagtgcctggtcgagacgggagccctggggccaatggcattccgggtacacctgggatcccaggtcgggatggattcaaaggagaaaagggggaatgtctgagggaaagctttgaggagtcctggacacccaactacaagcagtgttcatggagttcattgaattatggcatagatcttgggaaaattgcggagtgtacatttacaaagatgcgttcanatagtg

SEQ ID NO: 137621 - DNA, 891 bp, Homo sapiens
atggagagacttaaggtgtccagtcaaagttggaatcatgttgggcttgtgaaaaagatgaagccactgccagaaaagccacctgtggcagagaaggcagatgaggaatattttggcttctctcttatttctatcatccaatctttgattggctatgcccaactgaaggcctatgaaacaggagccttggaaatagcctgcagaggttggagcagagccagggaagctcaaagaatggatctgaaggcaaacagcaccaatacgtcccagaaggaggttactgaatttctcccttcactggctcatgttcacatgcacacaaatagccataaaatccaacagtgtggcatcttcacccacattcctaaacacctagattacaaggctgtttggattggtattaaatggttcagtggaagattggggcttggggtttcccatagaagggctaatattttgacagctggagaggaagcaagaacccgttctatgaaggaaaatcatcgaaaattatggagtattatctctagaaaaaacaccacaaagacatataatgtcatgaagttttatgatgcatgcacaaataattatgttattgacaatataatggaatgtgctcaccagggccagcaggagtgcctggtcgagacaggaagccctggggccaatggcattccgggtacacctgggatcccaggtcgggatggattcaaaggagaaaagggggaatgtctgagggaaagctttgaggagtcctggacacccaactacaagcagtgttcatggagttcattgaattatggcatagatcttgggaaaattgcgggcaggaattgttggcatatactggcaccagtgcccaacattgtttcactttattttggatcctaa

SEQ ID NO: 137622 - DNA, 2241 bp, Homo sapiens
actcactatagggctcgagcggccgcccgggcaggtgtctgcccgcagccatgagcgtgctcggccccggtggagcccgcagtcctctagattagtctccaccgccgtccaggacccacttgcagcatggagtcgcccgcctcgagccagcccgccagcatgccccagtccaaaggaaaatccaagaggaagaaggatctacggatatcctgcatgtccaagccacccgcacccaaccccacacccccccggaacctggactcccggaccttcatcaccattggagacagaaactttgaggtggaggctgatgacttggtgaccatctcagaactgggccgtggagcctatggggtggtagagaaggtgcggcacgcccagagcggcaccatcatggccgtgaagcggatccgggccaccgtgaactcacaggagcagaagcggctgctcatggacctggacatcaacatgcgcacggtcgactgtttctacactgtcaccttctacggggcactattcagagagggagacgtgtggatctgcatggagctcatggacacatccttggacaagttctaccggaaggtgctggataaaaacatgacaattccagaggacatccttggggagattgctgtgtctatcgtgcgggccctggagcatctgcacagcaagctgtcggtgatccacagagatgtgaagccctccaatgtccttatcaacaaggagggccatgtgaagatgtgtgactttggcatcagtggctacttggtggactctgtggccaagacgatcaatgtccggatgcaaagtcaaacatgggcacgagagtctcaatctcagatctgaaccggaagggatgcgatgtcaagtcccacgtctggagcctgggcatcaccatgattgagatggccttcctgcggttcccttacgagtcctgggggaccccgttccagcagctgaagcaggtggtggagcacccgtccccccagctcccagccggccgtttctcccccgagtttgtggacttcactgctcagtgcctgaggaagaaccccgcagagcgtatgagctacctggagctgatggagcaccccttcttcaccttgcacaaaaccaaggagacggacattgcttgccttcgtgaaggagatcctgggagaagactcataggggctgggcctcggaccccactccggccctccagaagccccacagccccatctgcggggggaagttgcttcacccacaccataagctactgccatcctggcccgagggcatctgggaaggaaaccgagggggaatgctcccacctggctctgtggcgaagccattttgttccaagttgcaaaagaaagcagacaattgggggcttccaggcaagggcccttgttcgggccccaacagtgcctctccctgctgctcctaggacccgtcttcaagctgctgaaaatcctggcctgaagggggccttgattgcccctgggattgcttgttgcccctgcacaagaaggcttgcaagtgcctgggtgggattgggccaccgctttgcccagccttgattgcattccaagttgtatatttttttaatctctcgactgaatggactttgcacactttggcccagggtggccacacctctatcccggctttggtccggggttacaacaaagagggaataagttgtgtgaaataccccaaagactccccatgagggagatgcccatgagcccgcccaaggccttccccctggcaactggcaaaacagggcctctgcggagcacactggctcacccagtcctgccccgcccaccgttatcggtgtcattcaacctttcgtgtttttttctaatttatccctctgttgaattttttccttttgcctttatgggtttggccttgtttttccttgccatggtttggaagctgatcgccttctccccccaccccctagggtacccagcaggcagagccttgcccgtcgtgctcaggctggggtcccagtgggatggggcccaaagatctttttgctcaaaaaagtgcaggggggagccttcccagctcactctcccctgaggactggcttgacaggggctatgggtttgactttggtgttgtttttaaaaaaaagaaaatatatttttttgaaaaaacgactgcccatcccgggtcctttccctgatgggttggggcagttacctggttgctgttttaattaaaaaaaaaaaaaaaaaaagg

SEQ ID NO: 137623 - DNA, 269 bp, Homo sapiens
  misc_feature (1)...(269): n = a,t,c or g
cggnggcnacctacgtcctgatcgacatggttctcaacaagntggccaaaggtgctaaagagattgatatcgcagcgaccctggancacttgagggaccagagacccggcatggtccagacgaaggagcagtttgagttcgcgctgacagccgtggtgagcgaggtgaacgccatcctcaaggcccttccccagtgagcggcanacctcagtgaggccnccggacacaaggcacgtttggcatttctctttgagagagtttatcattgg

SEQ ID NO: 137624 - DNA, 699 bp, Homo sapiens
atgggttctgcggtgtctttggcagcagggtctgcaggaacaggtgaatcagcattggctgacccaggatcccagtgcctgtggacgggattcacatggaaccacatctggaccctttacaagtctccagatgcactaccccagtactcagaggtggcagctgcacttcctcctggtgccaacaggaaggcgagcatgtttcgtgtgagcgggtcctgcatcagatgcacacgggatgctggttatattttgcaccagaaacgccaacctggtcgttcagtgaaaaagcaactggaaaggggaagcgatgacggccttagagtgcccaccctgagccaggcgattgtccctcaccaccacacccacccagatgcgggggtgtcgcgcaaacagcacaggtgcccgatgcacctgctcccgtgtgagctgggccagcacagcaggtcctacatggaggaccacctgaagaacaagaaccggctggagaaggagtgggaagcgctgtgcgcctaccaggcggagcccaacagctcgttcgtggcccagagggaggagaacgtgcccaagaaccgctccctggccgtgctgacctcccaaccaacaaggaaccagtgtcttcctttcctccagcacgggcctggggacatctgcaccccagtgagcatcagctctattgttctctgtcaccgagtgacttga

SEQ ID NO: 137625 - DNA, 3856 bp, Homo sapiens
caggcggcggggatggggccgccgctcccgctgctgctgctgctactgctgctgctgccgccacgcgtcctgcctgccgccccttcgtccgtcccccgcggccggcagctcccggggcgtctgggctgcctgctcgaggagggcctctgcggagcgtccgaggcctgtgtgaacgatggagtgtttggaaggtgccagaaggttccggcaatggacttttaccgctacgaggtgtcgcccgtggccctgcagcgcctgcgcgtggcgttgcagaagctttccggcacaggtttcacgtggcaggatgactatactcagtatgtgatggaccaggaacttgcagacctcccgaaaacctacctgaggcgtcctgaagcatccagcccagccaggccctcaaaacacagcgttggcagcgagaggaggtacagtcgggagggcggtgctgccctggccaacgccctccgacgccacctgcccttcctggaggccctgtcccaggccccagcctcagacgtgctcgccaggacccatacggcgcaggacagaccccccgctgagggtgatgaccgcttctccgagagcatcctgacctatgtggcccacacgtctgcgctgacctaccctcccgggccccggacccagctccacgaggacctcctgccacggaccctcggccagctccagccagatgagctcagccctaaggtggacagtggtgtggacagacaccatctgatggcggccctcagtgcctatgctgcccagaggcccccagctccccccggggagggcagcctggagccacagtaccttctgcgtgcaccctcaagaatgcccaggcctttgctggcaccagccgccccccagaagtggccttcacctctgggagattccgaagacccctctagcacaggcgatggagcacggattcataccctcctgaaggacctgcagaggcagccggctgaggtgaggggcctgagtggcctggagctggacggcatggctgagctgatggctggcctgatgcaaggcgtggaccatggagtagctcgaggcagccctgggagagcggccctgggagagtctggagaacaggcggatggccccaaggccaccctccgtggagacagctttccagatgacggagtgcaggacgacgatgatagactttaccaagaggtccatcgtctgagtgccacactcgggggcctcctgcaggaccacgggtctcgactcttacctggagccctcccctttgcaaggcccctcgacatggagaggaagaagtccgagcaccctgagtcttccctgtcttcagaagaggagactgccggagtggagaacgtcaagagccagacgtattccaaagatctgctggggcagcagccgcattcggagcccggggccgctgcgtttggggagctccaaaaccagatgcctgggccctcgaaggaggagcagagccttccagcgggtgctcaggaggccctcagcgacggcctgcaattggaggtccagccttccgaggaagaggcgcggggctacatcgtgacagacagagaggttctcggaccagcagtgaccttcaaagtgagcgccaatgtccaaaacgtgaccactgaggatgtggagaaggccacagttgacaacaaagacaaactggaggaaacctctggactgaaaattcttcaaaccggagtcgggtcgaaaagcaaactcaagttcctgcctcctcaggcggagcaagaagactccaccaagttcatcgcgctcaccctggtctccctcgcctgcatcctgggcgtcctcctggcctctggcctcatctactgcctccgccatagctctcagcacaggctgaaggagaagctctcgggactagggggcgacccaggtgcagatgccactgccgcctaccaggagctgtgccgccagcgtatggccacgcggccaccagaccgacctgagggcccgcacacgtcacgcatcagcagcgtctcatcccagttcagcgacgggccgatccccagcccctccgcacgcagcagcgcctcatcctggtccgaggagcctgtgcagtccaacatggacatctccaccggccacatgatcctgtcctacatggaggaccacctgaagaacaagaaccggctggagaaggagtgggaagcgctgtgcgcctaccaggcggagcccaacagctcgttcgtggcccagagggaggagaacgtgcccaagaaccgctccctggccgtgctgacctatgaccactcccgggtcctgctgaaggcggagaacagccacagccactcagactacatcaacgctagccccatcatggatcacgacccgaggaaccccgcgtacatcgccacccagggaccgctgcccgccaccgtggctgacttttggcagatggtgtgggagagcggctgcgtggtgatcgtcatgctgacacccctcgcggagaacggcgtccggcagtgctaccactactggccggatgaaggctccaatctctaccacatctatgaggtgaacctggtctccgagcacatctggtgtgaggacttcctggtgaggagcttctatctgaagaacctgcagaccaacgagacgcgcaccgtgacgcagtttccactttcctgagttggtatgaccgaggagtcccttccttcctcaaggtccctcctggacttccgcagaaaagtaaacaagtgctacaggggccgttcttgtccaataattgttcattgcagtgacggtgcaggccggagcggcacctacgtcctgatcgacatggttctcaacaagatggccaaaggtgctaaagagattgatatcgcagcgaccctggagcacttgagggaccagagacccggcatggtccagacgaaggagcagtttgagttcgcgctgacagccgtggctgaggaggtgaacgccatcctcaaggcccttccccagtgagcggcagcctcaggggcctcgaggggagcccccaccccacggatgttgtcaggaatcatgatctgactttaattgtgtgtcttctattataactgcatagtaatagggcccttagctctcccgtagtcagcgcagtttagcagttaaaaggtattttttgtttaatcaaacaataataaagagagatttgtggaaaaatccagttacgggtggaggggaatcggttcatcaattttcacttgcttaaaaaaaatactttttcttaaagcacccgttcaccttcttggttgaagttgtgttaacaatgcagtagccagcacgttcgaggcggtttccaggaagagtgtgcttgtcatctgccactttcgggagggtggatccactgtgcaggagtggccggggaagctggcagcactcagtgaggccgcccggcacacaaggcacgtttggcatttctctttgagagagtttatcattgggagaagccgcggggacagaactgaacgtcctgcagcttcggggcaagtgagacaatcacagctcctcgctgcgtctccatcaacactgcgccgggtaccatggacggccccgtcagccacacctgtcagcccaagcagagtgattcaggggctccccgggggcagacacctgtgcaccccatgagtagtgcccacttgaggctggcactcccctgacctcacctttgcaaagttacagatgcaccccaacattgagatgtgtttttaatgttaaaatattgatttctacgttatgaaaacagatgcccccgtgaatgcttacctgtgagataaccacaaccaggaagaacaaatctgggcattgagcaagctatgagggtccccgggagcacacgaacccg

SEQ ID NO: 137626 - DNA, 4856 bp, Homo sapiens
gcctcccgccgcctcccgcgcggccatggactgagcgccgccggccaggccgcggggatggggccgccgctcccgctgctgctgctgctactgctgctgctgccgccacgcgtcctgcctgccgccccttcgtccgtcccccgcggccggcagctcccggggcgtctgggctgcctgctcgaggagggcctctgcggagcgtccgaggcctgtgtgaacgatggagtgtttggaaggtgccagaaggttccggcaatggacttttaccgctacgaggtgtcgcccgtggccctgcagcgcctgcgcgtggcgttgcagaagctttccggcacaggtttcacgtggcaggatgactatactcagtatgtgatggaccaggaacttgcagacctcccgaaaacctacctgaggcgtcctgaagcatccagcccagccaggccctcaaaacacagcgttggcagcgagaggaggtacagtcgggagggcggtgctgccctggccaacgccctccgacgccacctgcccttcctggaggccctgtcccaggccccagcctcagacgtgctcgccaggacccatacggcgcaggacagaccccccgctgagggtgatgaccgcttctccgagagcatcctgacctatgtggcccacacgtctgcgctgacctaccctcccgggtcccggacccagctccgcgaggacctcctgccgcggaccctcggccagctccagccagatgagctcagccctaaggtggacagtggtgtggacagacaccatctgatggcggccctcagtgcctatgctgcccagaggcccccagctccccccggggagggcagcctggagccacagtaccttctgcgtgcaccctcaagaatgcccaggcctttgctggcaccagccgccccccagaagtggccttcacctctgggagattccgaagacccctccagcacaggcgatggagcacggattcataccctcctgaaggacctgcagaggcagccggctgaggtgaggggcctgagtggcctggagctggacggcatggctgagctgatggctggcctgatgcaaggcgtggaccatggagtagctcgaggcagccctgggagagcggccctgggagagtctggagaacaggcggatggccccaaggccaccctccgtggagacagctttccagatgacggagtgcaggacgacgatgatagactttaccaagaggtccatcgtctgagtgccacactcgggggcctcctgcaggaccacgggtctcgactcttacctggagccctcccctttgcaaggcccctcgacatggagaggaagaagtccgagcaccctgagtcttccctgtcttcagaagaggagactgccggagtggagaacgtcaagagccagacgtattccaaagatctgctggggcagcagccgcattcggagcccggggccgctgcgtttggggagctccaaaaccagatgcctgggccctcgaaggaggagcagagccttccagcgggtcctcagcgcggccctcagcgacggcctgcaattggaggtccagccttccgaggaagaggcgcggggctacatcgtgacagacagagaccccctgcgccccgaggaaggaaggcggctggtggaggacgtcgcccgcctcctgcaggtgcccagcagcgcgttcgctgacgtggaggttctcggaccagcagtgaccttcaaagtgagcgccaatgtccaaaacgtgaccactgaggatgtggagaaggccacagttgacaacaaagacaaactggaggaaacctctggactgaaaattcttcaaaccggagtcgggtcgaaaagcaaactcaagttcctgcctcctcaggcggagcaagaagactccaccaagttcatcgcgctcaccctggtctccctcgcctgcatcctgggcgtcctcctggcctctggcctcatctactgcctccgccatagctctcagcacaggctgaaggagaagctctcgggactagggggcgacccaggtgcagatgccactgccgcctaccaggagctgtgccgccagcgtatggccacgcggccaccagaccgacctgagggcccgcacacgtcacgcatcagcagcgtctcatcccagttcagcgacgggccgatccccagcccctccgcacgcagcagcgcctcatcctggtccgaggagcctgtgcagtccaacatggacatctccaccggccacatgatcctgtcctacatggaggaccacctgaagaacaagaaccggctggagaaggagtgggaagcgctgtgcgcctaccaggcggagcccaacagctcgttcgtggcccagagggaggagaacgtgcccaagaaccgctccctggctgtgctgacctatgaccactcccgggtcctgctgaaggcggagaacagccacagccactcagactacatcaacgctagccccatcatggatcacgacccgaggaaccccgcgtacatcgccacccagggaccgctgcccgccaccgtggctgacttttggcagatggtgtgggagagcggctgcgtggtgatcgtcatgctgacacccctcgcggagaacggcgtccggcagtgctaccactactggccggatgaaggctccaatctctaccacatctatgaggtgaacctggtctccgagcacatctggtgtgaggacttcctggtgaggagcttctatctgaagaacctgcagaccaacgagacgcgcaccgtgacgcagttccacttcctgagttggtatgaccgaggagtcccttcctcctcaaggtccctcctggacttccgcagaaaagtaaacaaatgctacaggggccgttcttgtccgataattgttcattgcagtgacggtgcaggccggagcggcacctacgtcctgatccgacatggttctccacaagatggccactaggtgctaaagagattgatatcgcatcgaccctgcgagcacttgacggaccagagacccggcatggtccacacgaaggaccagtatgagttcgcgctgacagccgtggctacgagaggtgaacgcccatcctcaagcccctttccccagtgagcggcagcctcaggggcctcaggggagcccccaccccacggatgttgtcaggaatcatgatctgactttaattgtgtgtcttctattataactgcatagtaatagggcccttagctctcccgtagtcagcgcagtttagcagttaaaagtgtatttttgtttaatcaaacaataataaagagagatttgtgggaaaaatccagttacgggtgggagggggaatcggttcatcaattttcactttgcttaaaaaaaaatactttttctttaaaggcacccgttcaccttcttgggttggaagttgtgtttaacaatggcagtaggccaggcacgtttcgagggcggtttccaggggaggagtgtgcttgttcattctgccacttttcgggagggtgggatccactgttgcaggagtggccggggaagctggcagcactcagtgaggccgcccggcacacaaggcacgtttggcatttctctttgagagagtttatcattgggagaagccgcggggacagaactgaacgtcctgcagcttcggggcaagtgagacaatcacagctcctcgctgcgtctccatcaacactgcgccgggtaccatgggacggccccgtcaggccacacctgttcagcccaagcagagttgatttcagggggtttcccggggggcagacacctgtgcaccccatgagtagtgcccacttgaggctggcactcccctgacctcacctttgcaaagttacagatgcaccccaacattgagatgtgtttttaatgttaaaatattgatttctacgttatgaaaacagatgcccccgtgaatgcttacctgtgagataaccacaaccaggaagaacaaatctgggcattgagcaagctatgagggtcccccggggagcaacacgaacccctgccaggcccccgctggctccttccaggcacgtcccggacctgtgggggccccagagaaggggacattttcctcctggggagagaaggagatcagggcaactcggagagggctgcgagcatttccctcccgggagaggagatcagggcgacctgcacgcgctgcgtagagcctggaatgggaagtgagaaaccagccgaccggccctgcccctcttcccgggatcactttaatgaaccacgtgttttgacatcatgtaaacctaagcacgtagagatgattccggatttgacaaaataacatttgagtatccgattcgccatcaccccttacccccagaaattaggacaattcacttcattgacccaggatgatcaccatggaaaggcggccccagaggcaagctgtgtgggctgccagatttccttgtgtggggttcagcgtagaaaacggcacctcccatcccgccctttcccacagcattcctccatcttagatagatggtactctcccaaaaggcccctacccagagggaaacacggccctactgaagcggacagaatgatgcccaaaatattgccgtatgtctctacatggtattgtaatgaatatcctgcctttaatatagctatcatttgcttttcccaaaattacttctctctatctggaatttaattaatcgaaatgaatttatctgaatataggaagcatatgcctacttgtaatttgataaatccttatgtttgaagagaaacttccggtgtgagatatacaaatatattgaattgtgtcatagtaaacttctgatttcaccttcaaaaaaaaaaaaaaaaa

SEQ ID NO: 137627 - DNA, 1459 bp, Homo sapiens
atgcctctcacctcccaggatgtagatcagaaaacagctgcttgggtccccaccaaccgcgactctaccgtcccctctgatccctgggactgtaagcgccggccttggccactgctggtcctgcggcctctggcaccaggcaccaaggcgccgcctggcggtcagaatgggcgtggacggcagaagggaagtccgtgctctcgccggctgctccttgagccagcagggccactggggccagcttctgtgcggtgcattcgcacgaccacgccccagctattaataattaccactagcctgcgtttcccgagcctagaggcagctgttggctatgggagtaatacctgcattttcgctaatgcttgccagatggtttttataatgatcacatggccttatctacagtgtatcccctactccgtgttgctgaaagacctggagatgcggaatctccgggaactagaagaccttatcattgaggctgtctacactgacatcatccagggcaagctggaccagcgaaaccagctgctggaagtggatttctgcattggccgtgacatccgaaagaaggatatcaataatattgtcaagaccctgcatgaatggtgtgatggctgtgaagcaggctctactgggcatcgagcagcaagttctgagagccaaccagtacaaagagaaccacaaccgaaacttcagcagcaggtagaagcagaggatgtttacattttgcctcaaagtggtaacgactgtagaggacttagatttgtcagcagtcttattggaggagtgaggtgtgtgcatctgaaacacaaaggagatgcagtggtgtgggaggccatcgaagagggagaggcactgccaggcaagtacagattgaagggtggcagatcagtgtgggctgcagcagtcagggcagtttgtatggaccaggttaccaacatcaagaagacactcaaagccaccgcatcctcctcggctcaggagatggagcagcagctggctgaacgggagtgtccccctcacgctgagcagaggcagcccaccaagaagatgtccaaagtgaaaggtctggtctccagctcgccactagggccggctggggcagctggcactcaccaggcctgggtcaggtggggaggggacaccaagggcccatttcctcccctctctacctgcagtgagttccagacctgcccgtcccctcaccagcgcctccccaccctgttggtactgttccagaaaaactgttactccccctcacccactccctccttccccagttgttcccttcagactcaggggctccaccaatgccatcccaaaacagggtcagacactgcccagcttccctccaggaggttcttgtctctgtgtaaagggcttgtctccctcccagtttttcttttgctcccacgtcattttgtcaggctggttataaagccggagaaggctttaa

SEQ ID NO: 137628 - DNA, 396 bp, Homo sapiens; identical to SEQ ID NO: 130913

SEQ ID NO: 137629 - DNA, 1017 bp, Homo sapiens
atgcctgggatttcaaatatgcgtgcattagagaatgattttttcaattctcccccaagaaaaactgttcggtttggtggaactgtgacagaagtcttgctgaagtacaaaaagggtgaaacaaatgactttgagttgttgaagaaccagctgttagatccagacataaaggatgaccagatcatcaactggctgctagaattccgttcttctgtcatgtacttgacaaaagactttgagcaacttatcagtattatattggaatgttacgttcataacttactaaggattagtgtatattttccaaccttgaggcatgaaattctggagcttattattgaaaaactactcaagctggatgtgaatgcatcccggcagggtattgaagatgctgaagaaacagcaaatcaaacttgtggtgggacagattccacggaaggattgtttaatatgggattcgcagaggcatttttggaacatctttggaaaaacttgcaggatccaagtaatcctgccatcatcaggcaggctgctggaaattatattggaagctttttggcaagagctaaatttatttctcttattactgtaaaaccatgcctagatcttttggttaactggctgcacatataccttaataaccaggattcgggaacaaaggcattctgcgatgttgctctccatggaccattttactcagcctgccaagctgtgttctacacctttgtttttagacacaagcagcttttgagcggaaacctgaaagaagtctccctcatgacagagcatctggctggtgacgggaaaaggtgctccacagagcaccaccccaacatcacacgggcatctgctgacccacagctgactgcagatgaggaagctcagcctagggagttgagttggcagatgggcactgtgtccagccttgggaaaggacatcgcagactttgcatcctaagaactcataaccacaacggcaagaaactccacaaggacatccctgcacccagtgcctag

SEQ ID NO: 137630 - DNA, 469 bp, Homo sapiens
  misc_feature (1)...(469): n = a,t,c or g
cgcaattgacatgtgaaagttagtgttccttttataatttcatctgatgttaaagtacggttaaaagtcttgctgttgatactaaacaggaaacaaaagcataacttaattctttccccttcttgttaagggtgaaacaaatgactttgagttgttgaagaaccagctgttagatccagacataaaggtaattaattttgtgtttgatcattagcaaaattattgccactttatacagacatagtttgctctttgggtcccattctgttctgcagaacttgctctctccatggtcctcccttactttaatctggtggttctcaaccaagggacagttttaccccctatgaagacatttggtgatggctgcagatattttttgtcacaactggggaggaaaagggttgctactgggcatctagtgggntgaatgacagagatgctgctaaacatctcacagtgcacaggg

SEQ ID NO: 137631 - DNA, 750 bp, Homo sapiens
atggggccctatcctcaggtgttggctggaacaaacaaccctcatccctcccgtgggagccccctttggacactctatgaccctggaccctcgggggacctgaacttgatgcgatgggaggctgtgcaggctcgcggcggcgcttttcggattccgaggctcattcaggcttctgccgttttggatttaaccgaagatgatttcgattttctgacgagtaacaaagtttggattgctactgaccgctctcgtgctcgtcgctgcgttgaggcttgcgtttatggtacgctggactttgtaggataccctcgctttcctgctcctgttgagtttattgctgccgtcattgcttattatgttcatcccgtcaacattcaaacggcggcaggaaatgggatgcttttttccttgggtgacaacggcaacccatccaccctggtgttgactgactttaacaaggttcacttcacagacattgagggcagaaaaaggaaatggcctaaaaaggcacccctcacttacaagtccctggttaatgaaatactcggcaaagtaaactacgaccaagggaacaatgtaccacagcagaccctggaaaaggcagaagatataagcggggggcctggaggtgagcaagccccacagggacataccccagccatcatccgaaccttgaacactgtccacctttcccgaagggagaggctggagctggagcctgcaggggaacagagagagaagggcagatga

SEQ ID NO: 137632 - DNA, 495 bp, Homo sapiens
atgtggggtgtttgcatcactgagtatcacacagccttttcactcatggttagagacggagcagaaaggtggacagacaccccagcacaaagccgagtgaagaactctgaggaaggatgcgtgcttgggaatgatgcctcgaccctggtgcctgaagccgtgcctgggacgcgaccactcctagcgatactcggtgatggtcgctcaataggagccattccgacacgcttgcgaaccaatcagcaagtcgtgggtcccccaaagtgccgttccatggcgcaggtgcatcctattatgccgactttagtgaagccagctgtgaggccgcgctggcaaatggcatacacagcccgagtgatcattaaggaaggcgatgtagatgtttcagattctgatgatgaagatgatagttgcgctggcacgcgcaacttccgggacagaggctgtggctggaaggagctgggcatccggcctgaggcgcagcggtcgcgttag

SEQ ID NO: 137633 - DNA, 627 bp, Homo sapiens
tttcatgaacttaatagcttgttaatcttggttccacaggatttcaaatatgcgtgcattagagaatgattttttcaattctcccccaagaaaaactgttcggtttggtggaactgtgacagaagtcttgctgaagtacaaaaagggtgaaacaaatgactttgagttgttgaagaaccagctgttagatccagacataaaggtaattaattttgtgtttgatcattagcaaaattattgccactttatacagacatagtttgctctttgggtcccattctgttctgcagaacttgctctctccatggtcctcccttactttaatctggtggttctcaaccagggacagttttaccccctagaagacatttggtgatggctgcagatatttttgtcacaactgggaggaaagggtgctactggcatctagtgggtgaatgacagagatgctgctaaacatctcacagtgcacagggcagcctcccataaccaagagtgatccagccccaaatgacaacagtgttgaggctgggaaaccctgctctaatgcttcctttctattagattactacctctttcctccatgctgcatgcaactcttttgtctctttaaagctaaaacaaacc

SEQ ID NO: 137634 - DNA, 3169 bp, Homo sapiens
atggcggcaccgctgcttcacacgcgtttgccgggagatgcggccgcttcgccctctgcagtcaagatgctgggcgcgtcgaggactgggatttcaaatatgcgtgcattagagaatgattttttcaattctcccccaagaaaaactgttcagtttggtggaactgtgacagaagtcttgctgaagtacaaaacgggtgaaacaaatgactttgagttgttgaagaaccagctgttagatccagacataaaggtggtgtgccccgccatgccgatgatcctgagggaggggagggccattgtgggcgagtgtgcctttcatccccttcgtggctttcagttgtgctcaaaccagagtggcctcagcccgaaggttgctaagctgcctgcggtgggtcggcccgtggcctgccggcccacatacagccccagcctctgccacaacccccaacgcccagcgcagcttctggctcactcatctgctttgcaggacaccgtggtttctcatgccaatactggtggaaaaatttccatttgttcgaaaatcagagagaacactggaatgttacgttcataacttactaaggattagtgtatattttccaaccttgaggcatgaaattctggagcttattattgaaaaactactcaagttggatgtgaatgcatcccggcagggtattgaagatgctgaagaaacagcaaatcaaacttgtggtgggacagattccacggaaggattgtgtaatatggttagcagtttattaatgaaagtggagatgaagtttatcataatcaaagggtggaaacagctagtgctgctcatctttggattcgcagaggcatttttggaacctctttggaaaaaattgcaggatccaagtaatcctgccatcatcaggcaggctgctggaaattatattggaagctttttggcaagagctaaatttattcctcttattactgtaaaatcatgcctagatcttttggttaactggctgcacatataccttaataaccaggattcgggaacaaaggcattctgcgatgttgctctccatggaccattttactcagcctgccaagctgtgttctacacctttgtttttagacacaagcagcttttgagcggaaacctgaaagaaggcgtctggttcaaggtgtcctctcttctgagtctcagtgatagtaaaggattaggaaaaggcataaagagaccaataagcaacggcgaacagaggctcgtggtaacgcgtacagagatggtacatccctgtcctctcatcaaagtgattcctctcccttttgccaaacttccacagaagccaaataaacagtgtagacactccgtcactcgctacggccacggcggccactcggatcacactccgtcactcactgtggccacagtggccactcagatcacaccccgtcactcgggccacggcagccactgtgatcgcaacctgtcacttgctacagccacagcagccactctgatcacaccccatcacttgctatggccacgatggccccttggatcacactctgtcacttggtgtggccacggtggccactcggatcacactccatcacccactacggccacagcagtcactcggatcacatcccgtcacccactacggccacagcagtcactcggatcacatcccgtcactcactacagccatggcagccactctgattgcattcccgtcactcgctatgcccacggcggccactcagatcacactccatcacttgctatggccacggcagccactcagatggcactctgtcactcactatggccacggcagccacttggatacttggtcaataaaataagaagaaagcgttgtacggatggggtatcgccaagcggtaaggcaccggtttttgataccggcattccctggttcgaatccaggtaccccagccatcttcttcgagtaagcggttcaccgcccggttattggggtatcgccaagcgccaccaaattctgaatgtatcgaatatgttcggcaaattcaaaaccaatttgttggggtatcgccaagcggtaaggcaccggattctgattccggcattccgaggttcgaatcctcgtaccccagccaatttattcaagacgcttaccttgatttcaaatatgcgtgcattagagaatgattttttcaattctcccccaagaaaaactgttcagtttggtggaactgtgacagaagtcttgctgaagtacaaaacggcgattgaaaaacggctggaaaaactggcggttgatccacatcgcgaccgtgcgcagatgctgaaagtcgaaaacgtccagcaggcgtggcagcaatggatcaacaaactgccgcccgcacgtcgtgaggatgaagacgtgaaagagatccgttggatgatagaagagttgcgcgttagttacttcgctcaacaacttggcaagaactctcgggcagaatccatgctgtggtccttccataaagcggctatagaagcggcacgcaccaatatcattcaggcgcaaacccgcgtcgaagcggcacaagccactgaacggcgcattgccgcagatatcgatgacagcgaactgaaagccccgcgtgacggacgcgtgcagtatcgggttgccaagccaggcgaagtgctggcggcaggcggtcgggtgctgaatatggtcgatctcagcgacgtctatatgactttcttcctgccaaccgaacaggcgggcacgctgaaactgggcggtgaagcccggctgatcctcgatgccgcgccagatctgcgtattcctgcaaccatcagttttgtcgccagtgtcgcccagttcacgccaaaaaccgtcgaaaccagcgatgaacggctgaaactgatgttccgcgtcaaagcgcgtatcccaccggaattactccagcagcatctggaatatgtcaaaaccggtttgccgggcgtagcgtggtcattcctgtattccatcaaccagacaatctgcttgcggttggatagcattgaagccaaattgcaagccctggaggctacttgtaaatccttagaagaaaagctggatctggtcacgaacaagcagcacagccccatccaggttcccatggttgccggctcccctctcaggacaacccagatgtgcaacaaagtgcgatggtaa

SEQ ID NO: 137635 - DNA, 1276 bp, Homo sapiens
atggaagtggtcaacatgctggctctgatgtcagccatgaccagacttcggactcccatcgcctatacgaaatatggttccttttgtggcttgggaggccatggccagccctgcgatgccattgactggtgctgccatggccacgactgttgttacactcgagctgaggaggccggctgcagccccaagacagagcgctactcctggcagtgcgtcaatcagagcgtcctgtgcggtgacaacggcaaaccatcccaccctggtgttgactgactttaacaaggttcagttcacagagattgagggcagaaaaaggaaacggcctaaaaaggcccataaatatttaccaagtagatatcatgtgtcagacactgggaacataacagagaacaaaacaaaagttctctttcttcgtggaatttacattaaaacttcttatttctctgtatgttctcagcatctaactgagaaggtgctgagaacatacagagaaatggctgggcagtgctcccaaaatgaatattttgacagtttgttgcatgcttgcataccttgtcaacttcgatgttcttctaatactcctcctctaacatgtcagcgttattgtaatgcaagatcaggtctcctgggcatggctaacattgacctggaaaagagcaggactggtgatgaaattattcttccgagaggcctcgagtacacggtggaagaatgcacctgtgaagactgcatcaagagcaaaccgaaggtcgactctgaccattgctttccactcccagctatggaggaaggcgcaaccattcttgtcaccacgaaaacgaatgactattgcaagagcctgccagctgctttgagtgctacggagatagagaaatcaatttctgctagcctcagcaccgctctccacaccgggtccggcgacttggagctgcgccgcggtttacgttccgggtcggcgggcggggcctcgtcggcggccaggctctacttccggggcggggcggccggggcggggctcctgtctcccggcctgtctggagctcggcagccgcagaagcggcagcggcggcggcgcggcgcaggcaccggcccggggagaggcaccatgagcgcccatctggggaccgtcacttcgtccttcttcttcccagtccaaacttcttcctctcaccatcgagggggtggtgttgatggggatgctggaagtgagagggagaaaatggaaattaaagcaagtaatgaatgtatagtgcgtttctcaggacctggaacatag

SEQ ID NO: 137636 - DNA, 1260 bp, Homo sapiens
atggctcctaagtcaggatgttatgtcctgaaaataggtgacaacggcaaaccatccaccctggtgttgactgactttaacaaggttcagttcacagagattgagggcagaaaaaggaaacggcctaaaaaggaggctgtggctggaaggagctgggcatccggcctgaggcgcagcggtcgcgttagttcggcccaatggcggcaccgctgcttcacacgttgtttgtcgggagatgcggccgcttcgtcctctgcagtcaagacgctgttcgcgtcgtaggactgggatttcaaatatgcgtgcattagagaatgattttttcaattctcccccaagaaaaactgttcggtttggtggaactgtgacagaagtcttgctgaagtacaaaaagggtgaaacaaatgactttgagttgttgaagaaccagctgttagatccagacataaaggatgacccagatcatcaactgggctgctagaattccgttcttctgtcatgtacttgaccaaaagactttgagccaacttatcagtattatattgagattgcctttggttgaatagaagtcaaaacagtagtggaagagtatttggcttttcttggtaatcttgtatcagcatagactgttttcctcagaccgtgtctcagcatgattgcttccccattttgtgcctccccgagtgatcattaaggaaggcgatgtagatgtttcagattctgatgatgaagatgataatcttcctgcaaattttgacacatatcacagagccttgcaaataatagcaagatatgtaccatcatgagtatacttttccttattttgaatgtttaattctcaagaaaattgtaatcaattagtaaaaattataaaatgttaatagtattaaagcttgagtcttacattgcattttttttttttgtatccacttgaggaaacattacattctacaaaaagtggcatttccattttctatttattctctttaattgtttttcaaagttcgtatgcagattctcccccaattttgtatggtggttggaattttgtttttatcttcaacagatatgctatccaaaatttttcagtgagaaacccctgggtgtgtttgtgtcatgccatatgaataaaaattgcacttctaagaaaagcttttcaggtttgtgggtttcttttggaggggtggatttctagttccctctgtctgttgattatttgttaacttaaaaaaatccaacttgattattttttcttctttt

SEQ ID NO: 137637 - DNA, 455 bp, Homo sapiens
  misc_feature (1)...(455): n = a,t,c or g
cttgtgcggnggannnagttctggctgctccagccccaggaaggacccaggacacccggaagccggaaatggacttagtggcctttgaggatgtggctgtgaacttcacgcaggaggagtgggctttgctgagtccttcccagaagaatctctacagagatgtgacgctggaaaccttcaggaacctggcctcggaatccaatggaaagaccaggacattgagaatctgtaccaaaacctggggattaagctaagaagtctggtggagagactctgtggacgtaaagaagggaatgaacacagagaaactttcagccagattcctgattgtcacctgaacaagaaaagtcaaactggagtgaaaccatgcaaatgcagcgtgtgtgggaaagtcttcctccgtcattcattcctggacaggcacatgagagctcatgctggacacaaacgatctg

SEQ ID NO: 137638 - DNA, 3707 bp, Homo sapiens; identical to SEQ ID NO: 127949

SEQ ID NO: 137639 - DNA, 1975 bp, Homo sapiens
atggtgaccgacaggaaggccgcagctgggacccacggcgaggctcgaccgtgctgggggtcgggctcgcgtgtacacacttaccggggtgcaggtgagcgcgcaatgcgcgtgcacagaccaatgccccgagaggacagtgagcgcgtgcgcgaggcagatggtggcaagcacgagcagcgcagcttcggggatctgcacccaactgctgccccagccccagcagccagcggctgcggcacccaaccaggccgggtaaagcagcccggcgaatggcagcaccgtgaggcgccgcaacagcgccaaccgccggtacggccacacggcagccaccagctcgtcaccgttcgctatgagcgccggcccggcggcaaggagcgcgcgcggctgcgcccgggcttgggctgcccgtcaggccggaccccgcaaggccgggccccgcagggcaccgcgttgcccaccgccgccgctgccgccatctttcctagcgccgcgctcacttccgggcagaggaacgcctcacttccgaagttttacttccggggcgggacctggggcaccagccagtcagaggcgctgtgcggcaaactgtccaatcagttcctcggggagcccctggtgccccggatacggctgattttgtcgtgtgggacctgttctggctgctccagccccaggaaggacccaggacacccggaagccggaaatggaccgtccagggacttcttccagctgccctcggaagaacgggactcagtggcctttgaggatgtggctgtgaacttcacccaggaggagtgggctttgctgagtccttcccagaagaatctctacagagatgtgacgctggaaaccttcaggaacctggcctcggtcggaatccaatggaaagaccaggacattgagaatctgtaccaaaacctggggattaagctaagaagtctggtggagagactctgtggacgtaaagaagggaatgaacacagagaaactttcagccagattcctgattgtcacctgaacaagaaaagtcaaactggagtgaaaccatgcaaatgcagcgtgtgtgggaaagtcttcctccgtcattcattcctggacaggcacatgagagctcatgctggacacaaacgatctgagtgtggtggggaatggagagagacgccccgtaaacagaaacaacatgggaaagcctccatttcccccagtagtggtgcacggcgcacagtaacaccaacttcgatgagaccttatgaaatccaaggtgtgcgggaaagccctttatttcttcccatttattttcaaatccatcaaagaactcccactgaaaaaaggtcctataaatgtagggaaatagtgagagccttcacagtttccagtttctttcgaaaacatggaaaaatgcatactggagaaaaacgctatgaatgtaaatactgtggaaaacctatcgattatcccagtttatttcaaattcatgttagaactcacactggagaaaaaccttacaaatgtaaacaatttggtaaagccttcatttccgcaggttaccttcggacacatgaaatcagatctcacgcgctggagaaatcccaccaatgtcaggaatgtgggaaaaaactcagttggttccagttcccttcacagacatgaaagaactcatagtggaggaaaactctacgaatgtcaaaaatgtgccaaagtctttagatgtcccacgtcccttcaagcacatgaaagagctcacactggagaaagaccttatgaatgtaataaatgtggtaaaaccttcaattatcccagttgttttcgaagacataaaaaaactcatagtggagaaaagccatatgaatgtacaaggtgtggtaaagcctttgggtggtgcagttccctccgaagacatgaaatgactcacactggagaaaaaccctttgattgtaaacagtgggtaaagtctttacttttcaaataaaat

SEQ ID NO: 137640 - DNA, 424 bp, Homo sapiens
  misc_feature (1)...(424): n = a,t,c or g
aggaattcnnnnnanacctcgnnnnnnnnnnnnnnnnnnnnnnnnnnnnnnnnnnnnnnnnnnnnnnnnnnntttggtgccgtgactcggatcgggggacctcccttgggagatcaatcccctgtcctcctgctctttgctccgtgagaaagatccacctacgacctcaggtcctcagaccaaccagcccaagaaacatctcaccaatttcaaatccggaacttgctacacatgccggaaatctggccactgggccaaggaacgcccgcagcccgggattcctcctaagccgcgtcccatctgtgtgggaccccactgaaaatcggactgttcaactcacctggcagccactcccagagctcctggaactctggcccaaggttctctgactgactccttcttggcttactggctgaagactgac

SEQ ID NO: 137641 - DNA, 522 bp, Homo sapiens; identical to SEQ ID NO: 114701

SEQ ID NO: 137642 - DNA, 663 bp, Homo sapiens; identical to SEQ ID NO: 115467

SEQ ID NO: 137643 - DNA, 516 bp, Homo sapiens; identical to SEQ ID NO: 114704

SEQ ID NO: 137644 - DNA, 397 bp, Homo sapiens; identical to SEQ ID NO: 124293

SEQ ID NO: 137645 - DNA, 473 bp, Homo sapiens; identical to SEQ ID NO: 130332

SEQ ID NO: 137646 - DNA, 1563 bp, Homo sapiens
atggggtttcaccatgttggccaggctggtctggaactcccgaccccagggcccatcttctggctgctggtcaagagccccgagctggccgcccagcccagcacatacctggccgtggcggaggaactggcggatgtttccggaaagtacttcgatggactcaaacagaaggccccggcccccgaggctgaggatgaggaggtggcccggaggctttgggctgaaagtgcccgcctgataacctctggagcagatttgaaagccaggatggcgcctccagaccgaggacagctgtccgccatgcccgcagcttcctggcactacctgagccgggagacccaggactggcggccgccatgcccgcaccctcttgtcttgccctctcgctggctggtggtgatggagccggctgccatggtgagcggccctgtggagaagccagggaggaatggagacaatctggagaaacagaatcacaccaacaaccacgtgcggctgtgtctggggcgtgtgccagcgcagagtggaccgctccccaagccctccctccaggctctgcccagctccctggtgcccctggagaagccagtgaccctccggtgccagggacctccgggcgtggacctgtaccgcctggagaagctgagttccagcaggtaccaggatcaggcagtcctcttcatcccggccatgaagagaagtctggctggacgctaccgctgctcctaccagaacggaagcctctggtccctgcccagcgaccagctggagctcgttgccacgggagtttttgccaaaccctcgctctcagcccagcccggcccggcggtgtcgtcaggaggggacgtaaccctacagtgtcagactcggtatggctttgaccaatttgctctgtacaaggaaggggaccctgcgccctacaagaatcccgagagatggtacagggctagttttcccatcatcacggtgaccgccgcccacagcggaacctaccgatgctacagcttctccagcagggacccatacctgtggtcagcccccagcgaccccctggagcttgtggtcacaggaacctctgtgacccccagccggttaccaacagaaccaccttccccggtagcagagacttctaggagtatcaccgccagtccaaaggagtcagactctccagctggtcctgcccgccagtactacaccaagggcaacctggtccggatatgcctcggggctgtgatcctaataatcctggcggggtttctggcagaggactggcacagccggaggaagcgcctgcggcacaggggcagggctgtgcagaggccgcttccgcccctcccgcccctcccgctgacccggaaatcaaacgggggagcttgctacaagtgccagaaatctgaccaccaggccaaggaatgcctgcagcccaggattcctcctaagccgtgtcccatctgtgcgggaccccactggaaatcggactgttcaactcacctggcagccactcccagagcccctggaactctggcccaaggctctctgactccttctcggcttagcggctga

SEQ ID NO: 137647 - DNA, 462 bp, Homo sapiens
ctgggcaccaaggagcttcatcaagaaaagagccagaaaaacatctgagacccactgattgcagaacacgcctaaaaacgcatggtgggaagtgaacacaggaagtagctttataccacaaggaagagtactctgaagctggccctcttcttcagggacctttgaaggaaggataagaggccatggaaccgtggaagggagtcccacttggaagggtaaatacagaacaaatagccccattttctgaggcagaggggccaagagagattcattagggttcgaggaaagtaagaaaggctgcccaaggcttgaatgaaggaccgagggagctgttctggcagccactcccagagcccctggaactctggcccaaggctctctgactgactccttcccagatcttcttggcttagcggctgaagactgacacagcccgatcgcctcggaagccccatagaccat

SEQ ID NO: 137648 - DNA, 1764 bp, Homo sapiens; identical to SEQ ID NO: 115471

SEQ ID NO: 137649 - DNA, 248 bp, Homo sapiens
cttagggcaaaggtgaggctgaagttgcctggaggtatgcgatgaacaaggaccagagaaaagcaaggcagcgagccctccggggagtcagttctgtgactgaagacactctcaacatttgcagactttgctggcagccactcccagagcccctggaactctggcccaaggctctctgactgactccttctcggcttagcggctgaagactgttgctgcccgatcgcctcggaagccccgtagaccat

SEQ ID NO: 137650 - DNA, 390 bp, Homo sapiens
ttaatataccaagcccctcaaagagccaaggttggtggtaagattgatgccgttgccggaggaacagggtccagctgcttgctctcgtggtccaatgatgagatacaggtgaatatccctcaacctctttctcctttcaatcttggcgccacacttcagtctctcccttatcttaatttcaattcctttcattttcaagtgtattgtcgcagagtaagttcggagataccctcggagattcactatgcggtgcgggtttcgatgcaggatatattttcggattagcgtgggtatatttatagccgcgggtaaaatgattattattctaattgcttggaacacgctttgcttttgctcatttactacatttctttccttctctgtcaccat

SEQ ID NO: 137651 - DNA, 324 bp, Homo sapiens
tgtggcgcatgaaatttggtgccgtgactctgatcgggggacctcccttgggagatcaatcccccgtcctcctgctctttgctccgtgagaaagatccacctatgacctcaggtcctcagactgaccagcccaagaaacatctcaccaatttcaaatccggaccccactggaaatcggactgttcaactcacctggcagccactcccagagcccctggaactcttgcccaaggctctctgactgactccttcttggcttaacggctgaagactgacgctgcccgattgcctcggaagccccgtagaccatcacagatgccgagc

SEQ ID NO: 137652 - DNA, 495 bp, Homo sapiens
ttattccagggacagagtttctgcacacttggccttctggatctcagccacaaagaggaggtaaaaagttcttcgctcataaacatttgccacaaagcctttcaatttcaaatctggtaagcggcctctttttactcttctccaacctccctcactatccctcaaccactttctcctttcaatcttggcgtcacacttcaatctctcccttctcttaatttcaattcctttcattttctggcagccactcccagagcccctggaactctggcccaaggctctctgactgagtccttctcggcttagcagctgaagattgacgctgcccgatcgcctcggaagcccctttgcaccaaaaggaacatgtgctgtttgttgagctccatagagctcaacagtgtacacactgttaacactgacgttatagattagagggagatctgcccattgagactctctcaaagaagcaaaaggcttctttaaagaagaggtcat

SEQ ID NO: 137653 - DNA, 890 bp, Homo sapiens
  misc_feature (1)...(890): n = a,t,c or g
ttgnnnnnnnnnnnnnnnnnnnnnnnnnnnnnnnnnnnnnnnnnnnnnnnnnnnnnnnnnnnnnnnnnnnnnnnnnnnnnnnnnnnnnnnnnnnnnnnnnnnnnnnnnnnnnnnnnnnnnnnnnnnnnnnnnnnnnnnnnntgggttatgaaatttggtgccgtgactcggatcaggggaccttcccttgggagatcaatcccccgtcctcctgctctttgctccgtgagaaagatccacctacgacctcaggtcctcagacggaccagaccaagaaacatctcaccaatttcaaatctggtaagcggcctctttttactctcttctccaccctccctcactatccctcaacctctttctcctttcaatcttggcgccacacttcaatctctcccttctcttaatttcaattcctttcattttctggtagagacaaaggagacacgttttatccgtggagccaaaattccggcgcctgtcacagactagggaaggcagcctttccttggtgtttaatcattgcagggacacctctctgattattcagccaggcttcagaggtgtcagaccacgcagggacgcctgacttggtccttcacccttagtggcaagtcccgcttttctgggggaaggggcaagtaccccaaccccttctctccttgtctctaccccttccctgcttttccggggacagggagcttgctacaagtgccagaaatctatctgaccaccaggccaaggaatgcctgcagcccaggattcctcctaagccgtgtcccatctttgcgggaccccactggaaatcggactgttcaactcacctggcagacactcccagagcccctggaactctggcccaaggctttctgaccgactccttctcggcttag

SEQ ID NO: 137654 - DNA, 677 bp, Homo sapiens
aatttttggtagagatgaggtctcattctgtcatctaggctggggtccagtgagctgtgattgtgccactgcagccttgacctcctggactcacgtgtagtcctgtagctgggactacaggtgcatgccaccattaataattgccacctggctaattagtttttttatggagacaggtctcactgtgttgccttagctggtctcaaactcctgggctgaagtgatcctcccacttcagactcccaaagtgcttgagattacaggcatgaaccaccacacctggcctgatttttttcttgagtaagatggagttctgtagtgataattcacattgcataaggtgaaaattgggaatttgttaggaaaaggtgagttacatttagaagttaaagtgtttaccaacattgatttagtttagttccttttgagaatctggcttagaaggacaagataagttatggttgcattaatatagtagggcacatgaaatgaaaccaagtactgtttgctttcctttgtttcagatggaggagatgtataagaaagctcatgctgctatacgagagaatccagtctatgaaaagaagcccaagaaagaagttaaaaaagagaggtgggaccgtcccaaaatgtcccttgctcagaagaaggatcgggtagctcaaaagagggcagct

SEQ ID NO: 137655 - DNA, 1260 bp, Homo sapiens
cctccctggcaccgctgggcctgcaggtctctgtcgagccgcggacgcgggtctctgttccgctggatggggtttgttaaagttgttaagaataaggcctactttaacagataccaagtgaaatttagaagacgacgagagggtaaaactgattactatgctcggaaacgcttggtgatacaggataaaaataaatacaacacacccaagtataggatgattgttcgtgtaactgacagagatatcatttgtcagattgcttatgcccgtatagagggggatatgatagtctgcgcggcatatgcacacgaactgccaaaatacggtgtgaaggttggcccgacaaattatgctgctgcatattgtactggcctgctgctggcccgcaggcttcttgataggtttggcatggacaagatctatgacggccaagtggaggtgactggcgataaatacaatgtggaaagtactgatggtcagccaggtgccttcacctgctgtatggatgcaggagttgtggatggaggcttgtctgtccctcacagcaccaaatgattccctggttatgattctgaaagcaaggaatttaatgcaggagtacaccagaagcacttcatgggccagaatgttgcagattacatgcgctacttaatggaagaagatgacgatgcttacaagaaacagttctctcaatacataaagaacagcgtaactccagacatgatggaggagatgtataagaaagctcatgctgctatacgagagaatccagtctatgaaaagaagcccgggagagcctgctccaggctggggcctggactcgaccggtctcaaaggggcccctgcagctccacactccagccgcctcccccgtcacctcctcacctcaccccaggcccagccaccccagtaaacggggagggagctgcctccaccccaccacccacccacccaccctcatccattcaggttctcacacacacgcccgtcaccgtcagccagcgccccagccggggatcaggactgggacatctttgggggccacttcgccttccaccagacctggttggccccctcagctgccctctgtacggccttgtaacatccttttccaaagtccaagcaactcaagacggggctcccagctatgaaggggccagctcgcggccacacaaggatgacctccttgcccacccaggctctgccttgaccaatccagaagccatgcggcctctgtgcgactccctgctcttctcccag

SEQ ID NO: 137656 - DNA, 1443 bp, Homo sapiens
atggtacactgtaagccttataagggaataaaaggatcagatagcaaaggagctatgagaattatacagcctttaccagcagtagccaagagaatattcttgctactgaattttgacagtgcctgttcaagggtccttacacactcgttaagaaaaactcttggtatgctactgggctctgttccaattgaacatctgaccatgaagcatcaagtgaacatgactttcttgggtgcaacaggagaagggacttggcagtggcaacggcagtgggtctttcatttgtttcttggagttccacttcagagaaatgcagccactgccaatcagaatgatcagctggggtccaagggcagcaagagcaataccatcacaatggcaatggcatacgggctgtcaattgcctatgggacttccaccccagagagacacagagccactgccaatgggaatgttcagccaagggtgaagcagctatgctgcaggcccaacctaaaggaagtgggggcaggggcttcagccgtggcaaaagctgcagggctgttggttacctgtgggaggtctaaaccagagaaagacagaaccgttaccagcctgagtactcaggtgagggtggattggctgcactgggatcccaggccaatggggtttgcctgctctccaactgagaacaacaattgctctattcctgaaaccctacaacctgaagctggaaaacttgatgtaaaattcacccttgcaatttttacacccttgtcttgtgccctatatgggccacacagaaaatttactaaaatccttcatgccataatcagagacattcaaactgcaaacaacgaggacatattaatgatttcctgctgcgtgctgctggcccacaggcttctcaatagatttggcgtggacaagatctatgaaggccaagtggaggtgactggcaatgaatacaatgtggaaagcattgatggccagccaggtgcctttacctgctatttggacacaggccttgccagaactaccactggcaataaagtttttggtgccctgaagggagctgtcaatggaagcttgtctgtccctcacagtaccaaacaattccctggttatgattctgaaagcaaggaatttaatgcagaagtacagaggaagcacatcatggaccagaatgttgcagagtacatacactacttaatggaagatgcttacaagaaagagttctctcaatacataaagaatagtgtaactccagacatgaaggaggagatgtataagaaagcttatgctgctatacgagagaatccagtctatgaaaagaaccccaagaaagaagttaaaaagaagaggtggaaccgtcccaaaatgtcccttgctcagaagaaagatggggtagctcaaaagaaggcaagcttcctcagagctcagatgcaggctgctgagagctaa

SEQ ID NO: 137657 - DNA, 1212 bp, Homo sapiens
atggagaggctaactggctcaaattctcacagctggaaagtagcagatctggccttcaaacccaagaaggctccagagtctgtgatcttaacctgtgcatgtactgagtctccaagagagaacaagctctttggaagcaataggggcctcaaccccgaaggcgaggggcgagatcagggactcggcgacgagggcgagcgcccccgggcttaccacgagcacggggaccccggcggccagcgagtagaggagcacggggggcacggcgctgctgtcctccgggcccgggtagggtttgcggtaggcgctgtcgtggcagaagaagccctgcacgttcacggtgaacgtgtccgtatactcgaagtagtacgccagcatcaccgtccctgccatgatcaccatctggaaatagagcatgctgctgaccattcgagaagcagcggcgctgggtcaatcccccaggctagcccggaggaggcgctgcgtgggcggacggggcggcagccggcgggacagcggcacctgtacccctcacagggcggacgctgtggggctggagaagctcctggcgggggtaaaatcaaaagggggggaggggaggcagtagagatggagcttccagaaactcttccgaggcaccagctgagaggtttaagaaacccgcacaacgcctgggaaaatggtgcgtggacgcgtcttccgagcgcaaagcccaccaaggcgcaaagtgccgatgcggcgcccagagtttcaaccgctgcttgtgagaggaggcattgcagattccaggcactgagcggtcccagccaccagggtaggaaaaaggactatttgcctcatctcgttctttattccctgaattccagggaactgcagggattcctcaggggtcgggataaaggagagggagaccaatgctggctcacagcacatgcatacaaaaattcatccgtccatggctatccacgcctatgcgtggaagatgaagatgcttacaagaaacagttctctcaatacataaagaacagtgtaactccagacatgatggaggagatgtataagaaagctcatgctgctgtaccagagaatccggtctatgaaaagaagcccaagaaagaagttaaaaagaagaggtggaaccgttccaaaatgtcccttgctcagaagaaggattgggtagctcaaaagaaggcaagcttcctcagagcttag

SEQ ID NO: 137658 - DNA, 1139 bp, Homo sapiens
  misc_feature (1)...(1139): n = a,t,c or g
atggggtttgttaaagttgttaagaataaggcctactttaagagataccaagtgaaatttagaagacgacgagagggtaaaactgattattatgctcggaaacgcttggtgatacaagataaaaataaatacaacacacccaaatacaggatgatagttcgtgtaacaaacagagattatcatttgtcagatcgctaatgccccgtatagagggggtatatgatagtctgcgcanccgtatgcacacgaactgccaaaaatatgggtgtgaagggttggcctgacaaattatgctgcagccatattgtactggcctgctggctgggcccgcaggcttcttccataggtttggcatggaccagatctatgaaaggccaagttggagttgactggtgatgaatacaatgtggaaagcattgatggtcagccagggtgccttcaccctgcctattgggatgccaggcccttgcccagaacctacccactggccattaaagtttttgggtgcccctgaaggggagcctgtggatggagggcttgtcctattccctccacagtaccaaaacgattccccctggttatgattcctgaaagcaagggaatttaatgcagaaagtaccatcggaagccacatccatgggcccagaatgttgccagattacatgcgcctaccttaatggaagaagatgaagatgccttacaaagaaacagttctctcaatacataaagaacagcgtaactccagacatgatggaggagatggtattagaaaagctcatgctgctatacgagagaatccaggtctatgaaaagaagcccaagaaagaagtttaaaagaaaaaggtggaaccgtcccaaaatgtcccttgctcagaagaaggatcgggtagctccaaagaaggcaagcttcctccagagctccaggagcgggctgctggagagcttaaccccagccattttcccatgatttttttcagatatcgctaactaaacttatgaacagcaactaannnnnnnnnnnnnnnnnnnnnnnnnggggcgcccgttttaaaggacccctgggggggcccaagtttaccggggcttgcaacgtcaaacctttttccctaaagggggccgaattaaaacccacctgggga

SEQ ID NO: 137659 - DNA, 886 bp, Homo sapiens
gcaaattcaagtcctgttaaccccgtggtgttctttgatgtcagtattggcggtcaggaagttggccgcatgaagatcgagctctttgcagacgttgtgcctaagacggccgagaactttaggcagttctgcaccggagaattcaggtcagtttcagatgtgtttgacttctttgcctgctccagaggggtgttctggggctgcagtgagggtatcggtgaaccacctgctggccttgaatgattgctggtgacagtgatagaaggaaagatggggttccaataggatacaaaggaaagcaccttccaccagggtcataaaggatttcatgattcagggtggagattttgttaatggagatggtactggagtcgccagtatttaccgggggccatttgcagatgaaaattttaaacttagacactcagctccaggcctgctttccatggcgaacagtggtccaagtacaaatggctgtcagttctttatcacctgctctaagtgcgattggctggatgggaagcatgtggtgtttggaaaaatcatcgatggacttctagtgatgagaaagattgagaatgttcccacaggccccaacaataagcccaagctacctgtggtgatctcgcagtgtggggagatgtagtccagacaaagactgaatcagcacttcccaggagcctgcccacagctgtggctaacatcaggccttcccttcttcttggtggtgttcttgagtaagataatctggactggcccccgtctttgcttccctgcctgctgctgccccatttgatcaagagaccatggaagtgtcagagattcagaatccacgattgtctttaagttttcaactgtaaataaagtttttttgtatgcgtaaaaa

SEQ ID NO: 137660 - DNA, 1860 bp, Homo sapiens
atggaggacgccgccgcgccggggcggaccgagggggtccttgaaaggcaaggagcgccgccagctgcaggccagggaggagccctggtggagctcaccccgacccccggcggcctggccctggtgagcccctaccacacccaccgggccggggaccccttagacctcgtggcgctcgcagagcaggtgcagaaggctgatgaattcatccgagcaaatgccaccaacaagctgacagtcatagctgagcaaatccaacatttgcaagaacaagccaggaaggtactggaagatgctcacagagatgccaacctgcaccatgtagcttgtaatatagtgaaaaaacctggcaacatttactatctctataaacgggagagtggtcagcagtatttttccatcatttctccaaaggaatgggggacaagttgtccacatgacttccttggtgcctacaaactacagcatgacttgtcctggactccgtatgaggacattgagaagcaagatgctaaaatcagcatgatggacacgttgctaagccaacctaatgaatccaaggctcagaaggaggaactcaccacttacatcacaccctcccaagcactactagccttggcagccatcttgaaaatgatgcccggcttacaagggagcccatggaatacagtgcgtctactgcacgttaccaccaccactcctacaaacaacccgaagggttcgccggaatcccacgctcccgacttctgcttccgggtcggagccatggcggttggcaaattcaagtcctgttaaccccgtggtgttctttgatgtcagtattggcggtcaggaagttggccgcatgaagatcgagctctttgcagacgttgtccctaacacggccgagaactttaggcagttctgcaccggagaattcaggaaagatggggttccaataggatacaaaggaagcaccttccacagggtcataaaggatttcatgattcagggtggagattttgttaatggagatggtactggagtcgccagtatttaccgggggccatttgcagatgaaaattttaaacttagacactcagctccaggcctgctttccatgctaacatggccggggaaacttactgcaggtatatttggtttccatcaggcgaacagtggtccaagtacaaatggctgtcagttctttatcacctgctctaagtgcgattggctggatgggaagcatgtggtgtttggaaaaatcatcgatggacttctagtgatgagaaagattgaggtgaatgccttgcatcttccagcctacatggactcatttcttacccgtaattaccactgcctgctctgcgctgggcagcatgctagctgcagagagggggacaaagaattgaaagatgtctcctttcaggagctcatggaaagtaagacattcccagaggtgatcactagtaatatgagtgacattgccaagtatgagaagagtacaagggagaaatccatcacttccagccagcacttcccaggagcctgcccacagctgtggctaacatcaggtgtgaatccattgctgatccctccacctcctcttccaggtctaagcccagacagtgggtgctcccacagcacttggttcatctctccactgtggcatttaatatactgtatcacaaatatgccttcccttcttcttggtggtgttcttgagtaagataatctggactggcccccgtctttgcttccctgcctgctgctgccccatttgatcaagagaccatggaagtgtcagagattcagaatccaagattgtctttaagttttcaactgtaaataaagtttttttgtatgcgtaaaaaaaaaaaa

SEQ ID NO: 137661 - DNA, 809 bp, Homo sapiens
agctcgtgccgaattcggcacgagccgggtcggagccatggcggtggcaaattcaagtcctgttaaccccagtggtgttctttgatgtcagtattggcggtcaggaagttggccgcatgaagatcgagctctttgcagacgttgtgcctaagacggccgagaactttaggcagttctgcaccggagaattcaggaaagatggggttccaataggatacaaaggaagcaccttttcacagggtcataaagggattccatgattccagggtggagattttgttaaatggagatggtactgggagtcgcccagtatttacccgggggccaattttgcagatgaaaatttttaaactttagacactcagctccaaggcctgctttccatggcgaacagtggtcccaagtacaaatggctgtccagttctttatcacctgcttctaagtgcgattgggctgggatgggaagcatgtggtgtttgggaaaaatcatcgatggacttctagtgatgagaaagattgaagaatgttcccacaggccccaacaataagccccaagctacctgtggtgatctcgcagtgtggggagatgtagtccagaagacaagactgaatcaaggccttcccttcttcttggtggtgttcttgagtaagataatctggactggcccccgtctttgcttccctgcctgctgctgccccatttgatcaagagaccatggaagtgtcagagattcagaatccaagattgtctttaagttttccaactgtaaataaagtttttttgctatgcgtaaaaaaaaaaaaaaaaa

SEQ ID NO: 137662 - DNA, 635 bp, Homo sapiens
attgaatgtcactactccagtgcggtggaattcggtgttttaagatgcctgagccagccaagtctgctcccgccccgaagaagggctccaagaaggcagtgaccaaagcgcagaagaaagatggcaagaagcgcaagcgcagccgcaaggagagttactctgtgtacgtgtacaaggtgctgaaacaggtccatcccgacactggcatctcttccaaggccatgggcatcatgaattctttcgttaacgacatatttgagcgcatcgcgggcgaggcttcccgcctggcgcattacaacaagcgctcgaccatcacctccagggagatccagacggccgtgcgcctgctgcttcccggagagctggccaagcacgccgtgtcggagggcaccaaggccgtcaccaagtacaccagctccaagtaactttgccaaatttccaagttgatcgtgatgttgatccgggactcggtgtggtgacggcccgccctgagcacgaaagtgcacgctcttgacaacttccttatgtttggagctttctccaccaccacccccgcccattttcttgtaaaatttttaccatgcagatatgtaataactgcaagtaaaggctgaagacaatgtgagctgaacacg

SEQ ID NO: 137663 - DNA, 876 bp, Homo sapiens
cggacgcgtgggtaagcggtaggttgacagaactaccgtcttcctgtttttttcctccaattttccggcagttactcccagtcatgcccgagccctcaaagtccgctcctgccccgaagaaaggctccaagaaggcagtgacaaaggcccaaaagaaggacggcaagaagcgcaagcgcagccgcaaggagagctactccgtgtacgtgtacaaggtgctgaagcaggtccattcccgacaccggcatctcttccaaggcaatggggatcatgaattccttctgtcaacgacatcttcgaggcgcatcgcaggcgaggcttcccgcctggcgcattacaacaagcgctcgaccatcacctccagggagatccagacggccgtgcgcctgctgcttcccgggggagctgtgcaagcacgccgtgttcggaggggaccaatgccggtcaccaagtacaccagttccaagtaactttgccaagggagagacatgaagacagaggagaaatgaatgcataaaataaccgattaatatgattctatacatagaacttaggaagtctcatcttgcctgaaaatgacctgtgtggatcccacccaaatccaacttcatcctggtttggtgcccccttggttcatcaaaaaaaggttcccgaggggaaggaactaaaggggtttgcccttcatgttactttttgagtttataaacataaaaaccagaatttactytctgttacagacctagttactgggaattcattacttgccatggactacctttgctaagaaaagtctgaatgagaagatggcaggacgtctgaaaaaaaaagttataattaataaaatctgcgaagaattgtaaaaaaaaaaaaaaaaaa

SEQ ID NO: 137664 - DNA, 421 bp, Homo sapiens
ccctcggtgattgagaactgtgttgctgctgctggattcagtgtgggagagtttgcagccctagtgtttgccggagccatggaatttgctgaagacgcaccaggatgttgccggttagtggcgcattccacacccgcctcatggagccagccgtggagcccctgacgcaagctttaaaggcagtcgacattaagaagcctctggtttctgtctactccaacgtccacgcgcatagatacaggcatcccgggcacatccacaagctgctggcccagcagctggtctccccagtgaagtgggagcagacgatgcatgccatatacgaaaggaaaaagggcagggggttcccccaaactttcgaagtaggccctggcaggcagctgggagccatcctgaagagctgtaacatgcaggcctggaa

SEQ ID NO: 137665 - DNA, 1173 bp, Homo sapiens
ggaccacgctgcgccgcgccgccgcagtcgggcctcggtcgccacggtaacgcgcgcgggcaggtgtccgaccatgagcgtccgggtcgcacgggtagcgtgggtcaggggcttgggcgccagctaccgccgcggcgcctcgagcttcccggtgcctccgccgggcgcccagggtgtagcggagctgctgcgagatgcgaccggggcggaggaggaggcgccctgggcggcgacggagcggcgaatgccgggccagtgctccgtgctgctcttcccgggccagggcagccaggtggtgggcatgggccgcggtctgctcaactacccgcgcgtccgcgaactctacgccgccgcccgccgcgtgctgggctacgacctgctggaactgagcctgcacgggccgcaggagaccctggaccgcacctctcaggtacagagccctggaactgggatccccaggagagtgagggctcacgttctgcatctgtccccacaggtgattgagaactgtttgtttctcaggcctggccttttctccttcattctgtgccctcatttttccaaatgcgcttctctctggccaggtttgtatgcagtgaaaatccgagctgaggccatgcaggaagcttcagaagctgtccccagtgggatgctgtctgtcctcggccagcctcagtccaagttcaacttcgcctgtttggaagcccgggaacactgcaagtctttaggccctgtgaatggtcagatctgtaaaggcggatttctgggacattgctcggctgaaacctccttccttccccaggctctacggtttctccagaagaattcctctaagtttcatttcagacgcaccaggatgttgccggttagtggcgcattccacacccgcctcatggagccagccgtggagcccctgacgcaagctttaaaggcagtcgacattaagaagcctctggtttctgtctactccaacgtccacgcgcatagatacaggcatcccgggcacatccacaagctgctggcccagcagctggtctccccagtgaagtgggagcagacgatgcatgccatatacgaaaggaaaaagggcagggggttcccccaaactttcgaagtaggccctggcaggcagctgggagccatcctgaagagctgtaacatgcaggcctggaa

SEQ ID NO: 137666 - DNA, 425 bp, Homo sapiens
ctatttggtcatgtgagagccgatatccagtttcaacgctgaacacatttcggatggtctgcacactcatccagtaaaaattccagtcctcgttttctgtcacttggacccatcctctcttttcagagttattgatcagcactgacttctcgatatcagtgacccattttactttccctgccataatccataggcactgacagagcacctctggcaacgcccacgctcacctcggtctcgctgacgtcactaacgccggcccctccttcttccctgtgggctcagagcgccgagggactcggaggagcgccctgcagggatgcctcgagccgcgccctcgccccgcctccagcccctctccggcgctcgcaggaggacgcacccgactgccaggcgcaccggtccgccccgccccgcgctgcact

SEQ ID NO: 137667 - DNA, 1259 bp, Homo sapiens
atgaaggcatacctgctgttgggtgctgcccctcccctcccatggttccccgggcaggcagttttcagaccctgcccaccacctgccggcttgtggagaacagcccagctggtagagctggaacatgggccagtgccaagggaggacttaatcccgtgctccagacccttctcaatctcctttctgggccccgagagggtggacggcctggcatttcctaggatccaagccctgggcatagcggccgcccgaggtatggagcccaaaggagccccaggcaagtctgactccggaaatagtcgcagcgccggcggtcgcgtcctgggttgccagggcgccgccctggaagtagagtgcagcgcggggcggggcgggccggtgcgcctggcagtcggctgcgtcctcctgcgagcgccggagaggggctggaggcggggcgagggcgcggctcgaggcatccctgcagggcgctcctccgagtccctcggcgctctgagcccacaggtaggagtgaggtcggatatagggatcaatggaaacatctggcaccctggggtacaaacggatttctccagccttaagcgttcccaaggtttgtatgcagtgaaaatccgagctgaggccatgcaggaagcttcagaagctgtccccagtgggatgctgtctgtcctcggccagcctcagtccaagttcaacttcgcctgtttggaagcccgggaacactgcaagtctttaggcatagagaaccccgtatgtgaagtgtccaactacctctttccagattgcagggtgatttcaggacaccaagaggctctacggtttctccagaagaattcctctaagtttcatttcagacgcaccaggatgttgccggttagtggcgcattccacacccgcctcatggagccagccgtgggagcccctgacgcaagctttaaaggcagtcgacattaagaagcctctggtttctgtctactccaacgtccacgcgcataggatacagggcatcccggggcacatccacaagctgctgggcccagcagctggtctccccagtgaagtgggagcagacgatgcatgccatatacgaaaggaaaaagggcagggggttcccccaaactttcgaagtaggccctggcaggcagctgggagccatcctgaagagctgtaacatgcaggcctggaagtcctacagcgccgtggatgtgctgcagaccctcgaacatgtggacctggaccctcaggagcccccgagatga

SEQ ID NO: 137668 - DNA, 1172 bp, Homo sapiens
gggcaggtgtccgaccatgagcgtccgggtcgcacgggtagcgtgggtcaggggcttgggcgccagctaccgccgcggcgcctcgagcttcccggtgcctccgccgggcgcccagggtgtagcggagctgctgcgagatgcgaccggggcggaggaggaggcgccctgggcggcgacggagcggcgaatgccgggccagtgctccgtgctgctcttcccgggccagggcagccaggtggtgggcatgggccgcggtctgctcaactacccgcgcgtccgcgaactctacgccgccgcccgccgcgtgctgggctacgacctgctggaactgagcctgcacgggccgcaggagaccctggaccgcaccgtgcactgtcagcccgcgatcttcgtggcatcgctggccgctgtcgagaaactacatcacctgcagccctcggtgattgagaactgtgttgctgctgctggattcagtgtgggagagtttgcagccctagtgtttgccggagccatggaatttgctgaaggctctacggtttctccagaagaattcctctaagtttcatttcagacgcaccaaggatgttgccggttagtggcgcattccacacccgcctcatggagccagccgtggagccccttgaacgcaagcttttaaaggcagtcgacattaagaagcctctggtttctgtctactcccaacgtcccacgcgcattagattacaggcattcccgggcaacatccaacaaagttgcttggcccagcagcttggtctccccaagtgaaagtgggagcaagacgatgcatgccatatacgaaaggaaaaaagggcaagggggttcccccaaactttcgaagtaggcccttggcaggcagcttgggagccatcctgaagagctgtaacatgcaggcctggaagtcctacagccgccgtggatgtgctgcagaccctcgaacatgttggacctggaccctcaggagcccccgaagatgactggcagggggctcaaatgcaatgaccccctctgtcctcctgaggagaggctgtaggctgtgcctgtcgccccctaccttcctaatggctcctcctctgaggagtgaaagggatttgtttgcaacgtgctttgaaggccacataaaaagccctaaaaatgagtaaaaaaaaaaaaaa

SEQ ID NO: 137669 - DNA, 1575 bp, Homo sapiens; identical to SEQ ID NO: 127561

SEQ ID NO: 137670 - DNA, 804 bp, Homo sapiens
ggtgataaagatattggctcctcgagtatgatggttcatgtcgtggggaggatgtgagggcgaatagtaatgattagagcgatgagtgacgtggatgtcgtaaatgtgcgccgaaacaatgtgtggacccagtgaaattgcccttgccattacaattccaagaatcagagttgttaaacctgtagagatgagggagacctttccaagctttgctatatttcggtacaaggataaaggcagagtaaaggtaactgtggaaagtccaataatgaagtggcgaccaataaacacgttttcaggatcaactgacctgttgcaaggtgaatgaaatttccggacaactggcttcagaacctgcctagtcgctagttttacctgcggcgggatgacaggctcctgcctctggtagcccatggctgagcggtggtcctcagcaggtggaagatgctggggctgggtacggattcgcacccggccagcctcctccgccacctcgcacacagccgaggtccgcgtgtagccgcagagctgcagggagccagttccacgggcgccccctgctccctcggcaggccgcgagggctgcagccccaagatctctaggctgtggcagcctggggcgcttttccaccggagttcgcccagacaaatgtatttttcctccggagacggagatgtcttatctgctctttcggaacactgtttctcgttgtcgttgttgatcattccttttattctcaaccattctcctttggcctttgtgacatctctttcttgtggttttcttcctgctgttttggtcat

SEQ ID NO: 137671 - DNA, 674 bp, Homo sapiens
atggggcaagtgaaggggcacaagctctgcctggacttcacactgctttccccagatggaggagctgctgaggggcggtgccttgagctgggttggcaggcgaaggaggtggaggagaccatcgagggcatgctcctcaggctggaagagttttgcagcctggctgacctgatcaggagtgatacttcacagatcctggaggaaaacatcccagtccttaaggcccaaacttacaaaaaatgcgtggcatttatgccaaagtggaccggataaaggcctttgtcaaaatggttggacaccacgtcgccttcctggaagcaaacgtgcttcaggctgagcgggaccatggggccttccctcaggccctgcggaggtggttgggatccgcagggctcccctccttcaggaacgaccccactgcccccctgaggcaggtgtttgaggcctcccccgaccccaggctggcccgaacagtgaccatccagacgcagcagccagtcagggtctcagggcccttgtccggtcagaggaaagaaaagagtctccagaaaggggcccaggtcttccagacaaatgtccctgagaccctgctagagggggcagccatcagcccagcgcctgcttgcggagggcccctcacatctggagatggtttcaggcatgtgcggaagtga

SEQ ID NO: 137672 - DNA, 651 bp, Homo sapiens
ctcccacctcctgcaacccgagaaagaccaccaggatgcaaaacagtatttgtgggtggtctgcctgaaaatgggacagagcaaatcattgtggaagttttcgagcagtgtggagagatcattgccattcgcaagagcaagaagaacttctgccacattcgctttgctgaggagtacatggtggacaaagccctgtatctgtctggttaccgcattcgcctgggctctagtactgacaagaaggacacaggcagactccacgttgatttcgcacaggctcgagatgacctgtatgagtgggagtgtaaacagcgtatgctagccagagaggagcgccatcgtagaagaatggaagaagaaagattgcgtccaccatctccacccccagtggtccactattcagatcatgaatgcagcattgttgctgaaaaattaaaagatgattccaaattctcagaagctgtacagaccttgcttacctggatagagcgaggagaggtcaaccgtcgtagcgccaataacttctactccatgatccagtcggccaacagccatgtccgccgcctggtgaacgagaaagctgcccatgagaaagatatggaagaagcaaaggagaagttcaagcaggccctttctggaattctcattcaa

SEQ ID NO: 137673 - DNA, 497 bp, Homo sapiens
aagatttcgtccttgggccaaagtgccgggtctaggcctggaatcgcgaggcgggcatttcagaagagagcggcgcggagtggggcgccgcgagggcactacgagcccaggaactgtcgcgccggcccgattttccgcggctgtataaggactagcgcttccgtagccggggagctggagggaacctgatttgagatcaattcttggagaacacaaagaagtgtgatggattgaaccagctgtcctttgaccctgctaacaacaacaagcccctggagtttggtagagccagaggccctctggtcacagaaggcctcattgagaatggaggggaatcaagcaagaaaagaaggagaacaaattcttcttcagccgataacagtagaactctgaacgtggattccactgcaatgacactacctatgtctgatccaactgcatgggccacagcaatggaataattttggaatggcacccgtgcgaattgtcggacaccc

SEQ ID NO: 137674 - DNA, 1825 bp, Homo sapiens
ttcgaagtacctagtcagtgtggtggaattcgagtgccgggtctaggcctggaagcgcgaggcgggcatttcggaagagagtggcgcggcgtggggcgccgcgagggcactacgagcccaggaactgccgcgccggcccgattttccgcggctgtataaggactagcgcttcggtagccggggagctggagggaacctgatttgagatcaattcttggagaacacaaagaagtgtgatgaaatgatgacagagctaagttcacagttgaggaccacacaatgcaaagagattttagatggctgtgggtctacgaaataggctatgcagccgataacagtagaactctgaacgtggattccactgcaatgacactacctatgtctgatccaactgcatgggccacagcaatgaataatcttggaatggcaccgctgggaattgccggacaaccaattttacctgactttgatcctgctcttggaatgatgactggaattccaccaataactccaatgatgcctggtttgggaatagtacctccaccaattcctccagatatgccagtagtaaaagagatcatacactgtaaaagctgcacgctcttccctccaaatccaaatctcccacctcctgcaacccgagaaagaccaccaggatgcaaaacagtatttgtgggtggtctgcctgaaaatgggacagagcaaatcattgtggaagttttcgagcagtgtggagagatcattgccattcgcaagagcaagaagaacttctgccacattcgctttgctgaggagtacatggtggacaaagccctgtatctgtctggtaatagggaattgaagaaatttttgaacaaggaagataattatttccgcaagattaatttgacagctctatataaaactgtattagaggagagatgtgaaaagaggagaggaggttaccgcattcgcctgggctctagtactgacaagaaggacacaggcagactccacgttgatttcgcacaggctcgagatgacctgtatgagtgggagtgtaaacagcgtatgctagccagagaggagcgccatcgtagaagaatggaagaagaaagattgcgtccaccatctccacccccagtggtccactattcagatcatgaatgcagcattgttgctgaaaaattaaaagatgattccaaattctcagaagctgtacagaccttgcttacctggatagagcgaggagaggtcaaccgtcgtagcgccaataacttctactccatgatccagtcggccaacagccatgtccgccgcctggtgaacgagaaagctgcccatgagaaagatatggaagaagcaaaggagaagttcaagcaggccctttctggaattctcattcaatttgagcagatagtggctgtgtaccattccgcctccaagcagaaggcatgggaccacttcacaaaagcccagcggaagaacatcagcgtgtggtgcaaacaagctgaggaaattcgcaacattcataatgatgaatataatgggaatcaggcgagaagaagaaatggaaatgtctgatgatgaaatagaagaaatgacagaaacaaaagaaactgaggaatcagagttgaagaaactagaaggaatagtagatggtagtgtagaggtatcggctgaagccctgagaaaattattaaatgaatatgaaagacaagtgaaagaagagcaaaaggttggatacagaatttgggggactatccacaataagggagaaggaaagaaagaggagtttgcagaggagttagaaaaaagcagttctgagaggctggaagaaaactag

SEQ ID NO: 137675 - DNA, 1512 bp, Homo sapiens
tcagaggcgccggttggactcacgggcggtgcatgatggtggtggctacggtcacctcgctggcgctctcctccctcctgtccctgctgctctttgctgagatgcagatgtacagccgtcagctggcctccaccgagtggctcaccatccagggcggcctgcttggttcgggtctcttcgtgttctcgctcactgccttcaataatctggagaatcttgtctttggcaaaggattccaagcaaagatcttccctgagaatgcttacgtgaaaggttgttaaggagaaatatatttactgaagctgtctgaagacagatgacgcttttcgattctgcaccttgtatagctcctggaggtggagctggaaaataaggcctttgaaagcaagaaactttgttctcctgtgcctcctgttggctctctttgcatctggcctcatccaccgagtctgtgtcaccacctgcttcatcttctccatggttggtctgtactacatcaacaagatctcctccaccctgtaccaggcagcagctccagtcctcacaccagccaaggtcacaggcaagagcaagaagagaaactgaccctgaatgttcaataaagttgattctttgtagaacattcagggtcagtttcttcttctttgcttcttgccttgtgacctttggcttggtgtgaggacttggagctgcttgccttggtacagggtggaagaagatctttgtgattgtagtccagcccaccccatggagaagatgaagataccaggtggtgacacagactcgcgtggatgcaggcccgatgccaaaggagagccaaccaggagcgcacaggcagaatctccagggaagatctttgcttggaaatcctttgcccaaagacaaagattctccaagattattgaaggcaagtgaaccgagaacacggaagagaccccgaaccacagcagggccgccctgggatggtgaagccactcggttggaggcccagctgacggcctgtacatcttgcatccccagccaaagagcagcaggggacaaggaagggaaggagagcgccagcgaggttgcccgtacccaccactggaaggggattggagaagggaccggagagtcaggctccgccttccttccggcaagctacgggcagattcagccggtccggaagctctggtgggccgaccccctccaagaactcccgggactgcagccacacgccccaactccccacaccgcgcggcaacccctacgtattccccagccccggacaccccgaaccctcccgtccggtggaaatgcccgctcccggtggaacccaggacacgtcagctctgtcgggagaggacgaggaaagcttgtccacccaaaccccgaccccctctaggacttcctggggaccccaccggtcctgttacccatcatgccccgcccgtgagtccaaccggcgcctctggccaagaaaggcgagctgaaccgggtgcggttagctatgcgcatgcgtcagcgacgaaa

SEQ ID NO: 137676 - DNA, 2502 bp, Homo sapiens
atggcggcgcccaggtggagcgcgtcgggcccctggatccggggaaacggccaaggttgcgggagtctcttcactctcgtctcaaagccattttgtgccgctgccgctgcctctacggccataaatgcccagagattagcggagaagctccgagcccagaaacgggaacaagacacaaagaaggagccggtgtccacaaacgctgttcagcggcacgagtgcaagaaatagtgcggttcacacggcagctgcaagcgacgtccaccccaaccgtgcttgctaaggcacttgaccccgaggaattctccaccaggacaagaaccttgtggtcatcaataaagccctacggtctccctgtgcatggttggccttggggtccagctctgcatcactgatgtactacctatcctggcaaagatgcttcatggccacaaggcagagcctttgcatctgtgccaccggctggacaaggaaaccacaggtgtaatggtgttggcttgggacaaggacatggcacatcaagtccaagagttgtttagaacccgtcaggtggtgaagaagtactgggccatcactgtgcatgtccccatgccctcagcaggagtcgtggacatccccattgtggagaaggaggcgcaaggccagcagcaacaccacaagatgacattgtccccgagctaccgcatggacgatgggaaaatggtgaaagtgcggcgcagccggaatgcgcaagttgctgtaactcagtaccaggtgctcagcagcactctctcctccgccctcgtggagctccagcccatcactggaataaaacatcagcttcgagttcacttgtcttttggattggattgtccaatccttggtgatcacaagtactcagactggaataggttggccccccagaagctgtctgtgggcaccctgaagaagctggggctagaacagtcgaaggcccgctacatcccccttcacctgcacgcccggcagctgatcctgcctgccctggggtccgggaaggaggaactcaacttggtctgcaaacttcctcgcttctttgtgcattccctgcaccgcctgcgtttagagatgccaaatgaggatcaaaatgagaacaatgaagccaagtgtctgggagcacagtgaagaccatgggagcaccctggcacctgggagcacagtgaagaccctgagagcatcctggcaccttgggagcgcaggttggcccctgaactgttctttgtttacagccctctgctaacttctcactcgcaacagactgcgtaagagccaggtgggataagaaaaagcaaatcagctgctacagggcttttaatgaaaaccaaagtcctatttcctgatagtttggctgcgctgtgggaaagcctgctggaagtctccctcccgtgggctctcattgccaatatggaacagagcccagggccaggcagattggggcagtgactggaaaaggagacctaaaggtcagaatccgggatcaggaactgtttttatccagcagtgaagctcttgagctcttaaggaaaggttcccgtggttggaaagaacataatggttaacaaatatcgcagcatccagggattgcccagctatagtgtgggtgccctactgaactctgattagggaacctgtataagggtattgagtgtgaggttgaggtgggacatttgctgagcaaggagaaccgatgtgaatgacaggcagataacatgcacacatgaagctggctgggtgtaaggcagtagcggggaacagcatgctgtctaacagctgttagctccagctggtttttgccattgtgggaagggattttctcatttcttccagagaagctggaaacctagaatatttcatgtgaaacctccccagtgtattgcccaactaaatcaaatttttaaaagatgcttaggcacctaagcaaataatacttagaggttgaaatttggtctacaggcctagcagtttgccagtctaaggtttattgaatggtatagaagtttggggaaaggggccctcttgaaaattttggatcagtggttgggcattttcgctgcgtgtagtatgtatcctttctaggcttggagatggctttggttggtccgtggaatgtaagttaatgaggagtgctgcccatttaaaaaaatcaaaaaatctctgtttgtggaagcgtatctttctgttcttacggtctcaggaaggagagggctatactgaacaccattagggatagatggaaatgaccttggcctccctgctcagctggtccatctagtttccaccttgtttcttgcaaacaaaatacacctcacactactttttctttctgacagagttggagtgacagcacagttaggggggtacaccccgggacagtctttatatgttccctctgtatagatgatgccactttctagccctttccctgtctccatggtacccattactgtgcataataaatttaactttgaaagcacaaaaaaaaaa

SEQ ID NO: 137677 - DNA, 1752 bp, Homo sapiens
  misc_feature (1)...(1752): n = a,t,c or g
atggctgtggacctgggaagtcacactcctggttcctcaggcgtgactgcagccaccttcagagggcggagactggtcaacaccagagaggagagtgtggtgctgggtgctggtggtgaggtactctcaggcgttccaggaacttgggatgccctgggccctggcgccagctttggaataaagggcatgttccccaaggggacagtcatcatgagcacatcccccatgtgcgaaggcccagtaccaaggcgcaagccttgcgccagcagtgtgggccagcaaaatagcagaagcaggaagaaagccggccggaagacacctaccctggctggaagacacgtacccgtgaagatcaagaaagaggccatccagcagaaaccacttccagcttcttccttctctcctgcccttactcgctcgggcgccatctttggcccatgccccgcccttacttcagcgccggtgctagaatacccccttcagaaagtagtagaaaatgaagccttcaaagtctttaacaatcgtgatgaggaaagtaaaaggcaaaaacaggcagagtttcgaatgcttacctctgccatcaggggccctgcaggcccacggggccatagctccacacggaagcctcctagcaatccacctccacctggcgcctgtttcaagtgcggcaatgaaggtcacaggtccagacaatgcccaaacccaggcaccacctcccaagaagctgaactcatcgccctcactcgagctctcactctagcagcaggacaacagatcaacatatattcaaattctcattatgtgttccacatagtgcactcacactcatccatctggaaagaacggggtatcctaactgcaaaaaacactcctgccataaatggctctctcatcaacaagctccttaaagctgccaggctcccgcaaaaagttgccatcattcattgcaggggccaccaaaccccagacaatcctatattggctggaaatgtgctagcagatcaggtagccaaacaagtggccctacaacccgtgcaaggccagtttctgtccctgtccttgttctctccgctttactcctcagaagaaaaggaggacttccgagcccaaaaccttcaaaagcaaggaccatggcccagtcccaaggtgcaaggctacttgtgccagcagcgtgcgccagcaaggtagcagaagcaggaagaaagccggcaggaagacacgtacccctgaagatccagaaagaggccatctggagcagtcccttctcagtgcccatggccaccagggctgccgccagcacatcccccacagcccatggccccgcctagttattacacagagcatgaggagctctctggtcaacaagaaattccaccgagtccgttactgggctcagacttttaagttaatttactgcccccctaccttggccagtaaccagcgcctttagggctagcctcccccccagctcctgcctgaaaaatgacatttcgccggtgtctccggagggggctgaatttcactttgtaactttctgcggaacccgagcccgggtnggcatgctcgggtggtggtatcgtatgcaaatacgcatgctgacgttacagatcatgtgggttttggcgtagattccccactgatgcgaggcattttttttccctttttttttccttgtnttttttcttttaaaaaatttttgggccaccgtttctccgttacgggggctttttctgttctgtctgtctgggctgg

SEQ ID NO: 137678 - DNA, 739 bp, Homo sapiens
tttttttaccccaagttgttgtttattttcatgaggggggaaaaaagaatcctttatgatagtgaaaatatactttattttttaatacaatagctgccagcaatatactggtgctgatgttccaaagataaaagaaaatacatgcattctataataagctttcatttgcctgttcaagaaattataaagaaaatactaagctaattaatgataggctcaaaaaatgcagtatacttataaaaagccgctttcataaagccagtgcttactaaatgttagcatatcaaagtgggagaaacactgccattttaaagcaataaacttaaaatttcaagaaacagcctatgagaaatagcacttcctatacaaattaggtataaaaaaattaccaaaaatgtattatagtcacaatcacagtctttggagtagtacgtagaaagtctggttttgcttttgtcttttaaaaaagagtaaatacatagcaaagttttattttcagcaagttcatcctcctgttagaacacaaataattcctggtttagggcttcaattaaaaaaaaccccgaaaaacaaaacaaaaacatgcagagtgctattcctcaacatgggctgtggaaaatttaactccaggaagtgcaatgagtgagatcaggcaaaactacagtaaatacacactcaccataactataacttagtccccaaagaatgaacaatcctctatacaaggtaaatggggtga

SEQ ID NO: 137679 - DNA, 4502 bp, Homo sapiens
atgccccctggggtaagggcgtggggaggtgctgaggggccgaggccgcggccagttagacgccgtactgtccagagagcactgcggcgggagccggcagtcggagcagccttggagcaggaggagcagcagcagcagcagccgtcgccgtttgcggagcgcagccgagccggccatggcgttgtcgatgccgttgaacgggctgaaggaggaggacaaagagcccctcatcgagctcttcgtcaaggctggcagtgatggtgaaagcataggaaactgccccttttcccaggggcctcttcatgattctttggctcaaaggagtttgtatttagtgtgacgactgttgccttaaaaaggaagccagcagactgtcagaatttggttccggggaccccccccccccattatacttttcagcagtgaagtcaaaacggatgtaaataagattgaggaattttctgaagaagttttatggccctcccaagtacttaaagctttcaccaaaaacaccccagatcaaatactgctggaatggacatctttgcccaaattctctgcatattatcaagaattcaaggccagaggctaatgaagcactggagaggggtctcctgaaaaccctgcagaaactggatgaatatcctgaattctctctctcccgtgatgaaattgatgaaaatagtatggaggacataaagttttctacacgtaaatttctggatggcaatgaaatgacattagctgattgcaacctgctgcccaaactgcatattgtcaaggtggtggccaaaaaatatcgcaactttgatattccaaaagaaatgactggcatctggagatacctaactaatgcatacagtagggacgagttcaccaatacctgtcccagtgataaggaggttgaaataggcatatagtgatgtagccaaaagacttcaccaagtaaaatcgcgtttgttaaaagaggtgtctttcatgtcttccccttaaggaatacggttttcctaacagggcttactccttcctgtagagcagaaattgtattttgcacgaacatgcagttattgaagattaggatcaaggatagacaaggtatagtagttatcttaaaatatacactcctaagcagtattattttaaaatcctttaccctggctacctcccctacccgggttcccctctctttaatttggagacactccaccacaaacttttcactttagaggtagcttgccatctctcaggagccctcaccattgtgtccattcactgtgtatagatggcagaacttttgaggtgcaatgtttaattgttaaaaatagtagccacgacttttatcaggcagccccaaactggtgcataatgcatggtaccaaggaaatatttatgtattttttggaattttgtaatatttagtaagagtatatgcaaaggattgcctactgtaatccagaaatattgtttccaatttaagtcctaccccgggatatgtacctaacgaatattacccacccagagaagagagctttctacaaaagtcacctacagattttgctatattgctttgtagatagatttttacttttgcctaaaagcatttatccttcataccaattgtaacatctgacaccatgtaggaagctaaaagtttagagggagtgagggttttctcaagaccttccctctccccccaaaaagggcccattttttatcttttagaagaagaaacctgatgggcaccctgatactctgttctaaatacgtttgtataatatgtgttttcgccctgtcgccattacatttggaactttattgcattcttatattttaaaaagccttgtttttacgtaatcatagaggcttgctatttgtacatcgtgttgagcacacactacataactgatttttagttgacttagcatatagcaggtacaatgattatgtaatgtaaaaattaacacagaaatttaacctaagagaatgaaggggtgggttgtgtcaaaatatcaagtaaatttttgtttctaaagtacatttaatgtagatgacctaaagaatgcgttatccatcctatataaaagaaagataaaacacaggtcaccaattttctcatttcaccccatttaccttgtatagaggattgttcattcctttgggactaagttatagttatggtgagtgtgtatttactgtagttttgcctgatctcactcattgcacttcctggagttaaattttccaacagccatgttgaggaatagcactctgcatgtttttgttttgtttttcggggttttttttaattgaagccctaaaccaggaattatttgtgttctaacaggaggatgaacttgctgaaaataaaactttgctatgtatttactcttttttaaaagacaaaagcaaaaccagactttctacgtactactccaaagactgtgattgtgactataatacatttttggtaatttttttatacctaatttgtataggaagtgctatttctcataggctgtttcttgaaattttaagtttattgctttaaaatggcagtgtttctcccactttgatatgctaacatttagtaagcactggctttatgaaagcggctttttataaggatactgcattttttgagcctatcattaattagcttagtatgaaagataaggaaaaatctccatgttgtatccatttggctcaggaagattctttgccttacctttcttagaactctttattgcttatcaaaagtttgagtacccgcttggtttttttttggtaattaaatattgtatgatttatctggttcaaggaagatgcactattcagttatctattgagaaattattttgcagtggttttagtgggtgaaaaatgtcccatctgcaccagtacacaggcaggcattatcattcttcacctactttttaaataagtggcaacttgggattcattcctggtgaattcctgaacctttgcctcatagcttaaagtataaaaaaagattcaagaggcagtgagggttgttcctttccagtgaatggtggactgagtggtgcgaggtggagggctaacaagaggaaagaactacattcttcagaatacagtgatgaaaaatttcattttgaaactcaaatattttcattttggatattctcctgtttttattaaaccagtgattacacctggccatccctctaaatgttctacggaaggcatgtctattgtgattttgatgaagacagaattatttttctctgtaggaaacacagataccacttttatcaggggaagttagtcaaatgaaatgggaaattgggtaaatgggaccaaaagctaggctaggtaaaaagggacgaccccggcaacatgctttaacccccatttgtatggttttgtggaaagagcatagtttaacatcttgagaaatttgggacataaagttttcatggtagacagtttcatgcagtatatgaattgacataatggaaataatcctgattttatttttacaactaacatccattccccttccatttaaacaccttttgtgtttttacttccagtgaggagattggagtcctgaatggatctgttttcccagagattcctgagaaatttttgtattcagcagttgggaaagctctctattctagttgataaaacttccccttttttgatgtagatgcagatattctatacatttctgttgtcttttactagggctgtaaacttttgmmgataaacttcaaataagattttatttcttgggtaattttgggcttttcacaatttatcctttaaatccttgaggcaatctgtatacaattaaggaggatttctggacatttattcttacaactaaatggatcaacctctaggatttaggcatgttaactttctgttgtgttttgaatctctccagagttgcatgtagatagcatttatttctgtgcccctaaaacccatttaggaaaattaactacaaagtaaaaatgtagggggaaataggaaatgtattttttccatgaacattttggataccaaatttccatccatttaatggattcccccccattccctgccattaattttgaatttaagccatttaattccaaagagaggggagcatccccattattgataccatgtgggcttttaaaaactccctccctttattaaatagtcaaggtttgggcccacacaaagtatatttrvvatcatggaaaaattttcaactccctcaagccggaatgtttgaacaggaatggaggtattttctttataatttcttgaacaggcaaatgaaagctgtattatagaatcgcatgtatttttcttttatctttggaacatcaggcaccagctatattgctggcagctattgtattaaaaaataaagtatattcctcactatcataaaggattctttttttcccccctcatggaaataaacaccacccttggggtaaaaaaaaaaaaaaagggcggccgct

SEQ ID NO: 137680 - DNA, 1128 bp, Homo sapiens
atggcactggcatctggtgagggccttcctgttgcattatcccatggcagaagggggaatggtcaggaaagggttccttacctgaagcttcgggatacgtgtgcttaccgtgttgcatggcgttgcaataggttagctcgagcaaaagtcaagaggacgtcataccggagcggatatggtaatgggttcgagcctggagttgagccagattgtgtcgttttacttgccttgggcgtggagaacgatcttgtgagaatatcttcaaaggcagaaaaatattccctttatgaattctctttccctctgcgtgtaagtcgggaatgtgaagaggagtgtaggaaagagccctggttcaatcctggtcaaaagcccagcgtgctcatcacctctgggcagatcctagggcaagaggagcagaaaaccctgctcttccctggtctcctgtctttggtttttcagttcaatgtggaaaacagtgacttacgatgtctcagccttgctgaaaatttagaaataagcgctttattgtctctttcatgttcgagcgtcattcgtctaatactaatcaaccttgaggtgacgatcagtccccccatcaccatccttaagcatgcgccgcccttgacctcccttgaagcatcgagttcatcgtctggcatcgaaaaaaaaatccataataattttcgacagggtcctttcccatcatctgctacacgatctacctttttaatgaatcacacctcttttgacagctacgtcgtcgtatccaacatcgtccctcgccttaatctttatcctcaagtccttgacgtccttcagtctcttcataaaatccatcaattagccagcaatgcaaaatggactatacagggcccagccaagccagacctaggactagagcttggtctccacagatacccagattgggaaaaggaagagaggaaaaaaaagaggaaaaggtctgtgtcccctgaaaaatccatcaccacacacaataaacccacatcatctggaatcttctatccccaagaagatgtgggtgtgacctgggcaggcccccagcaccaggtcctcacccttccagtcctccccacagcccaccccagccctcccgctgccctcctgtga

SEQ ID NO: 137681 - DNA, 453 bp, Homo sapiens
tttcgttgggaaaagacattcgcccgcggtccgcacgcgctgcttgcaaaggggtggggttgtggagtggatgctttggcaagatggcggggagcggcgtccgccaagttacttctaccgccagcaccttcgtgaagcccattttcagtcgggacatgaacgaggccaagcggagggtgcgcgagctctaccgcgcctggtatcgggaggtgccgaacactggtgagaggtagcggcttacgtggggacccggaggccgccgctcaaggtcgtagccggcccggccggggtttctcatgggcccagctgaggtcaccaacttgggcaagaggcgactgcgggtgcttcaggggaagagggtcacccgaagcctaccatgggccggacctggcggcggcgcggttggtcagaccggccgtgcttaagcattcgtacgttgctaatcggagcttt

SEQ ID NO: 137682 - DNA, 1205 bp, Homo sapiens
gtccgtacgcctcgaggcgcaagttccgagtcgacccacgcgtccgggcgtggagcggatgctttgacaagatggcggggagcggcgtccgccaagctacttcctaccgccagcaccttcgtgaaagcccatttttcagtcggggacatgaacgagggccaagcgggagggtgcgcgagttcttaccgcgccttggtatcggggaggtgccgaacactggtgagagtgcaccaattccagctggacatacactgtgaaaatgggacgggataaagtccgagaaatgtttatgaagaatgcccatgttcacagaccccagggtggttgatcttcctggtcattaagggaaaagatcgaaactggaagaaacaattaaagttttgaagcaagcggacacatgttatgcggttcttccattgaaacagaagcgccaaggccaaaggatttcctatccaagtttctatgtttggccacgatccattgaagtcattcagtgggaaagatgcacgttggatactatttttaggagcacaaataaaactcactatacaatggtcactttgtgatagaattccattgatgaaccaattttctgcagcctctttttgcctgagcaagtggggaccttgggtattacacatcacctgttcttttcccttttcttggaaatgtggtgtttgctgtaaattggattgaattatttttctcagagccttgcatgtccagtaaacgggaaggaaggaggcccatctgttcaaaaaattgtgaccattgggcatgaggctggacggacttgttaatgtagttgtttcctatagccccctatgattaggacactttagtgtcaggggcaccagattatcctgaaattagcccagctcctcccctgtcaggggatcaggggcagcacttaacagggcgcaaaagtaggaggctgttcaaggatggggctagtttttccttggggtttcttgaaggaaaatgggatgtggcaaagggtttggcttccgttactttgtaacaagcttccagcccttaaaatgaaatttaacttcctactcagggcaccctgcttaggtgcacagctgttcaatatacacagagaacagaaatattcctactgtctttggaaaccctggtgtacctctcagtggcagaataaacatcaacacaggttcaagaactgataaaaaaaaaaaaaaaaa

SEQ ID NO: 137683 - DNA, 1304 bp, Homo sapiens
tttcgttaaacaacaacagcaagaggagctgtcccaacggcatggaggatgatgctatatttgggatccttaacaaagtgaagccttcctataaatcctgtgccgactgcatgtaccctacagccagcggggctcctgaggcctccagggagcgatgtgaggaccccaatgctcccgccatctgcacccagccagccttcctaccccacatcacgtcctcccctgtggcccacttggccagcaggtcccgtgttccggagaagccagcctctggcccaaccgaacctcccccgttcctaccaccagcaggctccaggagggcagacaccagtggccctggggctggagctgccctaaagccaccaaccagccttttggaacccttcagagagaccccaaaagtcctgccaaagtccctccttttgaagaattctcactgtgataagaaccctcccagcacagaagtggtaataaaggaagaatcgtcacccaagaaagatatgaagccagccaaggacctgaggcttctgttcagtaatgaatctgagaagccgacaaccaacagctacctgatgcagcaccaggagtccatcattcggctgcagaaggcaggcttggtccgcaagcacaccaaagagctagagcggctgaagagcgtgcctgcagacccagcacctccctccagggatggccctgccagcaggctggaggccagcatccccgaggagagccaggatccagccgcgctccacgagctgggccccctggttatgcccagccaggccgggagtgatgagaagtcagaggccgcccccgcttcattggaaggaggctcactgaagagcccccctcctttcttctaccgcctggaccacaccagtagtttctcaaaagactttctgaagaccatctgctacacccccacctcctcttccatgagctccaacctgacccggagctccagcagcgatagcatccacagtgtccgtgggaagcccgggctggtgaagcagcggacacaggagattgagacccggctccggctggcgggcctcaccgtctcttccccactgaagcgctcacactctcttgccaagctggggagtctcaccttctcaacggaagacctgtccagtgaggctgacccgtccaccgtcgctgactcccaggacaccactttgagtgaatcttccttcttgcatgagccccagggaaccccgagggacccagctgcaacctccaaaccatcagggaaacccgccccagaaaacttaaagagcccttcgtggatgagcaaaagctga

SEQ ID NO: 137684 - DNA, 642 bp, Homo sapiens
  misc_feature (1)...(642): n = a,t,c or g
gcgaccgctcctctagttccacaatgtccacgggcggagacttcgggaatccgctgaggaaattcaagctggtgttcctgggggagcaaagcgttggaaagacatctttgatcaccagattcatgtatgacagttttgacaacacctatcaggcaacaattggcattgactttttatcaaaaactatgtacttggaggatcgaacaatgttaactcattccagcaaactacaaagtggattgatgatgtcagaacagaaagaggaagtgatgttatcatcatgctagtaggaaataaaacagatcttgctgacaagaggcaagtgtcaattgaggagggagagaggaaagccaaagagctgaatgttatgtttattgaaactagtgcaaagctggatacaatgtaaagcagctctttcgacgtgtagcagcagctttgccgggaattatgccttcagttcttttccaaatcattcctagccaagctctgactcgttacctatgtngtttttaataaatctgagataggctactggtaaaaaaagaaaaagaagaagggaggagtgaaaaaaaaacctcgtgccgattcttggcttcgggggcaaatacccatagtgatcgtttaattcggacctgtccagcg

SEQ ID NO: 137685 - DNA, 3195 bp, Homo sapiens
gttgggctgcggcgccggcggctggggaagccgaagcgccgcgcgtgagagatcccggatacatctgcggtttgggctccgccaccctccgtctctctcccgcaggtctttgagccgggtgcggaaggagggaacggccctagccttgggaagccaaagcacacccctggctcctgccgacaccgccctccttcccttcccagccgcgggcctcgctccgtgctcggctactctgccgggaggcggcggcggctgccagtctgtggcgagccctgctgccctccagccgggcttctccagccgggctcctcccccggcccttgcaggggcacagagagctcggcgcccgcccttccgctcgcctttttagtcagccggatggaggagcatcggtccgggacggtctctaggctgaggcggcggccgctcctctagttccacaatgtccacgggcggagacttcgggaatccgctgaggaaattcaagctggtgttcctgggggagcaaagctctgtgaaagacatctttgatcaccagattcatgtatgacagttttgacaacacctatcaggcaacaattggcattgactttttatcaaaaactatgtacttggaggatcgaacaatcaggcttcagctgtgggatactgcgggtcaggaacgtttccgtagcctcattcccagttacatcccgtgattctgctgcagctgtagtagtttacgatatcacaaatgttaactcattccaggcaaactacaaaagtgggattgatgatgtcagaacagaaagagggaagtgatgttattcatcatgctagtaggaaataaaacagatcttgctgacaagaggcaagtgtcaattgaggagggagagaggaaagccaaaagagctgaatgttaatattaatggaaactagtgcaaaagctggaatacaatgtaaagcagcttctttcgacgtgtaagcagccagctttgccgggaatggaaagcacacaggacagaagcagagaagatatgattgacataaaactggaaaagcctcaggagccaaccagtcagtgaaggaggcctgttcctgactaatctcccatgtcatcttcaacctttctttcagaagctcactggcttttggcccccttactctttcattgactgcagtgtgaatattggcttgatgccttttcccttcagtaataacgtattgcgattcatcattgctgcctgtcctgcgtggagatgatctattagcttcacaagcacaacaaaagtcagtgtcttcattatttatattttacaaaaagccaaaatatttcagcatattccagtggataactttaaaaattaggatacattttcttaacatttttttcttttttaatgttatggataatgtacttcaaaatgagggaaatcttcaacagtatgagtatggcttggttaacgagcggtatgttcacagcctacctttatctctcccttgcctttctcacctctcacttacccccattccctattaccctattcttacctagcctcccccgacttcctcaaaacaaacaagagatgggcaaagcaggcagttctaccaaggcccattgggaattatcctttaattttacaggataccacttggctgtagggctacgggaccaaggatggtcccaaaatttattctttggaggcactggattaaaaattacgggtcttcttttgagggggtcaaaaatttcaggccatccatggggtaggggcagttgcttggaatggggaaaagggctcccgggtgccatcttccaaaatggggtcctaaaggaaccttctgaggtacttaggaggtgggagggaccttagggtgtattttctggacttaaaaccaattggctcttttcacatgtgctttattagactctggggagagaaaattaaccaagtggcttcagaacaggtttttaagtatttaaatccctccacggtaagaaaatgaaagtccctaatgaactgtttcctccccaagggttttaaaattgtcaagaggttattcctgtttgtttaaaaaataagaaacctctttaagccaatagattttgccttgggttttccttttttaaaaacaattatactgtgccaggcaaggcacgtgtaaaagtttttaattccctcccagaagaacccagtggaagaatttaaaatttgggcgcctacggatcaaaacttactgaattaggtagaaataatgatgtctaaaagcttaccaaccaaaaggaccctcagcagaatatactaaaactttgctcaggacatttgaggtcaaaattgaagacggaaaccggaaaccgttttcattgtaagcccctagaggcagattcaggtaaagcattacatagtagagggaaaggagagaatggaaataaaactcaatattatgcagatttatgccattattttttagcattttttaaggttgggttctttcaggctggttttggtttgttattagacctctcatatgtttaattaactgtgcgatttagttttatatttaagctacaattaatcttttttctttgggtggatatttatttctttgcctttttttttttttaacaactttcaatcttcagatggtttcgttgtaatctattttagagcttcacccatggcaatatgtatttccccttaaaacactgcaaacaaatatacctaggagtgtgccccttttaaacctttaccagttattgtgagattccggtgtaagctaataaccccatttgtaaatacattgtttgcaggacgaaaacttctgagttacagctcaggaaaagcctgctgaatttatgttgtaagcattacttaacacagtataaagatgaaaagacaacaaaaatatcttcatacttcctcatcccctcattggaacaaaaccttaaactgggagaaccttagtcccctctctttcctcttcctcctccacttcccacttattgtcaccttgtaatattcagagagcacttggattatggatctgaatagagaaatgcttacagataatcattagcccacataccagtaacttaaagatgggatggagttgtaaagtgcttttataatacaatataattgttaaaggcaagggttgactctttgttttattttgacatggcatgtcctgaaataaatattgattcaatatgga

SEQ ID NO: 137686 - DNA, 5338 bp, Homo sapiens
ccgaagccggcgaccgccccacctcctccctccctcccgcccgcttcctctgcccacagcgccggccagagcgagctagacaagggcacgcggggcctcgcctagacccgagaagactgcgggcgcgcgcaagcggcggcgtggaagctgtgagcgcccccatcccggaggtctccgccggctcccgggtgaatcagctcccggccgactttaggattcttctggattttaaattttttctttttaaaaaaacttggacggataaaagatgtgccatggcaggatagcaccaaagagcacctcagtgtttgccgtggcctccgtgggacatggagtgttccttccgctagtgatcctttgcaccctgcttggagacggacttgcttccgtgtgccccctaccaccggagccagagaatggtggctacatctgccacccccggccctgcagagaccccctgacagcaggcagtgtcatcgaatacctgtgtgctgaaggctacatgttgaagggcgattacaaatacctgacgtgtaagaatggcgagtggaaaccagccatggagattagctgccgtctcaacgaggataaagacacccacacatcacttggggtccccacgctgtctatagtggcttctactgccagctccgtggcgctcattctcctcctcgtggtgctgtttgtgctgctgcagccaaagctgaagtctttccatcatagcaggcgtgaccagggggtatctggggaccaggtctccatcatggtggatggagtccaggttgcactaccatcatacgaggaggctgtatatggcagttctggtcactgtgtgccacctgctgaccccagagtacagattgtgctgtcagaagggtctgggcccagtgggaggagcgtgccaagggagcaacagctgccggaccaaggggcctgctcctctgcaggtggagaagatgaggccccaggccagtctggactatgtgaagcctggggctctcgggcctcagagactgtgatggtgcatcaggcaaccacctcttcctgggtggccggctcagggaaccgccaactggcacacaaagaaactgcagattcagagaacagtgacatacaaagccttttatccctcacgtcagaggagtacacagatgatattccactgttgaaagaagcatgagggcagcggccagcctttcctctctgcgaggttctctcagcccttcctccctctccctgtgggattgagcaccctgtactctccagccaccttacctggatacctgagctgccacctgtgtatctgtgtatctctgagggccctataggcccaccttgctggaaactcaaggaagattctcgccatctgcctgttggacagctggaggagctggctctttgcctggccccgccttcccatctgtcagagacatatttgaatgtgctggatcaaaccctcccttttcctaagcctctgggtcccctccagccagctctttggcggcagcccccaccagctcctgtgggcctgagtgctgctgtgtttacttgtgcctttcccccaccctgtccagtttccctgtcatgcagacttgttgctgtccacaagccttagtggctgcactgctgccccctgccacacagggggccgggcctgggtctgtcctgtttcctttgagggttgcccctactgccctttgcaggaacagatccaggtgtgagagctcttgagtcaagagtggcagaagtggctctaattggggtgagagtgtagtccctgggcttgccctgggttgaccctggtggcatatttccttggccgaggatggaagatttggagaatcatgtccatgctggcccaggacccagccatctggcccaaaggcacaagctcctggccctgttgagttgagagtttccaagaagcatccagaagatcccaagggagagaaggaaaatggctgataatgattgtcttcctaatatgcaagttctcacttcctacttccagcatcggccttcctggccttgtcttttttttgtttccctggagtataatgggaagttgcatgctgcctcctgggttttatcccagatagctctggctttcttgctgcccacaggggcctggggcaggaaggagacttgctgagatgccatggagtgcccatctggtcactggcagtctgggcaggttgcccctttctgggtttgtggtgacggaggggaggccgagaggcacagaccaagtccccgggtggctgcaggcagctccagcccggtcctgaggatcctcctcaccatggtcacgtgccttagtaactgtgcccaggaagtggcctgctgcttgctgtgctgctgcttttcctacttctgcccttccctgccacccctcgcatgtcacagctgacaagcaattccttgtcttccctggccccctgggggaagggctgagaaacagtccatgtgcaccccaaccttaatggcctgaggtgggcagaggggtgtggagcagcctggagtacagggccctgggggaggagcccactgatgaggggcgctctcccatagccatgtgttgaatgctaactaggctggggtggacgaactctgccaactgctgtcatcttagaagatagatgcagcagtaaggaatgtttgttttgcttttttctgaaattttctgaagcactgtggctgggaaacttcgaagcggaccctgtgctgcatgtctgctcctcccctgagcctgtctgcttgggggtggtaaaaataaaaatcccagtttattttcagtaccttacctaacagggttggctccaggcgtgggtggcctagaagatgaggggagtggtcttctcccagccttttaccctcttgcctcctgcctccgcgcttacacacgcactttaccacccggtcattccctggcctcttgctgccacttgtagtcttccttccttcctctcagggtaagggcagtgcctgctgtgcctgttggccactcccacacttcccctcccccaggagccctcatctgctgtgctgagtccaggaaagcatagttaggtagggagctggttggagaaggtgctagaactagaaggcagatgagactagcatgggcccacctggagggctgtccctaatggccccagtcgccttacctcacccacagcagtgcccttgtcttcctccaaaacagaaagcagtgacaaaagggggaggggtggtaatctgaagtctcactgctgagccttcagcttttatttttcactgtttcaaaacccgcattctattctagaatggtttttaaaatggaagatcttacctttttctatcttgttactctggggttttgtccccctaagagattgcactttttgtttggggtttattcagctgcatagatgaccagcttgatccctggtgaaatgaaaagccttccttctcctgaagcctctttccgccctgccctccactaacaacactgaggagcacaagcccaggcttgcccacctggtaggaaaggaagaaattagaacaatgggagccttggctcccctctcgtctcctcccctccttcttgtcactggctttgatgaggcccacttcccagaggctcctgggcctgtgagtgcaggagctcattctcccctcactgctgaagtctgtgacagcttcttcctccagttatgtctttcttccaaagcaatttcttaaccatcagccatgtgctgctatttctagggcttctgggctttgtcccttactgagagattagggactccacagctgccttgaggtagggcctggctgagagacaagggtagcagcaggtggcaggctgttaaaagacaggctgcctgaggagcctggagcaggtggaaacaggtggaagaaaccggccacagccctgctttaccgggctcacctctagggcattccagcaagaggctgatgcaggagaatggccagcaccaaaggacatttaaaagagtttttgggtttttttgtttgtttgttgttggtgtttgtttttttttttttttttttggcacacttgagctgactcagtgcaggtttaatatcctggtgacttgcagtcacattctaatgactttcaagggccagaatatggtgaaaatcacttaaaatatccgtcccttccatgccttagtttagcaggtaggctctatcttttgccatttctgtattttatgtgctgtgttcccgtttcactgggtatgaactgtgaaatggactgaatcctggccactttatgagtttgtttggttttataaggcatttcaatgtacattctataaatacaagcactccatttgcaaacagatcttaagctaatattttctttcccattcatcttgccctccccctcctcccaccagctttaaagttcagtggagaagccagatggcaattcagacaaaggtatactcttcctgcttcatgggtggtggcacgggaatagatagcccttagccctttccctcccagtcccagctgagccctcagaccacttgcttcccacataacaatgtcgcctccatttccgaggaacatccttgcgtagagaatgaaatatgctgcaatcatttctgcatccttactcctcacccccaaagaaaaaaaaaaggcctagcagggaagcagcatgcaggcttcacagcttaatgccaaggacagcgagtgaggctgggagcttctcttgggcctgctgggtctgtcagctctcggaatagggacagtccttactggtgccccaaggtgggacttggagaatattttgcttggcatatgtttggtctgaatggtgtagttgctggttccctagagaggaaaaggtggcaggcccagctttgctgggaaatggctcttaatttccagttgaaaccctagtagaattgtgaatgaaaacctcaaggttgagcccctctgccaagcagcagagctagtagaaggggatgcaggggcaaagcactcagttgccaagcaaggaggagagatgtacgtgggctgtgtggcagtccccacaccctgccctggcttcttcaggttatcgcaccactatggaatcctttgcagaatggtactcatataatggtttaaaacaacacattcataattgactctgtgcaggatgtcactcaatcagtttgggtttgctttattttattttatatatatattttttggtatcctgtacattgcagtgggtgtgaagatagtattttaatatttgtacaaagtttaatttaattttaattgttctatgtatataactgcatttctaaataattaaaaaaaagttcttatg

SEQ ID NO: 137687 - DNA, 750 bp, Homo sapiens
atggagagcatttgggccggactgtggacagcacaggatactacagtccttgctgatgactttgagttcattctgtggaccctgaagcgccggccagagcgagctagacaagggcacgcggggcctcgcctagacccgagaagactgcgggcgcgcgcaagcggcggcgtggaagctgtgagcgcccccatcccggaggtctccgccggctcccgggggcgcgggaccagcgcgcaccgcccaggagtgacgctggccggagcccgggccggcttcggcggctccccgcgcttctctgcgccggcccgctgtcacccggccgcgagccgcgccgctgggagccccgcgctggcgtggcgcggccagccggccagcagtggggttttttttggcctggaaaccagcagggtgcctccatttgctctctcatcctctggttcttacttgagtgtggaagtcgctccactggtggaccttgcagtggcactgagctgggtcacttcagccgtgaaaggccaactgtactactgtcaaggcttgggacagttaagcgtccgtgaaggttcctatctccaccaccctaaccagaccttgtcatccgctggccttccaggctgtttcaatctctcttgccaggttcaccctgctagaacacggttctcctctccgtcctttgatgatgatgatgacgacgatgaagatgatgataatgttgatgatgatggaggacactcagtagcagtggactga

SEQ ID NO: 137688 - DNA, 410 bp, Homo sapiens; identical to SEQ ID NO: 117130
  misc_feature (1)...(410): n = a,t,c or g

SEQ ID NO: 137689 - DNA, 478 bp, Homo sapiens
gctgactcctttctcggactcagcccacctgcacccaggtgaaataaacagccctgttgctcacacaaagcctgttggtggtctcttcacaaggatgcgtgtgacatttggtgccaaaacccaggacaggagtactccttcaggagaccagtcccctgtcttcgccctcactccgtgacctcaggtcctcagaccaaccagcccaaggaacatctcaccaatttcaaattgggtaagcagtcttttcactcttctcatgcctctcttgctacccttcaatcttcctctcttgctacccttcaatctccctgtccttccaattccaattctttttcctctctagtagagacaaggagacggccaggtgcggtcgcacgcctgcaatcccagctctcagggaggctaagaggcgggaggatagcttgagcccaggagttcgagacctgcctgggcaatatagcgagaccccgttctccag

SEQ ID NO: 137690 - DNA, 362 bp, Homo sapiens
actcagcccccctgcacccaggtgaaataaacagctttattgctcacacaaagcctgtttggtggtctcttcacacggactcacatgaaatttggtgccgtgactcggatcgggggacctcccttgggggatcaatcccctgtcctcctgctctttgctccgtgaaaaagatccacttacgatctcagggcctcagacccaccagcccaaggaacatctcaccaattttaaatcaggaccccactgaaaatcggactgttcaactgcacctggcagccactcccagagcccctggaactctggcccaaggcgctctgactgactccttcccagatcttctcagcttagcagctgaagactga

SEQ ID NO: 137691 - DNA, 464 bp, Homo sapiens; identical to SEQ ID NO: 135602

SEQ ID NO: 137692 - DNA, 1440 bp, Homo sapiens
atgctgtcagacaaatgtcagcatcagataatgcatatggatagcatgcatgacatgaccatcaccatcatgatcaccgtcaagcttcttattggagaaactgacagcatacgttttaaactagccattaaacctgcctgtgaccttgtcagcctccaccacgtttatctggatggatgcatggttcttggcaccggtgacgcggttactagcagagactttcttccgcatgtacaggtccacaagctcgccggtgtgcttttggatttcaagactgtgcctgctgccacgacactgcgtaattcttctattccttcagctcttcctgaaccgatgactgctagtgaagcagctgctaggaaaagccaaataaaagccagaataacagataccattggaccaacagaaacctcaattgcaccaagacaaagaccaaaggccaactctgctactactgccactcccagtgtgctgaccattcaaagttcagcaacacctgttaaagtccttgctcctggtgaattcggtaaccatagaccaaaagagtacagtgtctctcccggcggctttcatgggctggccgttgagtatcagcagctttttcaggcgcatgttgcaagctgtaggattgaacagttgcatttgaatgtaggcagccgccacagcagcatagagtactccagcaactacagcagggagattggagattacagcaactccatttacagcatcgtcatcctcaccagcagcagcagcagcagcagcagcaacagcaacagcagcagcagcaacagcaacagcagcagcagcagcagcagcagcagcaccaccaccaccaccaccaccacttacttcaagatgcttatatgcagcaggtcagttgctgataaagaggccattgcaaatttcacaaatcagaagaacatcagcaatccacctgatatgtcagggtggaatccttttggagaggataatttctctaagttaacagaagaggaactattggacagagaatttgaccttctaagatcaaactcagcccacctgcacccaggtgaaataaacagccatgttgctcacacaaagcctgtttggtggtctcttcacacagatgtgcatgaaatttggtgccgtgactcggatcgggggacctcccttgggagatcaatcccctgtcctcctgttctttgctccatgagaaagatccacctacaacctcaggtcctcagactgaccggcccaaggaacatctcatcaattttaaatcaggagcttgctacacgtgccggaaatctggccactaggccaaggaatgcctgcagcctgggattcctattaagccgcatctcatctgtgtgggaccccactgaaaatcggactgttcaactcacctggcagccactcccagagcccctggaactctggcccaaggctctctga

SEQ ID NO: 137693 - DNA, 747 bp, Homo sapiens
atgaaaaagaatcaaccaaaaaatgccgaacatccaaaaggccagagtgccccttctcctccagatgattgcaatgcctctccagcaagggtgcagaactggacagaatatgagatgaacaaattaaaagaagtaggcttcagaagatgggtaataaaaaactctgctgagctaaaggagcatgttaaaatccaacacaaagaagctaagaactccaataaaaggcttgcattcttggaaggtaaagggataagaagctgtgaagaaagagaggagctcaagaaagagtttgcattggcaagcaagattgcaaggttacgagaaattcatggccttgcaatgttggaaaagccaaccaatcaactaatttcatactccaaacggagtgagaaggtgcctccctactacagggcagagtgtggtgaaacctctccctgggctttccctagtactaggctggctggagagtcaggggtgccttatgactgctccacatgccctccttctttcccagcccgcctgcacccaggtgaaataaacagccatgttgcttacacaaagcctgtttggtggtctcctcacacggacacgcatgaaatttggtgccttgactcggatcgggggacctcccttgggagatcaatcccctgtcctcctgttctttgctccatgagaaagatccacatacgccgtcgagaaagatccacatacgacctcagggaaaccatgaaagtcagaaaggactga

SEQ ID NO: 137694 - DNA, 1723 bp, Homo sapiens
  misc_feature (1)...(1723): n = a,t,c or g
cctggtgactaggatgtcgtcggaggagaacaagtgcgtggagcagccgcagccaccaccccccgaggagcctggagccccggccccgagccccccagccgcagacaaaagacctcggggccggcctcgcaaggcgcttcccctttccagagagccagaaagaaactcagcccacctgcacccaggtgaaataaacagctttattgctcacacgaagcctgtttggtggtctcttcacacggatgcgcatgaaatttggtgccgtgacttggatcgggggacctcccttaggagatcaatcccctgtcctcctgctctttgctccgtgagaaagatccacctacgacctcaggtcctcagaccaacccagcccaaggaacatcttgccaatttcaaatcggaagataggagtgtcaggcctctgagtccaagctaagccatcaaatcccctgtgacctgcacgtgtacatccagatgacctgaagcaactgaagatccacaaaagaagtgaaagtagccttaactgatgacattccaccattgtgatttgttcctgccccacgctaactgataccatatattcttcccccgcccttgagaatgtactttgtacacctatcccaaaacctgtaagaactaatgataatcctaccaccctttgctgactttttttttggactcagcccgcctgcaccccaggtgaaataaacagctttattgctcacacaaagcctgtttggtggtctcttcacacggacgcacatgaaatttggtgctgtgactcagatcgggggacctcccttgggagaatcaatcccctgtactcctgtgttctttgctccgtgagaaagatccacctacgacctcaggtcctcagaccgaccagcccaaggaacatctcaccaatttcaaatcgggtaagtggtcttttcactcttctccagcctttnttgctacccttcaatcttcctctctcactacccttcaatctccctgtccttccaattcccgttctttttcctctctagtagagacgaaggagacacattttatctgtgggacccaaaactccagcaccggtcacagactcaggaagacagtcttcccttggtgtttaattattgcagggatgcctctctgattattcacccacactccattggtgtctgatcaccacggggatgcctgccttggtccttcacccttagcggcaagtcccgcttttctgggaaaggggcaaaccatcacggacgccgagcttcgggtaactctcacagtggaggactcagcccgcctgcacccaggtgaaataaacagccatgttgctcacacaaagcctgtttggtggtctcttcacacggatgcacgtgaaaccacacacctgcaacgaactcattttcaacaaaggaactatagggttggggccacaacggacagccctgattatgacaatgtccaagaactctgggattacagctgcaacagagtccctaaaactttagagctacccatgtgcaacatcagcgtggaaaagctacaggaatatgactccaactctagaactgctgcatgggctgactatagcaaagccataggcatggggctatccaaggtcatgggatcccaacccctgccccagtgtgtccaggacgcaggacatggagtcaagaaaaattattctggagacttaagttttgatattgtttaccctcttgtgttttag

SEQ ID NO: 137695 - DNA, 1260 bp, Homo sapiens
atggggaagaaagtccttggcattgcatctcagctgttgggagctgtgcggtgcgagccagatgggcggcgtgtgctccccgaggactggcctgagtgccttagcctagttactcacgggacttggtttaccagacaaggggataaaaacattcagatggcagataacagtttttcagatggggttccttcagatttcgtggaagctgctaaaaatgcaagtaagacggaaaagctcacggatcaggtgatgcagaatcctggagttttggcagctttacaggagcgacttgacaatgcccctcacaccccttccagctacatcgaaactttacctaaagcagtaaaaagaagaattaatgcattgaaacaaattcaggtgagatgcgctcatatagaagccaagttctatgaagaagttcatgacttggaaagaaaatatgcagcattataccagcctctctttgacgagagaagagaatttatcaccggtgatgttgaaccaacatctgatatggaatcagaatggcaccgtgaaaatgaagaggaggagaaattggctggagacaggaaaaataaagtagtcataacagaaaaagcagcagcaacagctgaagagccaaatcccaaaggaattccagagttctggtttaccatctttagaaatgtagatatgctaagtgaattagtccaggaatatgatgaaccaatcttgaaatacctgcaggatattaaattccactttcaacccaatgactgctttgccaactcagtcctgacaaaaacctgcaagatgaaatcagaaccagataaggctgatcccttttcatttgcaggtcctgagatcatggactgcgatgggtgtactattgactggaagaaaggaaagaatgttactgtcaaaaccatcaagaaaaagcagaagcgtaagggtccaggcactgttagaacaattaccaaacaagtatccaatgagtcatttttcaacttcttcaatccactgaaagcatctggggacggagaatcactggataaagattctgaattccctctgattttgaaattggacactttttccgtgagcggaccacaggctgtgctgtacttcgctggggaggccttaaaggatgatgacaattttgacgaaggtgaagaagaagaggacgaattagaaggtgatgaggagggagaagatgaggatgaggtggaaattaatcccaacaaggaacccagccagccggcggaatgcaagcagcagtag

SEQ ID NO: 137696 - DNA, 1647 bp, Homo sapiens
ggcacgagcttgctcgcggagagaggagctaggagcctcggccaatgggagccggcgttgttggaggccacggcggcgcagccccaaagcgagcgaagctagggtcgccgccactgccgcaggaggcgtgaggggataaaaacattcagatggcagatcacagtttttcagatggggttccttcagattccgtggaagctgctaaaaatgcaagtaacacagaaaagctcacagatcaggtgatgcagaatcctcgagttctggcagctttacaggagcgacttgacaatgtccctcacaccccttccagctacatcgaaactttacctaaagcagtaaaaagaagaattaatgcattgaaacaacttcaggtgagatgtgctcacatagaagccaagttctatgaagaggtacatgacttggaaagaaagtatgcagcgctataccagcctctctttgacaagagaagagaatttatcaccggcgatgttgaaccaacagatgcggaatcggaatggcacagtgaaaatgaagaggaagagaaattggctggagacatgaaaagtaaagtagtcgtcacagaaaaagcagcggcaacggctgaagagccagatcccaaaggaattccagagttctggtttaccatcttcagaaatgtggacatgctgagtgaattagtccaggaatatgatgaaccaatcttgaaacacctgcaggatattaaagtgaaattttctgaccctggacagcctatgtcttttgtgttagagttccactttgaacccaacgactactttaccaactcagtcctgacaaaaacctacaagatgaaatcagaaccagataaggctgatcccttttcctttgaaggtcctgagattgtggactgtgacgggtgtactattgactggaagaaaggaaagaatgttactgtcaaaaccatcaagaaaaagcagaagcataagggtcgaggcactgttagaacaattacgaaacaagtacccaatgagtcctttttcaacttcttcaatccattgaaagcatccggggatggagaatcactggatgaagattctgaattcacattagcctctgattttgaaattggacactttttccgtgagcggatagtcccgcgggctgtgctgtacttcactggggaggccatagaagatgatgacaattttgaagaaggtgaagaaggagaagaggaggaattagaaggtgacgaggagggagaagacgaggatgatgcggaaattaaccccaaggtgtaatttttgtctgttaatcattcatacgtttctagaaggaacccagccagccggcggaatgcaagcagcagtaggaagcggaggcgggtgcctggcagaccggctgtcgggactccaggcctgtgggcggggcctcggtccttgccgcagcacaatcccgtggacagagcttactccatctaactcgttttcaagtgcatgattttcactttcacttttcctttttccttattattttgattaacttgtacagtggcaactgaaatgcatttcagaaataggaggtttcgtccagcaccctctgcagccttggtgcctgtagctctggacttccctgggcctttccctgtgggagggccctgtagaccacatc

SEQ ID NO: 137697 - DNA, 762 bp, Homo sapiens
cgcgtgaggcaccgctctgtaagtgtcgggtccacccacgcgtccgcccacgcgtacggggagggctcactgagaatcatcccggtaacccgatcaccgctggtcaccatgaaccacattgtgcaaaccttctctcctgtcaacagcggccagccgtcccaactacgagatgctcaaggaggagcaggaagtggctatgctgggggcgccccacaaccctgctcccccgacgtccacctgtgatccactatccgcagcgagacctccgttgcctgaccatgtcgtcctggtccctgttcaacaccgctcttcatgaacacctgctgcctgggcttcatagcattcgcctactccagtgaagtctagggacaggaagatggttggcgacgtgaccggggcccaggcctatgcctccaccgccaagtgcctgaacatctgggccctgattttgggcatcttcatgaccatttttgctcatcatcatcccagtgttggtcgtccaggcccagcgatagatcaggaggcatcatttgaggccagggagctctgccccgttgaacctgtaatcccaccgtactctatctttcattcctcgccctgcccccagaggccaggagctctgcccttgacctgtattccacttactccaccttccattcctcgccctgtccccacagccgagtcctgcatcagccctttatcctcacacgcttttctacaatggcattcaataaagtgtatatgtttctggtgcaaaaaaaa

SEQ ID NO: 137698 - DNA, 859 bp, Homo sapiens
tgctcccttgggctctagagaggaggcccctcttagccctcagcccctccttcctctctatcttaaagtaatttgatcctcaggaatttgttccgccctcatctggcccggccaaatcccgatttgacaaatgccaggaaaaggaaactgttgagaaaccgaaactactggggaaagggagggctcactgagtaaccatcccagtaacccgaccgccgctggtcttcgctcggacaccatgaaatcacactgtccaaaccattcttctctcctgtcaacagtggccagcccccccaacgtatgagatgcatcaaggaggagcacgaggtggctgtagctgggggcgccccacaaccctgctcccccgacgtccacccgtgatccacatccgcagcgagacctccgtgccccgaccatgtcgtctggtcccgtgttcaaacaccctcttcaatgaacccctgcatgccgtgggcttcatagcaattcgccttactccgtgaagtcttagggacaggaagatggttggcgacgtgacacggggcccaggccctatgcctccacccgccaagtgcctgaacgatctgggcccatgattctggggcatccgtcatgaccattctgctcatcgtcatccccagtggctgatcttgccagggcctattggatagatctaggaggcatcactggaggccaggagctttggccatgaccttgtatcccacgtactccaactttccattcctcggcctgccccccggagcccgaagtcctgtattcaggccctttatcctcacacgcttttctacaatggcattcaataaaagtgcacgtgtttctggtgaaaaaaaaaaaaaaaaaa

SEQ ID NO: 137699 - DNA, 1499 bp, Homo sapiens
caaggtgcaacttccttcggtcgtcccgaatccgggttcatccgacaccagccgcctccaccatgccgccgaagttcgaccccaacgagatcaaagtcgtataccttgaggtgcaccggaggtgaagtcggtgccacttctgccctggcccccaagatcggccccctgggtctgtctccaaaaaaggttggtgatgacattgccaaggcaatgggtgactggaagggcctgaggattacagtgaaactaaccattcagaacagacaggcccagattgaggtggtgccttctgcctctgccatgatcatcaaagccctcaaggaaccaccaagagacagaaagaaacagaaaaacattaaacacagtgggaatatcacttttgatgaaaatggtaacatttgctcgacagatatgcggcccgatccttatccagagaactctctggaaccactaaagagatcctggggactgcccagtctgtgggctgtaatgttgatggccgccaccctcatgacatcatagatgacatcaacagtgagaatgacaaacagccacgaaagagtaagatgagaacttcattcagtccccagattccagggcatgaacactttcactaccttctgcttcttcagcacgttcactgccagttagctttgacattaagagcgaggaaggaaggaagttccacccatcaccagaagctctccacttattacttcaaggaaggaaattccaaggaaccaaagaagatacagagatgcaggaacactgagctcaggaaggaagagggtggaggtgggtctgggaaagccccagggtctgagataaagctggagtccccggcgtgcagtggagcctcgctgggggaaatgacagcttggaccatgggcgcccgcggtctggacaagcgaggaagtttctttaagggccctttgcctaacacatgcggtcacttttgggagatggtgtgggagcagaaaagcaggggtgtcgtcatgctcaacagagtgatggagaaaggttcggttgttgagtttgtgactgagctgtttttctatgttgcgctccctaagatgttcccagtccattatattgttatcttgttagcatcaaagttggaagaagtcaccttcaacttcccaccaccccccgacctttgcaccccctttctccagaattacctccgagttgcatttcaggaggtcaacagtggttgcacaggaaagaccctccttgtgagaccttacatcaccactgaggatgtgtgtcagatctgcgttgagaagttcaaggtgggggaccctgaggagtacagcctctttctcttcgttgacgagacatggcagcagctggcagaggacacttaccctcaaaaaatcaaggcggagctgcacagccgaccacagccccacatcttccactttgtctacaaacgcatcaagaacgatccttatggcatcattttccagaacggggaagaagacctcaccacctcctag

SEQ ID NO: 137700 - DNA, 1094 bp, Homo sapiens
  misc_feature (1)...(1094): n = a,t,c or g
tttcgtgctcggaggaggccaaggtgcaacttccttcggtcgtcccgaatccgggttcatccgacaccagctctcctccaccatgccgccgaagttcgaccccaacgagatcaaagtcggtgcgtgctctggttgtggccggggctgcgggatggagcatccctcggccctgccgcgcgtgcaaagctttccccgtatggggctcttaaagccgctgcctcccagagaccttcccggtgttgcgccgccccggccaagcctcagcctttctgggccttagcttcttcacgtgtaggtggggagggaggactggaccacctgtggcggcttgggagcccgcacgccctaggtataccttgaggttgcaccggtagtagaggtacggtgccactttctgcccttggcccccaaagaatcggcccccctgggtcctgtctccaaataaaaagttgggtgaatgacatttgccaaaggcaaccgggtgaactggaaagggccctgaggatttacagtgaaactgacccattcaagaacaggacaggccccagattgcacgcgggtgccttcttgccttcttgcccttgattcattcaaagcccttcaagggaaccacccaagagaccagaaaagaaaccagaaaaaacatttaaacaccagttgggaatattcacttttttgaatgagatttgttcaacattgcttcgacagatgcgggcaccgatcccttagcccagagaaactctcttggaaccccacttaaagagattcctggggaattgcccagttcagtggggctgtaaatgttgatgggccgccattcctcatgacattcatcgatgacattcaacagtgggtgctgtggaaatgcccacgccagttaagcacaaaggaaaacattttcaataaagggatcatttgacaactaaataaaatttttaaatataatnnnnnnnnnntaaaataaaaaattatattttaagggggggccctttttaataattccctgggggggccccaatctcccgcggaggggaaaaannnnnnnnnnctcttatggggggctataaataccctcttttggtttttggaaaaaa

SEQ ID NO: 137701 - DNA, 645 bp, Homo sapiens
atgggggctgacatcccccttgctgttctcatgacaggcatctctgcaggaaatgcagcagccccagtcacgggcttacagacacctcatatggaagagctccagctggcatcaggccagcgcccctctgggatgaagcttctggaggaaggagcagacaacaatctttgctgttttgcagcctccactggtgatacccaggtcagtatcatcctgataccaaaacctggcagaggcacatcaaaaaaagatatcttcagaccaatatccctgatgaacattgatgagaacatcctcagtaaaatactggcaaaccaaatccagcagcacatcaaaaagcttatctgccacgatcaagtcagcttcatccttgaaccatgcaaggctggttcaacatataaaatcaataaacataattcatcacataaacagaaccaatggaaaaaaacacatgatatctcaatggatgcagaaaaggcctttgataaaattcaacatcccttcatgttaaaaactctcaataaactaggtattgatggaacatatctcaaaataataagagctatttatgacaaacccatagccaatattatactgaatgggcaaaagctggaagcattcactttgaaaaccagcacaagataa

SEQ ID NO: 137702 - DNA, 2440 bp, Homo sapiens
  misc_feature (1)...(2440): n = a,t,c or g
atggcagaaggcacctcttttcacatggtagcaggagagagaatgagtgccaagcaaagggggaaagcatcttataaaaccaaaagatctcaagagaactcactactacaagaacaacatgggggaaaccacccccatgattcaattatctccacctggtcccacccttcacatgaggagattgttacaattcaagatgcagaaaagacctttgataacattcaagagcctttcatgttaaaaactcccaataaactaggtattgatgaaacatatctcaaaataataagagttatttatgacaaatccatagccaacatcatactgaatgggcaaaagctggaagcattacctttgaaaactgtgtttctgaagataacaacagctcaaagtaatgacttctgcagaaatggaaatttcagtcaccagatcaggctttatggcaaaagaaggcaccaagccaccccagtggatgtgaagtggtatctcattgtggttatgatttgcatttccaatgatgactctttagtgtgcagagaaatcatttttcttgagcgtttattactgaagcccacttcgccccgcgcatttgcccgcccctctcgtcctcgctactcgggcggcttcggcagccgattcacttgccctcgggcggcagcggtcccactagctcagtgtctgcccaaacagctgcccagttttctgcttgaaacccagggccctggtggtgtaggcacacaaggaaatctcctgatctgcagattgcaaaaaccgtgggaaaagcatagtaaccggccagattatgtcgaggtatcagtacgtgcggccagctcgatccggcgtttctggcccgcttcaaggaacgggttcggctacaggggagggaccccnccgtagagactaagagaattcagcctcagcccccagatgaagatggggatcacagtgacaaagaagatgaacagcctcaagtggtggttttaaaaaagggagacctgtcagttgaagaagtcatgaaaattaaagcagaaataaaggctgccaaagcagatgaagaaccaactccagccgatggaagaatcatatattcgaaaaccagttcaagcatccctcagatgaaaaatattcaggtttaacagctagctcaaaaaagaagaagccaaatgaagatgaagtatatcaggactcggtcaaaaagaactcacaaaaactaattataaatagtagcctgctttcttttgacaacgaagatgaaaatgacacagaaaaatccatggagaatttgacagggaaaataaggaagttacaactgaggattgttgaccccacttttctgcctaagttgtcaaataaagggaaagacccagttgctgtagcccgactggaaacaggaaaaggaaacaagggagccttcagggtcctgagagacatttctagatgggccactctctgcacaagccctcagcacagttcctcagaagcaaagaacattataccttaccaagccacacaattccagaatgaagttcacaaatggtacaaaaagaagggagggctgaagatctccaagcgaaaggctttatttttcctaactcaagatattcagaagaaactccaaaaactagcactaggccccaacacccctacacctgacatccttaaaatagcttccttggtcttttacaaccaggaccaggaggaaaaggaaagggctcagcaaaatgagaggcaaaaggaaaagctctactggttgtcctacaagtctgccagccctttccaggttgcactcagaatactctcccaggaaaccacacacaaggatgagctgcccacagaccttcccaataatccagaggtccaggccccaggaataccaggaaacaccataatggcaatgcctgtagcaattcagcttaaagatccttctagctatccttgtagaatcattaaagtaccagagattgccagctggatacatcgtacccaagtgaagctgtggaaaagccctgaaacatcagaactggaaccaacaccctcagttatagaatatactcgagaggcactggaagatctgaaattcctctttaagcaaaaagataactcttccgctaaaacaccaggaagagcttatgcagcctcgcccagagactggacaagcatagaggcagaattacatattttctatcagtgggaccctaatctgaaagggatgttcaagcctgcaagccttcttgcaaaagtaaagcaagatttccctgatatccacaaggaatctcccattttcagagccatcttttctaatatcactttaatgggaatagcccctatctgtgttacaggtaaaacaatcaagaaacgtacaaggcaacatcacacaactcccaaatccaatttacgggaacaagcctctcagggttcgttaaattgggaaggaaactag

SEQ ID NO: 137703 - DNA, 3164 bp, Homo sapiens
  misc_feature (1)...(3164): n = a,t,c or g
atggagggggacgcacgaaccgaacaaccagatgatccagtaaatagtaaatacagtaacacatactgtatatcaagctctgttcaaagtgcttcacatatgagtaacccgtttaataaacttcacatgaatctcaattcaaaggttaagattctgtgtcaccagttgctggtccaggtttgtgacctgctcaggctaaaggactgccacctctttggactcagtgttatacaaatcagactatatgacttggaaatatcgggtcagtttcttctatattctttcatgtcgtctcctgaaaaaaaatgtacagataatgaacatgtgtatatggagttgtcaaaaaagctttacaaatattgtccaaaagaatggaagaaagaggccagcaaggtacgacaatacgaagtcacttgggttgtttccaagagggggaaggactacatcctgaagcacattccaaacatgcacaaagatcagtttgcactaacagcttccgaagctcatcttaaatatatcaaagaggctgtccgactggatgacgtcgctgttcattactacagattgtataaggataaaagggaaattgaagcatcgctgactcttggattgaccatgaggggaatacagatttttcagaatttagatgaagagaaacaattactttatgatttcccctggacaaatgttggaaaattggtgtttgtgggtaagaaatttgagattttgccagatggcttgccttctgcccggaagctcatatactacacggggtgccccatgcgctccagacacctcctgcaacttctgagcaacagccaccgcctctatatgaatctgcagcctgtcctgcgccatatccggaagctggaggaaaacgaagagaagaagcagtaccgggaatcttacatcagtgacaacctggacctcgacatggaccagctggaaaaacggtcgcgggccagcgggagcagtgcgggcagcatgaaacacaagcgcctgtcccgtcattccaccgccagccacagcagttcccacacctcgggcattgaggcagacaccaagccccgggacacggggccagaagacagctactccagcagtgccatccaccgcaagctgaaaacctgcagctcaatgaccagtcatggcagctcccacacctcaggggtggagagtggcggcaaagaccggctggaagaggacttacaggacgatgaaatagagatgttggttgatgacccccgggatctggagcagatgaatgaagagtctctggaagtcagcccagacatgtgcatctacatcacagaggacatgctcatgtcgcggaagctgaatggacactctgggttgattgtgaaagaaattgggtcttccacctcgagctcttcagaaacagttgttaagcttcgtggccagagtactgattctcttccacagactatatgtcggaaaccaaagacctccactgatcgacacagcttgagcctcgatgacatcagactttaccagaaagacttcctgcgcattgcaggtctgtgtcaggacactgctcagagttacacctttggatgtggccatgaactggatgaggaaggcctctattgcaacagttgcttggcccagcagtgcatcaacatccaagatgcttttccagtcaaaagaaccagcaaatacttttctctggatctcactcatgatgaagttccagagtttgttgtgtaaagtccgtctgtgtgcagctgtacaggcagcttactgtttgctagaggatgcgaaagtcataagttctttacatattacttgtgccatatcttcttcaccctaaacatagctctttctttataatatttgtgatgatggaaacaaaagccttggaacaattgcactttaagtattacacagaagtaaaagaactacagaaaatgtacagcaagacaagtgcccggaagttcactgatccttcagaaggaaatgcgctttactgattgcaaagccttcagaatattggagtgtggtgtgtttgctcatctgatgctttttagttcagttacatgtaacatcacatttttttatcacgtgaaagatgttagatttgtttgcttataaattttttaccactcccacataaaatgctcatagtttgggagaggaaagagggaagattctctcttcttttaacagagagatgattgctctgtatacccattgcttcctccctgaggctgtccccaaagtgaaccacttgnatggagtggtcaaaatcataaggttgtagcaagccaaagatacgtaattgtgacagaaagcacataagcaataagcagaaaaccacgaagtgcatgctgtgatgcctgtgactccttacatcccgctcagtgccatgtcctcttttgtgatcttccagaaagctccagggattcatttgagttccacatccaagtaacagatgaattatattcatgttgtaatgcattttgtgggagtttaccaaaaccagtgtctgttaaaactttgggaaaatgtctttagaaaaacggttggtgcttgggtgattgcctttatttgtttaattatcaagaacaaattatggcaatgctagtttctgcttaaccaaaatactctgtgtatatattatacatatataaatacatgggattgtgtatgtctatatgtgtttaaagcttactatgtcttcattttggcttccatgactatcttttatacatggaattccttaagattgagaatatgtcactgagtgaatgatacctgcagacagtcagttgatatatgtagagttcagaatgactggttttctcatgtgcctttggccatggattcctcaacactggattgtataacagaattttggggggggagcttttaaaaaataatgactgagtctcccaccagaccgattacatcattctcttgtggcgggaccccaggtagaattgccttttcttttaaagttctccagatggagctaatatgcaacaaagttgaaaaccactgatcctgggggtgtcttgttaattttgaagtaaaagtgtacagaagacgtagtggtatgagaaagggccatttttaagacagttacctgttgtgctgctgttacaatatataatgaaaccaagtcaggggagtgaatttatcaa

SEQ ID NO: 137704 - DNA, 454 bp, Homo sapiens
  misc_feature (1)...(454): n = a,t,c or g
cttaagatgcgtgcaattaagggctttggcgggattggctccncgtttgggctggtccgctgctccccacctaccagggtcggatccggagcccttccccgcgggcganccatccaaacaaccgactcctttccaggtgaagggtgacttggctgaagaaacacttaaattctggaaatagcgactcagtatcatggccagcagccttaatgaagatccagaaggaagcagaatcacttatgtgaaaggagacctttttgcatgcccgaaaacaagactctttagcccactgtatcagtgaggattgtcgcatgggcgctgggatagctgtcctctttaagaagaaatttggaggggtgcaagaacttttaaatcaacattacaaagaaaaggggcttcgcacaagccaactttatgganaacttacagaagaagttntagagggcaatggaag

SEQ ID NO: 137705 - DNA, 819 bp, Homo sapiens
cccacgcgtccggatccagaaggaagcagaatcacttatgtgaaaggagacctttttgcatgcccgaaaacagactctttagcccactgtatcagtgaggattgtcgcatgggcgctgggatagctgtcctctttaagaagaaatttggaggggtgcaagaacttttaaatcaacaaaagaaatctggagaagtggctgttctgaagagagatgggcgatatatatattacttggattggatgtggtcttgatcgtctgcaatgggaaaatgtatctgcgatgatcgaggaggtatttgaggcaacagacatcaaaattactgtgtacacactctgaaccagtgaacattttggatgtttccgtgttctcctgtgtcatctctactgggccataggaccgggcaaacctaccttaaaataggcagaggaaagtttcatgagaagtagtgtgtttaacaagacagactttggttgctgtattcaagtatttggattatgactgtggaggagggcttgcttaagatatgtggttgtgtttttttgtggaaaagtaaggagttaggtggcttgataataggcagggaaaccagattgtcgggactatgacctttttctccagtatgctacctgatttgtttggctggccactaggtggcagcattggttctacttctctgctttttaagagaaatttcaggaaggatgatcattccagttagtttggcattttttgtcgtttgtgcacataacttggtgttatccttatgtcatcagattcctcctaggggagagtatggaaaaataaaaatttggggagtt

SEQ ID NO: 137706 - DNA, 588 bp, Homo sapiens
aaatgagcagtggataagattagtaatatgaacagcaagttgtgcagcctccggaaagaatgcgcaagggtatcaatcttctaagagtgaggttccaggcaccgaatggacggtcagcgagacccgccaatcggggcgctggggccggctctgggccgctggatattggctcctcacactcaccgtgcctcgctcccccggttcgctgcccgcgctgttagatgcgtgcaattaagggctttggcgggattggctccgcgtttgggctggtccgctgctccccacctaccagggtcggatccggagcccttccccgcggggcggggacctccaaacaaccgactcctttccaggtgaagggtgacttgggtacgtgattatttgtttttatgctttgagtggatatagcttaaaagagaggagcagtttcctagatactttcgttaccatcaatggagatattttgtctttttcaggattggatgtggtcttgatcgtctgcaatgggaaaatgtatctgcgatgatcgaggaggtatttgaggcaacagacatcaaaattactgtgtacacactctgaacgtgattg

SEQ ID NO: 137707 - DNA, 1254 bp, Homo sapiens
taccgggcgggggcggccatcttagatgcgtgcaattaagggctttggcgggattggctccgcgtttgggctggtccgctgctccccacctaccagggtcggatccggagcccttccccgcggggcggggacctccaaaccaaccaactcctttccaggtgaagggtgacttggctgaagaaacacttaaattctggaaatagcgactcagtatgcatggccagcagccttaatgaagatccagaaggaagcagaatcacttatgtgaaagggagccctttttgaaggcccgaaaacagactttttagccccctgtatcagtgaggattgtcgcatgggcgctgggataacctgtcctctttaagaagaaattttggaggggtgcaagaacttttaaatcaacaaaagaaatcttggagaagttggctgttctgaagagaagatgggggcgattatatatatttacttggattaccaaaagaaaaagggctttcgcacaaagcccactttatgaaaacttaacagaagagtttagagggcaattgaagtctcatttgtctgaagaatggagtcactgacctctccatgcccaggattggatgtggtcttgatcgtctgcaatgggaaaatgtatctgcgatgatcgaggaggtatttgaggcaacagacatcaaaattactgtgtaccccactctgaacccagtgaaccatttgggatgtttccgtgttccccctgtgtccatctctactgggccataggaccgggcaaacctaccttaaaataggcagaggaaagtttcatgagaagtagtgtgtttaaccaagacagactttggttgctgtattcaagtatttggattatgactgtggaggagggcttgcttaagataatgtggttgtgtatttttgtggaaaagtaaaggagttaggtggcttgataataggcagggaaaccagattgtcggggactatgacctttttctccagtatgctacctgatttgtttggctggccactagggggcagcattggttctacttctctgctttttaagagaaatttcaggaaggatgatcattccagttagtttggcattttttgtcgtttgtgcacataacttggtgttatccttatgtcatcagattcctcctaggggagagtttttgttttaattacaaaattaaattctacattgttaccaagaaatttgtggtgataaaaatggaaaaataaaaatttggggagttagtgaaa

SEQ ID NO: 137708 - DNA, 2241 bp, Homo sapiens; identical to SEQ ID NO: 125978

SEQ ID NO: 137709 - DNA, 2727 bp, Homo sapiens
gcgaccgccgcgggaactggtctgaagagacgcggggaccaagtggcaacgacttggacatctgagctgtcactgccgaaaacaggccgcaagagagataatcaatatgcatttccaagccttttggctatgtttgggtcttctgttcatctcaattaatgcagaatttatggatgatgatgttgagacggaagactttgaagaaaattcagaagaaattgatgttaatgaaagtgaactttcctcagagattatatataagacacctcaacctataggagaagtatattttgcagaaacttttgatagtggaaggttggctggatgggtcttatcaaaagcaaaagaaagttgacatggatgaggaaatttcaatatacgatggaagatgggaaattgaagagttgaaagaaaaccaggtacctggtgacagaggactggtattaaaatctagagcaaagcatcatgcaatatctgctgtattagcaaaaccattcatttttgctgataaacccttgatagttcaatatgaagtaaattttcaagatggtattgattgtggaggtgcatacattaaactcctagcagacactgatgatttgattctggaaaacttttatgataaaacatcctatatcattatgtttggaccagataaatgtggagaagattataaacttcattttatcttcagacataaacatcccaaaactggagttttcgaagagaaacatgccaaacctccagatgtagaccttaaaaagttctttacagacaggaagactcatctttatacccttgtgatgaatccagatgacacatttgaggtgttagttgatcaaacagttgtaaacaaaggaagcctcctagaggatgtggttcctcctatcaaacctcccaaagaaattgaagatcccaatgataaaaaacctgaggaatgggatgaaagagcaaaaattcctgatccttctgccgtcaaaccagaagactgggatgaaagtgaacctgcccaaatagaagattcaagtgttgttaaacctgctggctggcttgatgatgaaccaaaatttatccctgatcctaatgctgaaaaacctgatgactggaatgaagacacggatggagaatgggaggcaacctcagattcttaatccagcatgtcggattgggtgtggtgagtggaaacctcccatgatagataacccaaaatacaaaggagtatggatacccccactggtcgataatcctaactatcagggaatctggagtcctcgaaaaattcctaatccagattatttcgaagatgatcattcccattcttctgacttctttcagtgctcttggtttagagctttggtctatgacctctgatatctactttgataattttattatctgttcggaaaaggaagtagcagatcactgggctgcagatggttggagatggaaaataatgatagcaaatgctaataagcctggtgtattaaaacagttaatggcagctgctgaagggcacccatggctttggttgatttatcttgtgacagcaggagtgccaatagcattaattacttcattttgttggccaacgaaagttaaagacagcacatagcgatctagagtatatcatacccgacatatgtatcccacaaacgaaaggagtactagagcaagaagaaaaggtagagaaagcagccctggaaaaaccaatggacctggaagaggaaaaaaagcaaaaatgatggtgagatgcttgaaaaagaagaggaaagtgaacctgaggaaaagagtgaagaagaaattgaaatcatagaagggcaagaagaaagtaatcaatcaaataagtctgggtcagaggatgagatgaaagaagcagatgagagcacaggatctggagatggcccgataaagtcattacgcaaaagaagagtacggaaggactaatctagattgaaatatttttaattcccgagagggatgtttggcattgtaaaaaatcagcatgccagacctgaaccttaaatcggtctgcacacccggtttctaatatctagcaaccattatattctttcagacatttattttagtccttcatttcagaggaaaaagaagcaactttgaagttacctcatctttgaatttagaataaaagtggcacattacatatcggatctaagagattaataccattagaagttacacagttttaggttgtttggagatagttttggtttgtacagaacaaaataatatgtagcagcttcattgctattggaaaaatcagttattggaattcccaccttaaatggctataccaacaatataactggtagttctataataaaaatgagcatatgttctgttgtgaagagctaaatgcaataaagtttctgtatggttgtttgattctatcaacaattgaaagtgttgtatatgacccacatttacctagtttgtgtcaaattatagttacagtgagttgtttgcttaaattatagattcctttaaggacatgccttgttcataaaatcactggattatattgcagcatattttacatttgaatacaaggataatgggttttatcaaaacaaaatgatgtacagattttttttcaagtttttatagttgctttatgccagagtggtttaccccattcacaaaattttttatgcatacattgctattgaaaataaaatttaaatattttttcatcctgaaaaaaaa

SEQ ID NO: 137710 - DNA, 398 bp, Homo sapiens
  misc_feature (1)...(398): n = a,t,c or g
atttgtgctttttctcatcaataacaacatctgattggctcaccaccaacgtgtctactaagaataaaaattaggttgataggttgagaggccgggcgtggnnnnnnnnnnnnnnnnnnnnnnnnnnnnnnnnnnnnnnnnnnnnnnnnnnnnnnnnnnnnnnnnnnnnnnnnnnnnnnnnnnnnnnnnnnnnnnnnnnnnnnnnnnnnnnnnnnnnnnnnnnnnnnnnnnnnnnnnnnnnnnnnnnnnnnnnnnnnnnnnnnnnnnnnnnnnnnnnnnnnnnnnnnnnnnnnnnntcccagcttccaggatgtcctggcatcttagctgtgcgtctcccagaacctgcagatcacagggcaagaggctgtgacagtcaccgggggctcccgacgaaa

SEQ ID NO: 137711 - DNA, 1086 bp, Homo sapiens
ctaggcaagtgcaacatgacagccaccccaggacccgcgctgctgccctccaactccacgggcagcccacagcaaaatttcatgtgttccttgtatacaagctatcaggcctctgagcccaagcctgcaagtacacatccagatggcctgaagcaacttcaaggtgtacagtaatagagaagaggcagccaagcggcaatgtatttctgagttgcaattacttgcctctgctgtgagagaaaccccagctacatctccagcacacaagaacttcaaaactcctaaactgcaggggccaggtgttcctccaggacctcctccccaggatcttgcttcaattgccagaaatccggccactgggccagggaatgcccgcagtccaggattcctcctaagccgtgtcccatcagtgaactggatccacatctgagagtcaagtttccggcctttgactgccaagtcaggattctgccctgatgacccccctggcatccctgaacactctgggaaatactcggggctgcaggtgcagagctgcccagagagctccatgtagggcgccccccaggcaccaggtgcgatgccagggtcctggctgcaggcccacctgccatcttgcagccagagggccatttcccagcttccaggatgtcctggcatcttagctatgcgtctcccaggacctgcatcacagggcaacagaggctgtgacagagtcactgggggctcccaaggaggaggacgcaaaaccggaagaggacgcagaacagtggaaatgaattccaagctatctgttcccttgattacccgctctgtaactgaccttctgtccaaactgctcttactgccactgtaacccacacctctgcagattgttcccagagtcttcccagagtgttcagagatgctagacaggtcatcagggcagaaactcaactcagtgtatgtgtgggaggagctgcagccctggggtccccagtctctctggtgtcgagaccagcttggccggggagaccctaacccagtggcactgtggttatcctgaggcctaaccatctccctgtgatgctgtgcttcagtggtcat

SEQ ID NO: 137712 - DNA, 571 bp, Homo sapiens
agcccctgttgccctgtgatctgtaggtccttggggacgcatagttaaggtgccaggacatcctggaagctgggaaatggtaacttcttataccaagtctagaaacaatctgaggacaataacaattccattctaaaaagaatctcccaacatttcttctgtctcaacctcaactgcatctgcctgtgaacttccagcttaccaaggctctatatcttctggcagtgacaaaggctccttccatgatatgtattcatttcctaccacccgtagtggaagagatactatccctatctttacaactgatagcatttccaacagtaagctgtgagattctgcttgaaatcacctctcagacaaataaaaaacagacccgggagacatgctacgctcattctggctcaaggaaataggcatcatagctgggaaacggattcacaagacccagggctgttccctacatatgtttcctcctccgacattcagtttcatcagttcattcaagccatgttgaggagtgggaggccttgtattccctatttattcttgggcactcttattccaagtagga

SEQ ID NO: 137713 - DNA, 660 bp, Homo sapiens
atgaagggaagtcctaggatgatgggagatgaaacaggatttgctgttagtaccaaaggtaaattggggatttcttcttggtttggatccattactgatgatgcaaaagaacctgaaattatttttgtttctgccagtatgagcacctggtggattcagtctagaagatggatgtatgacaagatatggcatccagaaccagagaaacaaagtcacattgcctctcttatgaactgctgcagcctgaatgtgctgacagcccaacagggaggagcttgtgcagctattggtgacaaatgctgtttctacataaaccgctcagggcaagtagagactgatctgcacctcttgaaggtcaaggtaaaatattatccatcaggatgtggaatcctgaagtcagcgccttgccttctcttaggctttgaagcatttttgtctgtgctccctgatcttcaggtcaccaccatgaagttcttagcagtcctggtactcttgggagtttccatctttctgtctctgccctgtgctctggtgctgggttacggcggctggctggccaactaccagatgaattttgagactgcaaagtcccgagttactcagagcaactttgcagttggctacaagactgatgaattccagcttcacactaatgtctga

SEQ ID NO: 137714 - DNA, 501 bp, Homo sapiens
cagcgccttgccttctcttaggctttgaagcatttttgtctgtgctccctgatcttcagtgtcaccaccatgaagttcttagcagtcctggtactcttgggagtttccatctttctggtctctgcccagaatccggacaacagctgctccagctgacacggtatccagcttactggtcctgctgatgatgaagccccttgatgctgaaaccactgctgctgcaaccactgcgaccactgctgctcctaccactgcaaccaccgctgcttctaccactgctcgtaaagacattccagttttacccaaatgggttggggatctcccgaataggtagagatgtgtccctgaggatgggaatcagctgtgacgtctttgcaattgtgtcacagactattgcatgcttacctgtgattttcatccacactacttaccttgcctacgatatcccctttatctctaatcagtttattttctttcaaataaaaaataactatgagcaac

SEQ ID NO: 137715 - DNA, 273 bp, Homo sapiens; identical to SEQ ID NO: 117476

SEQ ID NO: 137716 - DNA, 563 bp, Homo sapiens
cgctgtgggtctcagcagctcgggcggcgggaggagtggcagcggcaaggcagcccggtttcgcgaaggctgtcggcgcgccgcggcccgcaggcacccggcacgcgccttccccgcaggcacccggcacgcgccttccccgccgccacgatgcccaagaggaaggtcagctccgccgaaggcgccgccaaggaagagcccaagaggagatcggcgcggttgtcagctaaacctcctgcaaaagtggaagcgaagccgaaaaaggcagcagcgaagtgtaggtagaagtttagcactgcagtcatcagaagaggcaagattaatttccttgacattgaggagttgttggataattactaaatttgtccttgttaaataaagaaagttctgtttttgtgatccttttaaaaataaagcttcacggaaggtatgagaatagtatttttcaactttaaatttctcattaccagaagaccatgtggtaattctctgtatacagtagacagcacggaaacttgaggcctaaaaattagctgacttgttaaaatgtggcgacggtatat

SEQ ID NO: 137717 - DNA, 546 bp, Homo sapiens
gatatttcagccaattagtttaaaaacacacacacacacacacacacaaaataaaaaaagataggtaataatatactgctcacgccaacatttttaacaaggtcagctaattttttaggccttcaagtttccgtgctgttctaactgtatacagagaattaccatcatggccttctggaaatgagaaatctaaagttgaaaaatactattctcataccttccgtgaagctttatttttaaaaggatcacaaaaacagaactttctgttaaagaaaacatagctaacatttttacactcagctctgtaaaaaatttaaattaaaaaagaaaaaaacatctttgttttatacctttatttaacaaggacaaatttagtaattatccaacaactcctcaatgtcaaggaaattaatcttgcctcttctgatgactgcagtgctaaacttctacctacacttttaggaaagaggtgaaggcattaacaaaaattttttttgagacttcaaatagcaaactctcacctaagttttggataaaaattaatcg

SEQ ID NO: 137718 - DNA, 459 bp, Homo sapiens
  misc_feature (1)...(459): n = a,t,c or g
ttatgtttctttaacatggcttaaattttgaacttaatgtatcaagttagtatggtcatattaatacctgtgcttttcagattcttcaaacacctaaatgaaagtgataaattcaaaactgatccttttagttcctcattatatgatatgaagggattaactgtagcaggatagtcaacctgaccgtacggcatggtgctttttttcaggtgattggtcttaatgtgagggttaaggtcttgtgaggacagtattgttgaagttcacaacaaatttggggatgggtgggaatacggtcgacgagactcctccggtattcaacttcatggacattgtcctgttcatgtgggaactgtaggggaatagtgggatgatgggcgacagtgggtgaaattttaggntcgggctttagggattttgttcatatgtccaaatgagggcttgacatgccagtactat

SEQ ID NO: 137719 - DNA, 586 bp, Homo sapiens
  misc_feature (1)...(586): n = a,t,c or g
tgcaaaagtggaagcgacccgagcaaaggcagcagcgaagtgtaggtagaagtttagcactgcagtcatcagaagaggcaagattaatttccttgacattgaggagttgttggataattacntaaatttgtccttgttaaataaagattcttcaaacacctaaatgaaagtgataaattcaaaactgatccttttagttcctcattatatgatatgaagggattaactgtagcaggatagtcaacctgacccgtacggcatggtgctttttttcaggataaatcttcagacaaaaaagtgcaaacaaaagggaaaaggggagcaaagggaaaacaggcccgaagtggctaacccaagaaactaaagaagacttacctgcggaaaacggggaaacgaagactgaggagagtccaagcctctgatgaagcaggagagaaagaatgccaatgtctgattaataaccatataccatgtcttatcagtggtccctgtctcccttcttgtacaatccagaggaatatttttatcaactattttgtaaatgcaagttttttagtagctctagaaacatttttaaagaaggagg

SEQ ID NO: 137720 - DNA, 1313 bp, Homo sapiens
  misc_feature (1)...(1313): n = a,t,c or g
ccgcccccgctgtgggtctcagcagctcgggcggcgggaggagtggcagcggcaaggcagcccggtttcgcgaaggctgtcggcgcgccgcggcccgcatgcagcaggcacccggcacgcgccttccccgcaggcacccggcacgcgccttccccgccgccacgatgcccaagaggaaggtcagctccgccgaaggcgccgccaaggaagagcccaagaggagatcggcgcggttgtcaacttaaacttcctgcaaaagttggaagcgaagccgaaaaaggcagcagcgaaggataaatcttcagacaaaaaagttgcaaacaaaagggaaaaggggagcaaagggaaaacaggcccgaagtggctaaccaagaaactaaaagaagacttaccctgcggaaaacggggaaaccgaaagacttgaggaagagtccagcctcttgattgaagcaggagagaaagagaagcccaagtcttgatttaattaaccattataccattgtcttattcagttgtccctgtctcccttcttgtacaatccagaggaatattttttatcaactattttgtaaatgcaagttttttaggtagctctagaaacatttttaaagaaggagggaatccccccctcatccccattttttaagtggtaaatgccttttttttaagaaggtgaaatcatttgcctggttgtttattttttgggtaccanccagaaaatagtgtggggatattgaattatgggaggctctgactgtctccgggtgtccagcttaaccattcccacagatgggggggttagtttttataatcctataatacaaagcatatttaaatgggcaatatggagtcagtcctgcatttaatgtcttgaacattttaaattacttctattagccatgttgttttttagtagaattgtttccctaaagaaaaccactcctttgatcatgggctctctctggccagaattggtgtgcactccggtaacatctttggttgtggtagtcctgttttcctaataactttgttactgtgctgtgaaagattacagatttgaacatgtagtgtacgtgctattgagttgtgacttggtggggccgtatgtaacagctgaccaacgtgaagatactggtacttgatagcctcttaaggaaaatttgcttccaaattttaagctggaaagtcactggaataactttaaaaaagaattacaatacatggctttttagaatttcgttacgtatgttaagatttgtgtacaaattgaaatgtctgtactgatcctcaaccaataaaatctcagtttatga

SEQ ID NO: 137721 - DNA, 489 bp, Homo sapiens
gggtgtggtgtgaggctggcgctggagcggtctgggaatgttaggaggtctagggtatcgcggccctgcgtcctcttgtctggactaaaagtccgggcagttctccccggacctggattgtgggcccagcgacaggtgcttggcgatctgtgcccgctgtgcctgcggggctgtggtgggagtcctgtctgcacgggattctgtgtggctgtgcataacccagaagaggagagaactgctgtgcgtctgaagtgatggcggagggctttctgatactaagccaaatgtgatctccttattggagcagaagaaagagccctggatggttaagaggaaggagacaaaagaatggtgtccagattgggagtttggaagagaaaccaagaatttatctccaaaggaaaacatttatgaaattagatcaccacaacaggagaaggccagagttatccgagaaatcagatgccaggtggagagacaacagggtca

SEQ ID NO: 137722 - DNA, 474 bp, Homo sapiens
  misc_feature (1)...(474): n = a,t,c or g
ccacggcgacgaaattaaccgtcaacagtggtaatgaaataaccccagcccagaaacggggagaaataacccgacgcagcggatccaccgccatcatctccatactggagagttgctctgtagcgcgcatcaggccgatttctgcggttagcgccgaaccagcacgcccggcaaacaacaacgcggcaaccaccggccccagttcacgcagtagcgataacngctcaccagcatacccagactggtttccgcactataagtggtcagaaccaggataaccttgcagccccaacaccattccgatgaacacgccagaaaccacaataatcagcatcgacaggacgccgacattatagagctggcgcaccagcagcggcgcatgtttgcgaaattccggtttgccgaccagcgcattgaataacattaacccggcccgcccgacccttctcagggttttaatccctttatgtctga

SEQ ID NO: 137723 - DNA, 3159 bp, Homo sapiens
atggtgcatgagctggcgggcgaagggatgttaatcctctggagtacctcgtatctcgacgaagccgagcagtgccgtgacgtgttactgatgaacgaaggcgagttgctgtatcagggagaaccaaaagccctgacacaaaccatggccggacgcagctttctgatgaccagtccacacgagggcaaccgcaaactgttgcaacgcgccttgaaactgccgcaggtcagcgacggcatgattcaggggaaatcggtacgtctgatcctcaaaaaagaggccacaccagacgatattcgccatgccgacgggatgccggaaatcaacatcaacgaaactacgccgcgttttgaagatgcgtttattgatttgctgggcggtgccggaacctcggaatcgccgctgggcgcaatattacatacggtagaaggcacacccggcgagacggtgatcgaagcgaaagaactgaccaagaaatttggggattttgccgccaccgatcacgtcaactttgccgttaaacgtggggagatttttggtttgctggggccaaacggcgcgggtaaatcgaccacctttaagatgatgtgcggtttttgtccccccgggttggaaactttttcccgggagggatttctaaaggagcatgaaatatgtaccaccatccgtgtcgtcatactaaccctcctgcgcgccacacaagaggagaatgaaaaggcatcagctgtgatccagactactgagagaagaatcatatgttcacgaaaagtttggggaaatccccagccacccagaagggaaattgttatgaaaaagttctgtaggcattttcccaatatcggcgcttccggcgacttctgcgtgggctgcacctgtacaggtggccgaagcgacaggttcggcagcaacgtcgctttcggcggggagttcctccgcgaccagcgtcagcaccgtaagctcgccggcgtacagctgacggatgatgatattcaaaatatgccctacgccagccagtacatgcagcttaatggcgggccgcagttatttgtggtgctggccttcgctgaagacggacaacaaaaatgggtcactcaggatcaggctactctcgttacccaacatggccgtctggtgaagactctgctcggcggcgacaacctgattgaagtgaataaccttgctgccgacccgctgattaaacccgcacaaatcgttgactcccggggccccccactcctggacaggccccgaccattaaggccaggtctggtgcagaccaattctgcccgttgtattggctgtcagagttgcgtcagtgcgtgcccgtttggaatgatcaccattcagtcgttgccgggggatacccgacaacaaattgtgaaatgcgatctctgtgaacagcgggaagaggggccagcctgcgttgaatcttgcccaacacaggcgctgcagttgcttactgaaagagaactcaggcgagtccgccagcagcgtattgttgtcagcgaaatctccgcgctgaaaggcgcggagaatctattagattgcccaaccacccgcgtaaaatgcgaccagtgcggcagtaatgatcaccgtaccaatattcagcttttgccattcgcgtgcaaagacgcggcctacgaccagtgtcacaaagcccagcataagcgcacgcagaattttcacgctccacgccagaccgtcgcggcacggcgtacaccagccgcaggactcacgggcgaaaaactcttccaggttacgcaccagcgacaccatgttgatctcatggtcaaccgccatcgccagcgccgtacccagacggctgcccgctttaccgatactttcgaattccatcggcagatcaaggtgcgcttcggtcaggaagtcagtccccgcgccgcctggctgccaggctttaaatttcagaccatcacgcataccaccggcgtaatcttcgaggatctcgcgtgcggtggtgccgaacggcagttcccacagtcccggatttttcacccgaccggagaagcccatcagcttggtgccagcatctttacttttcgagatgttctgataccactccacgccgttagcgaggatcgccggaacgttacacagggtttcgacgttgttgacacagtgtttgaagcgagtctgcgcagacggcgtattgaccgtttcagtccactcacacagtaccgcttcacgcaggcgcgccatctcttcttccagatgtgcgttcagccccagtttgtcgtcaatgatcactgctttcagtttgtcggcagtacggatgtagaacatcatgaagcggtcgagatatttgatcagcgtttcgcgatcgatatccgccgccagcagatccgcatgacgcggtttcatgccgccgttaccgcaaacatacagtacgcctactcactgtgcaacacccctaatcgcatcgctcgtatccgctcaccagactacgtgcgcgatgccgataagctatttcattcagatgctgtgccgattgatcatctgatcgcaccagagcagttggttatcgataatatttaccgactgattgagtatcccggcgcattgcaggtggtgaacttcgctgagggtaaagtcagcctggctgtggttaaagcctattatggcggcccgctgattggtaatgcactttcgaccatgcgcgaacatatgccacatatcgatactcgtgtggcagcaattttccgccacgatcgccccattcgtccgcaaggttcgaccattgttgaagctggtgatgaagtgttctttattgccgcttcacagcatatccgcgcggtgatgagtgaattacagcgactggaaaaaccgtataagcggatcatgctggttggtggcggtaatatcggtgcagggctggcgcgtcgtctggaaaaagattacagcgttaaactcatcgaacgtaatcagcagcgcgctgccgaactggcggaaaagttacagaatacgatcgtcttttttggtgatgcgtcggatcaagaactactggccgaagaacatatcgatcaagttgaggagtgtgccttccacgccggtttgcgttatcgtagttattgcccccagcgcgtttcctggaagagtgaacaaagggccgttcacagggtaaatccagctaacacgctttga

SEQ ID NO: 137724 - DNA, 2793 bp, Homo sapiens
atgcgctctataccaagtcagcagggtatcacccggttgctcagcaaggcacaatcacgccaccgattacgcgttcagcgttgccgacttcgacggcgaaaccatcctgaaagtggaaccagaagccctgaccctgctggcgcacaagcctttcacgacgcttcttttatgctccgcccggcacaccagaaacaggttgcggctattcttcacgatccagaagccagcgaaaacgacaagtacgtggcgctgcaattcttaagaaactccgaaatcgccgccaaaggcgtgctgccgacctgccaggataccggcaccgcgatcatcgtcggtaaaaaaggccagcgcgtgtggaccggcggcggtgatgaagaaacgctgtcgaaaggcgtctataacacctatatcgaagataacctgcgctattcacagaatgcggcgctggacatgtacaaagaggtcaacaccggcactaacctgcctgcgcaaatcgacctgtacgcggtagatggcgatgagtacaaattcctttgcgttgcgaaaggcggcggctctgccaacaaaacgtatctctaccaggaaaccaaagccctgctgactcccggcaaactgaaaaacttcctcgtcgagaaaatgcgtaccctcggtactgcagcctgcccgccgtaccatatcgcgtttgtgattggcggtacgtctgcggaaaccaacctgaaaaccgtcaagttagcaagcgctcactattacgatgaactgccgacggaagggatcgaacatggtcaggcgttccgcgatgtccagctggaacaggaactgctggaagaggcccagaaactcggtcttggcgcgcagtttggcggtaaatacttcgcgcacgacattcgcgttatccgtctgccacgtcacggcgcatcctgcccggtcggcatgggcgtctcctgctccgctgaccgtaacattaaagcgaaaatcaaccgcgaaggtatctggatcgaaaaactggaacacaacccaggccagtacattccacaagaactgcgccaggccggtgaaggcgaacgggtgaaagttgaccttaaccgcccgatgaaagagatcctcgcccagctttcgcaatacccggtatccactcgtttgtcgctcaccggcaccattatcgtgggccgagatattgcacacgccaagctgaaagagctgattgacgccggtaaagaacttccgcagtacatcaaagatcacccgatctactacgcgggtccggcgaaaacccctgccggttatccatcaggttcacttggcccaaccaccgcagccagtatggactcctacgtggatctgctgcaatcccacgcggcacatgatcatgctggcgaaaggcttaatgcctgcctgacgcttgcagtcatgcatcagggggccgagatcaccaccattgaaggcctgggttcgccagataatcttcaccccatgcaggcggcctttatcaagcatgatggcttccagtgcggctactgcacctccgggcaaatttgctcatcagtagcggtgctaaaagagattcaggacggcattcccagtcacgtcacggtcgatttggtttccgctccagaaacaactgccgatgagatccgtgaacgtatgagcggcaacatctgtcgctgtgccgaggcggcacttagcgctcagcgcgtacccggcgcaaaatttatcgcgggcgggaccaatctgctggacctgatgaagctggaaattgaaacgcccacccaccttatcgatgtgaacggcctcgggctcgataagattgaagtgaccgacgcgggtgggctgcgcatcggcgcactggtacggaacaccgacctggcggctcacgagcgcgtgcgtcgtgattacgcggtactctcccgcgccctgctcgctggcgcgtctgcgcacgcgctgccccctatttttacgacaccaatcagccctgcaataaagcgctgcccgggagcggctgcgcggcgcttgaaggctttagcgtcagcacgcggtggtaagcgtaacgacgctgcattgcacccacttcccaccaccaacaatcagctggtcagcgattttagacagggagtccagaacggtcagtttggtagatactttagaaccaccaacgatagccaccatcgggcgagcaggttctttcagtgctttacccagcgcgtccagttcagctgccagcagcgggcctgcgcagcgcaacgagcagcgcaatttacacgataccggtaagtagaaagcctgcgcgcaggtgagcagtaccgaatgcgtccattacgaacacgtcacacagtgcagcgtatttcttggacagggtttcgtcgtctttcttctcgcctttgttgaagcgaacgttttccagaacaaccagttcaccttcagcaacgtcaacgccgtcgaggtaatctttaaccagacgaaccgggttagacagtttgtctttcaggtagttaacaaccggcagcagagagaattcttcgttgtactcgccttcggtaggacgacccaggtgggaagttaccatcacttttgcgccttgtttcagggccagttcgatggtcggcagagaagcacggatacgcgcgtcgctggttactttcccgtcttttactggtacgttcagatccgcacggataaatacacgtttcccagcaagatccagatcggtcatcttaattacagacatgaccaacgttttgatcaagtgtgcgccattgaccggggttttggtgcatcgaccatggcactgtgccgatcgtg

SEQ ID NO: 137725 - DNA, 423 bp, Homo sapiens
tttcgtctagggtatcgcggccctgcgtccttttgtctttactaaaagtccgggcagttctccccggacctggattgtgggcccagcgacaggtgcttggcgatctgtgcccgctgtgcctgcggggctgtggtgggagtcctgtctgcacggtattctgtgtggctgtgcataacccacaagaggagagaactgctgtgcgtctgaagtgatggcggagatgtgatcttgtttaatccacataacaaccctattagacagggcttgaagttcaaagatgtggtcatttacttctctcaaaaggagtgggaatgcttgcactctgctcagaacgatttgtaccgagatgtaatgttggaaaattacggcaacctggtcttactggggctttctgatactaagccaaatgtgatctccttattg

SEQ ID NO: 137726 - DNA, 849 bp, Homo sapiens
gatatgttaaactctgtttgatacgaaggcatcgtgatgaaaccgttaattatcgttaatccggctgactgtattggctgcccgtacttgtgaaagtagcctgtgtggtcgctcacccttcagaacaggagttgaatgccgatgtctttttaccccggctgaaggtacagccgatctggacagcagtcagtgctgccaggtgatgttgcccattcagtagtgaaaacgcacccttgtgttggcgcttgaccccgtgggggcgcatgacgatgggcgagcaggtggtgcagaccaattctgcccgttgtattggctgtcagagttgcgtcagtgcgtgcccgtttggaatgatcaccattcagtcgttgccgggggatacccgacaacaaattgtgaaatgcgatctctgtgaacagcgggaagaggggccagcctgcgttgaatcttgcccaacacaggcgctgcagttgcttactgaaagaaaactcaggcgagtccgccagcagcgtattgttgtcagcggtgagaatcctctttgaaagaaaactgccccccttaagggcgcggagaaatctattaaattgccccacccaccccggcggaaaatgcgaccagtgcggcagtaatgatcaccgtaccaatattcagcttttgccattcgcgtgcaaagacgcggcctacgaccagtgtcacaaagcccagcataataccggtaacgatattacaagtcagaacgatgaacacggcacacaccaggccagccatagcgtcaataaaatcattgaaatccagcttcgagacgttacttaacatcagcaaacctacgtacatcagagcgggtgcagtggc

SEQ ID NO: 137727 - DNA, 2802 bp, Homo sapiens
ctagccccaaggcttcaaattaaccaggcgccaggcagagtgcgggtttttgatccacccggattcacatttagtttgatcccgatttaaatcagaaccctctacgcagcggatcaggtcgcccagccctatgacccattcacatgaaaacgcggcagccgcgtgaccaattttcagcagactgtgtatttctgcaatccacttgtccagtgccctgctgaagaaatcgcctctaaacacctggcggatactggcgtactcggagggattatctccggtgcgatcgcagcgtacatgtttaaccgtttctaccgtattaagctgcctgagtatcttggcttctttgccggtaaacgctttgtgccgatcatttctggcctggctgccatctttactggcgttgtgctgtccttcatttggccgccgattggttctgcaatccagaccttctctcagtgggctgcttaccagaacccggtagttgcgtttggcatttacggtttcatcgaacgttgcctggtaccgtttggtctgcaccacatctggaacgtacctttccagatgcagattggtgaatacaccaacgcagcaggtcaggttttccacggcgacattccgcgttatatggcgggtgacccgactgcgggtaaactgtctggtggcttcctgttcaaaatgtacggtctgccagctgccgcaattgctatctggcactctgctaaaccagaaaaccgcgcgaaagtgggcggtattatgatctccgcggcgctgacctcgttcctgaccggtatcaccgagccgatcgagttctccttcatgttcgttgcgccgatcctgtacatcatccacgcgattctggcaggcctggcattcccaatctgtattcttctggggatgcgtgacggtacgtcgttctcgcccggtctggtcgacttcatcgttctggctggtacagcagccaactgtggttgtccccgaacgacggatcggtaatcgacggtgtataaacaatttcccggggaggataaagccaaacaatcccatgttcagccggtatttgccgtgctcgatccggtttatacctacaccctgccgccgcgtcaggtggctaacggcgtagtggacgcctttgtacacaccgtggaacagtatgttaccaaaccggttgatgccaaaattcaggaccgtttcgcagaaggcatttttcggtaccatttcgcagtttaacagcgcagtcgtacattcgaaatccacattaatatgcggctgaatagcgcccgttgtaccgatacgcaggaaggtgcgaatgcccagctgtgccagctcttcaacagcaatagaggtagacgggccgccgataccggtagagcagacgataacaggtttaccatccagctctgcacgccaggtagtgaattcgcggtgagatgccagcttaaccggcttatccatcagcgcggcgatcttttccacacgatccgggtcgccagggacgatggcaagcgtagcccctgccgaacaagcaagcgtggccacgccatgtccggtgtgcgaattcgcgctatacattggactggtccgagcccgaggaatggacaaacgaatatcggaaggccaagatggatccacggaagccttcaacaccggacgaccaatagcgcccaggaactccctgaggctgttgttatgggggccgtcttcaatcggtaacgaggcgtgaatatcatgacgcaggcggatcgccaccacaaacaccgccaggtagcaaatcaaaaaggtggcgctggcaacgctggcgagtgagcctaaattcagtgccgccgtcatcagcataatcaacaccacgacaataatgttgccccacgtactctgccgccacagggatttattcattagcttcggcagttcgcgttcgctgcccatgttgtccatgatgttaaacacggcgaacaggttcgcgttaatggctgaagccgtcgccagtaaagcgccgatgacgacgatcacataacccacatgcccgagcagcggagaagcagcctgcgctacggcggtatcggcatatttttctaactctaatgccgatacatcgctaagcaaaaccagtgccagcgagatataaagcaacgtggtaacgccaatcgccaccagaaacgcccgtggcataatgacctgcggatctttcactttatccgccgcgttcgccatcatgccaaagcccgcataggcaaggaaagttatcccaatacatgagaagaacgcaccggagctggggggcgcatagactgaaatatgccccggttgcagcgaccaaacaccggcaataatcagcaataacaggatcatcattttaatgccgacgaggatcactttcagccgccctaccgcatggtggcgcatgatccccacgcgtaagcaaaaaagggctctatatcgcgcttctatggcgattgcacacagcggccagcgtaattgatcgacatcctccatgttccaggtatttaattgctgaataaatttctgccaggcggaaggctgaaaacgatcactttctgaatccagtaatgtcctgaatgcacgtagtatttcatgttcagcggcagcatctttttcttcatcatctgcttcctcgacaggatttaccgccagtcgcagggcctcttcataggcctggcgtaatgctttaaacccttgcggatcggtttcgggatgacacaacggtaagcgagcaagataagcctggcggataatgtctatttgcgtcgtgctttcaatttcgaggatttgccaacatgttttcat

SEQ ID NO: 137728 - DNA, 3111 bp, Homo sapiens
ctaggcgtcctctagggcgttcctagagcggtagatccatgagacgatgtgacagagacctccatggatccttccataacgattatatggacagacagctacatctacatacttagcacagcgggtggtaaccaaaatatccacagctagagcatctacgtgtacgctagatagctttcgacacattcccagcctatagccgacgcagcggatccaccgcctcatctccatactggagagttgctctgtagcgcgcatcaggccgatttcgcggttagcgccgaaccagcacgcccggcaaacaacaacgcggcaaccacggccccagttcacgcagtagcgataacgccaccagcatacccagactgtttccgcactttgccgaagtctctttctcaccaagattccactcagaggctctacggcatagccagactgctcttgcgcatctccacgtccgggccccctccatcccggctgaaggtacagcgactggacagcatcagtgcgccggtgagtgccatcagtgtgaaaacgccccttgtgttggcgcttgccccgtggggcgctgacgatgggcgagcaggtggtgcagaccaattctgcccgttgtatggctgtcagagttgcgtcagtgcgtgcccgtttggaatgatcaccattcgtcgttgccgggggatacccgacaacaaattgtgaaatgcgatctctgtggcgccttgcgcgactgcgtcgcggtacttcgtcaacgcagaaattcacgggtagtactcgatgcctgcacacgggcctagcagtaaatcgagtccgactcggcgacgataagaatcggcaacgaggcgtgaatatcatgacgcggcggatcgccaccacatacaccgccaggtagcaaatcaaaaaggtggcctggctacgctggcgagtgagcctaaattcagtgccgccgtcatcagcaaatctgcggtctttcactttatccgccgcgttcgccatcatgccaaagcccgcataggaaggaaagttatcccaatacaggagaagataaccggagctggtaccgatggagatgatgtttgttgtgctgtgccggtattgttttggccgaagatcttttttgatccgttcacgtgtttcgcattgtatagctggtgattgccggtggatctgaggcgtttgttgcgcggttagggtcacggtggggctgtatcgggggggtgcggcaacacagccactgttggaagcaggtcgcttcctgcgggcttgtaatcctggcacgcggtgtgtatgagttgtgcgcccacgactttgacagatgatcagaagtctcaggtacgcactagttaatagtcttgtgcgagcacgacctatatccgtctgtcctctctgccttcttggtcctttgtggttcttcttttctttctttctcctttctgctctttcttctccccgctcgctctcctccctttgcttctttctcctcgtgtcgtcttttctgtcttggtctttcatgctgctctcttctctctggcctcttttctcttttcgcctcgctctcctgtcttctcccttcctcttcttgctctgcttttgtgttcggtgtgcgtgcagatcagaccttcgaattcggatcgacacccaccggccgtcccagaatggtttcgcatcttcaggattcaaccaggtccataccgtgagtagaagcctgcgcgcggtgagcagtaccgaatgcgtccatacgaacacgtcacacagtgcagcgtattttttggacagggtttcgtcgctttcttctcgcctttgttgaagcgaacgttttccagaacaaccagttcccttcagcaacgtcaacgccgtcgaggtaatctttaaccagacgaaccggttagacagtttgtctttcaggtagttaacaaccggcagcagagagaatcttcgttgtactcgccttcggtaggacgacccaggtgggaagttaccatactttgcgccggggcgtttggcgcggcccgcgagccactgtgttgcctcgctgtgggaaaaggttagccccagcccagtggaatctggttcacgtgcttttctgtaagaccgcgttcgtctgtgattgaacatgaacaacgggggtgtacacacagtctgcgtccctgatacagtcaacttggtcacggccgtttcccccgtgggataggttccggatgcacagccacaagaataccgtgcagacaggactcccaccacagccccgcaggcacagcggcacagatcgccaagcacctgtcgcagtgtgaattctctgatgtcgagtaagatttgagcctttataaaggccttcccacattcattacattcatatgttttttcatctgtatggatttctctgatgttgaaaaaagtttctggagcttcggaataaaggcccttcaaccattctttcacaatttcaataggggctttctcaacccgccaggattctatgtgagtcctccctgtgggaggtgtccgagggacagtataaatgcctttgtctgacgtgttggtgtgtacaggtatccctggtggatgtttcccatgggggacaataagggccgtatggtctgtacgttgtggatgtactcctctgttcccctgcccagtgtccaaggtaatcgccagagggtagttcacaagggttcccactacccaagggccacacgtgtccacttccacattgtccaagaatcgcccaaggtgtagttcccaaaggtgcacacaaaagcacacacgttcactttccacgcttccgagaactccttggggggaaaatgagaacgcgcacacggacaacgccacacactgcgactgccacactatcccatagtttggtggacctaacggtaagttctcacctcgtaatttggggggtttataaattgggtaaaattttataggtctggggtcgtcggttggcgtccagggaccctggtaatgtcccagcatctttttggggaaggtccgaatgttttgggctatgattacacccgtgacgttccagggatgttttgaatgacccaggcctgtggcccacatcaatgggtgaatatccccccggtgcttctggcctcgacaaaagga

SEQ ID NO: 137729 - DNA, 434 bp, Homo sapiens
  misc_feature (1)...(434): n = a,t,c or g
tttgataagcctacccttcccgccggactcgctggcccacaggcccccaagctccgctccgacggagtcncagggccttttcaccgtggccgctccagcnccgggagcgccttctcctcccgccacgctggcgcaccttcttcccgcnccggcaatgtacagccttctggagactgaactcaagaaccccgtagggacacccacacaagcggcgggcaccggcggccccgcagccccgggaggcgcaaaatggccctggagaaccccaagatgcacaattctgagatcagcaagcgcttgggcgccgactggaaactgctgaccgacgccgagaagcgaccattcatcgacgaggccaagcgacttcgcgccgtgcacatgaaggagtatccggactacaagtaccgaccgcgccgcaagaccaagacgctgct

SEQ ID NO: 137730 - DNA, 490 bp, Homo sapiens
cggccgcagccgccatgagcctgggccccatgggctcggtagtgaagtctgagcccagctcgccgccgcccgccatcgcatcgcactctcagcgcgcgtgcctcggcgacctgcgcgacatgatcagcatgtacctgccacccggcggggacgcggccgacgccgcctctccgctgcccggcggtcgcctgcacggcgtgcaccagcactaccagggcgccgggactgcagtcaacggaacggtgccgctgacccacatctgagcaccggcctgcgctcgtccacccttgttccccacccgcacccccactcccgccccgcacccccaagttgggacgcccttgtttagctttgcttgcctaggactgttgccttgtaccgatgatggggagggctgaaagttttgctgtagctgtcgggttttgtacaaaagccaaaaataagtcaggagcagcgaaaatgggacttctagagagctctcttgccccac

SEQ ID NO: 137731 - DNA, 2378 bp, Homo sapiens
atggatgataccttcctaaactacaaatataaaaacaaatgtggtccaaaacatattaagaagaaagaggaggaggaggaggaggacaataacagcaatgacagcaagaacaaggacaagacattgacaactgggagttcaggctctgccaagatcttcttgatgcgaggtggtaggagacagctacttcttcccactctttccttatgtcttctgtcagttcaaagaagcccaggtagtcatgaatctggacctcctcagagcatgaatcctagactgagtccacaagggaagtacctgaaaaatgactttttagatgtgattgggatgtgtgacatagcctgccatcttgttgtggagcttcttgttgggaataatggcaacttcctcgcacatgcctttgctcatgtggaagtagttgcccagcagaatcagagggaaaatgctgccaggccgaacgggggctcggtaatgattggccagggcgcatcactgcgaacctgtcaatcacgggtcctccgggttgcgaggggcggaccaagccccaaccccggggaatccgagcagggccttttcaccgtggccgctccagccccgggagcgccttctcctcccgccacgctggcgcaccttcttcccgccccggcaatgtacagccttctggagactgaactcaagaaccccgtagggacacccacacaagcggcgggcaccggcggccccgcagccccgggaggcgcaggcaagagtagtgcgaacgcagccggcggcgcgaactcgggcggcggcagcagcggtggtgcgagcggaggtggcgggggtacagacccaggaccgtgtgaaacggcccaatgaacgccttcatggtgtggtcccgcgggcagcggcgcaaaatggccccggagaaccccaagatgcacaattctgagatcagcaagcgcttgggcgccgactggaaactgctgaccgacgccgagaagcgaccattcatcgacgaggccaagcgacttcgcgccgtgcacatgaaggagtatccggactacaagtaccgaccgcgccgcaagaccaagacgctgctcaagaaagataagtactccctgcccagcggcctcctgcctcccggtgccgcggccgccgccgccgctgccgcggccgcagccgctgccgccagcagtccggtgggcgtgggccagcgcctggacacgtacacgcacgtgaacggctgggccaacggcgcgtactcgctggtgcaggagcagctgggctacgcgcagcccccgagcatgagcagcccgccgccgccgcccgcgctgccgccgatgcaccgctacgacatggccggcctgcagtacagcccaatgatgccgcccggcgctcagagctacatgaacgtcgctgccgcggccgccgccgcctcgggctacgggggcatggcgccctcagccacagcagccgcggccgccgcctacgggcagcagcccgccaccgccgcggccgcagctgcggccgcagccgccatgagcctgggccccatgggctcggtagtgaagtctgagcccagctcgccgccgcccgccatcgcatcgcactctcagcgcgcgtgcctcggcgacctgcgcgacatgatcagcataacaggaagagagaacatctttgtcgtgggtgaccccgcagcgtgcttgcttcccatagaaatggaggagacattcctaccctggccccttgggttcgaggacaggctccatctggagggccctcgcccagtccaggagattccttcatttctaagaaaagtgcctaactgcggccagtggctcctacagaccccttctgtagagcctgcagacccttgggagaatcctcaggcctttccaccaagtcttcaacaggaacagccctgcttgtctcttattgttgggatttttgtagaagcttttggaggcagagggcggtggggcagcaaaggcaaaaaaccaaaaagatacagaacggtagaatggatgagaattcaccaaccaagtatctgctgtcttcaagagactcacctgacacgtaaggactcacataaacttaagcaaaattggctacaagggacatactttaaggtaataaaagccatctatgacaaacccacagccaacattatactgaatggggaaaagttgaaagcattccccctgagaattggaacaagacaaggattcccactttcatcacttctactcagcattttactggaattcctagccaaagcaattagacaagagaaagaaataaaggacatccaaatccataaagaggaaggcaaactgttgctgtttgctgatgatatgatcatatacctagaaaaccctaaagactcatccaaaaactcctag

SEQ ID NO: 137732 - DNA, 399 bp, Homo sapiens
cttcccgcgtccgccgattcctcctccttggtcgccgcgtccttggctggcgtcagaaaaatggctacaaacttcctagcacaccagagtctgcgtggcgtggtacaggagctgcagcaggccatctccaagctggaggcccggctgaacgtgctggagaagagctcgcctggccaccgggccacggccccacagacccagcacgtatctcccatgcgccaagtggagcccccagccaagaagccagccacaccagcagaggatgacgaggatgatgacattgacctgtttggcagtgacaatgaggaggaggacaaggaggcggcacagctgcgggaggagcggctacggcagtacgcggagaagaaggccaagaagcctgcactggtggccaagtcc

SEQ ID NO: 137733 - DNA, 1216 bp, Homo sapiens
tcttagggaacaagcgggccgggctgcgacgggccgatggggaggccccctctgccttgccctactgttacttcctgcagaaggatgcagaggccccctggctcagcaagcctgcctacgacagcgccgagtgccgccaccacgctgccgaggccctgcgtgtggcctggtgcctcgaagctgcctccctgtctcaccgacccggtcctcggtctggcctgtccgtgtccagcctgagacccaccagaaaaatggctacaactttcctagcacatgagaagatctggttcgacaagttcaaatatgacgacgcagaaaggagattctacgagcagatgaacgggcctgtggcaggtgcctcccgccaggagaacggcgccagctgtgatcctccgtgacattgcgagagccagagagaacatccataaatccctggctggaagctcagggccccggggcctccaagcggcaccagcggagaccacggtgagctcgtcgtccggattgccagtctggaagtggagaaccagagtctgcgtggcgtggtacaggagctgcagcaggccatctccaagctggaggcccggctgaacgtgcttggaaaagagctccgcctggcccaccggggcacggccccacagacccagcacgtatctcccatgcgcccaagtggagccccccagccaagaagccagccacaccagcagaggatgacgaggatgatgacattgaccctggtgggaagggacaatgaaggaggaggacaaggaggcggcacagcttgcgggaggagcggcctacggtcattacgcggagaagaaggcccaagaaagcctgccacttggtggccaagtccctccatccttgctggatgtcaaagccttgggatgatgagtcggacatggctcagctggaggcctgtgtgcgctctatccagccggaacgggtcgttcttggggggcttcacagatggttgccgtgggctacgggtatccggaagctacagattcagtgtgtggtggaggacgacaaggtggggacagacttgctggaggaggagatcaccaagtttgaggaagcacgtgcaagaagtgtcgatatcgcaagcttttcaacaagatctgaagccttgaagtgtgtgtacgttgcgcacgtgcgtgaaggcccgtgcacacgatctaaagacttgagaccggcaaaaaaaaaaaaaaaaaaa

SEQ ID NO: 137734 - DNA, 2068 bp, Homo sapiens
atggcggcggcactgagggccccgacccaggtgagcgctgcgtcctcccggcctcctctgccctccccacccgaaactgagggacgcgtgaagggttttctgcagcccggaccgcactgtccggcacaatgtctttgttctggagatgatggcagcaatgaagatttggagcagaagagggaggtgatcttccccaggcctcatgaggctcctgtggctgagcacagacaacagactgtgggtttaagggagttggtagcaataccaaagaggaaagaggagactactgcaatagtccaggtttttgtagcctttgaggatgtggccatttacttctcccaggaggagtgggagctccttgatgagatgcagaggctcctgtaccgcgatgtgatgctggagaactttgcagttatggcatccctaggttgctggtgtggagcagtagatgaggggacgccttctgcagagagcgtttctgtggaagaactgtcacagggcaggactccaaaggcagatacatccactgataagagtcacccctgtgagatttgtaccccagtcctgagagacattttacaaatgattgagctccatgcctcaccctgtggacagaaattgtacttgggtggagcatcaagagatttctggatgagttcaaaccttcaccagctccagaagcttgataatggagagaagctctttaaagtggatggggaccaggcctcatttatgatgaactgcaggttccatgtgtcaggaaaacccttcacgtttggggaagtcgggagggacttttcagccacctcaggacttctccagcatcaggtgactcccaccattgagagaccacacagcaggattagacacttgagagttcccactggacgaaagcctctcaaatacactgaatccaggaaatcttttagagagaaatctgtattcattcaacaccaaagagctgactctggagaaaggccttacaagtgcagtgaatgtgggaaatcctttagtcaaagttctggctttcttcgacacaggaaagcacacggtagaacaaggactcatgaatgtagtgaatgtgggaacatcctttagtcgcaaaactcacctaactcaacaccaaagagttcacactggagaaaggccttatgactgcagtgaatgtggcaaatcctttcgccaggtatctgtcctcattcaacatcaacgagttcacactggagaaaggccttatgagtgcagtgaatgtgggaaatcttttagccacagcactaacctctatcgtcacaggagtgcccacactagcacaaggccttatgagtgcagtgaatgtggaaaatcctttagccatagcactaacctctttcgacactggagagttcacactggagtaaggccttatgagtgtagtgaatgtgggaaagcatttagttgcaatatctaccttattcaccaccaaagatttcacactggagaaagaccttatgtgtgcagtgaatgtgggaaatcatttggccagaaatctgtcctcattcaacaccaaagagttcacactggagaaaggccttatgagtgcagtgaatgtgggaaagtttttagccaaagctctggcctctttcgacacagaagagctcacactaaaacaaagccttatgagtgcagtgaatgtgaaaaatcatttagttgcaaaactgacctcattcgacaccagacagttcacactggagaaaggccttatgagtgcagtgtatgtgggaaatcttttatccgaaaaacccacctcattcgacaccagactgttcacactaatgaaaggccttatgagtgcgatgaatgtgggaaatcctatagccaaagctctgccctccttcagcataggagagttcacactggagaaaggccttatgagtgcagagaatgtgggaaatcttttacccgcaaaaatcacctcattcaacacaagacagttcacactggagaaaggccttatgaatgcagtgaatgtggaaaatcctttagccaaagctctggcctcttaagacacagaagagttcatgtgcagtga

SEQ ID NO: 137735 - DNA, 970 bp, Homo sapiens
atggctgcgcaggtcggagcggtgcgcgtagtacgggcggtggcggcgcatgaggagccggacaaagaggggaaggagaaacctcatgctggggtctccccgcggggagttaaacggcagcgccgatctagcagtggggggtctcaggagaagcgggggcggccgagccaggagccccctctcgctccccctcaccggcggcggtcgcagccgccaacatcctgggccgctgccgtcaacgatatgcagccccaactgtgccaggccctgttgagcctcttctcctgccgcctccgccgccaccttcgctggcacccgccgggcccgctgacgatgcccctctcccggccccaagcacctcgggcctcttcaccttctcgcctctgacggcgagcgcggccgggcccaagcataagggcacacaaggagcggcacaagcaccatcaccaccgcggccccgatggtgatcccagctcctgcggaaccgatctcaagcacaaggacaagcaggaaaacggcgagaggactggaggggtgcctctgatataaagcccccaagagagtgagtcttaccatctttgcctccaatgaggggagtatccagtttagatttatgagcttcagaatttctctaattgaagttctctctgcagtagagagagcaggagcagccaatgtggagaggtcgcaagatggggctgcccaagatgttggaacaccatgtgcaataaagggcttcgtcttggattttggccttattaccacaaccagacttgaggtaattcgaaaaggcatgttaagccatgtgatgcttgagtacaatcttgaaagcatgttaatacttaacttggtgggagaacacaaagtttggctgtctcgagaactctgcaaggtagttcctcagtgccttgcaaatataggtcagtattataccaagcctccatcaggacagaagaagtacaagtggtaa

SEQ ID NO: 137736 - DNA, 1578 bp, Homo sapiens; identical to SEQ ID NO: 126968

SEQ ID NO: 137737 - DNA, 1027 bp, Homo sapiens
ttcaatgtaaatgctgtgtcagtagttgtctagggaataatgacaagaagaaaattttgtacatgttcagtacgtaggaaaaagaaagagagatcagactgtcactgtgtctatgtagaaagggaagacataagagattccattttgaaaaagacctgtactttaaacagttgctttgctgagatgttgttaatttgtagctttgccccagccactttgccttagccactttgacccaacctggagctcacaaaaatatgtgttgtataaaatcaaggtttaagggatctagggctgtgcaggatatgccttgttaacaaaatgtttacaagcagtatacttggtaaaggtcatcgccattctctagtctcaataaaacaggagcacagtgcactgcggaaagccgcagggacctctgcccttgaaagtggggtattgtccaaggtttctccccatgtgatagtctgaaatatggcctcgtgggatgagaaagacctgactgtgccccagcccgacacccataaagggtctgtgctgaggtggattagtaaaagaggaaagcctcttgcagttgagatagaggaaggcccactgtctccctgaactgccccctggggaacttgaatgtcccgggtattaaaacacggattgtaccattggtccagttctgagatgggagaaataccgccctatggtgggaggcgagacatgtttacagcaatgctgccttgttattctttactgcactgaggatatttgggcagagaagaaacataaatctcggcctacgtgcacatccagggcatagtacctccccttgaacttaattatgacatagattcttctgctcacatgtttttttggcggaccttctccttattatcaccctgccctcctactacattcctttttgctgaaataatgaagataataatcaataaaaactgagggaactcagagaccggtgccggtgcaggtccttggtatgctgagctccggtcccctgggcccactgttgtttctctat

SEQ ID NO: 137738 - DNA, 945 bp, Homo sapiens; identical to SEQ ID NO: 123374

SEQ ID NO: 137739 - DNA, 1754 bp, Homo sapiens
tcactgtctgaagctgcctgcctcctccttctcccgcttcgtgctgagaaagtagtggcagaagaggcggccctgccgcagtgccacgctttctccaggaaacaaggacagctgcacgggtgcccacacgagagtcggcgaccagcctcggcggtggggttcctgcaacgcgtgttcctgctggggttctcctttctgctgttccgagctacagtgcggatcatgctccccatacgtggagtccagggacagcacagcccggggactgcccagccagccaggaagtctggctttcagagaactgggaagaccatcttccactttatcccatctgggagactgtaaacatggattccactgtctcggacagggagacgattcccagtcttttcctgttcctcctctaggtatgtagctgctatcagcttccacaaacgctggaaggaagggcgttgctttggcaggacacgtggggagatgggctgggaggggagatcccggagcctgaaggaattgaacaccaggaatgactggaaccctggagagagagaactggatttctggaggaaaatcactcgttttaaggaagcagcatcctggacccttgaggccctggaggaagcgggcagcacagctcggaggcgggtgtggctggaggacggccgtcgcacctgcgaaattctgtctgtgctttgcacctcgtcattgtcttctaattgtgcatccctggactgcgtgacctacaaggctctcagcacaacaagactctatgattctgtctattggaacaaaaagccagaacgtagctcctcaccagcaacggaacaaagctggacagagaatgactttgacaagttgagagaagaaggcttcagacgaattaaattactccgagctaaaggaggaagctcgaacccatggcaaagaagttataaaccttgaaaaaaagattagacgaacggctaactagaataaccaatgcagagaagtccttaaaggacctgatggagctgaaaaccatggcacgagaactacgtgacgaatgcacaagcttcagtagccaattcgatccactggaagaaagggtatcagtgatggaagatcaaatgaatgaaatgaagccaagaagagaagtttagagaaaaaagaataaaaagaaacaaaagcaaagcctccaagaaatatgggactatgtgaaaagaccaaatctacacctgattggtgtacctgaaagtgacagggagaatggaaccaagttggaaaacactctgcaggagattatccaggagaacttccccaatctagcaaggcaggccaacattcaaattcaggaaatacagagaacgccacaaagatactcctcaagaggagcaactccaagacacataattgtcagattcaccaaagttgaaatgaaggaaaaaatgttaagggcagccagagagaaaggtcgggttacccacaaagggaagcccatcagactaacagctgatctcttggcagaaactctacaagccagaagagagtgggggccaatattcaacattcttaaagaaaagaattttcaacccagaattgcatatccagccaaactaagcttcataagtgaaggagaaatacaatactttgcagacaagcaaatgctgagagattttgtcaccactaggcctgccctaaaagagctcctgaaggaagcactaaacatggaaaggaacaactggtaccagccactgcaaaaacatgccaaatggtaa

SEQ ID NO: 137740 - DNA, 447 bp, Homo sapiens
ctagcagtcctcacagctctcgctcgctctcggcgcctcctctgcctgggctcccactttggcggcacttgaggagcccttcagcccaccgctgcactgtgggagcccctttctgggctggcgaaggccgcagcccgctccctcagcttgcagggaggtgtggagggagacgcgcgagcgggaaccggggctgcgcgcggcgcttgcgggccagctggagttccgggggggcgtgggcttggcggccccgcactcggagcagccggccggcccgggccttagctgccttcccgcggggcaggccttgggactgcagcccgccatgcctgagccttcccccgcctccgtgggttcctgtgcagccggagcctccccgacgagcgccgccccctgctccacggcgcccagtcccatcgaccgcccaagggctgaggagtgcaagcgcat

SEQ ID NO: 137741 - DNA, 417 bp, Homo sapiens
ttttttttttttgggtttccatgtattttattccattccactcataccaagagacaattctttttgaggtgtgtttagctctctagacttaattactgctgtgtttgtcacattggctgaattgagatcggtgacataaggattcctgggagcctgcgctgggcgcgaatttaagatggctcctccatgatcttcactctctgggtgaaaactgtcggtcagcccatgcccaggattgttgatcagtgctgaaggtcctgaggctgtttttagcatagtctaaaacgcgagggtccgtggcttcattcttgaagtcagtgagaccaagaacccaccaattccggacacattgggaacttagagcagtgcttgggacatggttatcagcgttagctatttccttaaactagcgtgaag

SEQ ID NO: 137742 - DNA, 3277 bp, Homo sapiens
catgccctggtgtccccaaaaccagttccgtcttgggggttgtgggaaacaccgaaggcggcggcagttgtcatagaaggcgtaggtccaggccaggacatgggccaggagccaggaggccccgaccagcaggaggagcagccaaggggatgctgccactggccagaggcccagccaggacaggctcagctgggacatcttataggtgtaggagcccctttctaggctggccaaggccagagccggctccctcagcttgcagggaggtatggagggagaggcgcgagtacgaaccggggctgcgcgcggcacttgcgggccagctagagttccaggtgggcgtaggcttggcaggccccgcactcggagcagccggccggccctgccagccccgggcaatgaggggcttagcacccgggccagcggctgctcgggaaggtgtactcggtcccccagcagtgccagcccaccggcgctgcgctcgatttctcgccgggccttagctgccttcccgcggggcagggcccaggacctgcagcccgccatgcctgagccttcccccgactccgtgggttcctgtgctgcccgagcctccctgacgagcgcgaccccctgctccacggctcccagtcccatcgaccacccaagggctgaggagtgcgagtgcatggcgccggactggcaggcagctccacctgcagccccggtgcgggatccactgggtgaagccagctgggctcctgagtcatggaagcgttgttctttcgctctttgcaataaatcttgctgctgctcactctttgggtccacactgcttttatgagctgtaacactcaccgtgaaagtctgcagcttcactcctgaagccagcgagaccacgagcccaccgggaggaacgaacaactccagacgcgccgccttaagccttaagagctgtaacactcaccacgaaggtctgcagcttcactcctgagccagcgagaccacgaacccgccagaaggaagaaactccgaacacatccgaacatcagaaggaacaaactccggatacaccatctttaagaactgttaacactcaccgtgagggtccgcggcttcattcttgaagtcagtgagaccaagaacccaccaattccggacacagttggaaatgcagaagggcacttgagtttccctgcagtctcccacacggacaccttctggaggaagatgagccctaaacgcgatgggttggggacaggtgatggtctgcactcacaggttttacaggagcaggtctccacaggagacaatctccatgaatgtgactcccagggaccaagtaaagacactttggttcgtgaggggaagacctacaaatgcaaggaatgtgggagcgtgtttaacaaaaacagcctccttgttcgacatcagcagattcacactggggtgaagccttatgaatgccaggagtgtggaaaagcctttcctgaaaaggtcgacttcgttcgacacatgaggattcacacaggggagaagccctgtaagtgcgtggagtgcgggaaggtcttcaaccgcaggtcgcacctcctgtgctaccgccagattcacactggagagaagccctatgagtgcagcgagtgtggaaagaccttcagctatcactctgtcttcatccagcatcgtgtgacccacactggagaaaaactctttgggtgcaaagaatgtggaaaaaccttttactacaactcttccttaacccggcacatgaagattcacactggagagaagccctgcaagtgcagtgagtgcgggaagaccttcacctaccgctctgttttcttccgacatagtatgacccacactgcaggaaagccctacgagtgcaaagaatgtgggaaaggtttttactacagctattccctcactcgacatacaaggagtcacactggagagaaaccttatgagtgccttgaacatagaaaggactttggctaccactctgcttttgcccaacagagtaagatccactctggaggaaaaaacctttgagtgcaaatgatgtgggaatttgtgggttttctttttttttttttctttgatacatagagagccacactgaggagaagcactctgaattcagtggcagtaggaaagctgtgacctgcagctcatcctcacttggcattgaagaattccttccagagataaactctatgagatatgtgggaaggccttttgcaagtgggccctcatcagtcgacgtcagagaacttaaactgcgaaaagacattttgacaaaaactagtgaagaaaatcttttggccacaggaaatatcttcctcagcatctgagaatttttccaggagggagacctgttggttattgtgcacttaaaagaaccacccacacctctctccatagtttatatcactaagccacttcaggatttttttttttttaagtaagaagggaactgtaaaagagaaaaaaagaaattcatgcatagcttctgtcagacttctctgaaagaaatgcctatcaaaatttgaattcagttcttcattttgcagatggctgaaagggacgagagaatgatggtgaagctgtgttgctttcccaggtgagccttgattatttcctctgtgctttctcagcttctttggccttctgtaagaggggcttctccaagagcatgtcactagttttctagaagttaaacaagagctaagacaaacaaaacaaaacacagcttatctaatctaatgagaaactcagaaaaaaatgttttgatgaatacaatgtattaaaatataaaacatgtagatcctttgacatgttaattcaattctagaatcctcaagaaatgtttttatattatgcagagatgtgcgtgcaaagaataatcgctggagttttgtttttatgtgtgaacgttgagacaatctaaatgtttatcagtggaagtaagtaggtacactgtctatgaaatactgtgaaacaataaggtatctctgtatgtactgatatcaaaagatctctaagatacagtatttagtaaaagagaaagtttcaggaaataaaactacatctagaagtataagcataaaactgttaatagtggttttctgcaggaaatgggatggaccagggttatatgcaatgttcagtttttacttttatacttaagtattgtttatgtttgaaaaataaaaagcatttattgtttttgcaataaatgtttaaaatatttcaataaagatagcatgttagaaaaaaaaaaaaaaaaaccgaattc

SEQ ID NO: 137743 - DNA, 579 bp, Homo sapiens
atgaaacatgagaagagggatcggtgcgcagaattaacagctattctattaaatgaacaagcatctcccatgtgcacgattgtgttgggctacacagggacatccacgataaccctgccgcggacatcatgccattttgctccacgattgagcaacagtcaacagcattcatcatatcaagtgggacataaaccagagtcctattgtgtccggaattggtgggttcttggtctcactgacttcaagaatgaagctgcggaccctcacaactcaggaggccagctggcttcacccagtggatcccgcacaggggctgcaggtggagctgcctgccagccccgcgccatgtgctcgcactcctcagcccttgggcggtcgatgggactgggcgccgtggaacagggggcggcattcgtcggggaggctcgggctgcacaggaacccacggaggcgggggaaggctcaggcatggcgggcttcagtccggaggcctgccccgcgggaaggcagctaaggcccggcgagaaatcgagagcagcgccggatatagtaactcctcgagcaaatgtagcatcataa

SEQ ID NO: 137744 - DNA, 592 bp, Homo sapiens
gggctctgtgtgtctggatgcgccttaggttccaagacaattgcccaataccttgtaggtcaagggcccagggcccccccacagcaaggttgagggacccctttccagtagggctgtcccaagccccactcaatgggccaggtttctggcccacttttgttaatagcacatggatcaatattagtaaccccatccaagattgacctgtgaaaagaggttccaggggaatctccctcagtgccagttacttagtgatgtgttacccaggatgcagcaggtgtgtgcaggtatcttgctctctaggcctgtgtgtgtgtgtaagtgtgtgtgtatatgggtgtgggtgtgtttgtgtgtggtggttgtggggggggtgttggaggttctatttcatttaaaaatgtattcatttccctggccccaccccaaagtttgtctgtggtgttatagtggtaactgcagttcctcctttggaatgtagactgtatatgtttaataactccccttctctatccttgctcaaaatgtgggataacgcgatgactgtgaccctggttggaaattaaacttgttttatgcaaaaaaaaaaaaa

SEQ ID NO: 137745 - DNA, 1158 bp, Homo sapiens
atgaccgggtactcctctgagaaaaaacttccagaggaacgatcagacagcagcattcacggttcacgaaaatccgctgctgtgcagctaccgctgctggtacccgggcaaacaggaacaaaagaagataaaaccacaaagagggggaaagaacagagcagaaaaactggaaactctaaaaagcagagcgcctctcctcttccaaaggaacgcagttcctcaccagcaacggaacaaagctggatggagaatgactttgacgagttgagagaagaaggcttcagacgatcaaactactccgagctacaggaagaaattcaaatcaaaggcaaagaagttaaaaactttgaaaaaaatttagacgaatgtataactagaataaccaatacagagaagtgcttaaaggagctgatggagctgaaagccaaggctcgagaactacgtgaggaatgcagaagcctcaggagccgatgcgatcaactgaaagaaagggtatcagtgatggaagatgaaatgaatgaaatgaagcgagaagggaagtttagagaaaaaagaataaaaagaaatgaacaaagcctccaagaaatatgggactatgtgaaaagaccaaatctacatctgattggtgtacctgaaagtgatggggagaatggaaccaagttggaaaacactccgcaggatattatccagcagaacttccccaacctagcaaggcaggccaacattcaaattcaggaaatacagagaatgccacaaagatactcctcgagaagagcaactccaagacacataactgtcagattcaccaaagttgaaatgaaggaaaaaatgttaagggcagccagagagaaaggtcgggttacccacaaagggaagcccatcagactaacagtggatctcttggcagaaactctacaagccagaagagagtgggggccgatattcaacattcttaaagaaaagaattatcaacccagaacttcatatccagccaaactaaacttcataagtgaaggagaaataaaatcctttacagacaagcaaatgctgagagattttgtcacaaccaggcctgccctaaaagagctcctgaaggaagcactaaacatggaaaggaacaactggtaccagccactgcaaaatcatgccaaattgtaa

SEQ ID NO: 137746 - DNA, 873 bp, Homo sapiens
ttagccggttattttgctcgttagttgatgcagtttcttcctagtctcgatggtctttacattttggcatgattttgctgcggctggtaccagttgttcctttccatgtttagtgctttccttcaggagctcttttagggcaggcctggtggtgacaaaatctctcagcatttgcttgtctgtaaagtattttatttcttcttcacttatgaagcttagtttggctggatatgaaattgtgggttgaaaattcttttctttaagaatgttgaatattggcccccactctcttctggcttgtagagtttctgccgagagatccgctgttagtctgatgggcttctctttgagggtaacccgacctttctctctggctgcccttaacattttttccttcatttcaactttggtgaatctgacaattatgtgtcttggagttgctcttctcgagaagtatctttgtggcattctctgtgtttcctgaatctgaatgttggcctgccttgctagattggggaagttctcctggataatatcctgcagagtgttttccaacttggttccattctccccgtcatttatttcattcatttcgtcttccatcgctgataccctttcttccagttgattgcatcggctcctgaggcttctgcattcttcacgtagttctcgagctttggctttcagctccatcagctcctttaagcgcttctctctattggttattctagttatacattcgtctaaatttttttcaaagtttttaacttctttgcctttggtttgaatttcttcctgtagctcatagtttgatcttctgaagccttcttctctcaactcgtcaaagtcattatccatccaggtttgttccat

SEQ ID NO: 137747 - DNA, 2079 bp, Homo sapiens
atggacacttttcagttgcgtctccaccccacagaagcacagctgtgggtgttggctgccatttggccaggatacttgaaaagagactcgagtgttcaggacaagctcaaggctcacgtgtttccagaagatgaggaggaaggcccattccttacttcagggcagatgttccggagtctgaatgcaggagtggctgagactcacggccaggaagacagagctgtccagagacagtcggagctgcggacaactgaaaacatctctgctcatttccttgctggtcgaaagcacacaggggaggcattgatctttcctagctggacccaaacacattctggaggagatggctggagagtggccaaagcctggaggccaaaataccatgacacacaattgggaggagagaaagaggagccccaaggccaccatgcctccgactgccgctggcgggcacagcctcattgccgcaccctcagtgcggctgttgtcaacgtcgcagggttcacagtcacctttgagctcagatgcctcacacttatgaaaatgagggagaaggatcatcatctctgtgataacgacatcgtgctctttcctccagacactgcctttccccttgattgtctcctttcctgcattcattcaactgttcatgggctgctgaggtggaatgcaattcagtatttggcttcaagaagtgaaagtcacccagagagatctgagggtgggacaccagacaggaacggccatcctgctttgtctctagcgtctttcaatggtgcacagcaagacagaaggacagttcaatcccttggggagaaacctgggctccctgaagagatggctgctttcatggctggcacagagaaagaacaaaatgagcttggaattgaattctttcagttgatcattcctgcctctaagagaacacattcagaaaatgcgcttttctctcattccggcgatgacacagaatgttcaagatcaggacagggctctcctccgtcatacagccgaggcccaccccgaagaacattcatccttgcaacacagccactgtgctctaaagaagcccagactagcccacatgaacagcccacacgcactgagaaaaaccgaggctcccacctataccacaagtctccctgtgatcatgcatcacctgggatgtctgtgacaatgtctgggatgcagcaggcactccctagacagttaactactcttactttttatcccccagcttttcgctctataaaaatctttagaataatgattctgaaaacagagatgctgcatactcatgcacgatctcaagaagcacttctaaaagattcctccaaaacgatgctccattccacacttccttcctgtgtccggaaatctaattatcatcatcgggagagaaaaatcaagacaaaggaagcctttcctgccaagattcacaggtccaggaatcaagggatgaaagtggaagtggcaccactcaccatcacctctagtgatccactagcagaatttttgcttcctgttactgtgacactatgttctgcaagcctagaggtcttagctccagagggaggaatgctgtcaccaggagacgcaacaatgattccattgaactggaagttaacactgccacctggccactctgggctcctcctgcctctaagtcaacaggttaagaagagagttccagtgttggttggggtgattgacctggactatcaagatgaaatcgactactactcctcgatgaaggaacgcagttcctcaccagcaacggaacaaagctggatggagaatgactttgatgagctgagagaagaaggcttcagacgatcaaattactccgagctacgggaggaaattcaaaccaaaggcaaagaagttgaaaactttgaaaaaaatttagaagaatgtataactagaataaccaatacagagaagtgcttaaaggagctgatggagctgaaaaccaaggttcgagaactacgtgaagaatgcagaagcctcaggagccgatgcgatcaactggaagaaagggtatcagcgatggaagatgaaatgaatgaaatgaagtga

SEQ ID NO: 137748 - DNA, 1380 bp, Homo sapiens
atgtgggcaggcaaaagggctccaatatccagagaaagccctccagcaaagaaacacaagtgctggcaggcagaggagcctctctctgtggccatcaccactaaaaggcccacaggctgtacttctaggctactactgatgttcactgaattctcaagggctcctcagtcagcctgtggtgaattttgccaggcctgggactcacccttcagggcactaggctctcctctggcccaggacagctccagaaatgctgtccaagagccaaagcctgaagctggggaccccaagagcctgcttggtgctctaccccactatggccaagctgctgttgtggagaaatggcagaggggtagtgttggtaatacgactgtcattcctatcctcttcagtgtctctttcagtgatatgaagttaaaaaccggtaataaggttggcttgggctattccctgcattgccattattgtcactttaagtctcaggccgaaggagcaaccactgttggagaatgtttccagtcaccatggcagaaggaaaaaagagcttcaaacgggctcctaaagtttctgccaaagggcacagacaaacaaaaagacagcagtaacctctgcagacttaaatgtccctgtctgacagctttgaagagagcagtggttctcccagcacacagctggagatctgagaatgggcagactgcctcctcaagtgggtccctgaccccgacccccgagcaggctaactgggaggcacccccaagtaggggcagactgacacctcacacggccaggtactcctctgagacaaaactttcagaggaacgatcagacagcagcatttgcggttcacaaaaatctgctgctctgcagccaccgctgctggaacgcagcttctcaccagcaacagaacaaagctggatggagaatgactttgacgagttgagagaagaaggcttcagacgatcaaactactccgagctacaggaggaaattcaaaccaaaggcaaagaagttgaaaactttgaaaaaaatttagacgaatgtataactagaataaccaatacagagaagtgcttaaaggagctgatggagctgaaagccaaggctcgagaactacatgaagaatgcagaagcctcaggagccgatgcaatcaactggaagaaagggtatcagtgatggaagatcaaatgaatgaaatgaagcgagaagggaagtttagagaaaaaagaataaaaagaaacaaacaaagcctccaagaaatgtgggactatgtgaaaagaccaaatctacgtctgattggtgtacctgaaagtgatgcggagaatggaaccaagttggaaaacactctgcaggatattatccaggagaacttccccaattga

SEQ ID NO: 137749 - DNA, 1209 bp, Homo sapiens
atggtgtcataccaagttggatggactctcactatttggggagagtgtggcattggaggaagctggagggcaaaccgcactttggcttatgagattcttgtcaagaaaggcaaactatgtagacaaaatcactaccagggaagtgggccacagagagtgattaatgagctcaaggctacacagcagatgatgggccgcatccagtgtctgctcatcatcatgcgtcttgctgccctcaagtcactcctagcagttgcccaggactgtttgttccccgttcctatcctcagctggacggagaatgactttgacgagttgagagaagaaggcttcagacgatcaaactactctgagctatgggaggaaattcaaaccaaaggcaaagaagttgaaaactttgaaaaaaatttagaagaatgtataactagaataaccaatacagagaagtgcttaaaggagctgaaggagctgaaagccaaggctcgagaactacgtgaagaatgcagaagcctcaggagccgatgcgatcaactggaagaaagggtatcagtgatggaagatgaaatcaatgaaatgaagcgagaagggaagtttagagaaaaaagaataaaaagaaatgaacaaagcctccaagaaatatgggactatgtgaaaagaccaaatctaagtctgactggtgtacctgaaagtgacggggagaatggaaccaagttggaaaacactctgcaggatattatccaggagaacttccccaatctagcaaggcaggccaacattcagattcaggaaatacagagaattccacaaagatactcctcaagaagagcaactccaagacacataattgtcagactcaccaaagttgaaatgaaggaaaaaatggtaagggcagccagagagaaaggtcgggttacccacaaagggaagcccatcagactaacagcagatctctcagcagaaactctacaagccagaagagagtgggggccaatattcaacattcttaaagaaaagaattttcaacccggaatttcatatccagccaaactaagcttcataagtgaaggagaaataaaatactttacagacaagcaaatgctgagagattttgtcaccaccaggcctgccctaaaagagctcctgaaggaagtgctaaacatggaaaggaacaaccggtaccagccactgcaaaatcatgccaaattgtaa

SEQ ID NO: 137750 - DNA, 1230 bp, Homo sapiens
tcacttcatttcattcatttcatcttccatcactgataccctttcttccagttgatcgcatcggctcctgaggcttctgcattcttcacgtagttgtcgagccttggctttcagctccatcagctcctttaagcacttctctgtattggttattctagttatacattcatctaaatttttttcaaagtttttaacttctttgcctttggtttgaatttcctcttgtagctcggagtagtttgatcgtctgaagccttcttctctcaactcgtcaaactcattctctgtccagcttgttctgttgctggtgaggaactgctttcttttggtctttgatgatggtaatgtacagatgggtttttggtgtggatgtcctttctgtttgttagctttccttctaacagacaggaccctcagctgcaggtctgttggagtttgcaagaggtccactctggaccctgcttgcctgggtatcagcagcagtggctgcagaacagcagattttcgtgaaccacgaatgctgctgtctgatcgttcctctggaatttttgtctcagaggagtacccagccgtgtgaggtgtcagtctgcccctactagggggtgcctcccagttaggctctgagaacttggttattcttcgatttatcacgagtgttaaacttggattatgttctgggaagtaataatctgcccggttaagaagagttttccggggaacagccggaatttggataaagaactgcagatgaatagttgcaaaagttgtcccatttgcagtcgtctcttcttgtcttgttccagtaattagagaagagacattcgacttgtcccagttcagtttgttagctgtgggtttgtcatacatagcttttcttatgttgagatatattccttcttggtggtgcaccattggtgctagctctggtgggtcactctccatgggcctctgaaggccacaatgcaggtatgtcagcaaccgctgtggtgactggaagtccaggagggcagcattgaggcaccagtgacctccgcactctattgtccctgtgtggactggatctgcgtagagccatgagggaggtcctgcgcgacggccctgtgcctgcaacaggtcctgagaaacagctccgcaggcgctcttggaagatacaaccctgtctggcagagcagcctcgcacttgcgttccaggcctgaatagcagccccacaggctgcccctggcacacat

SEQ ID NO: 137751 - DNA, 1069 bp, Homo sapiens; identical to SEQ ID NO: 128217

SEQ ID NO: 137752 - DNA, 3309 bp, Homo sapiens
ttacattttggcatgattttgcagcggctggtaccggttgttcctttccatgtttagcgcttccttcaggagctcttttagggcaggcctggtggtgacaaaatctctcagcatttgcttgtctgtaaagtattttatttctccttcccttatgaagcttagtttggctggatatgaaattctgggttgaaaattcttttctttaagaatgttgaatattggtccccactctcttctggctaggagagtttctgctgagagatccactgttagtctgatgggcttccatttgagggtaacctgacctttctctctggctgcccttaacattttttccttcatttcaactttggtgaatctgacaattatgtgtcttggagttgctcttctcgaggagtatctttgtagcgttctctgtatttcctgaatctgaatgttggcctgccttgccagattggggaagttctcctggataatatcctgcagagtgttttccaacttggttccattctccccgtcactttcgggtacaccaatcagatgcagatttggtttcatttcattcatttcatcttccatcactgataccctttcttccaattgatcgcatttgctcctgaggcttctgcattcttcacgtagttctcgagccttggctttcagctccatcagctcctttaagcacgtctttgtattggttattctagttatacattcgtctaaatttttttcaaagtttttaacttctttgcctttggtttgaatttcctcctgtagctcggtgtagtttgagcatctgaagccttctactctcaactcgtcaaagtcattctccatccagcttcgttccattgctggtgaggaactgcgttcctttggaggaggagaggtgctctgctttttagagtttccagtttttctgctctgttttttccccatctttgtggttttatctacttttggtctaggctctccaagcatggctggcagcacatttgtatttctgtccgaattttccattcgaaattggtcaacagctggaatgctacgtttgtcttgggttggccaacttcctgtattgttttctattgttatcccattgatttttgattggatccagtccaagaagatcatcactctggcaaatacacccggcttccatggctggacacagccagctccccagctgacaatgccatagaggacaaagggaccattttcatgtctacatactagtggcccaccagagtctccctggcagaaatctttctctccagatgctgcaaagccagcacagatcatcttctctgtgatccctcctggatgggcagaatagtaagtgtgttcacagacctctctttctaacacatgcacttgaatctgctgtaggcgacttgctaggccaccatctaatgaagaaacattcagagagagctcgatgatgaagtaagcagaaagtgttgttagaaatgtatttaagttcagatgtagctctgtaccaacatagctgaagtcattcagtttggcctgagctgatgtagaattctgctctgttgattccttcaggtttctgtcatggtccccagcaataatagtccaggagagtggattattcttcaattgcacacagtgggctgcggtcagaatccacactgggttgatgatggcacctccacattggtaatcgcctagaaacctcagacccacctgccatggccaacagtgggggcaggcttcttcccctcctgcgattcttctggaaagccactggggactaaatggagggatgccacagacatcatgcagaatagcttttacggtagatacaggattgttttggggaggtaactttggttcaaatttgtttaaagactctgagggcaaaatggtaaatctggccttgaagccttgtaaacgatttttaccatcacttttaaagtatatcaccgtcatgttactagaactgaatattgaagtgatggtcaacattccacaaagtttagctaacttgtgcttttcttcagaatcaccgtaaatcacaacagcatcataaatacagtttggactaaatttgacagcaaagtcctcaaatgtcaactttataatgtgcttctctggagcacaaatgaaccaatgacaccttgtgttactgggatacaaatcaggatacttggcagagtgatttgtcccttcttctaccaatatagccagactcccacaacctgaccctgcttctgacttctgtacagcagtaacggtaagctcaaagccactgccactgtcttctgtatcagaaacaaatggaaccatggcctcactggtctctgccagcaatggtgaaggcaatatttttccacagaccttaccctttcctctctggcttccattcacttcttggacagaactcagggcctttgttatataccttgagcccacttttgagaggggttggccccgatccaaacctgtgaacaggttttgagtgataaaatccatcaactcagacactttggagaaaatgccaagtgatgccttcacatggttgtttcttacgggaactgaacctccagcacaaccagctacccaggaagttatcccagcaagaatccagattccaccacctcttctacaaaccagtggtcctccagagtccccctggcaggcgtccattccccaatcagggaagccagcacacagcatggtccttcccaggggagggaggttcatgctcttgagcacagtattacacgctctgtcatccatgatgggaagttccatttcttgtaggacatttgaatattctgatgttttggaaatcttgccccatccactggataagcaaagaattcctggttcaactttatcatcgctgtcaggaagacagattggctgaacagcatttccaaacttgactttgtgttttagatacagcagtgcaatatcaggactcatatattcacggctgttgtattcaggatgggtaataatttttgagacaggaatattctgttcttgcttatccttctgaaagaggctgtactccccagaagtcacagttatattcttcagctgcttctcactgaggctgtccaggcagtgtgctgctgtaacaacccgatcttcttgaatcaagcttcctccacagaagtggtgctcatctgattttagggagacctgccatggatgtccagtcactgttgaatttctccaactactaattctagagaagaatctagatcccacggcaggttccttacttttcatgttgaccatgcgaattccacacttcagtcctgtgtagaagagcat

SEQ ID NO: 137753 - DNA, 1367 bp, Homo sapiens
ttacaatttggcatgtttttgcagtggctggtaccggttgttcctttccatgtttagtgcttccttcaggagctcttttagggcaggcctggtggtgacaaaatctctcagcatttgcttgtctgtaaagtattttatttctccttcacttatgaagcttagtttggctggatatgcaattctgggttgaaaattcttttctttaagaatgttgaatattggcccccactctcttctggcttgtagggtttctggcgagcgatcagctgttagtctgatgggcttccctttgagggtaacccgacctttctctctggctgcccttaacattttttccttcatttcaactttggtgaatctgacaattatgtgtcttggagttgctcttcttgaggagtatctttgtggtgttctctgtatttcctgaatctgaacgttggcctgccttgctagattggggaagttctcctggataatatcttgcagagtgttttccaacttggttccattctccctgtcactttcaggtacaccaatcagacgtagatttggtcttttcacatagtcccatatttcttggaggctttgctcatttctttttattcttttttctctaaacttcccttctcgcttcatttctttcgtttcatcttccatcactgataccctttcttccagttgatcgcatcggctcctgagtcttctgcattcttcacgtagttctcgagccttggctttcagctccatcagctcctttaagcacttctctgtattgattattctagttatacattcgtctaaatttttttcaaagtttttaacttctttgcctttggtttcaatttcctcctgtagctcggagtagtttgatcttctgaagccttcttctctcagctcgtcaaagtcattctccgtccagctttgttccgttgctggtgaggaactgcattcctttggaggaggagaggtgctctggtttttagagtttccagtttttctgctctgttttttccccatctttgtggttttatctacttttggtctttgatgatgggtgatttacagatggggtttttggtgtggatgtcctttctgtttgttagttttcctttgactccttgctggctagtcacggtcagaggcaaggtatgtgttgaatggatgacatgcgtccccaacgccttgcctggctgctgggaatgctgataaagtttaggcacgctggcaccatggactgggatctgacaaagttttcctgtgaaatttggagggcactgacatttgtcccttgaactgcactggccaccattcatacatggaagatggcaaattacttcttgctgccacaaatctgattcactatccat

SEQ ID NO: 137754 - DNA, 3988 bp, Homo sapiens
  misc_feature (1)...(3988): n = a,t,c or g
tcatttcatcttccatcgctgataccctttcttccagttgatcgcatcagctcctgaggcttctgcattcttcccgtagttctcgaaaaaggctttcagctccgtcagctcctttaagcaattctctgtattggttattctagttatacattcgtctaaatttttttcaaagtttttaacttctttgcctttggtttgaatttcctcctgtagctcgtagtttgagcatctgaagccttctactctcaactcgtcaaagtcattctccatccagcttcgttccatgncgcgcagctttcgcgcgatcggggaggtgggaagtatccggggctggggtggggggtacgccgcacagctccagtcgccgtcgcggcttccggtgctaggtggagggaagaaaggagggagccggggagtgggccagggcagcagccgggctgaagtcggcttggggagccagagggagcggagcggaacctgcggggcagaggcggcggccgcagcggcgcagctgatagcaggaacaggatcaagtcttccataccagggaccaggccaaaaccagactgctattgctcctacttgtgccccactgtccccatgtaaagcagctgctgtgatcatgggcaatatctttggaaaccttctcaagagcctgattgggaagaaggagatgcgcatcctgatggtgggcctggatgccgcaggaaagaccaccatcctatacaagctgaaactgggggagatcgtcaccaccatccctaccattgggttcaatgtggagacagtggagtataagaacatcagctttacagtgtggggatgtggggtggccagggacaaggattcgacccctcttggagacacttacttccagaacaacccaagggtttgatattttgtggtccgacagcaatggatcggggagcgagtaaatgaggccccgggaagagctgattgaagaatgctggcgcggagaccagcctccgggatgctgtactcccttttctcttggaaacaaaacagatctgcgtaatgctatgaacgctgctggggatccaagacaaactggggcgtgcattcccttcgtcaccgtaactggtacattccaggcaacctgtgccaccagggggaaccgggctgtacgaaggcctgcactggctggcaaattcggttcccaaacaggaagtcgaaagccggacggccctaacaaagcaccccaaccgaccctgaacatactactgtcaccctgcccccagttcttacccttactctccatgcaaggtttggcaagggcctggggtatcatgtccacattgcccagcagaaccctgcctcccctgacctccctccccttttcctgtccacctatatgaccaatccctaattgctgtcctgatgatgagtcattccaatttactggatttaaaacaaaaagttgttacggtttcatggggtggcccctctctctctctcacctctgggtttcgggaggtcgagtggggtattctctttgtttggcagtggttgctgtcctcttggcatctgagtcctttccctgtccccacaagcccttctactccctgtttgcctttcctttgccaccctctccctgttttacatggaaattgcacgggcctctctgtgtttgcgtgcatgtgtgcgcctgtatatacatgtatagagagatatatttgtgggggccggggggagcggggagggggtggagtgaagctcagggcttgcagccaggacactgcccactggagcctgtcatctgccccttccgtgttggtgagattaagggaagaaggtgggagggcattagtcaagccggactgccccagtctttgactggttaccctcctctctgcaggtaggtttttctggatgataggacagatgatggattcttcaccaccattttccttgtactcttctctccacccttcttagggctggaggatggcatttatctctagatgactgttcccaaggagatgccactctgctctgccttactgttgggaaggagagaggaacccactcactcttatcagcttagagtgttcaactgatccttccccaccatcttcagatctgttcctctggagcttgactgaggggtgggaatgacaagtccatggtgtgtgttatggaactcagggcattggggaaaggaagacgaaggcatgaggttttccatcttcattctcttttgttattaggagaaggtgaggcatgggccaatcccattcctgccttccagtgccccaccacccttctgatcttaggggttggatgggtcatctgtccttggtcagaattttctcaccctagtactcctactggcctgaccagggctgactgggtattctaatgaggagctgggaagtggggtgacatagctgaccttagtatcaacccccctcttctccaactcttgttttctagtccaggatatgctaaaggacgaagattttctattgtttccaggccctcagaccatccttgctgtcccttcaccctccatgcccctgccatcctcactcacttctcataaatggatctgggggttagagtggaggaaataaaatcctgaagtggttgtcagtgcttgtgggatgcagtggtcttcaggattctccccgcattattatgtagttgttcagaagctgttgctactgcgtctctctgtctgcagggggcacttgttcctgaggtcctcgcctgggtcctgacttctgtagtttctgtgaagacgtggctgtcctgtgggctcctgtgtgtgctggctgcgccctgagctccgagacagctgcccataacctgctaaggtcagggcccagggccctccaacaagcaatggctgaagggaccccttcccagtaagggctgtcccaagccccactccatgggggccaaggtttcctggccacttttgttgatagcagatggatcaatattagtaaccccatccaagattgaactgtgaaagagaggttccagggggtaatctccctcagtgccagttaacttagtgatgtgttacccaggatgcagcaggtgtgtgcaggtatcttgctctctaggcctgtgtgtgtgtgtgagtgtgtgtgtatatgggtgtgggtgtgtttgtgtgtggtggttgtggggggggtgttggaggttctatttcatttaaaaatgtattcatttccctggccccacagatgcttccctccatactttttatttgctctgtttcctcagatttattttgtcttgccccattgcctctccttccttgaactctttccttttcaatctcaactcattcacctgctgttgctcatttgccctttttccattgtattttttcctacttaggattttccactctatctttgtggttcatgaggactttgcctcttctcctgcctcattccctggactttctctagtttagatgtccagtcctaaaataggttttcctcacttcagggcctcacccctcaccttgtttttttgggggctccagggacccaatctggggctggaaatgttagggaggttgccttggtgctgccccagatctgtcccagccagggggcaagttaagtgaatcttggtagtaatccctgggctggctaagcccttgggcaagggggtgggtcctttctacattcccattcacttaacagctcttttgggattgggtgtttcattccatttctgcccactccctctccatctccgtctctggtaggtttaaattttatgctttccctgattccagctttctgcttcctgaggactcccgctccccccgaccccaaagtttgtctgtggtgttatagtggtaactgcagttcctcctctggaatgtagactggtatatgtttaataactcaccttctctatccttgctcaaaatgtgggataacgcgatgactgtgaccctgggttggaaattaaacttggttttatgcagctttaaaaaaaa

SEQ ID NO: 137755 - DNA, 404 bp, Homo sapiens; identical to SEQ ID NO: 114867
  misc_feature (1)...(404): n = a,t,c or g

SEQ ID NO: 137756 - DNA, 381 bp, Homo sapiens; identical to SEQ ID NO: 127041

SEQ ID NO: 137757 - DNA, 349 bp, Homo sapiens
  misc_feature (1)...(349): n = a,t,c or g
cggacttaccctccactgtaagagttacccaaagtgtctgtgatggtccaggaggcttccgaggccatcaggcagcatcagtcttcagccactaagctgagaagatctgggaaggagtcagtcagagagccttggggcagagttccaggggctctgggaacagctcccgggcaagttggacagtccgatttccagtggggtcccacacagatgggacacggcctaggaggaatcctgggctgcaggcattccttggcccagtggccagatttctagcacttgaagcaagatcctgggggaggaggtcctgaaggaatgcctggccactgtggcttangtgttntgaagt

SEQ ID NO: 137758 - DNA, 462 bp, Homo sapiens; identical to SEQ ID NO: 124296

SEQ ID NO: 137759 - DNA, 285 bp, Homo sapiens
atgatcataaggtaaagttccacaataggctgtcttcatgctgaagagcaaagaagtcattccaagtcccaaaatctcaaaagtagggaagccaaaagtacagccttcagtctgtggctgatggcccaaaagcccctggcaaatcactggtgttaagtttgaaagtctgacagccactgccagagcccctggaactctggcccgaggctctctgactgactccttcccagatcttcttggcttagtggctgaagactgatgctgcctgatcgcctcggaagcccc

SEQ ID NO: 137760 - DNA, 410 bp, Homo sapiens
ttggtccaaattgccaggagtgcaccaacacgtacaagactcttaatgcaaaccaggaacagatggcctatcctgacagaaaaattacacacagaggccccttcctctgcacggcctcttggagctggaagtaacttgtaggtgttggtcctggcagccacttctagagcccctggaactccggcccaaggctctctgactgactccttcccagatcgtcttggcttagcggctgaagactgacgctgcccaatcgcctcagaagccccccttttctcacagggagagtatctcctggtcccaagctgatcccaacttcttccaccatgggaagacaaatagaatgtaccttctttgaggaacaggccctcaccagacaccaaatctgctggtgcctttgtcttggacat

SEQ ID NO: 137761 - DNA, 765 bp, Homo sapiens
tcaggacatactctgagaaacattttcagatgggtctttaaaggcattgagaaaagctgagagatagagcaaggaaagcaggtgctgcacgttgctgcctttatcttcctgcacaggagtaaatactttcctggcagtcactcccagagcccctggaattccggcccaaggctctctgtctgactccttcccagatcttcttggcttagcgactgaagactgatgctgcccgatcgcctcggaagccccataattatggaagccaaggagtcccacaatctgccatctgaaagctggagaaactggagagctagtattgtaattcagtctgaagggaaccaatggtgtaactctcagtccaaggccaaagacctgagaatgggggcaaggtggagttgggggcactggtgtaaatccctgagtctgaaggtctgagaacctgaagttctgatgtcctgcctgcaactgacctgagtattctctgtattgtggctctgcatggtatggcattttcccctcctcttgggaactgtgaataattaactctcgtttaaatgcaattgtctcctgatctattggcttcactatatcaaaatccttggcaataacttttccttgtctctttctctcatatttcccatacagtgcatccgaaaatccaatccattttacctctgaaatttgtgctgcatacaaccactttttaccaagaggatttgctgataaatggcaacagagcaggccccagttgagcagctgtatcat

SEQ ID NO: 137762 - DNA, 411 bp, Homo sapiens; identical to SEQ ID NO: 114508

SEQ ID NO: 137763 - DNA, 2664 bp, Homo sapiens
tcacatttgtagttgtctctctccagtatgaattttcttatgtgtagtaaggttagaggagcacttacaagctttgccacattcttcacatttgtagaatatctctccagtatgaattctcctatgtgtagtaaggattgaggactggttgaaggctttgccacattcttcacatttgtagggtctctctccagtatgaattttcttatgtgtagtaaggttagaggagtacttaaaagctttgccacattcttcacatttgtagggtttctctccagtatgaattatcttatgcgtagtaaggtctgaagaccgcttgaaggctttgccacattcttcacatttgtagggtttctctccagtatgaattctcttatgtgtagtaagggtagaggagtacttaaaggctttgccacattcttcacatttgtagggtttgtcttcagtatgaattcttttatgtgtagtaagggtataggagtacttaaaggctttgtcacattcttcacatttgtagggtttttctccagtatgaattatcttatgtgtagtaagggttgaggaccggttgaaggctttgccacattcttcacatttgtagggtttcttttccgtatgaattatctcatgtttactaagggttgaggatgacataaaggctttgccacatttatcacacttgtagggtttctctccagtatgatttctcttatgtgtagtaagagtggaggagtgcttaaaggctttgccacattcttcacatttgtagggtttctctccagtatgaattttcttatgtctagtaaggctacaagagtggttaaaggctttgccacattcttcacatttgtagggtttccctccagtatgaatttttttctctttttcactataacgaaagaagagacgataacgaccagcaccaaattttacccgtgaccagtctttatttttcccagagcctaacgacttgccatgacggaatgccggtgatgatggattgaccgtgatatgctcctcaatcactttatggactaccgccaataactttgtggcggcttttctctgataattttcaggatcttttccctttaatgtctcgacttcggcaactaaagcgtcgtaggtttcctgaaaacagggatgagcatatagcgcccaaccattaacctggatgttgacggcgaaatttgaaatcactaaaacgtcggctgcgaagatatcgccagagctgtgcgtttccgtgccaatatgctcgatgatcttggccgttgcgttaagagtgcatcgtcggccattttctcgactctttacaactctctgtaagtgcctagttgcagccgtgccacgtgtgctcgaaccaacgactttaatcggtttgtcagaatgaggtgaataatcctcgaacccgctttcacgaccaccccttcctaccccagttaccccatgccccctcctccgcctttctctgcttcgggcttgctgctgttgtctctttctccctctccgcttcttctcctgtcctctgttatgttttttgttgtgtttttttttttctgtttgttctccagcacacaagaacttcaaaatgcctaagccacagtggtcaggcattcctacaggaccgcctccctcaggatcttgcttcaagtgccagaaatctggccactgggccaaggaatgcctgcagcccaggattcctcctaagccatgtcccatctgtgtgggaccccactgggaatcagactgtccagctcgcctggcagccactcctagagcccctggaactctagcccaaggctctctgactgactccttcccagatattcttggcttagcggctgaagactgacactgcctaatcacctcagaagcctccgcccaacgaggtgtaccgcgatttacgcgcgggggcggcctccggttgggattactcttcccgttggcggcgtgaacttggcgttgatgtagtcctcgactgcaccggcgtatatggctcccgcgagcatggcgaagcgcatattgccgccggggccaaaaaagtgctcttttcacatcctggcagtaacgattgcccgggctggcgtgaatggcttcaaccatcagcgtgacgccttcttttttcagcatctggcccgcttgcccccgggcgctaaagccgccgtcgctgctcagggtgtagtttttgttgtccagcacattaagcgtaaacacctgatccgccatctctttcgggcggttaaaggtggtcactttcaccgtctcgttctgacgtcccatcaggcgatcccagcccgcaccgaaaatcgggaacgtgtttttgctcactgcaatatcgaggtcgagatcgtccaccgttttaccaagcaccagacgcgaacgaatcaactggatctcggcgtccgatgcaggcggtttgttggctaatgccgaaccaatgtcctgcactaacgaattgccgctgttttgctcgatttgtaccagtgcgtcggcactataaatcggcgtggcgaagaaggtgtaaaccacggcacagagggcgaatacggtggtgatgccaatcacccaccagcgcgcttcaatgacggtgccgaccaggcgaccaatatcgatttcatcactgcccgttaccggagcggcatgttgttttactttttctgtcat

SEQ ID NO: 137764 - DNA, 433 bp, Homo sapiens; identical to SEQ ID NO: 124304

SEQ ID NO: 137765 - DNA, 606 bp, Homo sapiens
atgagaacacatggacccaaggacgggaacatcacacatcagggcctgttggaggacacatgtgacatttggtgccaaagacccgggacaggaggactccttcaggagactggccccctgtccttgccctcattctgtgaggagatccacctacaacatcaggtcctcagaccaagcagcccaaggaatatctcaccaatttcaaatctggctgctccttgcaaggccacagcaagtccctcagcctctgctcccccaccctataatccttctatcacttccactcctcacacccggtctggcttacagtttcgttccgcgactagccctcccccacctgcccgacaatttcctcttaaagaggaggctggagctaaaagcacagtcaagggatcttgcttcaagtgccagaaatctggccactgggccaaggaatgcctgcatcccgggattcctcctaagccgtgtcccatctgtgtggaaccccactggaaatcggatggtccaacttgcctggcagccactcccagagcccctggaattctggcccaaggctctctgactgactcctttccagatcttcttggcttagtggctgaagactga

SEQ ID NO: 137766 - DNA, 388 bp, Homo sapiens
atcactactccagtgcggtggaattcgggagagcagagcacgtgtgtttttacgagaattatgctgagataggtaacagatgaggatgaaatttgggcttgactgaagtgggggggtgtgtctgtgaagccttgcggaagtacagcccagggcttccgaggcgatccggcagcatcagtcttcagccgctaagccaagaagatctgggaaggagtcaatcagagagccttgtgccagagttccaggggctgtggaagtggctgccaggcagatgcaccccaagtcaataatcacattcagagagataaatggggagtacactggggctgtggattttcccaggctaggagtccgtgcttctgaggaaacagcgctcagagagctgaag

SEQ ID NO: 137767 - DNA, 528 bp, Homo sapiens
ccaggagtaagaggagcccagggtggtccctctatccccaggcagtgtgaagagtctgctattggtcctaaatttgcttggatcatctcttcctttcactggaagcaaggcatgttcaacatggaggctccttcttcccttttctttgtcaacatgtgtgcagtaaagaagcagacaacctggggccggccagacagaggattcatctggcagccactcccagagcccctggaactctagcccaaggctctctgactgactccttcccagatcttctcggcttagcagctgaagactgacactgcacgatcgcctcggaagccccctagaccattcacggacgccgagcttcgcgtaactctcacagcggaaggtaagcctgtccccttcttaatcaatacggaggctacccactccacgttaccttcttttcaagggcctgtttcctttgccttcataactgttgtgggtgttgacggccaggcttctaaacctcttaaaactccccaactcgaattccaccacact

SEQ ID NO: 137768 - DNA, 1554 bp, Homo sapiens
tcagggtatcaaaggaacttccttccttcctttcttccttccttccttctttccttccttccttccttccttccttccttccttccttccttctttccctccttctctcttccttttcttcttctctctcttccaccctgaagtcacttcttcctttaatcctaaagtaaaccaatagaaattacttggtgaagaacctggtatagtatattcagggagagaatgagtggctccagggtgtctagactgggatgtttctgacttgttctgtagtgccctaccttctataaatacacctgtgagtgagaacatgcggtgtttggttttttgttcttggggtagtttgctgagaacgatgatttccagcttcatccatgtcccttgggcagtatggccattttcatgatattttcttcccatccatgaggatggaatgttcttccatttgtttgtatcctcttttattttgttgagcagtggtttgtagttctccttgaagagttccttcacatcccttgtaagttggattcctaggtattttattctctttgaagcaattgtaaatgggagttcactcatgatttggctctctgtttgtctgttattggtgtataagaatgcttgtgatttttgcacattgattttgtatcctgagactttgctgaagttgcttatcagcttaaggagattttgggctgagacagtggggttttctaaatatacaatcatgtcatctgcaaacagggacaatttgacttcctcttttcctaattgaataccctttatttctttctcctgcctgattgccctggccagaacttccaacactatgttgcataggagtggtgagagagggcatctctgtcttgtgccagttttcaaagggaatgcttccagtttttgcccattcagtatgatattggctgtgggtttgtcataaatagctcttattattttgagatacatcccatcaatacctaatttactgagagtttttagcatgaaaggcagatgaattttgtcaaaggccttttcttcatctattgagataatcatgtggcttttgtctttggttctgtttatatgctggattacgtttattgattttcgtatgttgaaccagccttgcatccctgggatgaagccaacttgatcatggtggataaactttttgatgtgcttctggatttggtttgccagtattttattgagaattttcacagcgatgttcatcagggatattggtctaaaattgtcttttttggttgtgtctctgccaggctttggtatcaggataatgctggcctcataaaatgagttagggaggattccctctttttctattgattggaatattttcagaaggaatggtaccagctcctcattgtacctctggtagaatttggctctgaatccgtctggtcctggactttttttggttggtaggctattaattattgcctcaatttcagagcctgttattggtctgttcagggattcaagttcttcttggtttagtcttgggagggtgtatgtgtcgaggaatttttccat

SEQ ID NO: 137769 - DNA, 750 bp, Homo sapiens
ggcgcccagccactccccaccgctaccatggccgaagacgcagacatgcgcaatgagctggaggagatgcagatgcatttgtctacccgttatccttagtgcctagagcagagtagaggctcaataaacactaggaaggaaggagggaaggaaggaaggatggaaggaaggaaggaaggaaggaaggaaggaaggaaggaaggaaggaaggaaggaaggaaggaagggaaaaactgttgtcattgctgtcttacaaaggagaacggaggcacagaacagtcaggacacttgcctgaggccccacagttagggaatgaaatcaccagcattccagcccagagtctgtctccacagtctgcgctgtcaaggactcctgaggccaccctgggccagccctgtccatactacatcctgactttgccactaaattgtcactcaccctctcttttgcataggcttaaatcaagtgatgcttacaaaaaagcctggggcaataatcaggacggagtggtggccagccagcctgctcgtgtagtggacgaacgggagcagatttctaaaacttgctctttggatcccagggtaacaaatgatgcccgagaaaatgaaatggatgaaaacctagagcaggtgagcggcatcatcgggaacctccgtcacatggccctggatatgggcaatgagatcgatacacagaatcgccagatcgacaggatcatggagaaggtgagcacgtggcagtcagcaagt

SEQ ID NO: 137770 - DNA, 715 bp, Homo sapiens
tttttttttttttttggagatatatattcacgaagctttattgcagctgtttcccttacccagttgaagtggccagtcattttaatttgcagttctatttacattcccaaggtaaccacgttcagtaactctctagaggctaagctgttaaaatttccatttttatacaaatagcaaagatatttctttctctttctttctttctttctttctttctttctttctttctttctttctttcttttctttctctctttccttccttccttccctccttccttccttcctttctttctttttgtttgagacagagtttcgctcttgaccccgaggctgggagtgcagtggcctgatcctggctcactgcaacctcggcctcccggattcaagcgattctactgcctcagcctcccgagtagctgagactacaggcatgagccaccatgcctagctattttttcttttctctttctttccttccttccttccttccttccttccttccttccttccttccttccttccttccttctttccttctttccttcttttgtagagaaaaggtcttgctatgttgtgcaggctggtcttgaactcctggattgaagccgtcctcctgccttggcctcctgatgtgctgggattacaggcatgagccactgctcccggcctatttctttccttataggattataggatggtcccgcctatgatat

SEQ ID NO: 137771 - DNA, 507 bp, Homo sapiens
gggaataggttccagcagctcaggctccttcccattggttctcacaaagtgtgcttctctgggtggagcaggctggcgctttagttgaacccaggtacctttctctttggcttctttctttttctgatcattttccttcacacgtttcaggaagctatctcggctcttagagtgcttaatgtgctcaatacgcacattaattctcttggcaagaatcttgcccttaacttgtttgtttacaacaatgccaacagcatgctgggtaacattgtagactcttccagttttgccatggtaacacttgtggggcattcctttttgaacagtacccattcccttgatgtctacaatatcacctttcttatagattcgcatatatgtggccaaaggaacaactccatgttttctaaaaggcctagagaacatatatcgggtgcctctcctctttccctttgtgttcgtcattttggcgaattactggaagatggcggttcccggacgcgtggg

SEQ ID NO: 137772 - DNA, 1969 bp, Homo sapiens
atgaaagaaggaaggaaggaaggaaggaaggaaggaaggaaggaaggaaggaaggaaggaaggaaggaaggaaggaaggaaggaaaaagaaaaagaaagaaagaaagaaagaaagaaagaaagaaagaaagaaagaaagaaagagaaagaaagaaagaaagggaaagaaagaaagagatttactacatcttgctatgccgtacgttgatcaggaaaaagacaaagacacctaccatcacgaattctgttcagcaacaaactgaagaatctagacagtgcagtaaggtgcatcgccagtgcaagaaaatgcgagaagcctctgtttctgttgcaagcaacacctggacctccaaggaaaatgagcactttcttgctaggaacagtctcaaacattttcaaggctggagaggctctcctactcgtgcccgccgccttcttcctcccggcgaggattccagggccacaaccagggcagctgcacgccaggccggcctgggtagccgggatgacaccagggtttgccaacgccaaacagggcgcagactccccggcgcgctccggactctccactcgcctaaacctgctctcaagcccccagatatacacacacagccgcggctggacatgcacacccagtgccggctccgggcgcgcacacatgcagggccacctccccgccttccccacccccatctgcttctgtcaaatgagaaagtcaccgaggagaacccaaacactccagccgctgagagccccctttggcacttggcagcacgcggcggcgggctcctcggctcaacttcgaggagtctccgcgacgcaacttttggggacgctttgcatttaagagagaacgaccgaggaggaggagcgctctgcccggccgccgctacctgcggggagctcaccagcaaacgccactgcagacgaaggacccaaagaaccgggtctccgcgggcagccaacattgatttcctccgggccgagggcgagggcccgggaggcctgccggctgcagccgcggcagggcgagagcatgtccaaagccggtggaccacgtcaagcggcccatgaacgccttcatggtgtggtcgcgggctcagcggcgcaagatggcccaggagaaccccccaaatgcacaactcggagatcagcaagcgcttgggcgccgagtggaaactgctcacggagtcggagaagcggccgtttcatcgacgaggccaagcgtctacgcgccatgcacatgaaggagcaccccgactacaagtaccggccgcggcgcaagcccaagacgctgctcaagaaggacaagttcgccttcccggtgccctacggcctgggcggcgtggcggacgccgagcaccctgcgctcaaggcgggcgccgggctgcacgcgggggcgggcggcggcctggtgcctgagtcgctgctcgccaatcccgagaaggcggccgcggccgccgccgctgccgccgcacgcgtcttcttcccgcagtcggccgctgccgccgccgctgccgccgccgccgccgccgcgggcagcccctactcgctgctcgacctgggctccaaaatggcagagatctcgtcgtcctcgtccggcctcccagtgcttaatatgcccaatatgcatattaattctcttggcaagaatcttgcccttaacttgtttgtttacaatgatgccaacagcatgctagatctttgctatgatggtgttgatggcaagggtcccatctgtttctgtgccactcagggatacgaggatattttcaaggctggctatggctctgtggtggactattacaatgatggctctgatttaaccacacctttagaaattgccacagtcatcccaaccttcagcaaccacccgctgatgagtcagcgtccatcaacatggaggcaaaaccctccactagcaaaaagattaccactcactgaagactcagatggtgatgaccattag

SEQ ID NO: 137773 - DNA, 495 bp, Homo sapiens
gcggccgcagcggcgtccgtacctccacccaccgggagccccttgaagcatcccggaggggcttctggcgctgcaggagccccgatcggggagccacagcatccgggagccgtggtgtctgtgcgtgcgtggagcctgtgctcatgacataggaagccgaacagaaggagcgtcctcaaatcctttcctacagtcaccaaacccacgctctgttaaaatgacatttcgtggctcctactttgtttccccggagagcaatgagttttctatcaggcctgatttagtttgacaaaagtcaaaaagaaaaactggatttgtccctctgcgagttcagtcagatcgctgggaaaacagaaatgacaaaacaataataacagaaatagaaccaggcatttgatacataattaccatcaccacggctgtcaagctttctggaattacgttcctccagtaactggtgatgatgcttgcaggaggcaaaatgcaatgcagttt

SEQ ID NO: 137774 - DNA, 900 bp, Homo sapiens
atggctctgaagatgaggagagaagcgggatgggcagtttgtgtggtgaggaggctggctgcagctccggccgccgccgccgccgccgccgcctccttcttgcatgacacagcagaaccgcagctgctgcagcaatttcaagccatccgcccaggaagcgccgcaaccgggactcgggagggcccaggggcacgcgaacaaaatgaggctcaagctgaccaggccgagccggaggaacgctggggcttggcagcagaagggatgggaccagagagaagggtgtggaggagaccccacacaggctccacgcacgcacagacaccacggctcccggatgctgtggctccccgatcggggctcctgcagcgccagaagcccctccgggatgcttcgaggggctcccggtgggtggagggcgtgaagaaggcgtcccctccgctgccggcggagctgatcggctggctagtcaatttccccttagcacgccccgtgcgcccaccctcgctcagcccggggccccctcgccgtcccccggaaggggtctgcggttcctggccaggacgttcggaaggcgagcgggggaaggctaaaaacacagctgaaagcaccccaagacaaaacttacacagaaaatacacaataatagtaacacattatcaaagaaataggaaggggcaaaatatcagtttttcacttgtttgcgaatttcatccttcactggccgattggacgactgtgacagcgttaacttggacatcccctaaagataacagcctcacggaagaatcatggttgcgggaaggaaatgtccatcggggcatggatgagtacgtcagggcacagtcattcctgattttgatgaccttggagaacagtggtggctctgtagtttctaaatga

SEQ ID NO: 137775 - DNA, 2730 bp, Homo sapiens
tcatttccaaccctctgaggcccctttgtggatggcagcaggggcttcagcactgcccccgctctcggctctgctggtgctcgtaccccggcacctgcgcagagaggtcagctccctggctacggggcagccttcgtcttcactgcccgcttggctaacagcttgacgcagcccaccactggcccaggccttggagggatgtttgctttccaggggcctggcaggacgcaaggcaggccgggtacccgtgcaggtggctttgtttctgggcacgtatgtcaccgccttcatctctttcaaagccacccgtgggcttctggtcatattgtgatgaccctcgaaagtgacggatgccgtgaggccgtgggaacaggagctaggaggctgcaggccggccgccttcagtccacagaagccagatttgaggtgggttccggatgtcatgggtgccctggacaggtggatggggtggtctgagggctgacccggaggcttctgagcactgacatggtcttgccagtgtccactgatgatgcgtctgctgctctgtggctcacggggacaggaggaggtgggagcaggagccatctttgcccactcattgttggaggacggccccgttatgggctgttcccgagaggccgcggggtcactggtccggctcaggctctgccaaggagcctccttggggtttctggcgcctgcactcagggacggcaccacctgcgatggaggctgctgtgcagtgtagagtgtggtggaaactccctgcggccggctggggctcacctcagcttcccgagcacagtctgtgatggcactggcgtggcctggcctctccaggaccaaatctcttactcctgaatgctgagtgggcttccactgttgaatactgatacgtagcatccatggcatgcaggtgccattatctagtgaaccaaccctcactgccatgaccattactatcaccatcaccaccactgccaccattgccatcaccatcaccaccactgccaccaccatcactatcaccaccaccaccactgccgtgaccatcactatcaccatcaccaccactgccaccactgccatcaccatcaccaccactgtcaccaccatcactatcaccatcactatcaccaccactgccatgaccatcactatcaccaccaccaccactgccatgaccatcactatcactatcaccaccaccactgccatgaccatcactatcaccatcaccaccactgccatgaccatcactatcactatcaccaccactgccatgaccatcactatcaccatcaccaccactgccatgaccatcactatcaccatcaccaccactgccatgaccatcactatcaccatcaccaccactgccatgaccatcactatcactatcaccaccactgccatcaccatcgctatcaccatcaccaccactgccaccattgccatcaccaccaccatcacatcaccatcaccatcaccaccattgccatcaccatcactatcaccaccaccaccactgccatcaccatcactatcaccaccaccaccactgccatcaccatcactatcactatcactgccatcaccatcactattaccatcaccaccactgccaccactgccatcaccatcactatcaccatcaccaccactgccatgaccatcactatcaccaccactgccaccactgccatcaccatcactatcaccatcaccaccactaccatgaccatcattatcaccaccaccaccactgccaccactgccatcaccatcaccaccatcactgatcaccatcaccatcaccttcattgccatcaccattactatcaccatcaccaccaccaccatcaccatcactatcaccatcaccatcaccatcaccttcattgccatcaccattactatcaccatcaccaccaccaccatcaccatcactatcaccaccactgccaccactgctatcaccatcactatcaccaccatcactaccactgccatcaccactatcaccatcaccatcactaccacccctatcactaccaccagcaccaccatcactaccacccccatcactaccaccatcactactaccactgtcaccaccaccacgactaccaccacccccatcactgccatcaccaccaccactaccaccaacaccactactaccccatcaccatcatcaccaccaccatcaccactatcactaccatcatcatcaccgtcaccaccaccaccttcaccaccaccaccaataccactgcccccaccaccacccccgtcactgccatcaccaccaccaccactactactaccaccatcaccactaccacccccatcaccatcaccactatcactaacatcaccaccaccactgtcaccaccactgtcatcatcaccaccaccttcaccactactatccacccctatcaccatcaccaccaccaccaccctgtcactatcactaccaccatcactactgccaccatcatcaccacgaccacctccatcaccagtattaccaccatcaccaccaccattgttaccactatcattatcaccaccaccgccgccacacatcaccactatcacccctattaccatcactaccatcaccaccatcatcaccaccacacccatagctactaccattaccaccatcatcaccaccaccactgctttcactatcaccaccaccactaccatcaccat

SEQ ID NO: 137776 - DNA, 4685 bp, Homo sapiens
tcacccaggtgaggctgcatgctgtcctgtcatcggaagatggcaggaaatgaccagggccaccttcgtgcggggtgacccatcgggcacaatgtgccaggatcccagaaccatctctccttttgaggcctgttcacagtttctcggggccctgggtggctctgagctggggactgtggctgagctgttctgcatcaggacacagagggtcccaagagtgtttatctctcctaaatgctttcggcaaagctgatcactcccttctttgctgttggggttctggggtttggccttctcccagggcgccaacgtcttgtcgtcgtccgcgctgtccaccagggccttgtcagcgggcatgtaccaggcagcgctgtgctctgccatcagcgagtccaggtcaatggtgctcatggcgctcttgaccgcctcggagcagcagctgcccagctcgctgtcgccattctgcgcccctgaggccccgacggcgcactcacccttcttgccacccttcagccccagaggctggtcctcggagatgctgaactgctgcctctgtagctggatctgcgcctgaaggatctccagggggtggatctcgtcgggtggcggggcgccgctgctgctcgtcggggtgcggacctgctccaggcccggagtgcccggatggcccgggcccccaccgccgccgtagctgtcaggggtcgaggtagagttagacatgatgcccaggccgagggcgggcgggggcgccttcggtccgtgttccccggcgcctaccccacggggagggagtttgggcgagccggtcaccaggggactcctgctcgctttaactagtgcctgggggttgtcagagctggacgacacctcgtcctcattggcgtagctcgtgctcacctcgtccgaggcgaactcacccacgtttggcgaactactgtccgacttggccccgccgtccagggacccaatgaggtccggctgatcccccaggagcaactcagcccccttcccccaggatggcgacgtgagcgccttttcgtggggcgtcggtgccccgcgcgtctcgcctgcggagcttcccccgacggctgcgcctgacgcttgctgctgccctgggctcaccccaggtgcgcccccgctgtccggagccgccgagtacttgtcaaagaaggtgccagggctcacgtgaccactgtccctttttctgcgaccccgtccccggccgccgcccccggagaccggcttgccgtcattccccgacgtggattccagggtgtagttgggggagaggctggtgccgtccccctgggctggagggttgggcggccccgaggctttggagccgctgctactggtcccggacgggcctccgggtcctggggccccaggagcagtccctcctgggaagtaatccgagcccgggttgccggccactgccgcgccgtcggtctcgttctggctcagtttcctcttgccctctggcgggttcttcttgttgaaggtcacgttgaggttgggggccccgaggctggcgatcatgttctggcaagcggtggagagcgcagccaggcagctctggccgaacaggttgtccttggagctgggcttgttgaaggagcccagcgagagcgcgcccaatttactggccgaggtgcgctggctgggctggaaatcaggctgcggcgggtaggcacccccgccaccgccgccaccagagctgccaccgccccctcccgcgctggggggcgagttcacgcctggaccgctgtgcggcgtggactgccggccggctgcaccaaacggaaagcccggctggcccccgagcgcagacgtagcaaagtccggcggcgggggccggcgctccgaagcagcgctggggagccccacgcccgccccgggcgactgcagctgacccaggcctcccagactgcccccgaactgcaggcccggtgaaggcagcgcgggcacgtggccctctccgggcatcctcatcggctcctgcagagggccccggaacagcacccccgagccaccaggcggaggagggggcgccaggctggggtcgtgcgggccacagtcagcgggcagacccgagccgcccatcctacggggcagcaggtctccgggcggcggatgcggacctgagaaccacgcgctctcttgcgccaagtgcggcgcctgctgctcgaaggtgcccagacgcccggcgcccgtgctgccgccttcgcgctcaaagttcggctgggccaagccgcccaccgggccgccatgcaccaggccgccctggcccacgtccccggggtggcctagctgagccaggttgggctggcgcagccgctgctgctgattccgcgacgccatctgcttaatcatgagggccgcgttttggcgctgctgctgctgctgctgttgctgttgctgttgctgctgctgctgctgctgttgctgctgctgctgctgctgctgctgctgttgcagggactggtggtccggggccggatgctgcaggggcggccccgaagggaagctgtcgggcacaggcggtgtgaactcgccgggtaggcctgggtaggcggaaggggagaggtgattatccagagcgccgttgtgcatgctgccgttccacgaagcgcagcggtccactcccgcgctgcccggaaagtcgaagcgcggcctcttggccacgttcatgtaggggggcgcgtcgaaatgctgcagccgctggttgggcgcctgctgcggaggaggatgctgcatgctgaaaacaggctcggaataagggtgcatgctccggttctccagccggtggatgggatactcgaattgcgcgtgctggctgggcagcatggggcctccgtcctgcaggccgccgctgggcgtgcccgcctcgccctgctggggccgagggagcgcaggcgggcacgaattttgtcggactagaagcccgggtggcggcggcggctgctgctgtggcggctgctgcgggggctgctgctgagggggtggcggggcctgctggggaggctgcattaacgggtgcctggagcccactgagggctccagacccacaggcatctttctggccccactgaacctctcaaagaacacaccatgctgctgctgctgctgctggggctgctgctgctgctggggctgctgctgcggtggctgggcgtgcattttggacaagcccaccatgcccgcagctctgggcatggccgaggcgcccgggaaagcgcccccaggaacctggcgacccgctgcataatgaggcagctgcccttcggagtcagagggcgaaaacatgtcaaaatgtcccgagggcgcctcgcccgggtaattgtattccagcgagtcgacggctccttggttcgtcaccctccgtggctccagactgtgggaatcggagccgctggaggacggcaggccgtggaaggaggcggctcggttagggctctggtccagcggcaggcatggggccggcacggcgtggctggaggcacctgaactgtggaagtccgggaggttccccggtcgctgcgggccgaagctctcaggcccctggctctccgccatgtgctcatagccctcggcgaagggcggctggctgcccaggcctccggctgcgccgccgtagccgagcaggcgacccccgtgcaggcacgaggccccggggtccgggccaccgaagttgcccccaaagtgggggtgatgctggtggggatgatgacttcccgggtggccgtggtgaggctgctggccgccaaagaagccgtgcacaggctgcgcttgcagcccccctgcgtgcaactccgagtggccgcgcgcgtggaagccgtagggctccatgttcatgcccaagatcgggggttcgcccagcgcgctcatagcaggatccacagggccagggggccccccagtgtggaaagccggggccttaaagtgggtgttcatgctcagtccggtctcgttaaagttcctctcgccctggccagcgttcctgctgttgacctggggctcgaattggtccagcccaaacataccttcaaagccgcggctggcgccgggcaccgacagagcggtccctccccccgccccccggagtccccgcgccccgcagcccgagcctccaccgagcacgatccgctcgcacaatccccgtaggctccgggcgagcggctgctgcttcttcagcgggtcggaggactggaggctccgctcggcatcgccggtgccggcccccgagccgaggacgcagagggggtccgccgcctgccgcttctgttctccgccgttgggtgtctgagttcgccggagtctccgcgcaccgttgcaggcgcgggagggcagcgagacgaggggttgggtcgctccaaggctccggttccctgcctccgcgctgaggtgcttcgcgagtccctctcggaccttgaccttgggccgctgggggaagcctgcagagggtttgacagaagcgcacagcgcaatgtcaaggctgctgcagaggggtcttgaactagggtcttccatttctctgaacttgatttttctcctctgggcctgcaagttctgcagcccttctgagagctgaaggcaaaacccttgccccgagagccttgtcttcttctcgatgaccgtccctgtgccctcattgtccccacttggagacttggtctcaattctcc

SEQ ID NO: 137777 - DNA, 7568 bp, Homo sapiens
ttttttttttttttcaccattaacgtcatatttattgttatttaactgctcaggaaaacatatacaggtatatacaatatgcaggaatacagaagactgcactttacatatttttttaaaaaagaaagaaaaaaataacactcaatttcatgagctattgtcacagtcttccaaccaagcatttcagaaatgaatttcttttaagagtcaaaaaagattacaggattgcctaacacacagcagagttaagttttcatattttacatgtgcaataacattttcgttttctttcccaaagagtttgctatgcagtactgattaccagtgttcggagtctagtgtgtagggtgtgtttttcatttacttttattctttccattaaaccaaatttaatgaaataacatccttttgcttaaggctatttttaaagctgtttcattctggggtcgtggggagcgagaaagtttttaaaacttcaggggtttctgaggttgccaggaccatgagctaattggcaaagtgttgatgactcaacgctgggaaagtcaaagacagaagttaagacactttgctccccggccttaagcaattaaggagaaatcattcctgtttcaaaagtaaaatgatgaggctctcaaacagctgtacactgcagaatcagaggggtcatggagtcttgcccagaatacggtcaactctcccacagcccatggtggggggaaattcccttccctttccattccttttgtagcagaacgcaggaactgcctcggctcacacctttctcgctgatcaattcatgccacctgctttgtctgccctctgaaggcggggtttgctcctcgtcaagactgcccaggcgagaaccgcagactcagaccccagccaaaaggaccggcagaaggaaagaggggagaagggaggggaaagagtgaggtttttctgaaagctcctctcccttcgctgaaaagttctttgaaataaacaacgtgggtgttgtatggtgagcccagagccttcaggtcacttgctttagaaagcccagatctgcaaactctgaggacctggagggggtgggggagctcaaagtggagcgttttagtaagacacgctcgttaacaaaaactgaaattaaatagataaccatcacggttatatatttgggtgaagtgatatcagttacttcctgtctaacccaccggggaatctatgtgccccccaccacaagccataaatggcttttgcaggcatcagcagcacccaaagttgcctgcccctgccaaccaccactcatctctgctcagagcagttattcctttgtgagatgcttgggacatggctctagttttgcaacagggtgagattccaaaaaaatgttggggagggggcagaggaattccagagttcaaaactaaaaggcgcaggaatcaaagtcatttcattctattctctttctctgtcctctagccctcaggagtctgcagatccctgcaaaggctcagagaaggctgagcaggctgagcaagagggtgcctcatccctcccaggggtggggttgcccaggctggactggggatggaatgggagaggtggaggagatacacgcagtcccctccttcttccctgggatgcccggccaggaacagctttcagaaaagggaaagggctgagaacagcctcctccaactccagcacccaaggcacgggcagcagccttgctccaaagactgcaggctgggagcacaccatcccccatgcagaccaaaggctgcttagcacagcgtgaaaatgcagggcctgggcatttgcgaggaggcccagaaaaggagagaaaacactgctgtcgaacattccaactccttcccacagagcagagctggacacgtcctcacgtccatcgcagagaggggcggcttccagcaggagaagagagaactcaagtggaagggaactgaaggctgagcactgtgtttgcaggaatgaaaatatattttcttagggaacagacaaaacaaaatcccaggcggaatacctaagaggggcattcattgtttggctcctgcctgactgatgacactggggtgtcaatatataacattgtgatgacaattggactttcacccggcaatattccagaactactattctccaggatttccattttaataagcagtgaacaaagcaaaaagaaaataaaaggggagggggtaagaaaaggaaaaagaataaaaaagaaagcaactcttgtcttattatgaaataacaatacttggacatacagcagcatgaaaacaaaacaaggaaagaggtcatctaaaaaatgtatgccaagattaccgaaacatggggagtatctagaggaaaaaggcttaagcaaaagtttgctaactgcagaagggttaacactggtaacatactgtggcagacaagtttcttttttaaaaaaacttttgaggttccccccctttaaattaaccctttccggtccatatgccactaagcaggtaccaacctagaggaaaaaaaaaaaactcatccactcagcaatagtggccctttcaaattaacagaggggtggggtaaggttgagggggaaggaaacagacagggggagaggaagggcctggtagaggaggggatctttcttgtcattcaagttagggcagccacgaatgtcccaaatctgttggagatgtcagaatgcagggaccgccaggtgggcacggaggctcgagccttggcgtcacccacgtcgtctgtgcagtggacagacaggcactgcaagtggctgccaggctgggatgctgaggccttgtttgcagggaggtcgtgggcttctttgctgttggggttctggggtttggccttctcccagggcgccaacgtcttgtcgtcgtccgcgctgtccaccagggccttgtcagcgggcatgtaccaggcagcgctgtgctctgccatcagcgagtccaggtcaatggtgctcatggcgctcttgaccgcctcggagcagcagctgcccagctcgctgtcgccattctgcgcccctgaggccccgacggcgcactcacccttcttgccacccttcagccccagaggctggtcctcggagatgctgaactgctgcctctgtagctggatctgcgcctgaaggatctccagggggtggatctcgtcgggtggcggggcgccgctgctgctcgtcggggtgcggacctgctccaggcccggagtgcccggatggcccgggcccccaccgccgccgtagctgtcaggggtcgaggtagagttagacatgatgcccaggccgagggcgggcgggggcgccttcggtccgtgttccccggcgcctaccccacggggagggagtttgggcgagccggtcaccaggggactcctgctcgctttaactagtgcctgggggttgtcagagctggacgacacctcgtcctcattggcgtagctcgtgctcacctcgtccgaggcgaactcacccacgtttggcgaactactgtccgacttggccccgccgtccagggacccaatgaggtccggctgatcccccaggagcaactcagcccccttcccccaggatggcgacgtgagcgccttttcgtggggcgtcggtgccccgcgcgtctcgcctgcggagcttcccccgacggctgcgcctgacgcttgctgctgccctgggctcaccccaggtgcgcccccgctgtccggagccgccgagtacttgtcaaagaaggtgccagggctcacgtgaccactgtccctttttctgcgaccccgtccccggccgccgcccccggagaccggcttgccgtcattccccgacgtggattccagggtgtagttgggggagaggctggtgccgtccccctgggctggagggttgggcggccccgaggctttggagccgctgctactggtcccggacggcctccgggtcctggggcccccaggagcagtccctcctgggaagtaatccgagcccgggttgccggccactgccgcgccgtcggtctcgttctggctcagtttcctcttgccctctggcgggttcttcttgttgaaggtcacgttgaggttgggggccccgaggctggcgatcatgttctggcaagcggtggagagcgcagccaggcagctctggccgaacaggttgtccttggagctgggcttgttgaaggagcccagcgagagcgcgcccaatttactggccgaggtgcgctggctgggctggaaatcaggctgcggcgggtaggcacccccgccaccgccgccaccagagctgccaccgccccctcccgcgctggggggcgagttcacgcctggaccgctgtgcggcgtggactgccggccggctgcaccaaacggaaagcccggctggcccccgagcgcagacgtagcaaagtccggcggcgggggccggcgctccgaagcagcgctggggagccccacgcccgccccgggcgactgcagctgacccaggcctcccagactgcccccgaactgcaggccggtgaaggcagcgcggcacgtggcctctccgggcatcctcatcggctcctgcagagggccccggaacagcacccccgagccaccaggcggaggagggggcgccaggctggggtcgtgcgggccacagtcagcgggcagacccgagccgcccatcctacggggcagcaggtctccgggcggcggatgcggacctgagaaccacgcgctctcttgcgccaagtgcggcgcctgctgctcgaaggtgcccagacgcccggcgcccgtgctgccgccttcgcgctcaaagttcggctgggccaagccgcccaccgggccgccatgcaccaggccgccctggcccacgtccccggggtggcctagctgagccaggttgggctggcgcagccgctgctgctgattccgcgacgccatctgcttaatcatgagggccgcgttttggcgctgctgctgctgctgctgttgctgttgctgttgctgctgctgctgctgctgttgctgctgctgctgctgctgctgctgctgttgcagggactggtggtccggggccggatgctgcaggggcggccccgaagggaagctgtcgggcacaggcggtgtgaactcgccgggtaggcctgggtaggcggaaggggagaggtgattatccagagcgccgttgtgcatgctgccgttccacgaagcgcagcggtccactcccgcgctgcccggaaagtcgaagcgcgcctcttggccacgttcatgtaggggggcgcgtcgaaatgctgcagccgctggttgggcgcctgctgcggaggaggatgctgcatgctgaaaacaggctcggaataagggtgcatgctccggttctccagccggtggatgggatactcgaattgcgcgtgctggctgggcagcatggggcctccgtcctgcaggccgccgctgggcgtgcccgcctcgccctgctggggccgagggagcgcaggcgggcaacgaattttgtcggactagaagcccgggtggcggcggcggctgctgctgtggcggctgctgcgggggctgctgctgagggggtggcggggcctgctggggaggctgcattaacgggtgcctggagcccactgagggctccagacccacaggcatctttctggccccactgaacctctcaaagaacacaccatgctgctgctgctgctggggctgctgctgctgctggggctgctgctgcggtggctgggcgtgcattttggacaagcccaccatgcccgcagctctgggcatggccgagggcgccccgggaaagccgccccccaggaacctggcgacccgctgcataatgaggcagctgcccttcggagtcagagggcgaaaacatgtcaaaatgtcccgagggcgcctcgcccggtaattgtattccagcgagtcgacggctccttggttcgtcaccctccgtggctccagactgtgggaatcggagccgctggaggacggcaggccgtggaaggaggcggctcggttagggctctggtccagcggcaggcatggggccggcacgcggtggctggaggcacctgaactgtggaagtccgggaggttccccggtcgctgcgggccgaagctctcaggcccctggctctccgccatgtgctcatagccctcggcgaagggcggctggctgcccaggcctccggctgcgccgccgtagccgagcaggcgacccccgtgcaggcacgaggccccggggtccgggccaccgaagttgcccccaaagtgggggtgatgctggtggggatgatgacttcccgggtggccgtggtgaggctgctggccgccaaagaagccgtgcacaggctgcgcttgcagcccccctgcgtgcaactccgagtggccgcgcgcgtggaagccgtagggctccatgttcatgcccaagatcgggggttgccccagcgcgctcatagcaggatccacagggccagggggccccccagtgtggaaagccggggccttaaagtgggtgttcatgctcagtccggtctcgttaaagttcctctcgccctggccagcgttcctgctgttgacctggggctcgaattggtccagcccaaacatacttggcggggggcagagggggatcaatagggcatgacagccggctctccgcggcgcgcctccggccagctactcgttccagcccaggattgggcgctccgggacgctcagcaccgcgggggctcagcgcgcacctccaccccgcctgatgtgagggacggggggcggggtattagctcctctcctgaagctccgattctgcccggggagggcctctcacatcttgcgaggccgcggggcctctaggagccgtgttggggggcccatgccccgggcggttgtcacagccgcgggtgggtctgccggggaggggacgaagccgcggatgaacggagacaaaaagttaagtggggggaatggggagggaagggggttgggagagcagagcgatcaccttctcaagtccgattgggtctgctggggagccctcaggacgccgcccgcagcctcccggagtccgtggcagagctgctaagggcaggggagggagacccttcaaagccgcggctggcgccgggcaccgacagagcggtccctccccccgccccccggagtccccgcgccccgcagcccgagcctccaccgagcacgatccgctcgcacaatccccgtaggctccgggcgagcggctgctgcttcttcagcgggtcggaggactggagcgtccgctcggcatcgccggtgccggcccccgagccgaggacgcagaggggctgcgaggcggcaggcgccgggggctggagccgagggtcggggaaaggcgcggctcctctgctcggcagcgggtgcgctgcgttcggcgcgcagcttccgggccacgtccgccgcctgccgcttctgttctccgccgttgggtgtctgagttcgccggagtctccgcgcaccgttgcaggcgcgggagggcagcgagacgaggggttgggtcgctccaaggctccggttccctgcctccgcgc

SEQ ID NO: 137778 - DNA, 370 bp, Homo sapiens
tcaaacattgatgagagtaaaacaccaccgatgttccacaggcgccttctccactgcggcctcgaacagcaatgcggatcggccaccacccgcgcgccggagaggtctgcccaggccgggcctcccgccgccggaggtcgccgcgaccaccgaggagggagccgtggccgaggacgaggagaccgaggacgaggacggcgaaggcgcggcggcgggcgacgctagaaggccgctgccgccgggcttgcggacattggcagccgcgggcggcggctgctgctgctgctgctgctgctgctgttgctgctgctgctgctgctgctgctgctgctgctgctgctggggcttcagcgacatggtgagggaattc

SEQ ID NO: 137779 - DNA, 1440 bp, Homo sapiens
tcagagagccttgggccagagttccaggggctctgggagtggctgccaggtgagttgaacagtccgattttcagtggggtcccacacagatgagatgcggcttaataggaatcccaggctgcaggcattccttggcctagtggccagatttccggcacgtgtagcaagctcctgatttaaaattgatgagatgttccttgggccggtcagtctgaggacctgaggttgtaggtggatctttctcatggagcaaagaacaggaggacaggggattgatctcccaagggaggtcccccgatccgagtcacggcaccaaatttcatgcacatctgtgtgaagagaccaccaaacaggctttgtgtgagcaacatggctgtttatttcacctgggtgcaggtgggctgagtttgatcttagaaggtcaaattctctgtccaatagttcctcttctgttaacttagagaaattatcctctccaaaaggattccaccctgacatatcaggtggattgctgatgttcttctgatttgtgaaatttgcaatggcctctttatcagcaactgacctgctgcatataagcatcttgaagtaagtggtggtggtggtggtggtggtgctgctgctgctgctgctgctgctgctgttgctgttgctgctgctgctgttgctgttgctgctgctgctgctgctgctgctggtgaggatgacgatgctgtaaatggagttgctgtaatctccaatctccctgctgtagttgctggagtactctatgctgctgtggcggctgcctacattcaaatgcaactgttcaatcctacagcttgcaacatgcgcctgaaaaagctgctgatactcaacggccagcccatgaaagccgccgggagagacactgtactcttttggtctatggttaccgaattcaccaggagcaaggactttaacaggtgttgctgaactttgaatggtcagcacactgggagtggcagtagtagcagagttggcctttggtctttgtcttggtgcaattgaggtttctgttggtccaatggtatctgttattctggcttttatttggcttttcctagcagctgcttcactagcagtcatcggttcaggaagagctgaaggaatagaagaattacgcagtgtcgtggcagcaggcacagtcttgaaatccaaaagcacaccggcgagcttgtggacctgtacatgcggaagaaagtctctgctagtaaccgcgtcaccggtgccaagaaccatgcatccatccagataaacgtggtggaggctgacaaggtcacaggcaggtttaatggctagtttaaaacgtatgctgtcagtttctccaataagaagcttgacggtgatcatgatggtgatggtcatgtcatgcatgctatccatatgcattatctgatgctgacatttgtctgacagcat

SEQ ID NO: 137780 - DNA, 1379 bp, Homo sapiens
tattttaaatgtctttaattgctgaatgcctctttggctaatatttggaagatcattatttagtcctacaaccgacgcattgttccactttcccatcattttgtttgcaaaccgctaaaagtcttatttcctcatctctttgacacattaccaaagtggaccctatgctgtaatcacacaggataatgttggaaagtatgaatatctaaattattttttaaaggtattatttttttccttctggtttcaaaatcatttctgacagtttctaaagacatggtcacagctgcctgaagcatgtcttcttcactcatagcatcacctagatcactcccaagtgctcctgaactggtggctggcctttcacatggatgtgaactctgtcctgataggtccccctgctgctgctgctgctgctgctgctgctgctgctgctgctgctgctgctgctgctgctgctgctgctgctgctgctgctgctgctgctgctgttgctgcttttgctgctgtttttcaaagtaggcttctcgtctcttccgaagctcttctgaagtaagatttgtacctgatgtctgtgtcatatcttgagatatgtttctggaactaccttgcatacttagctgaatagtcctgcggagatctgcttcctcatcttccatgtcaatttcttggcgacttagtgccagagccctctgcaaatcctcctcatcttcgtctaacattcctgagccatcatttgcttctaacattcgttccaggtctgttttatggactctttgctcttttagttgtgctaattcttctccaataagttttggtcgatgcatctgttggaccctaatcatctgcaggagttggtcagcttcgcaatctggcagatcacccttaacaacaaatatagaataaccttcctgttgtaattgagccaagaaaagtgcaagatatgtatctgatattaattctggacccgtcaagagagaattcaagttaaaccactgttttcctaattttctaactgtaaaccagtgttccttataattgcatataaatgatctttcatttataggatcgatcctgagcctctgatactctggactgttgaacaggattagttctaaaccccaaactttcaaggcattgcttataacctgaatagagaaaaaaccactgtcatccatatttccagaaggctgctgtaaaaacgtgcgataatcttcactagtaactcctccttctgccattctcatcctctcctcctcatccagctgatgtgcaattgaggataattccacagggctaaaatattctccttgcaataagttattcaggcaatgttgagcacaaagtgagccttcttgtttctcgtggaagatggactc

SEQ ID NO: 137781 - DNA, 5568 bp, Homo sapiens
tcaagttagggcagccacgaatgtcccaaatctgttggagatgtcagaatgcagggaccgccaggtgggcacggaggctcgagccttggcgtcacccacgtcgtctgtgcagtggacagacaggcactgcaagtggctgccaggctgggatgctgaggccttgtttgcagggaggtcgtgggcttgcaggctgctaggaggattaagtgagatgacagctggaaagccttcagcataaggtgagccctggctgtcagccccatggcgatgtttctctaacacccctactctgagatgtgcatacttctctccctgctggcagatggcacccctggctccggctaccatgatggtaatgataccgctagctgcaggcttgctggcttcagggatgtgctcacacatcttgctctggcagaggggtgttccctgcaaggcctctgaggacccccgtgtgggctgcatggcctgcccagcaaacagcagctcagcttcaactctgaaaggacagatcatcagggtttggtacttagcaattgctccatggatgctgctgtcactatcaccattgccatcatcatcatcatcatcatcatcatcatcataatcaagcagtgtggctggcagctggtgacggccatgaggaggcaagacacagagttggtttttatctccagcatctgttggtaggaaatacagctcctcatctccgtgcccataagtggttctaagcacgggctcagaaaggccttctttgctgttggggttctggggtttggccttctcccagggcgccaacgtcttgtcgtcgtccgcgctgtccaccagggccttgtcagcgggcatgtaccaggcagcgctgtgctctgccatcagcgagtccaggtcaatggtgctcatggcgctcttgaccgcctcggagcagcagctgcccagctcgctgtcgccattctgcgcccctgaggccccgacggcgcactcacccttcttgccacccttcagccccagaggctggtcctcggagatgctgaactgctgcctctgtagctggatctgcgcctgaaggatctccagggggtggatctcgtcgggtggcggggcgccgctgctgctcgtcggggtgcggacctgctccaggcccggagtgcccggatggcccgggcccccaccgccgccgtagctgtcaggggtcgaggtagagttagacatgatgcccaggccgagggcgggcgggggcgccttcggtccgtgttccccggcgcctaccccacggggagggagtttgggcgagccggtcaccaggggactcctgctcgctttaactagtgcctgggggttgtcagagctggacgacacctcgtcctcattggcgtagctcgtgctcacctcgtccgaggcgaactcacccacgtttggcgaactactgtccgacttggccccgccgtccagggacccaatgaggtccggctgatcccccaggagcaactcagcccccttcccccaggatggcgacgtgagcgccttttcgtggggcgtcggtgccccgcgcgtctcgcctgcggagcttcccccgacggctgcgcctgacgcttgctgctgccctgggctcaccccaggtgcgcccccgctgtccggagccgccgagtacttgtcaaagaaggtgccagggctcacgtgaccactgtccctttttctgcgaccccgtccccggccgccgcccccggagaccggcttgccgtcattccccgacgtggattccagggtgtagttgggggagaggctggtgccgtccccctgggctggagggttgggcggccccgaggctttggagccgctgctactggtcccggacgggcctccgggtcctggggccccaggagcagtccctcctgggaagtaatccgagcccgggttgccggccactgccgcgccgtcggtctcgttctggctcagtttcctcttgccctctggcgggttcttcttgttgaaggtcacgttgaggttgggggccccgaggctggcgatcatgttctggcaagcggtggagagcgcagccaggcagctctggccgaacaggttgtccttggagctgggcttgttgaaggagcccagcgagagcgcgcccaatttactggccgaggtgcgctggctgggctggaaatcaggctgcggcgggtaggcacccccgccaccgccgccaccagagctgccaccgccccctcccgcgctggggggcgagttcacgcctggaccgctgtgcggcgtggactgccggccggctgcaccaaacggaaagcccggctggcccccgagcgcagacgtagcaaagtccggcggcgggggccggcgctccgaagcagcgctggggagccccacgcccgccccgggcgactgcagctgacccaggcctcccagactgcccccgaactgcaggcccggtgaaggcagcgcgggcacgtggccctctccgggcatcctcatcggctcctgcagagggccccggaacagcacccccgagccaccaggcggaggagggggcgccaggctggggtcgtgcgggccacagtcagcgggcagacccgagccgcccatcctacggggcagcaggtctccgggcggcggatgcggacctgagaaccacgcgctctcttgcgccaagtgcggcgcctgctgctcgaaggtgcccagacgcccggcgcccgtgctgccgccttcgcgctcaaagttcggctgggccaagccgcccaccgggccgccatgcaccaggccgccctggcccacgtccccggggtggcctagctgagccaggttgggctggcgcagccgctgctgctgattccgcgacgccatctgcttaatcatgagggccgcgttttggcgctgctgctgctgctgctgttgctgttgctgttgctgctgctgctgctgctgttgctgctgctgctgctgctgctgctgctgttgcagggactggtggtccggggccggatgctgcaggggcggccccgaagggaagctgtcgggcacaggcggtgtgaactcgccgggtaggcctgggtaggcggaaggggagaggtgattatccagagcgccgttgtgcatgctgccgttccacgaagcgcagcggtccactcccgcgctgcccggaaagtcgaagcgcggcctcttggccacgttcatgtaggggggcgcgtcgaaatgctgcagccgctggttgggcgcctgctgcggaggaggatgctgcatgctgaaaacaggctcggaataagggtgcatgctccggttctccagccggtggatgggatactcgaattgcgcgtgctggctgggcagcatggggcctccgtcctgcaggccgccgctgggcgtgcccgcctcgccctgctggggccgagggagcgcaggcgggcacgaattttgtcggactagaagcccgggtggcggcggcggctgctgctgtggcggctgctgcgggggctgctgctgagggggtggcggggcctgctggggaggctgcattaacgggtgcctggagcccactgagggctccagacccacaggcatctttctggccccactgaacctctcaaagaacacaccatgctgctgctgctgctgctggggctgctgctgctgctggggctgctgctgcggtggctgggcgtgcattttggacaagcccaccatgcccgcagctctgggcatggccgaggcgcccgggaaagcgcccccaggaacctggcgacccgctgcataatgaggcagctgcccttcggagtcagagggcgaaaacatgtcaaaatgtcccgagggcgcctcgcccgggtaattgtattccagcgagtcgacggctccttggttcgtcaccctccgtggctccagactgtgggaatcggagccgctggaggacggcaggccgtggaaggaggcggctcggttagggctctggtccagcggcaggcatggggccggcacggcgtggctggaggcacctgaactgtggaagtccgggaggttccccggtcgctgcgggccgaagctctcaggcccctggctctccgccatgtgctcatagccctcggcgaagggcggctggctgcccaggcctccggctgcgccgccgtagccgagcaggcgacccccgtgcaggcacgaggccccggggtccgggccaccgaagttgcccccaaagtgggggtgatgctggtggggatgatgacttcccgggtggccgtggtgaggctgctggccgccaaagaagccgtgcacaggctgcgcttgcagcccccctgcgtgcaactccgagtggccgcgcgcgtggaagccgtagggctccatgttcatgcccaagatcgggggttcgcccagcgcgctcatagcaggatccacagggccagggggccccccagtgtggaaagccggggccttaaagtgggtgttcatgctcagtccggtctcgttaaagttcctctcgccctggccagcgttcctgctgttgacctggggctcgaattggtccagcccaaacataccttcaaagccgcggctggcgccgggcaccgacagagcggtccctccccccgccccccggagtccccgcgccccgcagcccgagcctccaccgagcacgatccgctcgcacaatccccgtaggctccgggcgagcggctgctgcttcttcagcgggtcggaggactggaggctccgctcggcatcgccggtgccggcccccgagccgaggacgcagaggggcttgaccttgggccgctgggggaagcctgcagagggtttgacagaagcgcacagcgcaatgtcaaggctgctgcagaggggtcttgaactagggtcttccatttctctgaacttgatttttctcctctgggcctgcaagttctgcagcccttctgagagctgaaggcaaaacccttgccccgagagccttgtcttcttctcgatgaccgtccctgtgccctcattgtccccacttggagacttggtctcaattctccccccccatccccaaggatactggatgccctgcggcataactgtttctagttctttctgagtctcgtcttccattctcctaatgtcttccatcgtgagatcgatccacttgtcaatccaacaaaaaagctggcgatggaagtttgtaaatatccgtttttcttgcttttgaatgaagttttctactttgctttgcagtccccaccacttgaatttgatggtcaccagcttataggcacacatctggggacagtcagggctgtttgccagctccttcttccagttgggtcccaaagggcctctcttggtcttgactgactggaataatgctgggtcttcatcagctttgtagtctgctggttcaacttgacttctatctgcaatatctatatggacaatttcaacagttttccatgtgtttggatctaaaccatgtacattttctaatgttcccaagtctggtttgtgccatgtttcgattttaatgaagaaatcatctttcatatattcattctgttccttggtgcccacgtctgagggagcttttcccagtataggcat

SEQ ID NO: 137782 - DNA, 963 bp, Homo sapiens
agggtttttctaaacattttacacacattaactcatttattcccctcaataacttcatggggtaggtaccgatatcgtgctcatttcctagatatgctaagtggtactgggaagggtaactaacctgccaagggtagagagtaagtcgtggagccacgaagccaacccaaagggtctgacccagggtcagcacttttaacagcacgtcactggagagcctctgagatgcttctaaaaggacgaatccatctgcttctgtctctggtactgagggctttttagattccggaggctttctgaagaagtgaaacattgctgctgctgctgctgctgctgctgctgctgctgctgctgctgctgctgctgctgctgctgctcagccttgtgtcccggcgtctggctcagactgcccatgttggccagcagagtggaataggcctccagctgggagcgctgggatggagtggtggcccctgcggccgaggccactgcactggtgacggggttggcggttggggggatcagctgtgatgggatgaagctggcataggttccactgtattgggaggacccaatgaactggaaggtgtgcggcaggtgagcgtactgcacgggggacaccggggtccctggctgcggggtggcgtacgcggcaggcagcgtggtggccacggggacagacctgggagcgctgggcggggagtagtccagccctgtggacaatgctttgtgtaaacctattccctgttgtaaaccaagctccaccgaggtccctgccggcccatgcctcccgcccccgtggccccggccaccagggttgcccgggagccatgctgtgccctccacccggtggttgtcgctgggcagggtaggggccttctcctcggaggaccggctggtggcggggatctcgcgcttcttgggaggcaggcattcgttgctccgctcttggttggatttcat

SEQ ID NO: 137783 - DNA, 870 bp, Homo sapiens
atggaactagaggagtgggacatagaatttatgttaaaagttcaattggttaatgtcatccaggacagtggcagacctgaagagaaggctgatttgggcctgcaaggtgggcctgccttaaatcacactggaatggcattgacctaccttctccctggagttcctaaagtggggcagcgagccagagaagataaatctctactgcagtcacagccttcttctcctccaactgggataacaactctcagacactctggcaactacagaaacagagagagctctgaatcaatcaagagtttatttgcaaaggttctctccgcctccccctcaactaccaccacctccagtcagtctcgcctccggctatccgctgctccaccctctggcccggtatcctgcctgtccgctgccaccaaggagagcccggacggagcagcgaggaggggagcagccgggagttggggcttcccccctgcccatccctggccgctggcccgggaccgaagccacttgagcgagcagagagtcgtcaccttgtcttctttgccttcaggggtaggagacgcgtggttacttttcgcggggaactggggcaggaatccatggtggcatgaacttggtcgtgccctcggcataaaactgatgtatgtgttttttaagagcatattttccctgcacatgcttctcattatccgagaggcctggactcaatcagtaaaggagcagagaaaccacataattgaaaggagaatgacggtggtgcatacttggaatatttgtgggaaggggattgctgacatcagaaaatgtagtggcctgagtgttaacagcattgaagagaaatcagctttctgtgtttctgtgtattga

SEQ ID NO: 137784 - DNA, 697 bp, Homo sapiens
tttcgtgccacccgttcgtccccctcccctacctcccatcctttgcccaggagctgccttggcagtcacgccccttccttccgaggagctttctggctgcctaaactggtagaccccctgaattactcctccatctccgctctctttcgcctcctcttctcttagttctccccgcctccccctcaactaccaccacctccagtcagtctcgcctccggctatccgctgctccaccctctggcccggtatcctgcctgtccgctgccaccaaggagagcccggacggagcagcgaggaggggagcagccgggggttggggcttcccccctgcccatccctggccgctggcccgggaccgaagccacttgagcgagcagagagtcgtcaccttgtcttctttgccttcagggagctgctaagaaggacaaataagatagcagagcgaaagagcttttgtctccttagaaggaaggctgagaaactaaagagtgaccagtggttggactcttggcggcgcttaccctgaacctgagtgttaggggagagggaatctgccgttgcggtttctggagctgctcataagcaagaattccctatcctgatcaaggctttaagcctaaaagaaagcagaaataggtcaagggcagcccaggtgcccaatttctctctctcttcacaaggcaccaccagcaataga

SEQ ID NO: 137785 - DNA, 1488 bp, Homo sapiens
atgacgtactcaaaactgtccttgacgacagcaaggcagactggtccgcgaagggtgagggccggagactggaagttagatggcagatggggtccaaagccctcacccctcaccgggggcttgggtgccttggcgaaggatgaagtggttaacccactaaaatatgacgtctgtctggcccccagtgggcacctttgtcaggcctgtgctgggcactgtgacactgatgagaaagacaaggtgcctgcccgctgtaggagctcactgcctgctggccaagacagctggacacaagcagtgtctgagctacaggtcatgcctaagaggcctaaggacattgggaacacagtgagagaggtgagccgctgggcggggcccatcatcgatgtcctcctggactacgtgggcaacgtgcagctctgctcgcggctgaaggaacacatcgacagctttgaggactgggccgtcatcaaggagaaggcagagtcgacctgcaggcatgcaagcttggcactggccgtcgttttacaacgtcgtgactgggaaaaccctggcgttacccaacttaatcgccttgcagcacatccccctttcgccagctggcgtaatagcgaagaggcccgcaccgatcgcccttcccaacagttgcgcacgctgaatggcgaatggcgcctgatgcggtattttctccttacgcatctgtgcgaaacgctggtgaaagtaaaagatgctgaagatcagttgggtgcacgaatgggttacatcgaactggatttccacacggaaacgctggtgaaagtaaaagatgctgaagatcagttgggtgcacgagtggggtacatccgactggatctcaacagggccagcgccaccccaatgactcccggccctcgggctgacgtggggcttctcacgaactcacacagacaagccacccgattcaccccaccgcgacggtaccggggattggtcctgcaaccccgatcctgctcccgtaacgtgaccctggaccggcccccagaatccatcgagaggcctgcaactccgaacgtgcacatgctgagggcaggagccctgtgtcctttatctccaactccctgtgcctaccggggggctggcacaaagcaggtggtgctcggtgttgaaggaacagagtcgacctgcaggcatgcaagcttggcactggccgtcgttttactacgtcgtgactgggaaaacctggcgttacccaacttaatcgccttgcagcacatccccctttcgccagctggcgtaatagcgaagaggcccgcaccgatcgcccttcccaacagttgcgcacctgattggcgaatggcgcctgatgcgaaacgctgggtgaaagtaaaagatgctgaagatcagttgggtgcacgagtgggttacatcgaactggatctcaacagcgacaagctggtgaaccgtctccgggaacttcgatgtgtccagaaggttttcaacggtcattaa

SEQ ID NO: 137786 - DNA, 4116 bp, Homo sapiens; identical to SEQ ID NO: 136315

SEQ ID NO: 137787 - DNA, 2406 bp, Homo sapiens
atgggtaagtacatgcaaattgctgagtctctgttcattgcatccaaaacgaaagtcaccagcgtgctgtataactcaagaaaatacgagagagagggaaaagcaacatcacagtttgactacaagcggtttccagtagaaagggatggggcaggcaacgcccatttaccagccctctcctgggatctgggcactcgcacggccatcctgcgagggaggctttatcatcctgatgttacggatgaggagctgagaccctcatgggacttgcccgaactcggtgatgcttgcggtggtgaggtgatggcagccatggacacaggccagagagctgacccaagcaatcctggtgacaaggaaggggaccttcaagggctgtggcaggaactctaccagctccaggctaagcagaagaagctcaagagagaagtcgagaagcacaagctttttgaagactatctgattaaggtccttgagaaaatccccgagggctgcacgggatgggaggagccggaggaggtgctggtggaggccacggtgaagcactacgggaagctcttcacagccagccaggacacgcagaagcgcctcgaggccttctgccagatgatccaggctgtccaccggagcctggagtctctggaggaggaccacagggctctcatgttgagcctcaagatccggctgtgtcagctgcagaagaagtgctaccgcaagcaggagcagtggtggcagctgaagcacagcatcacttaccagaaggacattgactttgacacacacaccagcagcagctataatgatcagctgctcggctacatgcaaatgaccatcaccaacatggcccggcagtgctgcccctctgcccacggcgtgcccaagagcatggatctcttctccaagctcgatctgattaagcaagggatcagcaccaaaggaggacagacatggtggggaaattcaaagggattcatgaccatctgggcaatccgggaaggcctcatggacaatgacccaggatttgaaagacaggtggtatctgacaagtgggcattccagaaggagcaaagaaggaatatccttggaaaatacagcatcttctttactttcctgtttctacatcactgggctaagcttgaggaagggcgccccgtggaagacacaaagacacttgggaaggcccccagtgggcacctttgtcaggcctgtgctgggcactgtgacactgatgagaaagacaaggtgcctgcccgctgtaggagctcactgcctgctggccaagacagctggacacaagcagtgtctgagctacaggtcatgcctaagaggcctaaggacattgggaacacatggagcagcagagaagggacatgtagcaggctgaacaatggccccaatgatgtccacgtcctaatccccacaacctgtgactatgttaccgtggcgagagggacttggcaggtggtgcatgaagatgccctcctgccctgtgctccccgagctcagatctctgacaccttctctggcatctccatgtaccagtgccacacactgcggcctcttctgagtgaaacatctttcaacctaatatcagaaaaatgtgacattctatccattcttcagtggaccatcctgaaaacaggatttaccggaggaaaatcgaggaactcagcaaaaggttcaccgccatccgcaagaccaaaggggatgggaactgcttctacagggccttgggctattccatacctggagtccctgctggggaagagcagggagatcttcaagttcaaagaacgcgtactgcagaccccaaatgaccttctggctgctggctttgaggagcacaagttcagaaacttcttcaatgctctgagggccgggcgggcgcagttttacagtgtggtggaactggtagagaaggatggctcagtgtccagcctgctgaaggtgttcaacgacccagagtgcctcggaccacatcgtgcagttcctgcgccctgcttcacgtcggccttcatcaggaaccgagcagacttcttccggcacttcattgatgaggagatggacatcaaagacttctgcactcacgaagtagagcccatggccacggagtgtgaccacatccagatgacggcgttgttgcaggccctgagcattgccctgcaagtggagtacgtggacgagatggataccggccctgactcaacacgtgttccttgaggccgccaccccttccgtttacatgctctataaaacatcccaatacaacatcctttatgcagccgataaacattgattaattttaggccatgcagtggaacctgtcacctaatgggactgcattgtgaatggaccattccggctcttcaattaaataaacaatttagactgtagcaagattgtatt

SEQ ID NO: 137788 - DNA, 2033 bp, Homo sapiens
  misc_feature (1)...(2033): n = a,t,c or g
agagggtgcggcgacggctgatgaatcgggtgtggcggtcgtccgtaggtgcgagggttcgagggtcggtgatcgtgtgcgtagtggagacggtgggcgacgcatggtcaggagctgagcgacgggtggataggtgtagggagagtcggcgagtgatagttggtgtggagacacaggaggtgtccgtgggaacgtgcggatgtggccgtgctgcgatgacgattctacgagaggtgtgggtgtcggccatacaaataaaattgggtgtgttgtgcatggcgaagcgtgtgtataagacggtgagacgcctatgcgatgagacagtgcatgggagccaggtggacacgcagcccccaatttgtccctccggcctgggcggcccctggtcccgcgcgccagcatgggagagcgagggacctgcccgcggcccgccggcgtgtgcaaggaggtccagccgccgcgcccgctacccggagtctgaggacgggtgtccagggacggagaggcaggtgagagggaggtggctaagctggctatggtgacaggacgatgttggccagaaagagtatcatcccggaggagtatgtgctggcgcgcatcgccgcagagaacctgcgcaagccgcgcatccgagaccgcctccccaaagcccgcttcatcgccaagagcggggcctgcaacctggcgcataagaacatccgtgagcaaggacgctttctacaggacatcttcaccaccttggtggacctgaaatggcgccacacgctggtcatctttaccatgtccttcctctgcagctggctgctcttcgctatcatgtggtggctggtggcctttgcccatggggacatctatgcttacatggagaaaagtggaatggagaaaagtggtttggagtccactgtgtgtgtgactaatgtcaggtctttcacttctgcttttctcttctccattgaagttcaagttaccattgggtttggagggaggatgatgacagaggaatgccctttggccatcacggttttgattctccagaatattgtgggtttgatcatcaatgcagtcatgttaggctgcattttcatgaaaacagctcaggctcacagaagggcagaaactttgattttcagccgccatgctgtgattgccgtccgaaatggcaagctgtgcttcatgttccgagtgggtgacctgaggaaaagcatgatcattagtgcctctgtgcgcatccaggtggtcaagaaaacaactacacctgaaggggaggtggttcctattcaccaactggacattcctgttgataacccaatcgagagcaataacatttttctggtggcccctttgatcatctgccacgtgattgacaagcgcagtcccctgtatgacatctcagcaactgacctggccaaccaagacttggaggtcatagttattctggaaggagtggttgaaactactggcatcaccacacaagcacgaacctcctacattgctgaggagatccaatggggccaccgctttgtgtccattgtgactgaggaagaaggagtgtattctgtggattactccaaatttggcaacactgttaaagtagctgctccacggtgcagtgcccgagagctggatgagaaacccttnccatccttattcagaccctcccaaaagagtgaactgtctcatcaaaattcttctgaggaagcgcaactccccatagaagaaacaatttccataggaggaacaatttctatccgaaggaacaatttcttccctcatggtaccaaaggtgcaatttatgactccagaaggaaatcaaaacacatcggaatcatgacagcaagataaccccaagacagtcttttatcaagttttgacggtttatgctgggcactgccagactgaaccagagctggaacacaataatgtgtccttctacattttattacactaaatgatattcatattcaagcaacagcactttctgtagtaataaaaagtaacacaccaagtggaggattcatggcttatgcttgttt

SEQ ID NO: 137789 - DNA, 1629 bp, Homo sapiens
  misc_feature (1)...(1629): n = a,t,c or g
atggtggattcgttaattgcgcgcgtaggagtaatggctcgcggtaatgccattactttgcctgtatgtggtcgggatgtgaagtttactcttgaagtgctccggggtgatagtgttgagaagacctctcgggtatggtcaggtaatgaacgtgaccaggagctgcttactgaggacgcactggatgatctcatcccttcttttctactgactggtcaacagacaccggcgttcggtcgaagagtatctggtgtcatagaaattgccgatgggagtcgccgtcgtaaagctgctgcacttaccgaaagtgattatcgtgttctggttggcgagctggatgatgagcaaatggctgcattatccagattgggtaacgattatcgccccacaagtgcttatgaacctgggctatcgcccacaagtgcttatgaatgtgggcagcgttatgcaaagagatcgcggaatgaatttgatggaaatatttctgcgctggctgatgcggaaaatatttcacgtaagattattacccgctgtatcaacaccgccaaattgcctaaatcagttgttgctcttttttctcaccctggtgaactatctgcccggtcaggcgataaaaaagactcccttccccgcgaaactcttcaatgcctgccgtatatccttactggcttccgcagaggtcaatccgaatatttcagcatatttagcaacatggatctcgcagataccgtcatgtttctactaataatcagaccgacgatacgagtgggaccgtggtcccagtctgattatcagaccgacgggtaccgagctcgaattcttaatcatggtcatagctgtttgatcagaaaatctgatggcaccctacaggaacatgacggtatctgcgagatccatgttgctaaatatgctgaaatattcggattgacctctgcggaagccagtaaggatatacggcaggcattgaagagtttcgcggggaaggaagtggttttttatcgccctgaagaggatgccggcgatgaaaaaggctatgaatcttttccttggtttatcaaacgtgcgcacagtccatccagagggctttacagtgtacatatcaacccatatctcattcccttctttatcgggttacagaaccggtttacgcagtttcggcttagtgaaacaaaagaaatcaccaatccgtatgccatgcgtttatacgaatccctgtgtcagtatcgtaagccggatggctcangcatcgtctctctgaaaatcgactggatcatagagcgttaccagctgcctcaaagttaccagcgtatgcctgacttccgccgccgcttcctgcaggtctgtgttaatgagatcaacagcagaactcccatgcgcctctcatacattgagaaaaagaaagccggcagacactcatatcggattttcctttcgcgatatactttcatgacgacggataatctgagggttatctgtcacagattgaagcattctgccgacatggaagccatcacaaacggcatgatgaacctgaatcgccagcggcatcagcaccttgtcgccttgcgtataatatttgcccatggtgaaaacgggggcgaagaagttgtccatattggccacgtttaa

SEQ ID NO: 137790 - DNA, 1767 bp, Homo sapiens
  misc_feature (1)...(1767): n = a,t,c or g
ttagtctgggaccacggtcccactcgtatcgtcggtctgattattagtctgggaccacggtcccactcgtatcgtcggtctgataatcagactgggaccacggtcccactcgtatcgtcggtctgaccgggcagatagttcaccggggtgagaaaaaagagcaacaactgatttaggcaatttggcggtgttgatacagcgggtaataatcttacgtgaaatattttccgcatcagccagcgcagaaatatttccagcaaattcattctgcaatcggcttgcataacgctgaccacgttcataagcacttgttgggcgataatcgttacccaatctggataatgcagccatctgctcatcatccagctcgccaaccagaacacgataatcactttcggtaagtgcagcagctttacgacggcgactcccatcggcaatttctatgacaccagatactcttcgaccgaacgccggtgtctgcaggaagcggcggcggaagtcaggcatacgctggtaactttgaggcagctggtaacgctctatgatccagtcgattttcagagagacgatgcctgagccatccggcttacgatactgacacagggattcgtataaacgcatggcatacggattggtgatgtttttctnctggttacccaggccgtgccggcacgttaaccgggctgcatccgatgcaagtgtgtcgctgtcgacggtgaccctatatcgaggagggggtttctnntgaatcgccagcggcatcagcaccttgtcgccttgcgtataatatttgcccatggtgaaaacgggggcgaagaagttgtccatattggccacgtttaaatcaaaactggtgaaactcacccagggattggctgagacgaaaaacatattctcaataaacccgtctttcattgccatacggaactccggatgagcattcatcaggcgggcaagaatgtgaataaaggccggataaaacttgtgcttatttttctttacggtctttaaaaaggccgtaatatccagctgaacggtctggttataggtacattgagcaactgactgaaatgcctcaaaatgttgtgaaatattttccgcatcagccagcgcagaaatatttccagcaaattcattctgcaatcggcttgcataacgctgaccacgttcataagcacttgttgggcgataatcgttacccaatctggataatgcagccatctgctcatcatccagctcgccaaccagaacacgataatcactttcggtaagtacagcagtggcttccgcagaggtcaatccgaatatttcagcatatttagcaacatggatctcgcagataccgtcatgttcctgtagggtgccatcagattttctgatctggtcaacgaacagatacagcatacgtttttgatcccgggagagactatatgccgcctcagtgaggtcgtttgactggacgattcgcgggctatttttacgtttcttgtgattgataaccgctgtttccgccatgacagatccatgtgaagtgtgacaagtttttagattgtcacactgcaggaagcggcggcggaagtcaggcatacgctggtaactttgaggcagctggtaacgctctatgatccagtcgattttcagagagacgatgcctgagccatccggcttacgatactgacacagggattcgtataaacgcatggcatacggattgggggttnctntangacccgagtnagacgtagcnaccagatgcggttttcccat

SEQ ID NO: 137791 - DNA, 3297 bp, Homo sapiens; identical to SEQ ID NO: 124764

SEQ ID NO: 137792 - DNA, 1437 bp, Homo sapiens
  misc_feature (1)...(1437): n = a,t,c or g
atggacgatatcccgcaagaggcccggcagtaccggcataaccaagcctatgcctacagcatccagggtgacggtgccgaggatgacgatgagcgcattgttagatttcatacacgggtcaccgtcgacagcgacacacttgcatcggatgcagcccggttaacgtgccggcacggcctgggtaaccagtctgggacacacggtcccactcgtatagacggtatgattattagtctgggaccacggtcccactcgtatggtcggtctgataatcagtactgggccctcggtcccactcgcatcgtcgatacttcgttatcgacaccagctgccccgatggtggattcgttaattgcgcgcgtaggagtaatggctcgcggtaatgccattactttgcctgtatgtggtcgggatgtgaagtttactcttgaagtgctccggggtgatagtgttgagaagacctctcgggtatggtcaggtaatgaacgtgaccaggagctgcttactgaggacgcactggatgatctcatcccttcttttctactgactggtcaacagacaccggcgttcggtcgaangaaaattgccgatgggagtcgccgtcgtaaagctgctgcacttaccgaaagtgattatcgtgttctggttggcgagctggatgatgagcagatggctgcattatccagattgggtaacgattatcgcccaacaagtgcttatgaacgtggtcagcgttatgcaagcggattgcagaatgaatttgctggaaatatttctgcgctggctgatgcggagggcatccgatatttgctcttccatccacggggattgagagccattactattgctgtatttggtaagcaaaatacgtacatcaggctcgaaccctttaagatcaacgttcttgagcagatcacgaagcatatcgaaaaactgcagtgcggaggtgtagtcaaacaactcagcaggcgtgggaacaatcagcacatcagcagcacatacgacattaatcgtgccgatacccaggttaggcgcgctgtcaataactatgacatcatagtcatgagcaacagtttcaatggccagtcggagcatcaggtgtggatcgatagaaaggcaggagagtgtcttctgcatgaatatgaagatctggtacccatccgtgatacattgaggctgttccctgggggtcgttaccttccacgagcaaaacacgtagccccttcagagccagatcctgagcaagatgaacagaaactgaggttttgtaaacgccacctttatggaaaacaaccccgatcaccggtggaaagggtctgggaccacggtcccactcgtatcgtcggtctgattattagtctgggaccacggtcccactcgtatcgtcggtctgataatcagactgggaccacggtcccactcgtatcgtcggtctga

SEQ ID NO: 137793 - DNA, 774 bp, Homo sapiens
atgcgtgatgtgtttggtacgcgattgcgacgtgctgaagacgtatttccaccggtgatcggggttgctgcccataaaggtggcgtttacaaaacctcagtttctgttcatcttgctcaggatctggctctgaaggggctacgtgttttgctcgtggaaggtaacgacccccagggaacagcctcaatgtatcacggatgggtaccagatcttcatattcatgcagaagacactctcctgcctttctatcttggggaaaaggacgatgtcacttatgcaataaagcccacttgctggccggggcttgacattattccttcctgtctggctctgcaccgtattgaaactgagttaatgggcaaatttgatgaaggtaaactgcccaccgatccacacctgatgctccgactggccattgaaactgttgctcatgactatgatgtcatagttattgacagcgcgcctaacctgggtatcggcacgattaatgtcgtatgtgctgctgatgtgctgattgttcccacgcctgctgagttgtttgactacacctccgcactgcagtttttcgatatgcttcgtgatctgctcaagaacgttgatcttaaagggttcgagcctgatgtacgtattttgcttaccaaatacagcaatatctgggaccacggtcccactcgtatcgtcggtctgattattagtctgggaccacggtcccactcgtatcgtcggtctgataatcagactgggaccacggtcccactcgtatcgtcggtctga

SEQ ID NO: 137794 - DNA, 763 bp, Homo sapiens
gctggatagtctgatcgacaatacaagtgggaccgtggtccagaccgataatcagaccgacaacacgagtgggatcgtggtccagactaataatcagaccgacgatacgagtgggaccgtggtcagaactaataatcagaccgacgatacgagtggggacgttggttcccctgcaggtcgactctagaggatcccctttgatgaaggtaaactgcccaccgatccacacctgatgctccgactggccattgaaactgatgctcatgactatgatgtcatagttattgacagcgcgcctaacctgggtatcggcacgattaatgtcgtatgtgctgctgatgtgctgattgttcccacgcctgctgagttgtttgactacacctccgcactgcagtttttcgatatgcttcgtgatctgctcaagaacgttgatcttaaagggttcgagcctgatgtacgtattttgcttaccaaatacagcaatagtaatggctctcagtccccgtggatggaggagcaaattcgggatgccggttgaagatacttcgttatcgacaccagctgccccgatggtggattcgttaattgcgcgcgtaggagtaatggctcgcggtaatgccattactttgcctgtatgtggtcgggatgtgaagtctactcttgaagtgctccggggtgatagtgttgagaagacctctcgggtatggtcaggtaatgaacgtgaccaggagctgcttactgaggacgcactggatgatctcat

SEQ ID NO: 137795 - DNA, 405 bp, Homo sapiens
atgaaactcatggaaacacttaaccagtgcataaacgctggtcatgaaatgacgaaggctatcgccattgcacagtttaatgatgacagcccggaagcgaggaaaataacccggcgctggagaataggtgaagcagcggatttagttggggtttcttctcaggctatcagagatgccgagaaagcagggcgactaccgcacccggatatggaaattcgaggacgggttgagcaacgtgttggttatacaattgaacaaattaatcatatgcgtgatgtgtttgtctgggaccacggtcccactcgtatcgtcggtctgattattagtctgggaccacggtcccactcgtatcgtcggtctgataatcagactgggaccacggtcccactcgtatcgtcggtctga

SEQ ID NO: 137796 - DNA, 439 bp, Homo sapiens
agtggtagtggttgggattaggaaattggaaggagagattagggacacagacaagaatgatttggtcacaaaaaactgccagaaggctttgcagaactttcagcggtataccggcatacagcatgtgcatcgcataggaatggcggaacgtatgtggtgtgaccggaacagagaacgtcacaccgtcagcagcagcggcggcaaccgcctccccaatccagactgggccccgggtccccctcgtatcgtcggtctgaatattagtctgggacccacggtccccactcgtatcgtcggtctgattattagtctgggaccacggtcccactcgtatcgtcggtctgataatcagactgggaccacggttcccactcgtatcgtcggtctgatattagttctgggaccatggtcccactcgtatcgtcggtctgattattag

SEQ ID NO: 137797 - DNA, 816 bp, Homo sapiens
atgcgtttatacgaatccctgtgtcagtatcgtaagccggatgcgtcaggcatcgtctctctgaaaatcgactggatcatagagcgttaccagctgcctcaaagttaccagcgtatgcctgacttccgccgccgcttcctgcatgaccgacgatacgagtgggaccgtggttccagactaataatcagaccgacgatacgagtgggaccgtggtccagactaataatcagaccgacgatacgagtgggaccatggtccaggactaataatcagaccgacgatacgagtgggaccgtggtcagatctgattatcagaccgacgatacgagtgggaccgtggtccagactaataatcagaccgacgatacgagtgggaccgtggtcagatctaataatcagaccgacgatacgagtgggaccgtggtccagtctgattatcagaccgacgatacaagtggaacagatgggcccacgagagaatattttcaaagtgtcaggtcgactctagaggatcccctggatgtggctgcccggcaccggtcgactctagaggatccccctattgctgtatttggtaagcaaaatacgtacatcaggctcgaaccctttaagatcaacgttcttgagcagatcacgaagcatatcgaaaaactgcagtgcggaggtgtagtcaaacaactcagcaggcgtgggaacaatcagcacatcagcagcacatacgacattaatcgtgccgatacccaggttaggcgcgctgtcaataactatgacatcatagtcatgagcaacagtttcaatggccagtcggagcatcag

SEQ ID NO: 137798 - DNA, 1174 bp, Homo sapiens
aacacctggcactgcttttgggctactgcacaccacagccccttggacagcacacttaaccatctgcattgcctccccaggggcccatgagctggagcagatgcaactcatcctggagaccatccctaatctatctgtgaggtccctcgactataggtgcaccgtcgacagcgacacacttgcatcggatgcagcccggttaacgtgccgcacggcctgggtaaccagactaataatcagaccgacgatacgagtgggaccgtggtcccagtctgattatcagaccgacgatacgagtggaccgtggtcccagactaataatcagaccgacgatacgagtggaccgtggtcccagactaataatcagaccgacgatacgagtggaccgtggtcccagtctgattatcagaccgacgatacaagtggaacacacctcatctcatctcccatcatcccccacactgaggctgttggcacctacgtcatggcctccctctccacaattggtcccacatcattctggctcctgacaacagcgcaggtaaatgtgtcaaaatctgatgacacactcaaaatcaacggagtggaagatcacaaaacgatttttgacggagacggaaaaacatatcagaacgttcagcagtttatcgatgaaggcaattatacatccggcgacaaccatacgctgagagaccctcactacgttgaagacaaaggccataaataccttgtattcgaagccaacacgggaacagaaaacggataccaaggcgaagaatctttatttaacaaagcgtactacggcggcggcacgaacttcttccgtaaagaaagccagaagcttcagcagagcgctaaaaaacgcgatgctgagttagcgaacggcgccctcggtatcatagagttaaataatgattacacattgaaaaaagtaatgaagccgctgatcacttcaaacacggtaactgatgaaatcgagcgcgcgaatgttttcaaaatgaacggcaaatggtacttgttcactgattcacgcggttcaaaaatgacgaatgatgcccttaactcaaacgatatttacatgcttggttatgtatcaaactctttaaccggcccttacaagccgctgaacaaaacaggcttgtgctgcaaatgggtcttgatccaaacgatgtga

SEQ ID NO: 137799 - DNA, 528 bp, Homo sapiens; identical to SEQ ID NO: 119467

SEQ ID NO: 137800 - DNA, 795 bp, Homo sapiens
ctatcctgtcgtcatggaagtgatatcgcggaaggaaaatacgatatgagtcgtctggcggcctttctttttctcaatgtatgagaggcgcattggagttctgctgttgatctcattaacacagacctgcaggaagcggcggcgggagtcaggcatacgctggtaactttgaagcagctggtaacgctctatgatccagtcgattttcagagagacgatgcctgagccatcccggctacgatacgacgatacgagtgggaccgtggtcccagtctgattatcagaccgacgatacgagtgggaccgtggtcccagactaataatcagaccgacgatacgagtgggaccgtggtcccagacaaatgcggtcaattgcccggtcaggtggtccagcgtaccctgatcaatcacttctccggtttgcggatcaactttgttctgaatcacgccgcccataaattccggcttgttcatcaccattgcatcgaggaaaaccagaatctggcgcaggtgatactgacagcgcgcgccgccaatcacgcccattgagctggtctgaatcaataccggtttaccggccagcggttgatccggcaggcgggaaagccagtcgatggcatttttcagcccacccggtaccgagtagttatattccggcgtgacgatcaccacaccgtcagcctgacggatctgttccgccagagcttcaaccgttgctggaaaaccttcttcctgctgtacgtcagcgtcatacaagggaatgtcggcaatggatggtaacgcattgacttccat

SEQ ID NO: 137801 - DNA, 723 bp, Homo sapiens
atgaaactcatggaaacacttaaccagtgcataaacgctggtcatgaaatgacgaaggctatcgccattgcacagtttaatgatgacagcccggaagcgaggaaaataacccggcgctggagaataggtgaagcagcggatttagttggggtttcttctcaggctatcagagatgccgagaaagcagggcgactaccgcacccggatatggaaattcgaggacgggttgagcaacgtgttggttatacaattgaacaaattaatcatatgcgtgatgtgtttggtacgcgattgcgacgtgctgaagacgtatttccaccggtgatcggggttgctgcccataaaggtggcgtttacaaaacctcagtttctgttcatcttgctcaggatctggctctgaaggggctacgtgtttgctcgtggaaggaacgacccccagggaacagcctcaatgtatcacggatggtctgggaccacgatcccactcgtgttgtcggtctgattatcggtctgggaccacggtcccacttgtattgtcgatcagactatcagcaacggagtaacctcggtgtgcggttgtatgcctgctgtggattgctgctgtgtcctgcttatccacaacattttgcgcacggttatgtggacaaaatacctggttacccaggccgtgccggcacgttaaccgggctgcatccgatgcaagtgtgtcgctgtcgacggtga

SEQ ID NO: 137802 - DNA, 1104 bp, Homo sapiens; identical to SEQ ID NO: 131375

SEQ ID NO: 137803 - DNA, 1440 bp, Homo sapiens
  misc_feature (1)...(1440): n = a,t,c or g
ttaatattgttccagtttgtccttcacggcggcgatcacttctcgggcgtttttgccggatcgcaggatcaccaccccgcccgccacttcgccttcgccgtttagttcggcaatgccccggcgcatctccgggccaatctggaccttcgcaacatcgcgcagataaacgggcacgccattttcactggcttttaaaacgatgtgattaaagtcgtcgagcgtttgcagatagccgctggcgcgcaccatatattccgcttccgccagttcgatcgacgaaccgcccgcttcctggtttgaagcatccagcgcgctttttacttcggcgagactgatgccatactgcgccaggcgctggggatcgataaccacctgatactctttcaccacaccgcccaccgacgccacttncgcaacgtcagggatggttttcagctcatatttgagaaaccagtcctgtaatgagcgtaaatcggccagatcgtgcttaccgctgcgatccaccagtgcatattcatagatccagccaacacccgtggcatctggccccagctcggcgctgactcccgcaggcagcttaccctgtaccgacgatacgagtgggaccgtggtcccagtctgattatcagaccgacgatacgagtgggaccgtggtcccagactaataatcagaccgacgatacgagtgggaccgtggtcccagacttcccccactaggccattttttgggatttttaaaaaaaaaaggggttttccccccattgggccaagctgattggctatgcgatgttcaccacggtagagaatatccaccattgtgcgtactggtgctttacctgcgtgtttctctttccagtcttccgcttccgggatgtttttacgcagccagagagcaaagatgattggcaaaatgccgataaagaacagcgcacgccagccccagaccggaaccaccaggctatagacctgagcggcaacgacggcccccacagagaagcctgaaatcaaaaaaccactggctttgttacgcagatgttttggccagctttcaatgacataggtggcgctggaaccgtattcacccgccatccccatgccgatgaccagacgagcgataaacatggtgatgtagcctggcgcaaagccgcaggccagcgtcccggccgagaagagaacgatgctggtgaccattgccagacgacgcccgtagcggtcacccatagcgccgagcatcaggccgccgaaccagcgagagataaaggctgcagagatcagacttgccgcctgcaccgtcgtcagcccgaattcaccttgtacttcggtgagtaccagggcgattaaaacgaaatcaaaaccgtcaagcagatatcccaaccaggcagcggaaaatgcgcgccattgtgcaccggtgagatggcgataccacgggatattcgccat

SEQ ID NO: 137804 - DNA, 827 bp, Homo sapiens
atggacgatatcccgcaagaggcccggcagtaccggcataaccaagcctatgcctacagcatccagggtgacggtgccgaggatgacgatgagcgcattgttagatttcatacacgggtcaccgtcgacagcgacacacttgcatcggatgcagcccggttaacgtgccggcacgctcggagtaaccagtgcggatgttcgactccaaacatcaaagccaacgagaggttcaggttactcctccttgaccccaaacatccagtgagtggagactggcctgttcacagagtaaaatatgtcgtctctaattcggcaaagacggtgatgactgtatatatgcaggccaattccgtaagtaaagtttcatgtaaaactaattaccggatattccaaccaccccctgtgcaggccagccgcatgcacaagggacaggatttattccccactggaagcaactggaaaactggaaaaaaatatacaaaacagcagttctcaagacattgtgtgccggcaacaaaggacagtgatgctggagagatgagaaataagcaagtctgggaccacggtcccactcgtatcgtcggtctgattattagtctgggaccacggtcccactcgtatcgtcggtctgataatcagactgggaccaccggtcccactcgtatcgtcggtctgattattagttgcaacctccgcctcccgatcaagttccactaccacatttgctctgcagccttcaggcagaaacaatacctttgctgagacgccttcttcgtttgtaaaaatgggaatgacatttgcaccatggcttttcacaatggcaagtg

SEQ ID NO: 137805 - DNA, 2188 bp, Homo sapiens
actaataatcagaccgacgatacgagtgggaccatggtccagcactaataatcagaccgacgatacgagtgggaccgtggtcagatctgattatcagaccgacgatacgagtgggaccgtggtcagtactaataatcagaccgacgatacgagtgggaccgtggtcagatctaataatcagaccgacgatacgagtgggaccgtgtgtgacaatctaaaaacttgtcacacttcacatggatctgtcatggcggaaacagcggttatcaatcacaagaaacgtaaaaatagcccgcgaatcgtccagtcaaacgacctcactgaggcggcatatagtctctcccgggatcaaaaacgtatgctgtatctgttcgttgaccagatcagaaaatctgatggcaccctacaggaacatgacggtatctgcgagatccatgttgctaaatatgctgaaatattcggattgacctctgcggaagcagatctggctctgaaggggctacgtgttttgctcgtggaaggtaacgacccccagggaacagcctcaatgcatcacggatgggtatcagatcttcatattcatgcagaagacactctcctgcctttctatcttggggaaaaggacgatgtcacttatgcaataaagcccacttgctggccggggcttgacattattccttcctgtctggctctgcaccgtattgaaactgagttaatgggcaaatttgatgaaggtagactgcccaccgatccacacctgatgctccgactggccattgaaactgttgcgcatgactatgatgtcatagttattgacagcgcgcctaacctgggtatcggcacgattaatgtcgtatgtgctgctgatgtgctgattgttcccacgcctgctgagttgtttgactacacctccgcactgcagtttctcgatatgcttcgtgatctgctcaagaacgttgatcttaaagggttcgagcctgatgtacgtattttgcttaccaaatacagcaatagtaatggctctcagtccccgtggatggaggagcaaattcgggatgccttgggaagcatggttctacaaaatgttgtacgtgaaacggatgaagttggtaaagtctgggaccacggtcccactcgtatcgtcggtctgattattagtctgggaccacggtcccactcgtatcgtcggtctgataatcagactgggaccacggtcccactcgtatcgtcggatctggctctgaaggggctacgtgttttgctcgtggaaggtaacgacccccagggaacagcctcaatgtatcacggatgggtaccagatcttcatattcatgcagaagacactctcctgcctttctatcttggggaaaaggacgatgtcacttatgcaataaagcccacttgctggccggggcttgacattattccttcctgtctggctctgcaccgtattgaaactgagttaatgggcaaatttgatgaaggtaaactgcccaccgatccacacctgatgctccgactggccattgaaactgttgctcatgactatgatgtcatagttattgacagcgcgcctaacctgggtatcggcacgattaatgtcgtatgtgctgctgatgtgctgattgttcccacgcctgctgagttgtttgactacacctccgcactgcagtttttcgatatgcttcgtgatctgctcaagaacgttgatcttaaagggttcgagcctgatgtacttattgacagcgcgcctaacctgggtatcggcacgattaatgtcgtatgtgctgctgatgtgctgattgttcccacgcctgctgagttgtttgactacacctccgcactgcagtttttcgatatgcttcgtgatctgctcaagaacgttgatcttaaagggttcgagcctgatgtacgtattttgcttaccaaatacagcaatagtaatggctctcagtccccgtggatggaggagcaaattcgggatgcctggggaagcatggttctaaaaaatgttgtacgtgaaacggatgaagttggtaaaggtcagatccggatgagaactgtttttgaacaggccattgatcaacgctcttcaactggtgcctggagaaatgctctttctatttgggaacctgtctgcaatgaaattttcgatcgtctgattaaaccacgctgggagattagataa

SEQ ID NO: 137806 - DNA, 2305 bp, Homo sapiens
agaatccccgaatggagtgagctcttccagcacagctgacaagtcccagaagcagtccctgacccccagctttcagagcccagccaccagcttggggctggatgaaggggtctccgccagctcagctggagccggagccggggagactctgaagcaggaatgtgactccctgggcccccagatggcgagcagcaccacctccaagccgtcatcatcatcctcaggacccaggaccctcccatggccgggacagcccatcagaggctgccggggcccacaggcagccctgccaccagtggtgatcctatccaaagcggcctacagtctcctgggctcccagaagagtggcaagctgccatcctcctcctccctgctgccccacgccgacgtggcctgggtgagctccctgcggccactcctgaacaaggacatgagcagtgaggagcagtccctctactacaggcagtggaccttggcccggcagcaccacgctgactatagcaaccagctggacccggcctctggcacccgaaacttccacccccgacggctcctgctgacagggcccccacagactaataatcagaccgacgataccgagtgggaccgtggtccccgactcataatcagaccgacgatacgagtgggaccgtggttccagactaataatcagaccgacgatacgagtgggaccgtggtcccagatgttatcaggaactggcttctctttcaggcggccatttcctctgttatcccaaaatggctgccagcagcttcctggccagcatctttctgatttctcatcctgtgaaaaggtgggggcctttgtctcagcattccctgcattaaacttgttgaattcaaatggaattttcttgggcccaaacatgtcacactcatttctgagccaaacatgctgcctgccatctggagagacttgtgccaaatatgatgacatcatgaaggtggcgaagcaggctttggagggtcccctcaagggcatcctgggcatcgtgagcaccaggttgtctcctctgactttaacagtgacactcattcttccacttttgatgctgggactggcattgctctcaatgaccactttgttaagctcatttcctgatatgaccatgaatttgggtatgggccactcgcccttaaagacggtttttcggcctttgacgtggaagccccgttttttaataatggactcttgttcccaactggaaccacctctcaaccttatctcggggtattcttttgatttataaagggattttgccgatttgggaccccccatcaaacaggattttcgcctgctggggcaaaccagcgtggaccgcttgttgcaactctctcccgccaacattattatgtaggagccccaataaattttggcactttcaatagggggaccttctagtcctgggtaatgtttcagtatgattccacccatggcaagttccacagtaccatcaaggctgagaacgggaagcttgtcatcagtggaaatcccataaccatcttccaggagtgagatccctatctggggtattctttgattatagggattttgccgattcggaaacaccatcaacaggattttcgctgctggggcaaaccagcgtggaccgcttgctgcacttctctcagggccaggcggtgaagggcaatcagctgttgcccgtctcacttcccaatcagctcttacagattcatcatgacacttcagtgtagcagcttgctcattaacacctggcctgcattcactttcagttgttactaatttgatgatgatcatttgatttattctgatcatcttttgctcaagggcccacatttgcagccacctcatctcagtctcttggaaattgcacccttccacgagcaaaacacgtagccccttcagagccagatcctgagcaagatgaacagaaactgaggttttgtaaacgccacctttatgggcagcaaccccgatcaccggtggaaatacgtcttcagcacgtcgcaatcgcgtaccaaacacatcacgcatatgattaatttgttcaattgtataaccaacacgttgctcaacccgtcctcgaatttccatatccgggtgcggtagtcgccctgctttctcggcatctctgatagcctgagaagaaaccccaactaaatccgctgcttcacctattctccagcgccgggttattttcctcgcttccgggctgtcatcattaaactgtgcaatggcgatagccttcgtcatttcatgaccagcgtttatgcactggttaagtgtttccatgagtttcat

SEQ ID NO: 137807 - DNA, 3226 bp, Homo sapiens
  misc_feature (1)...(3226): n = a,t,c or g
tcagaccgacgatacgagtgggaccgtggtcccagtctgattatcagaccgacgatacgagtgggaccgtggtcccagactaataatcagaccgacgatacgagtgggaccgtggtcccagatcatggcctttgtcttaacgtagtgagggtctctcagcgtatggttgtcgccggatgtataattgccttcatcgataaactgctgaacgttctgatatgtttttccgtctccgtcaaaaatcgttttgtgatcttccactccgttgattttgagtgtgtcatcagattttgacacatttacctgcgctgttgtcaggctttgtttgccgtaatgtttaccggaatagtcagtgtagaataaacggatttttccgtcagatgtaaaggttgcagaaccggaccattcttgcgtctgatctttcaggatcggatcgttggcgtcgaacttatcgctgtctttaaagacacggcccgcgtttttccagctgtcgattgagttgtcgccgaccttttgataaaacatgtagattgatgtgtcatcagcgtctttcgggcttcccgcaagagcaaacacaacgtgatagccgttgtattcagctactgttccgtcagcgttttgcagcggccagctgtcccacacatcaagtccttttgcagactcaatatttttaatcgttgattgatcgaattgaggcacttggtatttttcgttttgctgctgtttnaggatctgcagcatatcatggcgtgtaatatgagagacgccgtacgtttctttgtatgcttttttggtattttctttcgcgaaggcttgattcgctcctcctgccagaagtgcagtcgtaaaagtcagaacgcctttcgtgcatgcatccaggtctactgtagnagatcccctcatggcctttgtcttcacgtagtgagggtctctcagcgtatggttgtcgccgggtgtataattgccttcatcgataaactgctgaacgttctgatatgtttttccgtctccgtcaaaaatcgttttgtgatcttccactccgttgattttgagtgtgtcatcagattttgacacatttacctgcgctgttgtcaggctttgtttgccgtaatgtttaccggaatagtcagtgtagaataaacggatttttccgtcagatgtaaaggttgcagaaccggaccattcttgcgtctgatctttcaggatcggatcgttggcgtcgaacttatcgctgtctttaaagacacggcccgcgtttttccagctgtcgattgagttgtcgccgaccttttgataaaacatgtagattgatgtgtcatcagcgtctttcgggcttcccgcaagagcaaacacaacgtgatagccgttgtattcagctactgttccgtcagcgttttgcagcggccagctgtcccacacatcaagtccttttgcagactcaatatttttaatcgttgattgatcgaattgaggcacttggtatttttcgttttgctgctgtttagggatctgcagcatatcatggcgtgtaatatgagagacgccgtacgtttctttgtatgctttttggttattttctttcgcgaaggcttgagtcgctcctcgtatatgagtgtaggcagttaaaaacagccagatcacatcttgaatggttttctgtttagaattttcttccactagatactctaaatcatcattctcaagttcaaacttccacaaatcatcgatcgtcatttttgaaccgcgtgaatcagtgaacaagtaccatttgccgttcattttgaaaacattcgcgcgctcgatttcatcagttaccgtgtttgaagtgatcagcggcttcattacttttttcaatgtgtaatcattatttaactctatgataccgagggcgccgttcgctaactcagcatcgcgttttttagcgctctgctgaagcttctggctttctttacggaagaagttcgtgccgccgccgtagtacgctttgttaaataaagattcttcgccttggtatccgttttctgttcccgtgttggcttcgaatacaaggtatttatggcctttgtcttcaacgtagtgagggtctctcagcgtatggttgtcgccggatgtataattgccttcatcgataaactgctgaacgttctgatatgtttttccgtctccgtcaaaaatcgttttgtgatcttccactccgttgattttgagtgtgtcatcagattttgacacatttacctgcgctgttgtcaggctttgtttgccgtaatgtttaccggaatagtcagtgtagaataaacggatttttccgtcagatgtaaaggttgcagaaccggaccattcttgcgtctgatctttcaggatcggatcgttggcgtcgaacttatcgctgtctttaaagacacggcccgcgtttttccagctgtcgattgagttgtcgccgacgggggttctttagagtccaccaaacaggtttcaacctcagtccccggtttaacgtgccggctcgggccgacgatacgagtgggaccgtggtcccagtctgattatcagaccgacgatacgagtgggaccgtggtcccagactaataatcagaccgacgatacgagtgggaccgtggtcccagaacatgagaaagtcatacttgagttgctcaggtaactcctctgctacatcaaacagctgatatcttgatttcagtttcagtgctctttccaccacatacccagctgtcanttcttgcgtctgatctttcaggatcggatcgttggcgtcgaacttatcgctgtctttaaagacacggcccgcgtttttccagctgtcgattgagttgtcgccgaccttttgataaaacatgtagattgatgtgtcatcagcgtctttcgggcttcccgcaagagcaaacacaacgtgatagccgttgtattcagctactgttccgtcagcgttttgcagcggccagctgtcccacacatcaagtccttttgcagactcaatatttttaatcgttgattgatcgaattgaggcacttggtatttttcgttttgctgctgtttagggatctgcagcatatcatggcgtgtaatatgagagacgccgtacgtttctttgtatgctttttggttattttctttcgcgaaggcttgagtcgctcctcctgccagaagtgcagtcgtaaaagtcagaactgtggcttgttttacaatttttttgatgttcatgttcat

SEQ ID NO: 137808 - DNA, 1301 bp, Homo sapiens
gagagggctctactctgagctcctatttttcaaggctccgggccgcgctcggcgctggcctgctgccccggcgggtccgccggccggaggcgggagtcacaggaagagccctccacaaaaggaggcctcgggggatcaggacagctgcaggtgggtgtgcacactggtgagctgccagcaggggcccagacgcgccaggcctggagatggctggaaactgctcctgggaggcccatcccggcaacaggaacaagatgtgccctggcctgagcgaggccccggaactctacaggcggggcttcctgaccatcgagcagatcgcgatgctgccgcctccggccgtcatgaactacatcttcctgctcctctgcctgtgtggcctggtgggcaacgggctggtcctctggtttttcggcttctccatcaagaggaaccccttctccatctacttcctgcacctggccagcgccgatgtgggctacctcttcagcaaggcgctgttctccatcctgaacacggggggcttcatgggcacgtttgcagactacatccgcagcgtgtgccgggtactggggctctgcatgttacttacaggcggtcctgctgatgcctgctggctgggacgagaggggggtgcggtcagaaagggcctggtgcactgtggaaacaggtcgggtgcacaggtcacgtgtgagagtcagccgcaataccgcacgcgatccagcaaatgggcttgggcatttgctgcagagtcttggaatgcctgctctggagcccggacccaccctgggatctgctttgcgctgggagtttctgcagactgcctcaccccaactaccagtccaacctctgcatcctgcggccgccactccacagcggtcactacggggaagagggagagggcccaaggcaagggcgttgggtctgggaccacggtccacatcgtatcgtcggtcatgattattagtctgggaccacggtccactcgtatcgtcggtctgataatcagactgggaccacggtcccctcgtatcgtcggtctgattattagtctgggaccatggtcacatcgtatcgtcgtctgggaccacggtacacatcgtatcgtcggtctgattattagtctgggaccacgatcccactcgtgttgtcggtctgactatcggtatgggacacggtccacttgtattgtcgatcagactatcagcgtgagactacgacttcatcaatgtctgtcaacggcaagtattgacatgtcgtcgctaactgtagtacggagtaacctacggtatgccgtttga

SEQ ID NO: 137809 - DNA, 1252 bp, Homo sapiens
  misc_feature (1)...(1252): n = a,t,c or g
atgcccaaatcttgtcatggcacagattcatgcctttccctgcagcgactgagaatctctaaattcttggatgatggcagcagttggtctccctggatggtcttcactgaggagctggatgcaatctgggaggcctcaaaatccttcaaaactctgggccattattcggtttcaaaaccgggtttctcaatttctagggatcttgaatgcgatgaggtcgactctagaggatccccgaatgcctatgccaaaagcatccagggtgacggtgccgaggatgacgatgagcgcattgttagatttcatacacgggtcaccgtcgacagcgacacacttgcatcggatgcagcccggttaacgtgccggcaccgctgggtaaccaggtattttgtccacataaccgtgcgcaaaatgttgtggataagcaggacacagcagcaatccacagcaggcatacaaccgcacaccgagtctcacgctgatagtctgatcgacaatacaagtgggaccgtggtccagaccgataatcagaccgacaaacacgagtgggatcgtggtcccagaactaataatcagaccgacgatacgagttgggaccgtggtcccagaactaataaatcagaacgacgatacgagtgggganccgtggtcccagactattaatcagaacgacgatacgagtgggaccgtggtcccagactaataatcagaccgacgatacgagtgggaccatggtcccagactaataatccgaacggacgataccgggttgggacgttgtcccagttctggattttcaggacgccggtacgagtgggaccgtggtcccagacttattaaatcagacggacgttacgagttgggaccgtggtcccagactaataatcagaccgacgatacgagtgggaccgtggtcccagtctgattattacaccggccatttccagtggaacaggggggcccagaaatgatatttctggccagttatgctttctggcctgtaacaaaggacattaagtaaagacagataaacgtagactaaaacgtggtcgcatcagggtgctggcttttcaagttccttaagaatggcctcaattttctctatacactcagttggaacacgagacctgtccaggttaagcaccattttatcgcccttatacaatactgtcgctccaggagcaaactgatgtcgtgagcttaaactagttcttgatgcagatgacgttttaagcacagaagttaaaagagt

SEQ ID NO: 137810 - DNA, 3252 bp, Homo sapiens
  misc_feature (1)...(3252): n = a,t,c or g
atggtgatggaaataaaagatgaaagtccttcctatattcctgcagagtacagcacaatccacagcccatcaacacccattaaagattcagattctgatcgattgcgtcgaggttcagatgggaaatcacgtggacggggccgaagaaacaataatccttcacctcccccagattctgatcttgagggattttgccgatttcggaaccaccatcaaacaggattttcgcctgctggggcaaaccagcgtggaccgcttgctgcaactctctcagggccaggcggtgaagggcaatcagctgttgcccgtctcactggtgaaaagaaaaaccaccctggcgcccaatacgcaaaccgcctctccccgcgcgttggccgattcattaatgcagctggcacgacaggtttcccgactggaaagcgggcagtgagcgcaacgcaattaatcagaactcttagacactcagcctctgcatctttatttcctctctgccttcttatcaaccctggggtatttgccaatctaacccctgacgtttggcaatactatgtcctctgcttcccttccactgtcagtcagctggcagaaaaggcacaggcaggagaggaactgagggattttgcgattttcggaaccaccatcaaacaggattttcgcctgctggggcaaaccagcgtggaccgcttgctgcaactctctcagggccaggcggtgaagggcaatcagctgttgcccgtctcactggtgaaaagaaaaaccaccctggcgcccaatacgcaaaccgcctctccccgcgcgttggccgattcattaatgcagctggcacgacaggtttcccgactggaaagcgggcaatcttttgctcatctcacactctttgaacagctatttcagacaaggacattcattaatggtttagaactggaggaacccctaacccagagctcagaaattggcaaagggagatgtccaggtcccaccaagactgaatggggaggagaaggaagaagaaagatgtgtggctggtctcaagccggggatcctctagagtcaaaactggaggtctatgcaaccacagtatctttccatcacccaagcagccaagctctggttgtgggcagcccctctcctttaggcccaaactccagaaagaaggtggcagccaagggtcccaggcnagtctgggaccacgatcccactcgtgttgtcggtctgattatcggtctgggaccacggtcccacttgtattgtcgatcagactatcagcgtgagactacgattccatcaatgcctgtcaagggcaaggattttgccgatttcggaaccaccatcaaacaggattttcgcctgctggggcaaaccagcgtggaccgcttgctgcaactctctcagggccaggcggtgaagggcaatcagctgttgcccgtctcactggtgaaaagaaaaaccaccctggcgcccaatacgcaaaccgcctctccccgcgcgttggccgattcattaatgcagctggcacgacaggtttcccgactggaaagcgggcaggattttgccgatttcggaaccaccatcaaacaggattttcgcctgctggggcaaaccagcgtggaccgcttgctgcaactctctcagggccaggcggtgaagggcaatcagctgttgcccgtctcactggtgaaaagaaaaaccaccctggcgcccaatacgcaaaccgcctctccccgcgcgttggccgattcattaatgcagctggcacgacaggtggtatttttgaatatgtcttatctggcccaatgggagctgaggaacttgcattcagatttgctgtgaacacaattaacagaaacagaacattgctacccaatactacccttacctatgatacccagaagataaacctttatgatagttttgaagcatccaagaaagggattttgccgatttcggataccaccatcaaacaggattttcgcctgctggggcaaaccagcgtggaccgcttgctgcaactctctcagggccagacggtgaagggcaatcagctgttgcccgtctcactgtattatccggataataatcagaccgacgattcgagggggaccgtggttccagacttaaaaacggacggcgaatacgagggggacggtggtccccagactaataatcagaccgccgatacgagtgggaccatggtgttaggttacaaaacatctcagttaagagagctgataaccaaaggttcaaccactgtgggtagtcagtacgtgcatttcttcaagagaattacaaattggaaaaaaccaattcgagcccagccatacccattcaagggactaataatcagacgcacgatacgagtgggaccatggtcccagctatataatcagaccgctgatacgagtgggacggtggtcccagtctcattatcagaccgaccatacgagtgggaccgtggtcccagactaataatcagaccgactatacgagtgggaccgtggtcccagactaataatcagaccgtcgatacgagtgggaccgtggtcccagtctgattatcagaccgacgggtaccgagctcgaattcttaatcatggtcatagctgtttgatcagaaaatctgatggcaccctacaggaacatgacggtatctgcgagatccatgttgctaaatatgctgaaatattcggattgacctctgcggaagccagtaaggatatacggcaggcattgaagagtttcgcggggaaggaagtggttttttatcgccctgaagaggatgccggcgatgaaaaaggctatgaatcttttccttggtttatcaaacgtgcgcacagtccatccagagggctttacagtgtacatatcaacccatatctcattcccttctttatcgggttacagaaccggtttacgcagtttcggcttagtgaaacaaaagaaatcaccaatccgtatgccatgcgtttatacgaatccctgtgtcagtatcgtaagccggatggctcangcatcgtctctctgaaaatcgactggatcatagagcgttaccagctgcctcaaagttaccagcgtatgcctgacttccgccgccgcttcctgcaggtctgtgttaatgagatcaacagcagaactcccatgcgcctctcatacattgagaaaaagaaagccggcagacactcatatcggattttcctttcgcgatatactttcatgacgacggataatctgagggttatctgtcacagattgaag

SEQ ID NO: 137811 - DNA, 1955 bp, Homo sapiens
atgaagcgtgcgcctgttattccaaaacatacgctcaatactcaaccggttgaagatacttcgttatcgacaccagctgccccgatggtggattcgttaattgcgcgcgtaggagtaatggctcgcggtaatgccattactttgcctgtatgtggtcggggatgtgaagtttactcttgaagtgctccggggtgatagtgttgagaagacctctcgggtatggtcaggtaatgaacgtgaccaggagctgcttactgaggacgcactggatgatctcatcccttcttttctactgactggtcaacagacaccggcgttcggtcgaagagtatctggtgtcatagaaattgccgatgggagtcgccgtcgtaaagctgctgcacttaccgaaagtgattatcgtgttctggttggcgagctggatgatgagcagatggctgcattatccagattgggtaacgattatcgcccaacaagtgcttatgaacgtggtcagcgttatgcaagccgattgcagaatgaatttgctggaaatatttctgcgctggctgatgcggaaaatatttcactctgggaccacggtcccactcgtatcgtcggtctgattattagtctgggaccacgatcccactcgtgttgtcggtctgattatcggtctgggaccacggtcccacttgtattgtcgatccagactatcagcctctgagccatggggaggaagcagacacaaaggaagtggagcattgggtttaactgggattggagttttaccaaatgagcatgcaaagagagcagaccaccgcagaaccaaaggtgtgagccaaggagcgcttctgatgatcaaccatggatttgaagtggggaacgagggaaggagggacaaaccttctgggatagctactctggttatccccggttacaaacgaggacacttgcccgtggccacacagctagcgaggaatggcaaggaacgcagttcctcaccagcaacggaacaaagctggatggagaatgactttgacgagctgagagaagaaggcttcagacgatcaaattactctgagctatgggaggacattcaaaccaaaggcaaagaagttgaaaactttgaaaaaaatttagaagaatgtataactagaataaccaatacagagaagtgcttaaagaagctgatggagctgaaaaccaaggctcgagaactacgtgaagaatgcagaagcctcaggagccgatgcgatcaactggaagaaagtttttcgatatgcttcgtgatctgctcaagaacgttgatcttaaagggttcgagcctgatgtacgtattttgcttaccaaatacagcaatagtaatggctctcagtccccgtggatggaggagcaaattcgggatgcctggggaagcatggttctaaaaaatgttgtacgtgaaacggatgaagttggtaaagatacttcgttatcgacaccagctgccccgatggtggattcgttaattgcgcgcgtaggagtaatggctcgcggtaatgccattactttgcctgtatgtggtcgggatgtgaagtttactcttgaagtgctccggggtgatagtgttgagaagacctctcgggtttggtcagatgcagatgcctacactcaaatgcagaaactcccatataatttgcagcaaatgctgacaccagccctcgtgggcctttcttgtgccgatgaaaggaacccaatgctgggcttaaaacaagttggtacgggtttgcaaacaagttcatttggaacaaaccaaggcaaaaccaaactaaacataatctgggaccacggtcccactcgtatcgtcggtctgattattagtctgggaccacgatcccactcgtgttgtcggtctgattatcggtctgggaccaccgtcccacttgtattgtcgatcagactatcagggtgggactacgattccatcaatgcct

SEQ ID NO: 137812 - DNA, 795 bp, Homo sapiens
acaccggcgttcggtcgaagagtatctggtgtcatagaaattgccgatgggagtcgccgtcgtaaagctgctgcacttaccgaaagtgattatcgtgttctggttggcgagctggatgatgagcagatggctgcattatccagattgggtaacgattatcgcccaacaagtgcttatgaacgtggtcagcgttatgcaagccgattgcagaatgaatttgctggaaatatttctgcgctggctgatgcggaaaatatttcacgtaagattattacccgctgtatcaacaccgccaaattgcctaaatcagttgttgctcttttttctcaccccggtgaactatctgcccggtcagaccgacgatacgagtgggaccgtggtcccagtctgattatcagaccgacgatacgagtgggaccgtggtcccagactaataatcagaccgacgatacgagtgggaccgtggtcccagactcttggtggctttatgatgggggttctggatgagatagctttggaatcagcagactgcataagctgattgccctctccatatgggaaggccttgtctgattgactaaggcccctgtagaacggagtaacctcggtgtgcggttgtatgcctgctgtggattgctgctgtgtcctgcttatccacaacattttgcgcacgggtattgtggaccaaaatacctggttacccaggccgtgccggcacgttatccgggctgcatccgatgcaagtgtgtcgctgtcgacgagctcgcgagctcggacatgaggttgccctgttct

SEQ ID NO: 137813 - DNA, 5124 bp, Homo sapiens
ctaataatcagaccgacgatacgagtgggaccatggtccagtactaataatcagaccgacgatacgagtgggaccgtggtcagatctgattatcagaccgacgatacgagtgggaccgtggtcagatctaataatcagaccgacgatacgagtgggaccgtggtcagcactaataatcagaccgacgatacgagtgggaccgtggtccagtctgattatcagaccgacgatacaagtggaacagtgggcccagagagaatattcaggccagttatgctttctggctgcccgctttccagtcgggaaacctgtcgtgccagctgcattaatgaatcggccaacgcgcggggagaggcggtttgcgtattgggcgccagggtggtttttcttttcaccagtgagacgggcaacagctgattgcccttcaccgcctggccctgagagagttgcagcaagacggtccacgctggtttgccccagcaggcgaaaatcctgtttgatggtggttccgaaatcggcaaaatccgccccgccctgccactcatcgcagtagtgttgtaattcatgcagcattctgccgacatggaagccatcacaagcggcatgatgaacgtgtatcgccagcggcatcagcacgttgtcgccttgcgtataatatttgcccatggtgaaaacgggggcgaagaagttgtccatattggccacgtttaaatcaaaactggtgacactcacacagggattgtctgagacgaaacacatattctctataaaccctttagggatataggccaggttttcactgtaacacgccacatcttgcgaatatatgtgtagaaactgccggatatcgtcgtggtattcactccagagcgatgaaaacgtttcagtttgctcatggaaaacggtgtaacaagggtgaacactatcccatatcaccagctcactgtctttcattgccatacggaactccgtatgagcattcatcaggcgggcaagaatgtgaataaaggccggataaaacttgtgcttatttttctttacggtctttaaaaaggccgtaatatccagctgagcggtcgacgatacgagtgggaccgtggtcccagtctgattatcagaccgacgatacgagtgggaccgtggtcccagactaataatcagaccgacgatacgagtgggaccgtggtcccagacatcgatcgtcatttttgaaccgcgtgaatcagtgaacaagtaccatttgccgttcattttgaaaacattcgcgcgctcgatttcatcagttaccgtgtttgaagtgatcagcggcttcattacttttttcaatgtgtaatcattatttaactctatgataccgagggcgccgttcgctaactcagcatcgcgttttttagcgctctgctgaagcttctggctttctttacggaagaagttcgtgccgccgccgtagtacgctttgttaaataaagattcttcgccttggtatccgttttctgttcccgtgttggcttcgaatacaaggtatttatggcctttgtcttcaacgtagtgagggtctctcagcgtatggttgtcgccggatgtataattgccttcatcgataaactgctgaacgttgatatgagtcgtctggcggcctttctttttctcaatgtatgagaggcgcattggagttctgctgttgatctcattaacacagacttgcaggaagcggcggcggaagtcaggcatacgctggtaactttgaggcagctggtaacgctctatgatccagtcgattttcagagagacgatgcctgagccatccggcttacgatactgacacagggattcgtataaacgcatggcatacggattggtgatttcttttgtttcactaagccgaaactgcgtaaaccggttctgtaacccgataaagaagggaatgagatatgggttgatatgtacactgtaaagccctctggatggactgtgcgcacgtttgataaaccaaggaaaagattcatagcctttttcatcgccggcatcctcttcagggcgataaaaaaccacttccttccccgcgaaactcttcaatgcctgccgtatatccttactggcttccgcagaggtcaatccgaatatttcagcatatttagcaacatggatctcgcagataccgtcatgttcctgtagggtgccatcagatttttctagaggatccccgcggcggaagtcaggcatacgctggtaactttgaggcagctggtaacgctctatgatccagtcgattttcagagagacgatgcctgagccatccggcttacgatactgacacagggattcgtataaacgcatggcatacggattggtgatttcttttgtttcactaagccgaaactgcgtaaaccggttctgtaacccgataaagaagggaatgagatatgggttgatatgtacactgtaaagccctctggatggactgtgcgcacgtttgataaaccaaggaaaagattcatagcctttttcatcgccggcatcctcttcagggcgataaaaaaccacttccttccccgcgaaactcttcaatgcctgccgtatatccttactggcttccgcagaggtcaatccgaatatttcagcatatttagcaacatggatctcgcagataccgtcatgttcctgtagggtgccatcagattttctgatcccagcttttttctgctcatgaaggttagatgcctgctgcttaagtaattcctctttatctgtaaaggctttttgaagtgcatcacctgaccgggcagatagttcaccggggtgagaaaaaagagcaacaactgatttaggcaatttggcggtgttgatacagcgggtaataatcttacgtgaaatattttccgcatcagccagcgcagaaatatttccagcaaattcattctgcaatcggcttgcataacgctgaccacgttcataagcacttgttgggcgataatcgttacccaatctggataatgcagccatctgctcatcatccagctcgccaaccagaacacgataatcactttcggtaagtgcagcagctttacgacggcgactcccatcggcaatttctatgacaccagatactcttcgaccgaacgccggtgtcaggacctcatgcacatctaaggtgctgtgactgtgacatgcagctgcaaagaatgatttgcctctacactcacctgcagtccttggagagccgctgcatcggtccattctcaccctgctacgaagagctacctgataccgggtagttgcccgctttccagtcgggaaacctgtcgtgccagctgcattaatgaatcggccaacgcgcggggagaggcggtttgcgtattgggcgccagggtggtttttcttttcaccagtgagacgggcaacagctgattgcccttcaccgcctggccctgagagagttgcagcaagcggtccacgctggtttgccccagcaggcgaaaatcctgtttgatggtggttccgaaatcggcaaaatcccttataaatcaaaagaatagcccgagatagggttgagtgttgttccagtttggaacaagagtccagggtttcagggccgaaaacagactggagggtgccccacacagcgctgccggatgaggtgcaagttagtttctgtgtctggctgacaagtcggacatggcctgcggctgcctccacaagcaagaaaacctttacagctaattttcgtggaccgagaactggaaaaccccaagcttcaccacggaatgaacagacgtcggctgcaacatactctgtggtaaaagtgttaacatcacggcatcctccctggttttgcaccgacgatacgagtgggaccgtggtcccagtctgattatcagaccgacgatacgagtgggaccgtggtcccagactaataatcagaccgacgatacgagtgggaccgtggtcccagaccctttccaccggtgatcggggttgttttccataaaggtggcgtttacaaaacctcagtttctgttcatcttgctcaggatctggctctgaaggggctacgtgttttgctcgtggaaggtaacgacccccagggaacagcctcaatgtatcacggatgggtaccagatcttcatattcatgcagaagacactctcctgcctttctatcttggggaaaaggacgatgtcacttatgcaataaagcccacttgctggccggggcttgacattattccttcctgtctggctctgcaccgtattgaaactgagttaatgggcaaatttgatgaaggtaaactgcccaccgatccacacctgatgctccgcctggccattgaaactgttgctcatgactatgatgtcatagttattgacagcgcgcctaacctgggtatcggcacgattaatgtcactaataatcagaccgacgatacgagtgggaccatggtcccagactacataatcagaccgacgatacgagtgggaccgtggtcccagtctgattatcagaccgacgatacgagtgggaccgtggtcccagactaataatcagaccgacgatacgagtgggaccgtggtccccagactgacggcacgtatcgccgccaatccggtaccgatcagcatcgccaagaacagcgcactgtacaaccagtacgtgcggggtaccgagctcgaattcgtaatcatggtcatagctgtttccttccacgagcaaaacacgtagccccttcagagccagatcctgagcaagatgaacagaaactgaggttttgtaaacgccacctttatgggcagcaaccccgatcaccggtggaaatacgtcttcagcacgtcgcaatcgcgtaccaaacacatcacgcatatgattaatttgttcaattgtataaccaacacgttgctcaacccgtcctcgaatttccatatccgggtgcggtagtcgccctgctttctcggcatctctgatagcctgagaagaaaccccaactaaatccgctgcttcacctattctccagcgccgggttattttcctcgcttccgggctgtcatcattaaactgtgcaatggcgatagccttcgtcatttcatgaccagcgtttatgcactggttaagtgtttccatgagtttcat

SEQ ID NO: 137814 - DNA, 462 bp, Homo sapiens
ctaagtttggatcaagagcaccttgttagaattaggaatgctggatttggtgtgaacttggtgctgagttacatcatcagccataagcttccagccactggaaatcttcctatagacaacagtcctcacttcccagatgcagagcaagccagagaactttacatctcctgctccaaggctgggctgtattgggaccactagaataacaataacaacatagaatgtatgtacacaggcatgcatgcgtgcatgcgtgtgcacaggcacacacacattcacacactgtcctttagcacgagccacaagatgaatatatgtgctggctagggaattcatctgaagttgcttgccattccaccatcttccagctcctaaaatgctggtgttattgtgtccggaatttagtccttctggtgggttcttggtcttgctgacttcagggatgaagccgtggaccttcat

SEQ ID NO: 137815 - DNA, 756 bp, Homo sapiens
atggttctcagtgaggatgaaggctcaccaggacaaggcaaatgcacatttgtgaccataagtaattcctatcgagcagaagctgctaggtggctactgtgctcttccaccttccaggatcacaaccactctcagtgccccatgcagccacctcagcccctggtcccatcgactgcccaagggctgtggagtgcgggtgcacgggccggactgtgggcagctccacctgtggcccctgtgcgagatccactaggtgaagccagctggactcctgagtctaagcaggctgtaggagagttccctgaggtagaaggaggaaaagaaaaggagactgggggaatgagctctgtgtatgagcatgttcaggggatgggagcaagagaggggtttacatctcctgggaaggcccagggagcccgaccctacgttctggcttccgttagagcaaaaaccctcaccggcacgcggcgagcgtccatgctggtggcgggtgcccagatcggcgcttggagcggggagagcggagcagccgcgcggtcagcggtcccacagcaggaggagcagcagcagcgcggctggcaggctgggcgcgccgacccgggcccggaggggcggggctcgggctgtctttcccgcgttgggacacaggtcctgcaagctgtgcacaggaagccgacttgtttacttgtggttttcaaagtagaagaaaagccgcagcagcttgatgaagacgtctatagtatagttaacctttaa

SEQ ID NO: 137816 - DNA, 1212 bp, Homo sapiens; identical to SEQ ID NO: 123565

SEQ ID NO: 137817 - DNA, 1239 bp, Homo sapiens; identical to SEQ ID NO: 115157

SEQ ID NO: 137818 - DNA, 448 bp, Homo sapiens
actacttgaagaatgcagaagcctcaggagccgatgcgatcaactggaagaaagggtatcagcaatggaagatgaaatgaatgaaatgaagtgagaagggaagtttagagaaaaaagaataagccctaaaagagcgcctgaaagaagcgctaaacatggaaaggaacaaccagtaccagccgctgcaaaatcatgccaaaatgtaaacaccatcgagactaggaagaaactgcatcaactaacgagcaaaataaccagctaacatcataatgacaggatcaaattcacacataacaatattaactttaaatgtaaatggactaaatgctccaattaaaagacacagactggcaaattggataaagagtcaagacccatcagtgtgctgtattcaggaaacccatctcacatgcagagacacacataggctcaaaataaaaggatggag

SEQ ID NO: 137819 - DNA, 1151 bp, Homo sapiens
atgtctccagagtttcttccttctggcaggttcgtggtcttgctcacttcaagaatgatgctgcagaccttagtggtgagtgtttcaacactaaaaggtgttatgtccagagtttgttccttcagaagtatccagggtttcttccttctggcaggttcatggtcttgctcactttaagaatgaagctgcagaccttactgaaacgcagttcctcaccagcaatggaacaaagctggatggagaatgactttgacgagctgagagaagaaggctacagacgatcaaattactctgagctacgggaggacattcaaaccaaaggcaaagaagttgaaaactttgaaaaaaatttagaagaatgtgtaactagaataaccaatacagagaagtgcttaaaggagctgatagagctgaaaaccaaggctcgagaactacatgaagaatgcagaagcctcaggagccgatgcgatcaactggaagaaagggtatcagcaatggaagatgaaatgaatgatatgaagcgagaagggaaggttagagaaaaaagaataaaaagaaatgagcaaagcctccaagaaatatgggactatgtgaaaagaccaaatctacgtctgattggtgtacctgaaagtgatgcggagaatggaaccaagttggaaaacactctacaggatattatccaggagaacttccccaatctagcaaagcaggccaacgttcagattcaggaaatacagagaacgccacaaagatactcctcgagaagagcaactccaagacacataattctcagattcaccaaagttgaaatgaaggaaaaaatgttaagggcagccagagagaaaggttgggttaccctcaaagggaagcccatcagactaacagcggatctctcggcagaaaccctacaagccagaagagagtggggaccaatattcaacattcttaaagaaaagaattttcaacccagaatttcatatccagccaaactaagcttcataagtgaaggagaaataaaatactttacagacaagcaaatgctgagagattttgtcaccaccaggcctgccctaaaagagctcctgaaggaagcgctaaacatggaaaggaacaaccagtaccagccgctgcaaaatcatgccaaaatgtaa

SEQ ID NO: 137820 - DNA, 1524 bp, Homo sapiens; identical to SEQ ID NO: 116251

SEQ ID NO: 137821 - DNA, 756 bp, Homo sapiens; identical to SEQ ID NO: 116237

SEQ ID NO: 137822 - DNA, 3354 bp, Homo sapiens; identical to SEQ ID NO: 116243

SEQ ID NO: 137823 - DNA, 1743 bp, Homo sapiens
atggggaaaaaacagagcagaaaaactggaaactctaaaaagcagagtgcctctcctcctccagaggaacgtagttcctcaccagcaacagaacaaagctggacggagaatgactttgacgagttgagagaagaaggcttcagacgatcaaactactctgagctacaggaggaaattcaaaccaaaggcaaagaagttgaaaactttgaaaaaaatttagacgaatgtataactagaataaccaatacagcgaagtgcttaaaggagctgatggagctgaaagccaaggctcgagaactacgtgaagaatgcagaagtctcaggagccaatgtgatcaactggaagaaagggtttcagtgatggaagatgaaatgaatgaaatgaagatcaacaaaattgatagaccgctagcaagacgaataaagaaaaaaagagagaagaatcaaatagatgcaataacaaatgataaaggggatagcaccaccaatcccacagaaatacaaactaccatcagagaatactacaaacacctctacgcaaataaactagaaaatctagaagaaatggataaattccttgacacatacactctcccaagactaaaccaggaagaagttgaatctctgaatagaccaataacagaatctgaaattgtggtaataatcaatagtttaccaaccaaaaagagtccaggacccgatggattcacagccgaattctaccagaggtacaaggaggaactggtaccattccttctgaaactattccaatcaatagaaaaagagggaatcctccctaactcattttatgaggccagcatcatcctgataccaaagactggcagagacacaaccaaaaaagagaattttagaccaatatccttgaagaacattgatgcaaaaatcctcaataaaatactggcaaaccgaatccagcagcacatcaaaaagcttatccaccatgatcaagtgggcttcatccctgggatgcaaggctggttcaatatatgcaaatcaataaatataatccagcatataaacagaaccaaagacaaaaaccacatgattatctcaatagatgcagaaaaggcctttgacaaaattcaacaacacttcatgctaaaaactctcaaaaaattaggtattgatgggacgtatctcaaagtaataagagctatctatgacaaacccacagcaaatatcatactgaatgggcaaaaactggaagcattccctttgaaaactggcacaagacagggatgccctctctcaccactcctattcaacatagtgttggaagtgctggccagggcaattaggcaggagaaagaaataaagggtattcaattaggaaaagaggaagtcaaattgtccctgtttgcagacgacatgattgtatatctagaaaaccccattgtctcagcccaaaatctccttaagctgataagcaacttcagcaaagtctcaggatacaaaatcaatgtacaaaaatcacaagcattcttatacaccaataacagacaaacagagagccaaatcatgagtgaactcccattcacaattgcttcaaagagaataaaatacttaggaatccaacttacaagggacatgaaggacctcttcaaggagaactacaaaccactgctcaatgaaataaaagaggatacaaacaaatggaagaacattccatgctcatgggtaggaagaatcaatatggtgaacatggcatactgcccaaggtaa

SEQ ID NO: 137824 - DNA, 1356 bp, Homo sapiens; identical to SEQ ID NO: 116174

SEQ ID NO: 137825 - DNA, 1935 bp, Homo sapiens; identical to SEQ ID NO: 116254

SEQ ID NO: 137826 - DNA, 1224 bp, Homo sapiens; identical to SEQ ID NO: 116253

SEQ ID NO: 137827 - DNA, 1269 bp, Homo sapiens
atggcgaaaaaacagaacagaaaaactggaaactctaaaaagcagagagcctctcctcctccaaaggaatgcagttcctcaccagcaacagaagaaaactggacggagaatgactttgacgagctgagagaagaaggcttcagacaatcaaattattctgagctatgggaggacattcaaaccaaaggcaaagaagttgaaaactttgaaaaaactttagaagaatgtataactagaataaccaatacagagaagtgcttaaaggagctgatggagctgaaaaccaaggctcaagaactacgtaaagaatgcagaagcctcaggagccgatgtgatcaacagcaagaaagggcatcagtactggaagtgttggaagttctggccagggcaattaggcaggaaaaggaaataaagggtattcaattaggaaaagaggaagtcaaattgtccctgtttgcagacgacatgactgtatatctagaaaaccccattgtctcagcccaaaatctccttaagctgataagcaacttcagcaaagtctcaggatacaaaatcaatgtacaaaaatcacaagcattcttatacaccaacaacagacaaacagagagccaaatcatgagtgaactcccattcacaattgcttcaaagagaataaaatacctaggaatccaacttacaagaaagctgaaactggatctcttccttacaccttatacaaaaatcaattcaagatggattaaagacttaaacattagacctaaaaccatcaaaaccctagaagaaaacctaggcgttaccattcaggacataggcatgggcaaggacttcatgtctaaaacaccaaaagcaatggcaacaaaggacaaaattgacaaattggatctaattaaactaaagagcttctgcacagcaaaagaatctaccgtcagagtgaacaggcaacctacaacatgggagaaaactttcacaacctactcatctgacaaagggctaatatccagaatctacaatgaactcaaacaaatttacaagaaaaaaacaaacaaccccatcaaaaagtgggtgaaggacatcaacagacacttctcaaaagaagacatttatgcagccaaaaaacacatgaaaaaatgtccatcatcactggccatcagagaaatgcaaatcaaaaccacaatgagataccatctcacaccagttacaatggcaatcattaaaaagtcaggaaacaacagggatatggatgaaattggaaatcatcattctcagtaa

SEQ ID NO: 137828 - DNA, 2091 bp, Homo sapiens
  misc_feature (1)...(2091): n = a,t,c or g
atgaaactcatggaaacacttaaccagtgcataaacgctggtcatgaaatgacgaaggctatcgccattgcacagtttaatgatgacagcccggaagcgaggaaaataacccggcgctggagaataggtgaagcagcggatttagttggggtttcttctcaggctatcagagatgccgagaaagcagggcgactaccgcacccggatatggaaattcgaggacgggttgagcaacgtgttggttatacaattgaacaaattaatcatatgcgtgatgtgtctggcacgcgattgcgacgtgctgaagacgtatttccaccggtgatcggggttgctgcccataaaggtggcgtttacaaaacctcagtttctgttcatcttgctcaggatctggctctgaaggggctacgtgtttgctcgtggaaggaacgaccgccagggaacagcctcaatgtatcacggatggaggggtctgttctttacgggggtggagggcaggggcacatcagggctcaatacgccttctacttccgggttgaagcagtctctcttcagcccaagtatcgggatattttattgctgattcttgttagtataatttacaacaatcctcattccaatcatctcaggaagagcgcctctcctcctccaaaggaacgcagttcctcaccagcaacggaacaaagctggatggagaatgactttgacgagctgagagaagaaggcttcggacgatcaaattactctgagctacgggaggacattcaaaccaaaggcaaagaagttgaaaactttgaaaaaaatttagaagaatgtataactagaataaccaatacagagaagtgcttaaaggagctgatggagctgaaaaccaaggctcgagaactacgtgaagaatgcagaagcctcaggagccgatgcgatcaactggaagaaagggtatcagcaatggaagatgaaatgaatgaaatgaagcgacaagggaagtttagagaaaaaagaataaaaagaaatgagcaaagcctccaagaaatatgggactatgtgaaaagaccaaatctacgtctgattggtgtacctgaaagtgatgcggagaatggaaccaagttggaaaacactctgcaggataggatccaggagaacttccccaatctagcaaggcaggccaacggattttgccgatttcggaaccaccatcaaacaggattttcgcctgctggggcaaaccagcgtggaccgcttgctgcaactctctcagggccaggcggtgaagggcaatcagctgttgcccgtctcactggtgaaaagaaaaaccaccctggcgcccaatacgcaaaccgcctctccccgcgcgttggccgattcattaatcgcagctggcacgacaggtttcccgactggaaagcgggcagtgagcgcaacgcaattaatgacgcagttctccccagcaagggaacaaagttggaggaagaatgctttgacgagctaagaaaagaagcttcgcacgatcaaattactcgagagaagtgcttaaaggagctgatggagctgaaaaccaaggctcgagaactacgtgaagaatgcagaagcctcaggagccgatgcgatcaactggaagaaagggtatcagcaatggaagatgaaatgaatgaaatgaagcgagaagggaagtttagagaaaaaagaataaaaagaaatgagcaaagcctccaagaaatatgggactatgtgaaaagaccaaatctacgtctgattggtgtacctgaaagtgatgcggagaatggaaccaagttggaaaacactctgcaggatattatccaggagaacttccccaatctagcaaggcaggccaacgttcagattcaggaaatacagagaacgtcacaaagatactcctcgagaagagcaactccaagacacataattgtcagattcaccaaagttgaaatgaaggaaaacatgttaagggcagccagagagaaaggttgggttaccctcaaagggaagcccatcagactaacagcggatctcgtggcagaaaccctacaagccagaagagagtgggggccaatattcgaggagccctcntag

SEQ ID NO: 137829 - DNA, 1710 bp, Homo sapiens; identical to SEQ ID NO: 125986

SEQ ID NO: 137830 - DNA, 1902 bp, Homo sapiens; identical to SEQ ID NO: 116247

SEQ ID NO: 137831 - DNA, 2784 bp, Homo sapiens; identical to SEQ ID NO: 120657

SEQ ID NO: 137832 - DNA, 834 bp, Homo sapiens
atggggaaaaaacagaacagaaaaactggaaattctaaaacgcagagtgcctctcctcctccaaaggaacgcagttcctcaccagcaacggaacaaagctggatggagaatgattttgacgagctgagagaagaaggcttcagacgatcaaattactctgagctacgggaggacattcaaaccaaaggcaaagaagttgaaaactttgaaaaaaatttagaagaatgtataactagaataaccaatacagagaagtgcttaaaggagctgatggagctgaaaaccaaggctcgagaactacgtgaagaatgcagaagcctcaggagccgatgcgatcaactggaagaaagggtatcagcaatggaagatgaaatgaatgaaatgaagcgagaagggaagtttagagacaaaagaataaaaagaaatgagcaaagcctccaagaaatatgggactatgtgaaaagaccaaatctacgtctgattggtgtacctgaaagtggtggggagaatggaatcaagttggaaaacactctgcaggatattatccaggagaacttccccaatctagcaaggcaggacaacgttcagattcaggaaatacagagaacaccacaaagatactcctcgagaagagcaactccaagacacataattgtcagactcaccaaagttgaaatgaaggaaaaaatgttaagggcagccagagagaaagacaagcaaatgctgaccgattttgtcaccaccaggcctgccctaaaagagctcctgaaggaagcactaaacatggaaaggaacaaccggtaccagccgctgcaaaatcatgccaaaatgtaa

SEQ ID NO: 137833 - DNA, 3267 bp, Homo sapiens; identical to SEQ ID NO: 137367

SEQ ID NO: 137834 - DNA, 885 bp, Homo sapiens
atggggaaaaaacagagcagaaaaactggaaactctgaaacgcagagcgcctctcctcctccaaaggaacggagttcctcaccagcaacggaacaaagctggacggagaatgactttgaagagctgagagaagaaggcttcagacgatcaaattactccgagctacgggaggacattcaaaccaaaggcaaagaagttgaaaactttgaaaaacatttagaagaatgtataattagaataaccaatacagagaagtgcttaaaggagctgatggatctgaaaaccaaggctcgagaactgtgtgaagtatgcagaagcctcaggagccgatgcgatcacctagaagaaagggtatcagcgatggaagatgagatgaatgaaatgaatgacggggagaatggaaccaagttgaaaaacactctgcaggatattatccaggagaactcccccaatctagcaaggcaggccaacattcagattcaggaaatacagagaacgccacaaagatactcctcgagaagagcaactccaagacacataattgtcagattcaccaaagttgaaatgaaggaaaaaatgttaagggcagccagagagaaagagaataaaatagctaggaatccaacttacaagggatgtgaaggacctcttcaaggagaactacaaaccactgctcaaggaaataaaagaggacacaaacaaatggaagaacattccatgctcgtggataggaagaatcaatatcatgaaaatggccatactgcccaaggttcaactttgcattactgtgatgaagcatatcctcatcacactttggatcccctgagtttgcaatccactgagagcatcaagataaactcgctgggaacagtaatggataattag

SEQ ID NO: 137835 - DNA, 1853 bp, Homo sapiens; identical to SEQ ID NO: 121008

SEQ ID NO: 137836 - DNA, 550 bp, Homo sapiens; identical to SEQ ID NO: 120829

SEQ ID NO: 137837 - DNA, 834 bp, Homo sapiens
atggggaaaaaacagaacagaaaaactggaaaccctaaaatgcagagtgcctctcctcctccaaaggaacgcagttcctcaccagcaactgaacaaagctggatggagaatgactttgacgagctgagagaagaaggcttcagacgatcagattactctgagctacgggaggacattcaaaccaaagggaaagaagttgaaaactttgaaaaaaatttagaagaatgtataactagaataaccaatacagagaagtgcttaaaggagctgatggagctgaaaaccaaggctcgagaactacgtgaagaatgcagaagcctcaggagccgatgtgatcaactggaagaaagggtatcagcaatggaagatgaaatgaatgaaacaacaaggcaggccaacattcagattcaggaaatacagagaacgccacaaagatactcctcgagaagagcaactccaagacacataattgtcagattcaccaaagttgaaatgaaggaaaaaatgttaagggcagccagagagaaaggtcgggttaccctcaaagggaagcccatcagactaacagcggatctctcggcagaaaccctacaagccagaagagagtgggggccaatattcaacattcttaaaggaaagaattttcaacccagaatttcatatccagccaaactaagcttcataagtgaaggagaaataaaatcctttagagacaagcaaatgctgagagattttgtcaccactaggcctgccctaaaagagctcctgaaggaagcgctaaacatggaaaggaacaaccagtaccagccgctgcaaaatcaagccaaaatgtaa

SEQ ID NO: 137838 - DNA, 3450 bp, Homo sapiens; identical to SEQ ID NO: 128076

SEQ ID NO: 137839 - DNA, 1425 bp, Homo sapiens; identical to SEQ ID NO: 120839

SEQ ID NO: 137840 - DNA, 1179 bp, Homo sapiens
atggggaaaaaacagagcagaaaaaccggaaactctaaaaagcagagcgccactcctcctccaaaggaacgcagttcctcaccagcaacggaacaaagctggacagagaatgactttgacgagttgagagaagaaggcttcagacgatcaaactactctgagctacaggaggaaactcaaaccaaaggcagagaagttgaaaactttgaaaaaaatttagacgagtgtataactagaacaaccaatacagagaagtgcttaaaggagctgatggagctgaaagccaaggcttgggaactacgtgaagaatgcagaagcctcaggagccgatgcaatcaactggaagaaagggtatcagtgatggaagatgaaatgaatgaaatgaagcgagaagggaagtttagagaaaaaagaataaaaagaaatgaacaaagcccccaagtaatacgggactatgtgaaaagaccaaatctacgtctgattggtgtacctgaaagtgacgggaagaatggaaccaagttggaaaacactctgcaggatattatccaggagaacttccccaatctagcaaggcaggccaacattcagattcaggaaataccgagaacgtcaaaagatactcttcagaagagcactccattattggccttattggtcgattcccaagttgaaggacggacatgtttagggccccaaaaaagcgggaacaaaaaaggaacaacagaaagattcaaaaagaagaaggaggacgaaccgcaccaactgggatctgagctgggcatttctgaaagaaacacagcagccccagtcagggactgtgggcgcagctttagcagacttaaacgttcctgcctgctggctctgaagacagcagcagatctcccagtacagcattcgagctatgctaagggacagactgcctcctcaagtaggtacctgacccatgtgcctcctcatggggagacacctcccagcagagatcgacagacatctcatacaggagagctccagctggcatctggtgagtgcccctctgggatgaagcttccagaagaaagaaaaggcagcaatcttttctgttctgcagcctccgctggtgatactcaggcaaacagggtctggagtggacctccagcaaactcgagcagacctacagcagaggggcctgaaggggcctga

SEQ ID NO: 137841 - DNA, 2778 bp, Homo sapiens
atggggaaaaagcagaacagaaaaactggaaactctaaaaagcagagcacctctcctcctccaaaggaacgcagttcctcaccagcaatggaacaaagctggatggagaatgactttgttgagctgagagaagaaggcttcagacgatcaaattactctgagctacaggaggacattcaaaccaaaggcaaagaagttgaaaactttgaaaaaaatttagaagaatgtatgactagaataaccaatacagagaagtgcttaaaggagctgatggagctgaaaaccaaggctcgagaactacatgaagaatgtagaagcctcaggagccgatgcgatcaactggaagaaagggtatcagcaatggaagatgaaatgaatgaaatgaagcgagaagggaagtttagagaaaaaagaataaaaagaaatgagcaaagcctccaagaaatatgggactatgtgaaaagaccaaatctacatctgatgggtgtacctgaaagtgatggggagaatggaagcaagttggaaaacacgctgcaggatattatccaggagaacttccccaatctagcaagtactctctcagaccacagtggaataaaactggaaatcaactccaaaaggaaccctcaaaaccatgcgaatacatggaaattaagtaacctgctcctgaatgcacactgggtcaacaatgaaatcaagatgaaagttaaaaatttctttgaattgaacgataatagtgacacaatctatcaaaatttctcggatacagcaaaagcggtgctagaagaaaagttcctaggactaaatgcctacaccaaaaaacctgaaagagcacagatagagaaagagagaatcctccctaaatcattctatgaagccagtatcaccctaatacccaaaccacgcaaggacataacaaaaaaagaaaactacaaaccaatatccctgatgaacatagaggcaaaaatcctcaacaaaataatagttaaccaaatccaacagcatatcaaaaagataatccaccatgataaactgagtttcataccagggatgcaggggtggtttaatatatgtaagccagtaaatgtgattctccacataaacataattaaaaacaaaaatcatatgatcatctcaatagacacagaaaaagcatttggcaaaatgcagcatccctttatgattaaaaccttcagcaaaattggcacagaagggacataccttaaggtaatagaagccatctatgatagacccacagccaacattatactgaatggggaaaacttgaaagcactccccctgagaactagaccaagacaaggatgcccactttcaccacttttattcaacttagtactggcagtcctagccagagcaatcagacaagagaaagaaataaagggcatccaagtcagtaaagaggaagttaaactgtctctgtttgctgatgatatgattgtatacctagaaaaccctaaagcctcatccaaaaagcttccagaactaaacaaagacacaatataccagaatctctgggatgcattcaaagcagtatgtagagggaaatttacagcactaaatgcccacaagagaaagcaggaaagatccaaaattgacaccctaacatcacaattaaaagaactagaaaagcaagagcaaacacattcaaaagctatcagaagacaagaaataactaaaatcagagcagaactgaaggaaatagagacacaaaaaacccttcaaaaaattaatgaatccaggagctggttttttgaaaggatcaacaaaattgatagaccgctagcaagactaataaagaagaaaagagagaagaatcaaatagacacaataaaaaatgataaaggggatatcaccaccaatcccacagaaatacaaaccaccatcagagaatactacaaacacctctacgcaaataaactagaaaatctagaagaaatggatacattcctggacacatacactctcccaagactaaaccaggaagaagttgaatctctgaatagaccaataacaggagctgaaattgtggcaataatcaatagcttaccaaccaaaaagagtccaggaccagatggatccatagctgaattctaccagaggtacaaggaggaactgctgataagcaacttcagcaaagtctcagcatacaaaatcaatgtacaaaaatcacaagcattcttatacaccaacaacagacaaacagagagccaaatcatgagtgaactcccattcacaattgcttcaaagagaataaaatacctaggaatccaacttacaagggatgtgaaggacttcttccaggagaattacaaaccactgctcaaggaaataaaagaggatacaaacaaacggaagaacattccatgctcatgggtaggaagaatcaatatcgtgaaaatggccatactgcccaaggtaatttttagattcaatgccatccccatcaagctaccaatgcctttcttcacagaattggaaaaaactactttaaagttcatatggaaccaaaaaagagcccgcatcgccaagtcaatcctaagccaaaagaacaaagctggaggcatcacactacctgacttcaaactatactacaaggctacagtaaccaaaacagcatggtactggtaccaaaacagggatatagatcaatggaacagaacagagccctcagaaataatgccgcatatctacaactatctgatctttgacaaacctgagaaaaacaagcaatggggaaaggattccctttttaattaa

SEQ ID NO: 137842 - DNA, 2715 bp, Homo sapiens; identical to SEQ ID NO: 129570

SEQ ID NO: 137843 - DNA, 1593 bp, Homo sapiens; identical to SEQ ID NO: 121955

SEQ ID NO: 137844 - DNA, 547 bp, Homo sapiens
atggggaaaaaacagaacagaaaaactggaaactctaaaaagcagagcgcctctcctcctccaaaggaatgcagttcctcaccagcaacggaacaaagctggacggagaacgactttgacgagctgagagaagaaggcttcagacgatcaaattactctgagctacgggaggacattcaaaccaaaggcaaagaagttgaaaactttgaaaaaaatttagaagaatgtataactagaataaccaatacagagaagtgcttaaaggagctgatggagctgaaaaccaaggctcgagaactacgcgaagaatgcagaagcctcagtagccgatgcaatcaactggaagaaagggtaccagcgatggaagatgaaatgaatgaaatgaaagaggatgaaatagatatgatgatcgcagacaggaaaggaggaaattatgataaaaagttggagattctgttgccgacatctcatcagggtagtcagaggctggggtccgtccaaatacctttggataacaatggtggtaaccctggccggaaatcctcag

SEQ ID NO: 137845 - DNA, 710 bp, Homo sapiens
  misc_feature (1)...(710): n = a,t,c or g
atggggaaaaaacagaacagaaaaactggaaactctaaaaagcagagcgcctctcctcctccaaaggaacacacttcctcaccagcaacggaacaaagctggatggagaatgactttgatgagctgagagaagaaggcttcagacgatcaaattactctgagctatgggaggacattcaaaccaaaggcaaagaagttgaaaactttgaaaaaaatttagaagaatgtataactagaataaccaatacagagaagtgcttaaaggagctgatggagctganaaccaaggctcgagaactacgtgaagaatacagaagcctcaggagccgatgcgatcaactggaagaaagaaaatcccctggagggattgcagagattagtgccaccatcaaggacttgaaagatgcaggagtggtgattcccaccacatccctattcaactctcccatttggccagtgcagaagacagacagatcttggagaaagacagtggattattgtaagcttaaccaagtggtggctccaattgtcgctgctgtaccagatgtggtttcattgcttgagcaaattaacacatctcctggtacctggtatgcagccattgacttgacaaatgcctttttctccattcctgtccataaggcccatcagaagcaatttgccttcagctggcaaggccagcaatatacttttactgtcctacctcagag

SEQ ID NO: 137846 - DNA, 895 bp, Homo sapiens; identical to SEQ ID NO: 127880

SEQ ID NO: 137847 - DNA, 1941 bp, Homo sapiens; identical to SEQ ID NO: 116267

SEQ ID NO: 137848 - DNA, 1416 bp, Homo sapiens; identical to SEQ ID NO: 129283

SEQ ID NO: 137849 - DNA, 3403 bp, Homo sapiens
cttcagagctaggaattcagatatcttgctacagagagtgaatcccaggtgtgtggggcttcagcctttgttagatggatcctggacggagcacagacaagcagtttctgatgccaaaggcaataagaaaagggaaagaatctttgatggaggttgtttggtatgtgagttggagggacatgccaagtgtcaggaggaagtagaagtggttgagtatgacaaaattgacccaactggtatgatcaacttcccattttcttcttttgatcaagatctttctctgaaagcatcactgatcaatcatcttgaatttggcttaattgttcctcagtgctgggctgatcgggcccttggaactcatacccctggggtccaagcagtccacgcaggaaatccacgagaaggttctaacgaagccatgggtgccatgatgtaccacaccatcatcctcaccagggaggacctagaaaagtttaaggccccgagagtgatcgtgcagataggcagtggctacgataacgtggacatcaaggctgccagcgagctcggaattgctgtgtgcaatatcccgtctgcagccgtggaagagacaccggactctaccatctgccacatcctcaatctgtaccagaggaacacatggctgtaccaagcactgcgggggcaggcggttgcagttcgagccaaggcctttggattcagcgtcatattttatgacccctacttgcaggatgggatcgagcgatccctgggcgtgcagagggatttgctgtatcagagcgactgcgtctccttgcactgcaatctcaacgaacataaccaccacctcatcaatgactttaccataaagcagatgaggcagggagcattccttgtgaacgcaccccatggtggcctggtggacaagaaagccttagcacaagctctcaaggagggcaggatacgaggggcagccctctatgtgcgtgagtcggagccctttagctttgctcagggtccgttgaaagatgcaccgaatcttatctgcactcctcacactgcctggtacagcaagcaggcgtcactggagatgagggaggcagctgctactgagatccgccgagccatcacaggtcacatcccagaaagcttaagaaactgtgtgaacaagaattctctgtcacatcagcgccttggagaaaatgcagaagtctccatggacgtttccctggcttaccgtgatgacgcgtttgctgagtggactgaaatggcccatgaaagagaatcactgtccggggcaggtgtttctgggccttcccgggttttccgcctattgccactctgcgcggagagaagcagatatcgaggaacttgtcagcatgagaaagttcatggggagacggggaagaagagccatcatgacatgaaggagcagtcagctcagcccctatttggcttatactatgaaaactggcaaaaagaaaaagcccttttccccacctctggtggaggaacccagcacagatggagccttgatgagcacagagcgaattctgccccgacggtgccctgcccttgcactaacactgctgtgggagtgaaactagtaaaaacaccgagtggtgtttttactagaaatggaaaggaagaaggctgcctagctcacaagccttctagcaaaacagtcagtcaaaccaaagttgggcagggggtagtttttatgggatggtgcatacaagaacatcagagcaaagacatacagattccacatcccatagatgcctgtgaaaaaggcactgttcacttggactgtgacgccgccccatttccaatggccttccgttacctgcggagaaaggatggtgatattcaattgaaacagagaagaaacagaagaaacataacaccaataaaggaaccaaccaacatgaaaaccaagtctcttctacatgtgggagacgtgaagggccatcccctcgatgttgtagatgccaagcgacctgcgacctctgcgttggaccatgccctcacgctgatatcttaccacgtattgcgcaagcggaatctatgcctgtacccacactccctgcgcccccgcaccccgctcctgtgcgcaagtcggaatataaaaccgcggaggagtgagctcttgggtgtccagttggttccgcggcagtctctccgagcagcgcatttgtcttctaggctgcttggttcgtgcctccgagaaagacactatggtttaattaatttctggaatggattatcaacttcaaagatatcatttagttataagaaatttgagactgataggaactcgagatattttcatgatactagtacagatagcaatgctaaaataaatgttgaaattgtagcccacaatgtgatggtattaggaggtgtggcctttgagaaacaattagatcataaggatagagccctcatgaatgggattagcacccttataagaaacagcagagagatgatctctctgctccctgttgcgtgggaacacaaagagaatatggcagtatacaaaccagaaagagtgccctcaccagatataggatttgctgctgccttcatcttggccttaacagcctccataacccatgctcagagcaaaggtgctccccatgcctcttctggggctgcactgactgcaggggtctcctgctgccagctaagtgtgggagaacttgtgcacgtatctcccctccgaatcccaacgatgggtaacgccagctttggctccaaggaacagaagctgctgaagcggttgcggcttctgcccgccctgcttatcctccgcgccttcaagccccacaggaagatcagagattaccgcgtcgtggtagtcggcaccgctggtgtggggaaaagtacgctgctgcacaagtgggcgagcggcaacttccgtcatgagtacctgccgaccattgaaaatacctactgccagttgctgggctgcagccacggtgtgctttccctgcacatcaccgacagcaagagtggcgacggcaaccgcgctctgcagcgccacgttatagcccggggccacgccttcgtcctggtctactcagtcaccaagaaggaaaccctggaagagctgaaggccttctatgagctgatctgcaagatcaaaggtaacaacctgcataagttccccatcgtgctggtgggcaataaaagtgatgacacccaccgggaggtggccctgaatgatggtgccacctgtgcgatggagtggaattgcgccttcatggagatttcagccaagaccgatgtgaatgtgcaggagctgttccacatgctgctgaattacaagaaaaagcccaccaccggcctccaggagcccgagaagaaatcccagatgcccaacaccactgagaagctgcttgacaagtgcataatcatgtga

SEQ ID NO: 137850 - DNA, 3573 bp, Homo sapiens; identical to SEQ ID NO: 119733

SEQ ID NO: 137851 - DNA, 1189 bp, Homo sapiens
  misc_feature (1)...(1189): n = a,t,c or g
atggggaaaaaacagaacagaaaaactggaaactctaaaaagcagagcacctctcctcctccaaaagaatgcagttcctcaccagcaacggaacaaagctggacggagaacgactatgacgagctgagagaagaaggcttcagacaaccaaattactctgagctacgggaggatagtcaaaccaaaggcaaagaaattgaaaactttgaaaaaaatttagaagaatgtataactagaataaccaatacagagaagtgcttaaaggagccgatggagctgaaaaccaaggctcgagaactacgtgaagaatgcagaagcctcaggagccgatgtgatcaactggaagaaagggtatcagcaatggaagatgaaatgaatgaaatgaaagcagatgggcgaggtggcctagggagcggcccgcatccgtggggagacgctgggcctcaacggctttggttgcacggggcaggcattgcagttcgagccaaagcctttggattcagcgtcatattttatgacccctacttgcaggatgtgtgtcgagcggtccctgggcgtgcagagggtctacaccctgcaggatttgctgtatcagagcgactgcgtccccttgcactgcaatgtcaacgaacataacaaccacctcatcaatgactttaccataaagcagatgaggcagggagcattccttncacccaagcccttcaaggagggcacgatacgaggggcagccctcgacatgcatgagtcggagcccttcagctttgctcagggtccgttgaaaaatgccccgaatctcatctgcactcctcacactgcctggtacagcgagcaggcgtcactggagatgagggaggcagctgccacagagatccgccgagccatcacaggttgcatcccagaaagcttaagaaattgtgtgaacaaggaattctttgtcacatcagcgccttggtcagtaatagaccagcaagcaattcatcctgagctcaatggtgccacatacagatatccgccaggcgtcgtgggtgtggctccaggaggactttctgccgccatggaagggatcatccctggaggcatcccagtgactcacaacctcccgacagtggcacatccttcccaagcgccctctcccaaccagcccacaaaacacgtggacaatcgagagcaccccaacgagcaatag

SEQ ID NO: 137852 - DNA, 4554 bp, Homo sapiens
atgccagtctggacaccggcgttcggtcgaagagtatctggtgtcatagaaattgccgatgggagtcgccgtcgtaaagctgctgcacttaccgaaagtgattatcgtgttctggttggcgagctggatgatgagcagatggctgcattatccagattgggtaacgattatcgcccaacaagtgcttatgaacgtggtcagcgttatgcaagccgattgcagaatgaatttgctggaaatatttctgcgctggctgatgcggaaaatatttcacgtaagattattacccgctgtatcaacaccgccaaattgcctaaatcagttgttgctcttttttctcaccccggtgaactatctgcccggtcaggtgatgcacttcaaaaagcctttacagataaagaggaattacttaagcagcaggcatctaaccttcatgagcagaaaaaagctggggtgatatttgaagctgaagaagttatcactcttttaacttctgtgcttaaaacgtcatctgcatcaagaactagtttaagctcacgacatcagtttgctcctggagcgacagtattgtataagggcgataaaatggtgcttaacctggacaggccaaaagtagataaaaccacaaagatggggaaaaaacagagaagaaaaactggaaactctaaaaagcagagcgcctctcctcctccaaatgaatgcagctcctcaccagcaacggaacaaagctggatggagaatgactttgacgagctgagagaagaaggcttcagacgatcaaattactccgagctatgggaggacattcaaaacaaaggcaaacaagttgaaaactttggaaaaaatttagaagaatgtataactagaataaccaatacagagaagtgcttaaaggagctgttggagctgaaaaccaaggctcgagaactacatgaagaatgcagaagcctcaggagccgatgtgatcaactgatagaaagggtatcagtgatggaagacccactgaatgaaatgaagcaagacgggaagtttagagaaaaaagaataaaaagaaatgagcaaagcctccaagaaatatgggactatgtgaaaagaccaaatctacgtctgattggtgtacctgaaagtgatgtggagaatggaaccaagttggaaaacactctgcaggatattatccaggagaacttccccaatctagcaaggcaggccaacgttcagattcaggaaatacagagaatgccacaaagatactcctcgagaagagcaactccaagacacataattgtcagattcaccaaagttgaaatgaaggaaaaaatgttaagggcagccagacagaaagcaccacaccacacctattccaaaattgaccacatagttggaagtaaagctctcctcagcaaatgtaaaagaacagaaattataacaaactatctctcagaccacagtgcaatcaaactagaactcaggattaagaatctcactcaaagccgctcaactacatggaaactgaacaacctgctcctgaatgactactgggtacataacgaaatgaaggcagaaataaagatgttctttgaaaccaacgagaacaaagacaccacataccagaatctctgggacacattcaaagcagtgtgtagagggaaatttatagcactaaatgcctacaagagaaagcaggaaacatccaaaattgacaccataacatcacaattaaaagaactagaaaagcaagagcaaacacattcaaaagctagcagaaggcaagaaataactaaaatcagagcagaactgaaggaaatagagacacaaaaaacccttcaaaaaatcaatgaatccaggagctggttttttgaaaggatcaacaaaattgatagaccgctagcaagactaataaagaaaaaaagagagaagaatcaaatagacacaataaaaaatgataaaggggatatcaccaccgatcccacagaaatacaaactaccatcagagaatactacaaacacctctacgcaaataaactagaaaatctagaagaaatggatacattcctcgacacatacactctcccaagactaaaccaggaagaagttgaatctctgaatagaccaataacaggctctgaaattgtggcaataatcaatagtttaccaaccaaaaagagtccaggaccagatggattcacagccgaattctaccagaggtacaaggaggaactggtaccattccttctgcaactattccaatcaatagaaaaagagggaatcctccctaactcattttatgaggccagcatcattctgataccaaagccgggcagagacacaaccaaaaaagagaattttagaccaatatccttgatgaacattgatgcaaaaatcctcaataaaatactggcaaaccgaatccagcagcacatcaaaaagcttatccaccatgatcaagtgggcttcatccctgggacgcaaggctggttcaatatacgcaaatcaataaatgtaatccagcatataaacagagccaaagacaaaaaccacatgattatctcaatagatgcagaaaaagcctttgacaaaattcaacaacccttcatgctaaaaactctcaataaattaggtattgatgggacatatttcaaaataataagagctatctatgacaaacccacagccaatatcatactgaatgggcaaaaactggaagcattccctttgaaaactggcacaagacagggatgccctctctcaccgctcctattcaacatagtgttggaagttctggccagggcaatcaggcaggagaaggaaataaagggtattcaattaggaaaagaggaagtcaaattgtccctgtttgcagacgacatgattgtttatctagaaaaccccatcgtctcagcccaaaatctccttaagctgataagcaacttcagcaaagtctcaggatacaaaatcaatgtacaaaaatcacaagcattcttatacaccaataacagacaaacagagagccaaatcatgagtgaactcccattcacaattgcttcaaagagaataaaatacctaggaatccaacttacaagggatgtgaaggacctcttcaaggagaactacaaaccactgctcaaggaaataaaagaggacacaaacaaatggaagaacattccatgctcatgggtaggaagaatcaatatcgtgaaaatggccatactgcccaaggtaatttacagattcaatgccatccccatcaagctaccaatgactttcttcacagaattggaaaaaactactttaaagttcatatggaaccaaaaaagagcctgcatctccaagtcaatcctaagccaaaagaacaaagctggaggcatcacactacctgacttcaaactatactacaaggctacagtaaccaaaacagcatggtactggtaccaaaacagagatatagatcaatggaacagaacagagccctcagaaataatgccacatatctacaactatctgatctttgacaaacctgagaaaaacaagcaatggggaaaggattccctatttaataaatggtgctgggaaaactggctagccatatgtagaaagctgaaactggatcccttccttacaccttatacaaaaatcaattcaagatggattaaagatttaaacgttagacctaaaaccataaaaaccctagaagaaaacctaggcattaccattcaggacataggcgtgggcaaggacttcatgtccaaaacaccaaaagcaatggcaacaaaagccaaaattgacaaatgggatctaattaaactaaagagcttctgcacagcaaaagaaactaccatcagagtgaacaggcaacctacaacatgggagaaaattttcacaacctactcatctgacaaagggctaatatccagaatctacaatgaactcaaacaaatttacaagaaaaaaacaaacaaccccatcaaaaagtgggcgaaggacatgaacagacacttctcaaaagaagacatttatgcagccaaaaaacacatgaagaaatgctcatcatcactggccatcagagaaatgcaaatcaaaaccactatgagatatcatctcgcaccagttagaatggcaatcattaaaaagtcaggaaacaacagcaaaatggtggaagcagatgggcctggcaatcttttcactggtgtcctccatttagaaaccaatgaaaagtcgcttaaagcagtatttgggaaatatggtcccatattggaagacaactttttggatggaaaagcaatgaaagtagaacaagttaacaaaccgtcttttcaaagtggtggtaatgtggagatcaccatcttcttggagaaacaggagcccttcaggaagtctgagacaggaaaaaaattttttaagttgttcctgctgacattagcaaacttttttaaatttagtgaccatgatgactatagtgggggccttggtagagatcattctgaacatccaaatgggagttcttacagagatgcatatcagagttatgggaccttctatggtgcaccacctgcatga

SEQ ID NO: 137853 - DNA, 4723 bp, Homo sapiens
atgcacccttcccagaggacaccctatcagtctcgtagtcctgccacaatctttgctactgtgtctaccttcaagtcccacaaatctaacttggaaacaaagcacccccagcaagtccctctcagctctctgggcttggcagccaacataagttcagaggacatcgagtccgaagccgaagataatggcaaatgggaatctgtcgatcgaacaagcttctttcctgcactgacttcattccagcagtccatgatccataagaaaatcatgacagtcttcaagtcagtggagccagaggatggcttgggcaggcccacactcgccttccatgaggaccgatgccagctcagtatccagaactcactggatgcaggaggaggctgtccctccatggcagcacctccagcagaagtacatgagcttgcctctggcctcatctcagcagcagccctgctgctgtctccagcggccagtggaagagtcagcaaacaccagcacattcccactgggtttcctgaccctccaaaagcccttcacaaaggaaaactaacaaccagaaaggacatctacaccgaaaacccatctgtacatcaccatcatcaaagaccaaaagtagataaaaccacaaagatggggaaaaaacagaacagaaaaactggaaactctaaaacgcagagcgcctctcctcctccaaaggaatgcagttcctcaccagcaacagaacaaagctggatggagaatgattttgacgagctgagagaagaaggcttcagacgatcaaattactctgagctacgggaggacattcaaaccaaaggcaaagaagttgaaaactttgaaaaaaatttagaagaatgtataactagaataaccaatacagagaagtgcttaaaggagctgatggagctgaaaaccaaggctcgagaactacgtgaagaatgcagaagcctcaggagccaatgcgatcaactggaagaaagggtatcagcaatggaagatgaaatgaatgaaatgaagcgagaagggaagtttagagaaaaaaagtataaaaagaaatgagcaaagcctccaagaaatatgggactatgtgaaaagaccaaatctacgtctgactggtgtacctgaaagtgacggggagaatggaaccaagttggaaaacactctgcaggatattatccaggagaacttccccaatctagcaaggcaggtcaatgttcagattcaggaaatacagagaacgccacaaagatactcctcgagaagagcaactccaagacacataattgtcagattcaccaaagttgaagtgaaggaaaaaatgttaagggcagccagagagaaaggtcgggttaccctcaaagggaagcccatcagactaacagcggatctctcggcagaaaccctacaagccagaagagagtgggggccaatattcaacattcttaaagaaaagaattttcaacccagaatttcatatccagccaaactaagcttcataagtgaaggagaaataaaacactttacagacaagcaaatgctgagagattttgtcaccaccaggcctgccctaaaagagctcctgaaggaagtgctaaacatggaaaggaacaaccagtaccagccgctgcaaaatcatgccaaaatacagatcaacgagacagaaagtcaacaaggatacccaggaattgaactcagctctgcaccaagcggacctaatagacatctacagaactctccacaccaaatcaacagaatatactttttttcagcaccacaccacacctattccaaaattgaccacatagttggaagtaaagctctcctcagcaaatgtaaaagaacagaaattataacaaactatctctcagaccacagtgcaatcaaactagaactcaggattaagaatctcaatcaaagccgctcaactacatggaaactgaacaacctgctcctgaatgactactgggtacataacgaaatgaaggcagaaataaagatgttctttgaaaccaacgagaacaaagacacaacataccagaatctctgggacgcattcaaagcagtgtgtagagggaaatttatagcactaaatgcccacaagagaaagcaggaaagatccaaaattgacaccctaacatcacaattaaaagaactagaaaagcaagagcaaacacattcaaaagctagcagaaggcaagaaataactaaaatcagagcagaactgaaggaaatagagacacaaaaaacccttcaaaaaatcaatgaatccaggagctggttttttgaaaggatcaacaaaattgatagaccgctagcaagactaataaagaaaaaaagagaggagaatcaaatagacacaataaaaaatgataaaggggatatcaccaccgatcccacagaaatacaaactaccatcagagaatactacaaacacctctatgcaaataaactagaaaatctagaagaaatggataaattccttgacacatacactctcccaagactaaaccaggaagaagttgaatctctgaatagaccaataacaggagctgaaattgtggcaataatcaatagtttaccaaccaaaaagagtccaggaccagatggattcacagctgaattctaccagaggtacaaggaggaactggtaccattccttctgaaactattccaatcaatagaaaaagagggaatcctccctaactcattttatgaggccagcatcattctgataccaaagccgggcagagacacaaccaaaaaagagaattttagaccaatatccttgatgaacattgatgcaaaaatcctcaataaaatactggcaaaccgaatccagcagcacatcaaaaagcttatccaccatgatcaagtgggcttcatccctgggatgcaaggctggttcaatatacgcaaatcaataaatgtaatccagcatataaacagagccaaagacaaaaaccacatgattatctcaatagatgcagaaaaagcctttgacaaaattcaacaacccttcatgctaaaaactctcaataaattaggtattgatgggacgtatttcaaaataataagagctatctatgacaaacccacagccaatatcatactgaatgggaaaaaactggaagcattccctttgaaaactggcacaagacagggatgccctctctcactgctcctattcaacatagtgttggaagttctggccagggcaatcaggcaggagaaggaaataaagggtattcagttaggaaaagaggaagtcaaattgtccctgtttgcagacgacatgattgtttatctagaaaaccccatcgtctcagcccaaaatctccttaagctgataagcaacttcagcaaagtctcaggatacaaaatcaatgtacaaaaatcacaagcattcttatacaccaacaacagacaaacagagagccaaatcatgagtgaactcccattcacaattgcttcaaagagaataaaatacctaggaatccaacttacaagggatgtgaaggacctcttcaaggagaactacaaaccactgctcaaggaaataaaagaggatacaaacaaatggaagaacattccatgctcatgggtaggaagaatcaatatcgtgaaaatggccatactgcccaaggtaatttacagattcaatgccatccccatcaagctaccaatgactttcttcacagaattggaaaaaactactttaaagttcatatggaaccaaaaaagagcccgcatcgccaagtcaatcctaagccaaaagaacaaagctggaggcatcacactacctgacttcaaactatactacaaggctacagtaaccaaaacagcatggtactggtaccaaaacagagatatagatcaatggaacagaatagagccctcagaaataacgccgcatacctacaactatctgatctttgacaaacctgagaaaaacaagcaatggggaaaggattccctatttaataaatggtgctgggaaaactggctagccatatgtagaaaactgaaactggatcccttccttacaccttatacaaaaatcaattcaagatggattaaagatttaaacgttagacctaaaaccataaaaaccctagaagaaaacctaggcattaccattcaggacataggcgtgggcaaggacttcatgtccaaaacaccaaaagcaatggcaacaaaagccaaaattggcaaatggtacctaattaaactaaagagcttctgcacagcaaaagaaactaccatcagagtgaacaggcaacctacaacatgggagaaaattttcgcaacgtactcatctgacaaagggctaatatccagaatctacaatgaactcaaacaaatttacaagaaaaaaacaaacaaccccatcaaaaagtgggcgaaggacatgaacagacacttctcaaaagaagacatttatgcagccaaaaaatacgtgaaaaaatgctcatcatcactggccatcagagaaatgcaaatcaaaaccactatgagataccatctcacaccagttagaatggcaatcattaaaaagtcaggaaacaacagtgatctctaccttatgtctgcaggaaccagttgtttaatgggcagacactgggacagtggacaagaaacgtgtgtccaaaatgtcgtgctggacacgtgcagcccctctgaacaactcttaagagctattgctgatcttgtcccgcaaccctga

SEQ ID NO: 137854 - DNA, 2153 bp, Homo sapiens
atggacattcttggatgggcttcacgtgctcataagtggaagggccgggccacaggcacgcacgtcttcaacctcatgagagagtacctcatctctctccagtgttgtgccagtgagcaggcagcatcgcctgagcatggagcttctttcagggtctggaagtctcttggatttcagaaactgatcttgtcactgatctgtccccagtgcctgcagtcacttactagggagacatggatgagatttaaaagcaagaagacaaaaggacctgatttaagacttgtcatggatgccaacaaatgggaattcaggcgccacgccttgcgcccggcgcttacctttccgaatgagggcggcgatctcggggtcgaagccctgccggtggcacttcctccagaggcccatgttggtggagttgtactgccggctgcactcgtccgcggggctcatggcgaacagctgccggcgattccgggcccggaggagtttgccctcccagcggtccaggcgcgagcggctcgcccggagcggcaagttgttgttattgttgtaaatgaagccggggtcgacccggcgggtgttgaaggccttgcacctgtccctgtgcttcctggcgtccgtctcgaagcgactgccccgaagcagccgcctcggctcccagcccggcttcgggcgccgctgccctcgggccggaaactaaatgccaagtgtcctcggctgcggtggggcttctttgtgcaggatggtgacgggacagaactcgcctgtctctctgagggggacggggggtgctgtcaggaggcgccactggaccaccggccgcggcggctccgaggcctcgcaggctcggctggtgcccgggaggcgcgagagcccaggctgcgcccaggggactggggaaatcgcattgcccgggtgcgggcgccggaggaagctgctgccgcgctctctcgtccggcgcgggtagctgcagccttggctaaaacccacagacgagaacaccgagcgcgcagccaaaagctagtgatgtcatccgtgcaacaaggaaaactaacaaccagaaaggacatctacaccgaaaacccatctgtacatcaccatcatcaaagaccaaaagtagataaaaccacaaagatggggaaaaaacagaacagaaaaactggaaactctaaaaagcagagcgccttttcctcctccaaaggaatgcagttcctcaccagcaatggaacaaacctggacgcgataatgactttgacgagctgagagaagaaggcttcagaggatcaaattactctgagctacgggaggacattcaaaccaaaggcaaagaagttgaaaactttgaaaaagatttagaagaatgtataactagaataaccaatacagagaagtgcttaaaggagcggatggagctgaaaaccaaggctcgagaactacgtgaagaatgcagaagcctcaggagccgatgtgatcaactggaagaaagggtatcagcgatggaagatgaaatgaatgaaatgaagcgagaagggaagtttagagaaaaaagaataaaaagaaacgagcaaagcctccaagaaatatgggactatgtgaaaagaccaaatctacgtctgattggtgtacctgaaagtgatgtggagaatggaaccaagttggaaaacactctgcaggatattatccaggagaacttccccaatctagcaaggcaggccaacgttcagattcaggaaatagagagaatgccacaaagatactcctcaagaagagcaactccaagacacataattgtcagattcaccaaagttgaaatgaaggaaaaaatgttaagggcagccagagagaaaggtcgggttaccctcaaaggaaagcccatcagactaacagcagttctctcggcagaaaccctacaagccagaagagagtgggggccaatattcaacattcttaaagaaaagaattttcaacccagaatttcatatccagccaaactaagcttcataagtgaaggagaaataaaatactttatagagaagcaaatgctgagagattttgtcaccaccaggcctgccctaaaagagctcctgaaggaagcgctaaacatggaaaggaacaaccggtaccagccgctgcaaaatcatgccaaaatgtaa

SEQ ID NO: 137855 - DNA, 2112 bp, Homo sapiens; identical to SEQ ID NO: 126817

SEQ ID NO: 137856 - DNA, 3896 bp, Homo sapiens
  misc_feature (1)...(3896): n = a,t,c or g
atgagtgtccactcctggaagccctcttggatcagacccatccgtagcctttctcccaagcgtcctctagggacccaagggacctctgaagtcccaccagatactcacatctgccagacaaaatttcacagtctttcttcaggaccacttctcttgtcagtccatccagttggaaagctatccgcagttgttggcagagtcttcatacacatactctcccagcgtgagcgacgaagaagacgggtgatttcagcatttccatctgaggtaccgggttcatctcaccagggagtgccagacagcgggtgcaggtcagtgggtgcgcaccccgtgcgcgagccgaagcagggcgaggcattgcctcactcaggaagcccaagggaaggaaaactaacaaacagaaaggacatccacaccaaaaacccatctgtacatcaccatcatcaaagaccaaaagtagataaaaccacaaagattgggaaaaaacagaacagaaaaactggaaactctaaaacgcagagcgcctctcctcctccaaaggaatgtagttcctcaccagcaacggaacaaagctggatggagaatgactttgatgagctgagagaagaaggcttcagacaatcaaattactctgagctacggaaggacattcaaaccaaaggcaaagaagttgaaaactttgaaaaaaatttagaagaatgtaaaactagaataaccaatacagagaagtgcttaaaggagctgatggagctgaaaaccaaggctcgagaactatgtgaagaatgcagaagcctcaggagccgatgcaatcaactggaagaaagggtatcagtgatggaagatgaaatgaatgaaatgaagcgagaagggaagtttagagaaaaaaagaataaaaagaaatgagcaaagcctccaagaaatatgggactatgtgaaaagaccaaatctacgtctgattggtgtacctgaaagtgatgtggagaatggaaccaagttggaaaacactctgcaggatattatccaggagaacttccccaatctagcaaggcaggccaacgttcagattcaggaaatacagagaacaccacaaagatactcctcgagaagagcaactccaagacacataattgtcagattcaccaaagttgaaatgaaggaaaaaatgttaagggcagccagagagaaagacagatcaacgagacagaaagtcaacaaggatacccaggaattgaactcagctctgcaccaagcagacctaatagacatctacagaactctccaccccaaatcaacagaatatacatttttttcagcaccacaccacacctattccaaaattgaccacatagttggaagtaaagctctcctcagcaaatgtaaaagaacagaaattataacaaactatctctcagaccacagtgcaatcaaactagaactcaggattaagaatctcactcaaagccgctcaactacatggaaactgaacaacctgctcctgaatgactactgggtacataacgaaatgaaggcagaaataaagatgttctttgaaaccaatgagaacaaagacacaacataccagaatctctgggacgcactcaaagcagtgtgtagagggaaatttatagcactaaatgcccacaagggaaagcaggaaagatctgaaattgacaccctaacatcacaattaaaagaactagaaaagcaagagcaaacacattcaaaagctagcagaaggcaagaaataactaaaatcagagcagaactgaaggaaatagagacacaaaaaacccttcaaaaaatcaatgaatccaggagctggttttttgaaaggatcaacaaaattgatagaccgctagcaagactaataaagaaaaaaagagagaagaatcaaatagacacaataaaaaatgataaaggggatatcaccaccgatcccacagaaatacaaactaccatcagagaatactacaaacacctctacgcaaataaactagaaaatctagaagaaatggatacattccttgacacatacactctcccaagactaaaccaggaagaagttgaatctctgaatcgaccaataacaggctctgaaattgtggcaataatcaatagtttaccaaccaaaaagagtccaggaccagatggattcacagccgaattctaccagaggtacaaggaggaactggtaccattccttctgaaactattccaatcaatagaaaaagagggaatcctccctaactcattttatgaggccagcatcattctgataccaaagccgggcagagacacaaccaaaaaagagaattttagaccaatatccttgatgaacattgatgcaaaaatcctcaataaaatactggcaaaccgaatccagcagcacatcaaaaagcttatccaccatgatcaagtgggcttcatccctgggatgcaagggctggttcaatatacgcaaatcaataaatgtaatccagcatataaacagagccaaagacaaaaaccacatgattatctcaatagatgcagaaaaagcctttgacaaaattcaacaacccttcatgctaaaaactctcaataaattaggtattgatgggacgtatttcaaaataataagagctatctatgacaaacccacagccaatatcatactgaatgggcaaaaactggaagcattccctttgaaaaccggcacaagacagggatgccctctctcaccgctcctattcaacatagtgttggaagttctggccagggcaatcaggcaggagaaggaaataaaggctattcaattaggaaaagaggaagtcaaattgtccctgtttgcagacgacatgattgtttatctagaaaaccccatcgtctcagcccaaaatctccttaagctgataagcaacttcagcnaactctcaggatacaaaatcaatgtacaaaaatcacaagcattcttatacaccaacaacagacaaacagagagccaaatcatgggtgaactcccattcacaattgcttcaaagagaataaaatacctaggaatccaacttacaagggatgtgaaggacctcttcaaggagaactacaaaccactgctcaaggaaataaaagaggagacaaacaaatggaagaacattccatgctcatgggtaggaagaatcaatatcgtgaaaatggccatactgcccaaggtaatttacagattcaatgccatccccatcaagctaccaatgactttcttcacagaattggaaaaaactactttaaagttcatatggaaccaaaaaagagcccgcattgccaagtcaatcctaagccaaaagaacaaagctggaggcatcacactacctgacttcaaactatactacaaggctacagtaaccaaaacagcatgtgggtaccagaagcagggagcagacacctcggagcctgcaggggcagtgaggggaaaccttccgaacttcccaagcccccaagagtgcagagatgccaggtccacagccatggcttggctggctgcagctgtgcctaagaagggaaagactcacattctcttgcctaatagtacaaggctagcctcagacattctgggagctggactggagaagcgatgttggggattcaccattcaatatgaactttgtgttcagtacagtctctctccttctttgtgtctggtgtctcagtgtcagactgctgttgtccaagcccccaagcaccgtggacatgttcagtggtgtctgatcccatcggcacagagcttggcttctcaggaggctcctcagagtcgcgtaaatagggtttccgatgcccggcctcaccagcttacagacgtgtctgaatctccttttcactcaggccacacttatattcactcttccctcctgaacattcgttag

SEQ ID NO: 137857 - DNA, 4843 bp, Homo sapiens
atgaaagagaatttcaaacacaggcacgtggtggcgttcattagcagtcaggaagctcaggaagattcaagagaggaagaagaccgactggagtctcggttttactttctttttctcttggagctgagctataagacaacaggactgaacagggagccaactgtttctttgaacagtaaatcaggaacaccaatggaccaaaatgaacacagtcactggggaccacatgcaaagggccaatgtgccagcagatctgagctgagaatcatcctggtgggcaaaacaggaactggcaaaagtgctgcagggaacagcatcctcaggaagcaagcatttgaatcgaagctgggttcccagaccttgactaagacttgcagcaaaagtcagggaagctggggaaatagagagattgtcattattgacacaccagatatgttttcttggaaggaccactgtgaagctctgtacaaagaggtgcagaggtgctacttgctgtctgcaccaggaccccatgtgctgctcctggtgactcagctgggccgctatacctcacaggaccagcaggctgcacagagggtgaaggagatctttggagaggatgccatgggacacacaattgtcctctttacccacaaggaagacctcaatggtggctccctgatggattacatgcacgactcagataacaaagccctaagcaagctggtggcagcatgtggtgggcgaatctgtgcctttaataaccgtgctgaagggagcaatcaggatgaccaagtgaaggaactaatggactgtattgaggatctgttgatggagaaaaatggtgatcactataccaatgggttgtacagcctaatacagaggtctaaatgtggacctgtgggatcagatgaaagagtaaaggaattcaaacagagccttataaagtacatggaaactcaaagaagttacacagccttggctgaagcaaactgcctaaaaggagccttaatcaaaacacaactaccaaaagtagataaaaccacaaagatagggaaaaaacagagcagaaaaactggaaactctaaaaagcagagcacctctcctcctccaaaggaacgcagttcctcaccagcaatggaacaaagctggacagagaatgactttgacgagctgagagaagaaggcttcagacgatcacattactctgagctaccggaggacattcaaaccgaaggcagagaagttgaaaactttgaaaaaagtttagaagaatgtataactagaataacccacacagagaagtgcttaaaggagctgatggagctgaaaaccaaggctcgagaactacgtgaagaatgcagaagcctcaggagccaatgcgatcaactggaagaaagggtgtcagcaatggaagatgaaatgaatgaaatgaagcgagaagggaagtttaaagaaaaaaagaataaaaagaaatgagcaaagcctccaagaaatatgggactatgtgaaaagaccaaatctacgtctgattggtgtacctgaaagtgatgcggagaatggaaccaagttggaaaacactctgcaggataggatccaggagaacttccccaatctagcaaggcaggccaacggattttgccgatttcggaaccaccatcaaacaggattttcgcctgctggggcaaaccagcgtggaccgcttgctgcaactctctcagggccaggcggtgaagggcaatcagctgttgcccgtctcactggtgaaaagaaaaaccaccctggcgcccaatacgcaaaccgcctctccccgcgcgttggccgattcattaatcgcagctggcacgacaggtttcccgactggaaagcgggcaccggtctgaaaagcgcaatattcgcgtgggagtgacccgattttccagctgggtgaggcagcctttgagagagatggtagtgctcttggagagggtgtctacaatcaccttgggggcaacgacagatgagaacatgacatccaaaagggacaagaagggattttgccgatttcggacccaccatcaaacaggattttcgcctgctggggcaaaccagcgtggaccgcttgctgcaactctctcagggccaggcggtgaagggcaatcagctgttgcccgtctcactggtgaaaagaaaaaccaccttggcgcccaatacgcaaaccgcctctccccgcgcgttggccgattcattaatgcagctggcacgacaggtttcccgactggaaagcgggcagaagaattgcatgatgcatcctgtgaaggagatggttctgtcttccacaaccaagttctccagcagtttgggtgtaactgtggtggaataacagaaatcaacaaaggacaagtggctgaggaaaaagtacatgcgggtgtggagtttggggttgatcctgatgatcatgatcatgcccaggtttcccaatacagtgattgtgtagatgggccaggcggtgaagggcaatcagctgttgcccgtctcactggtgaaaagaaaaaccaccctggcgcccaatacgcaaaccgcctctccccgcgcgttggccgattcattaatgcagctggcacgacaggtttcccgactggaaagcgggcagtgagcgcaacgcaattaatggattttgccgatttcggaaccaccatcaaacaggattttcgcctgctggggcaaaccagcgtggaccgcttgctgcaactctctcagggccaggcggtgaagggcaatcagctgttgcccgtctcactggtgaaaagaaaaaccaccctggcgcccaatacgcaaaccgcctctccccgcgcgttggccgattcattaatgcagctggcacgacaggtttcccgactggaaagcgggcaccacttgtcctctgtagatttctgctactcctcaataattgtgccaaaaatgttggctaatatctttaacaaggacaaagccatctccttcctagggtgcatggtgcaattctacttgttttgcacttgtgtggtcactgaggtcttcctgctggccgtgatggcctatgaccgctttgtggccatctgtaaccctttgctatacacagtcaccatgtcttggaaggtgcgtgtggagctggcttcttgctgctacttctgtgggacggtgtgttctctgattcatttgtgcttagctcttaggatccccttctatagatctaatgtgattaaccactttttctgtgatctacctcctgtcttaagtcttgcttgctctgatatcactgtgaatgagacactgctgttcctggtggccactttgaatgagagtgttaccatcatgatcatcctcacctcctacctgctaattctcaccaccatcctgaagatgggctctgcagagggcaggcacaaagccttctccacctgtgcttcccacctcacagctatcacaccaaaagtagataaaaccacaaagatggggaaaaaacagaacagaaaaactggaaactctaaaaagcagagcgcctctccacctccaaaggaacgcagttcctcaccagcaacagaaaaaaggtggatggagaatgattttgacgagctgagagaagaaggcttcagacgatcaaattactctgagctacgggaggacattcaaaccaaaggcaaagaagttgaaaactttgaaaaaaatttagaagaatgtataactagaataacaaatacagagaagtgcttaaaggagctgatggagctgaaaaccaaggctcgagaactatgtgaagaatgcagaagcctcaggagccgatgcgatcaactggaagaaaggggattttgccgatttcggaaccaccatcaaacaggattttcgcctgctggggcaaaccagcgtggaccgcttgctgcaactctctcaagggccaggcggtgaagggcaatcagctgttgcccgtctcactggtgaaaagaaaaaccaccctggcgcccaatacgcaaaccgcctctctccgcgcgttggccgattcattaatgcagctggcacgacaggtttcccgactggaaagcgggcagtgagcgcaacgcaattaatggattttgcggatttcggaacctccctcaaacaggattttcgcctgctggggcaaaccagcgtggaccgcttgctgcaactctctcagggccaggcggtgaagggcaatcagctgttgcccgtctcactggtgaaaagaaaaaccaccctggcgcccaatacgcaaaccgcctctccccgcgcgttggccgattcattaatgcagctggcacgacaggtttcccgactggaaagcgggcaggattttgccgatttcggaaccaccatcaaacaggattttcgcctgctggggcaaaccagcgtggaccgcttgctgcaactctctcagggccaggcggtgaagggcaatcagctgttgcccgtctcactggtgaaaagaaaaaccaccctggcgcccaatacgcaaaccgcctctccccgcgcgttggccgattcattaatgcagctggcacgacaggtttcccgactggaaagcgggcatacaacaagctatgatgatggtgttacagctttgcttggtcgtgatgatggtgtagtgcaggtgcttgcagatggctatgtagtggtcataggccattgctttgagtatgaagatctcaatgtctccaaggaaaccagaagtctgaatcaaggtgctggcaggactctgctgcctctgaaggcagtggaggagaaactttccttgctccacggcttgtggcagcaaaacaccatttccctctgtctgcacatgactttcctccctgtgtgtcttcctgttgtcctttattatctcttataa

SEQ ID NO: 137858 - DNA, 4137 bp, Homo sapiens; identical to SEQ ID NO: 128898

SEQ ID NO: 137859 - DNA, 2108 bp, Homo sapiens
ggggatttcctcttaatattttttattttgttgtttgaactcttgatgcaacattgtagagcagggtgttcaggacctgctgtgcccaagggactgataaaggaaaaagctctatttattctttttgtgatttgatgcacagatgaaaaacttaacacacaataacagaagttggtcgttaaataaatccacaccctagtctttccagcgccttccgtaagcaagacgacatcttcagttttctagctcttgtagtttcaacactgcaacatcaatgatgcatatgtcccaagaatccagttaccaaaagacccacccgattcctttttctccttagttccatccaatttttcactgtctcttggtccccaagtgtatctggagtgattaccttctggcattctctgctattgctcgttggggtgctctcgattgtccccgtgttttgtgggctggttgggagagggcgcttgggaaggatgtgccaactgtcgggaggttgtgagtcacttgggatgcctccagggatgatcccttccatggctgcaggaagtcctcctggagccacatcccacgatgcctggccggatatctgtatgtggcaccattgagctcaggatgaattgcttgctggtctattactgacccaaggcgctgatgtgacaaagaattccttgttcacacaattttctttaagctttctgggatgcgacctgtgatggctcggcggatctcggtggcagctgcctccctcatctccagtgacgcctgctcactgtaccaggcagtgtgaggagtgcagatgagattcggggcatctttcaacggaccctgagcaaagctgaagggctctgactcatgcacgtcgagggcataaaaatcgtatcctgccctccttgagggcttgtgataaggctttctcgtccaccaggccgccacgggctgcgttccacaaaggaatgctccctgccctcatctgctttatggtaaaagtcattgatgaaggtggtggttatgttcgttgaagattgcagtgcaaggagacgcagtcgctctgatacagcaaatcctgcagggtgtagaccctctgcacgcccagggaccgctcggatccccatcctgcaaagtaggggtcaataaaatatgacgctgaatccaaaggccttggctcgaactgcaaccgcctgccccgtgcgaccaaagccaatgaggcccagcgtctccccacggatgcgggccgctcccgaggccacctcgcggatctgctccacgctctgaacccgcgtgccttcccgcagtgcctggtacagccacgtgttcctccggtacaggttgaggatgtggcagatggtagagtccgctgtctcttccacggctgcagacgggatgttgcacacggcaattccgagctcgccggcagccttgatgtccacgttgtcatagccactgcctatccgcacgatcactctcagggccttgaacttctccaggtcctccctggtgagggtgatggtgtggtacatcatggcgcccacggcttcgtttagaaccttctcgtggatttcctgcgtcgactgcgcgtcacagaaggccacagtggccaggtccttcaggatgggcatctccacagtgcagtcgcggccgtccagcagcgccaccagggggcgggggtgcagggggccgttcatgatctgggggcggataccttcacaaattctgtccaatcgctgtctcttgactttgtgcttatccacaagggccattctttatggaactttgcaactctcagatcaaaaggcaaagcagtcctctaagaacttaggggaacttgcaggagtctgcgtgcatgacgccactatgaacccaatataaatctgtccacaaactctatagttcacacgatgggctgtccgtctttttaagggaatacaccttcattggttcaaaaccatttaaggtgatgaaaccctcgtcccggacggtcggcgtccacggcgaaaggcgcccaccctggaggcggcggcgcgcgttcccgcccctcccaccccacccggcggcggtggcggtggcggcggctgtgcggcccccccgcagcgcggcatcgcccg

SEQ ID NO: 137860 - DNA, 4018 bp, Homo sapiens
atggggaaaaaacagaacagaaaaactggaaactctaaaaataagagcgcctctcctcctccaaaggaacgcagctcctcaccagcaacggaacaaagctggatggagaatgactttgacgagctgagagaagaaggcttcagaagatcaaattactctgagctatgggaggacattcaaaccaaaggcaaagaagttgaaaactttgaaaaaaatttagaagaatgtataactagaataaccaacacagagaagtgcttaaaggagctgatggagctgaaaaccaaggctcgagaactacgtgaagaatgcagaagcctcaggagccgatgcgatcaactggaagaaagggtatcagcaatggaagatgaaatgaatgaaatgaatgaaatgaagcgagaaggaaagtttagagaaaaaagaataaaaagaaacgagcaaagcctccaagaaatatgggactatgtgaaaagaccaaatctacgtctgactggtgtacctgaaagtgatggggagaatggaaccaagttggaaaacactctgcaagatattatccaggagaacttcctcaccctagcaagacaggccaatattcacattcaggaaatacagagaacaccattaagatactcctcgagaagagcagccccaagacacatcgtgagattctccaaggttgaaacaaaggaaaaaatgttaagggcagccagagagaaagaaatacaaactaccatcagagaatactacaaacacctttacacaactaaactagaaaatctagaagaaatggaaaaattcctggacacatacaccctcccaagactaaaccagaaagaagttgaatccatgaaaagaccaataacaagttctgaaattgaggcagtcattaatatcctaccaatcaaaagaagtccaggacctgatggattgacagccacattctatcagaggtacaaagaggaactggaacgcagttcctcaccagcaacggaacaaagctggatggagaatgattttgacgagctgagagaagaaggcttcagacgatcaaattactctgagctacgggaggacattcaaaccaaagtcaaagaagttgaaaactttgaaaaaaatttagaagaatgtataactagaataaccaatacagagaagtgcttaaaggagctgatggagctgaaaaccaaggctcgagaactacgtgaagaatgcagaagcctcaggagccgatgcgatcaactggaagaaagggtatcagcaatggaagatgaaatgaatgaaatgaagcaagaagggaagtttagagaaaaaagaataaaaagaaatgagcaaagcctccaagaaatatgggactatgtgaaaagaccaaatctacgtctgattggtgtacctgaaagtgatggggagaatggaaccaagttgaaaaacactctgcaggatattatccaggagaacttccccaatctagcaaggcaggccaaagttcagattcaggaaatacagagaatgccacaaagatattccttgacaagagcaactccaagacacataattgtcagattcaccaaagttgaaatgaaggaaaaaatgttaagggcagccagagagaaaggagcacccagattcataaagcaagtcctgagtgacctacaaagagacttagactcccacacattaataatgggagactttaacaccccactgtcaacattagacagatcaacgagacagaaagtcaacaaggatacccaggaattgaactcagctctgcaccaagtggacctaatagacatctacagaactctccaccccaaatcaacagaatacacatttttttcagcaccacaccacacgtattccaaaattgaccacatacttggaagtaaagctctcctcagcaaatgtaaaagaacagaaattataacaaactatctctcagaccacagtgcaatcaaactagaactcaggattaagaatctcactcaaaaccgctcaactacatggaaactgaacaacctgctcctgaatgactactgggtacataacgaaatgaagctagaaataaagatgttctttgaaaccaacgagaacaaagacacaacataccagaatctctgggacgcattcaaagcagtgtatagagggaaatttatagcactaaatgcccacaagagaaagcaggaaagatccaaaattgacaccctaacatcacaattaaaagaactagaaaagcaagagcaaacacattcaaaagctagcagaaggcaagaaataactaaaatcagagcagaactgaaggaaatagagacacaaaaaacccttcaaaaaatcagtgaatccgggaggaggagccaagatggccgaataggaacagctccggtctacagctcccagcgtgagcgacgcagaagacaggtgatttctgcatttccatctgagggcacagacaaacaaaaagacagcagtaacctctgcagacttacgtgtccctgtctgacagctttgaagagagcagtggttctcccagcacgcagctggagatctgagaacgggcagactgcctcctcaaaaggaaaactaacaaccaggaaaggacatctacaccgaaaacccttctgtacattcaccatcattcaaagacccaaaagtaaataaaacccaccaaagatggggaaaaaaaacagaacagaaaaactggaaactcttaaaacccagagcgcctttccctcctccaaaggaatgcagttcctcaccagcaacggaacaaagctggatggagaatgactttgacaagctgagagaagaaggcttcagacgatcaaattactctgagctacggggaggacattcaaaccaaaggcaaagaagttgaaaactttgaaaaaaaatttagaagaatgtataacttagaataaccaatacagagaagtgcttaaaggagctgatggagctgaaaaccaaaggctcgagaaactacgtgaaagaatgcagaacgcctcaggagccgatgcgatcaactggaagaaagggtatcagcaatggaagatgaaatgaatgaaatgaagtgagaagggaagtttagagaaaaaagaataaaaagaaatgagcaaagccttcaagaaatatggggactatgtgaaaaagaccaaatctacgtccgattggtgtatctgaaagtgatggggagaatggaaccaagttggaaaacactctgcaggatattatcccggagaatttccccaatctagcaaggcaggccaacgttcagattcaggaaatacagagaacgccacaaagatactcctcgagaagagcaactccaagacacatacttgtcagattcaccaaagttgaaatgaaggaaaaaatgttaagggcagccagagagaaaggtcaggttaccctcaaaggaaagcccatcagactaacagcggatctctcggcagaaaccctacaagccagaagagagtgggggccaatattcaacattcttaaagaaaagaattttcaacccagaatttcatatccagccaaactaagcttcataagtgaaggagaaataaaatactttatagacaagcaaatgctgagagattttgtcaccaccaggcctgccctaaaagagctcctgaaggaatcactaaacatggaaaggaacaactggacctcaaagcagatcatccaagaggatggttactcagaggaggaaggttggctgtgcagggcagtcatctacagccacaccctccaggccatcatggccatcgtcaaggccacaggcaacctacagactgactttgccaaccccttccatacggatgatgccaggcaacagtttgcaatgtcttacacagttgtgggccagggtgcactccctgaggacctgtccagatgccacctgcaaactgaagctgtccagcgtcatccggaatctctgggctgcccattggatttgctccatgggatgcctgtttcatcctgctttggttacccacaggacaccagctccacagtttag

SEQ ID NO: 137861 - DNA, 11220 bp, Homo sapiens
  misc_feature (1)...(11220): n = a,t,c or g
ttagctatgccacactaagaaataagatatgaagcttagtttggctggatatgaaattctgggttgaaatttcttgtctttaagaatgttgaatattggcccccactctcttctggcttgtagggtttctgctgagagatccgctgttagtctgatgggcttccctttgagggtaacccgacctttctctctggctgcccttaacattttttccttcatttcaactttggtgaatctgaccattatgtgtcttggagttgctcttctcgagaagtatctttgtggcattctctgtgtttcctgaatctgaacgttggcctgccttgctagattggggaagttctcctggataatatcctgcagagtgttttccaacttggttccattctccccatcactttcaggtacaccaatcagacgtagatttggtcttttcacatagtcccatatttcttggaggctttgctcatttctttttattcttttttctctaaacttcccttctcgcttcatttcattcatttcatcttccatcgctgataccctctcttccagttgatcgcatcggctcctgaggcttctgcattcttcacgtagttctcgagccttggttttcagctccatcagctcctttaagcacttctctgtattggttattctagttatacattcttctaaatttttttcaaagttttcaacttctttgcctttggtttgaatgtcctcctgtagctgagagtaatttgatcgtctgaagccttcttctctcagctcgtcaaagtcattctccatccagctttgttccgttgttggtgaggaactgcgttcctttggaggaggagaggcgctctgcgttttagagtttccagtttttctgttctgttttttccccatctttgtggttttatgtacttttggtctttgatgatggtgatgtacagatgggtttttggtgtggatgtcctttctgtttgttagttttcctttgccgccttgcagtttgatctcagactgcagtgctagcaatgagcgagactccgtgggtgtaggaccctccgagccaggtgcgggatataatcttgtggtgcgccgttttttaagcccgtcggaaaagcgcagtattcgggtatgagtgacccgattttccaggtgccgtccgtcacccctttctttgactcggaaagggaactccctgaccccttgcgcttcccaagtgaggcaatgcctcgccctgtttcggctggcgcacggtgtgcgcacccactctcctgcacccactgtctggcactccctgcccaaggtaggaccatttcttgaaaattctgtccccggtttgtaaccccggtttgcggttacccaaccattctccggggtgcaaattttttcgataccgtcggggtctctgaaccctttcaatttggatactggccctggggcatcggtctggcaggttgggccccgctttttggcgttatttaggcttctggaaaatcgggtcactgccacccgaatattgcgcttttcagaccggcttaaaaagcggcgcaccacaagattatatcccacacctggccttcggagggtcctacgcccacggaatctcgctgattgctagcacagcggtctgagatcaaactgcaaggccgcagcaaggctgggggaggggcgcccgccattgcccaggcttgcttaggtaaacaaagcagccggggaagctcgaactgggtgcagcccaccacagctcaaggaggcctgcctgcctctgtaggctccacctctgggggcagggcacagacaaacaaaaagacagcagtaacctctgcagacttaaatgtccctgtctgacagctttgaagagagcagtggttctcccagcacgcagctggagatctgagaacgggcagactgcctcctcaagtgggtccctgacccctgacccccgagcaagcnttaacttgggaggcacccnccccagcaggggcacactgacacctcacacggccaggtactcccaacagacctgcagctgagggtcctgtctgttagaaggaaaactaacaaacagaaaggacaaccacacccaaaaacccatctgtacatcaccatcatcaaagaccaaaagtagataaaaccacaaagatggggaaaaaacagaacagaaaaactggaaactctaaaaagcagagcgcctctcctcctccaaaggaatgcagttcctcaccagcaatggaacaaagctggacggagaatgactttgacgagctgagagaagaaggcttcagacgatcaaattactctgagctatgggaggacattcaaaccaaaggtaaagaagttgaaaactttgaaaaaaatttagaagaatgtataactagaataaccaatacagagaagtgcttaaaggagctgatggagctgaaaaccaaggctcgagaactacgtgaagaatgcagaagcctcaggagccaatgcgatcaactggaagaaagggtatcagcaatggaagatgaaatgaatgaaatgaagcaagaagggaagtttagagaaaaaagaataaaaagaaacgagcaaagcctccaagaaatatgggactatgtgaaaagaccaaatctacgtctgattggtgtacctgaaagtgatgcggagaatggaaccaagttggaaaacactctgcaggatattatccaggagactttccccaatctagcaaggcaggccaacgttcagattcaggaaatacagagaacgccacaaagatactcctcgagaagagcaactccaagacacataattgtcagattcaccaaagttgaaatgaaggaaaaaatgttaagggcagccagagagaaaggtcgagttaccctcaaagggaagcccatcagactaacagcggatctctcggcagaaaccctacaagccagaagagagtgggggccaatattgaacattcttaaagaaaagaattttcaacccagaatttcatatccagccaaactaagcttcataagtgaaggagaaataaaatactttacagacaagcaaatgctgaccgattttgtcaccagcaggcctgccctaaaagagctcctgaaggaagcgctaaacatggaaaggaacaaccggtaccagccactgcaaaatcatgccaaaatgtaaagaccatcgagactaggaagaaactgcatcaactaacgagcaaaatcaccagctaacatcataatgacaggatcaaattcacacataacaatattaactttaaatgtaaatggactaaattctccaattaaaagacacagactggcaagttggataaagagtcaagacccatcagtgtgctgtattcaggaaacccatctcatgtgcagagacacacataggctcaaaataaaaggatggaggaagatctaccaagcaaatggaaaacaaaaaaaggcaggggttgcaatcctagtctctgataaaacagactttaaaccaacaaagatcaaaagagacaaagaaggccattacatgatggtaaagggatcaattcaacaagaggagctaactatcctaaatatgtatgcacccaatacaggagcacccagattcataaagcaagtcctgagtgacctacaaagagacttagactcccacacattaataatgggagactttaacaccccactgtcaacattagacagatcaacgagacagaaagtcaacaaggatacccaggaattgaactcagctctgcaccaagcagacctaatagacatctacagaactctccaccccaaatcaacagaatatacatttttttcagcaccacaccacagctattccaaaattgaccacatacttggaagtgaagctctcctcagcaaatgtaaaagaacagaaattataacaaactatctctcagaccacagtgcaatcaaactagaactcaggattaagaatctcactcaaagccgctcaactacatggaaactgaacaacctgctcctgaatgactactgggtacataacgaaatgaaggcagaaataaagatgttctttgaaaccaacgagaacaaagacacaacataccagaatctctaggacgcattcaaagcagtgtgtagagggaaatttatagcactaaatgcccacaagagaaagcaggaaagatccaaaattgacaccctaacatcacaattaaaagaactagaaaagcaagagcaaacacattcaaaagctagcagaaggcaagaaataactaaaatcagagcagaactgaaggaaatagagacacaaaaaacccttcaaaaaatcaatgaatccaggagctggttttttgaaaggatcaacaaaattgatagaccgctagcaagactaataaagaaaaaaagagagaagaatcaaatagacacaataaaaaatgataaaggggatatcaccaccgatcccacagaaatacaaactaccatcagagaatactacaaacacctctacgcaaataaactagaaaatctagaagaaatggatacattccttgacacatacactctcccaagactaaaccaggaagaagttgaatctctgaatagaccaataacaggagctgaaattgtggcaataatcaatagtttatcaaccaaaaagagtccaggaccagatggattcacagccgaattctaccagaggtacaaggaggaactggtaccattctttctgaaactattccaatcaatagaaaaagagggaatcctccctaactcattttatgaggccagcatcattctgataccaaagccgggcagagacacaaccaaaaaagagaattttagaccaatatccttgatgaacattgatgcaaaaatcctcaataaaatactggcaaaccaaatccagcagcacatcaaaaagcttatccaccatgatcaagtgggcttcatccctgggatgcaaggctggttcaatatacgcaaatcaataaatgtaatccagcatataaacagagccaaagacaaaaaccacatgattgtctcaatagatgcagaaaaagcctttgacaaaattcaacaacccttcatgctaaaaactatcaataaaataggtattgatgggatgtatttcaaaataataagagctatctatgacaaaaccacagccaatatcatactgaatgggcaaaaactggaagcattccctttgaaaaccggcacaagacagggatgccctctctcaccgctcctattcaacatagtgttggaatttctggccagggcaatcaggcaggagaaggaaataaagggtattcaattaggaaaagaggaagtcaaattgtccctgtttgcagatgacatgattgttgatctagaaaaccccatcgtctcagcccaaaatctccttaagctgataagcaacttcagcaaagtctcaggatacaaagtcaatgtacaaaaatcacaagcattcttatacaccaacaacagacaaacagagagccaaatcatgagtgaactcccattcacaattgcttcaaagagaataaaatacctaggaatccaacttacaagggatgggaaggacctctccaaggagaactacaaaccactgctcaaggaaataaaagaggatacaaacaaatggaagaacattccatgctcatgggtaggaagaatcaatatcgtgaaaatggccatactgcccaaggtaatttacagattcaatgccatccccatcaagctaccaatgactttcttcacagaattggaaaaaactactttaaagttcatatggaaccaaaaaagagcccgcatcgccaagtcaatcctaagccaaaagaacaaagctggaggcatcacactacctgacttcaaactatactataaggctacagtaaccaaaacagcatggtactggtaccaaaacagagatatagaccaatggaacagaacagagccctcagaaataatgccgcatatctacaactatctgatctttgacaaacctgagaaaaacaagcaatggggaaaggattccctatttaataaatggtgctgggaaaactggctagccatatgtagaaagctgaaactggatcccttccttacaccttatacaaaaatcaattcaagatggattaaagacttaaacgttagacctaaaaccataaaaaccctagaagaaaacctaggcattaccattcaggacacaggcaggggcaaggacttcatgtctaaaacaccaaaagcaatggcaacaaaagccaaaactgacaaatgggatctgattaaactaaagagcttctgcacagcaaaagaaactaccatcagagtgaacaggcaacctacaaaatgggagaaaattttcacaacctactcctctgacaaagggctaatatccagaatctacaatgaactcaaacaaatttacaagaaaaaaacaaacaaccccatcaaaaagtgggcaaaggatatgaacagacacttctcaaaagaagacatttatgcagccaaaaaacacatgaaaaaatgctcatcatcactggccatcagagaaatgcaaatcaaaaccacaatgagataccatctcataccagttagaatggcaatcattaaaaagtcaggaaacaacaggtgctggagaggatgtggagaaataggaacacttttacactgttggtgggactgtaaactagttcaaccattgtggaagtcagtgtggcgattccttagggatctagaactagaaataccatttgacccagccatcccattactgggtatatacccaaatgactataaatcatgctgctataaagacacatgcacacgtatgtttattgcggcattattcacaatagcaaagacttggaaccaacccaaatgtccaacaatgatagactggattaagaaaatgtggcacatatacaccatggaatactatgcagccataaaaaatgatgagttcatgtcctttgtagggacatggatgaaattggaaaccatcattctcagtaaactatcgcaagaacaaaaaaccaaacaccgcatattctcactcataggtgggaattgaacaatgagatcacatggacacagtcagaagaacaatatgcagtggggcctgttggagggcggatcggcaggttgacaaataatagacacacacaagatagtgaaagctgggtccggggggtcaccgccttctggtcccgtggtgccaacaatgcactggatataccagcatttattattaagtttagtgagggcaggggtagcctccacactcacgatggcccccctggtcccacttcttctctcaaactgtctttttctcattcctttgactccactggactttgtcgcccccacgacctggtgttgggtctgatcatcccaacaatggttaatattacaagtcaacttgactggcttgaggatgcccagatggctggtgaagcactgttcctggaaggaaaactaacaaccagaaaggacatctacaccgaaaacccatctctacatcaccatcatcaaagaccaaaagtagataaaaccacaaagatggggaaaaaaacagaacagaaaaactggaaacttctaaaaatcagagcgcctcttctcctcctccaaaggaatgcagcttcctcaccagcaatggaacaaagctggaccggagaatgatttttgactttgacgagctgagagcagaaggcttcaaacgatcaaattacttctgagctacgggaggacattcaaaccaaaggcaaagaagttgaaaacctttgaaaaaaaatttagaccgaatgtataactagaataaccaataccagagaagtgcttaaaggagcagctgatggagctgaaaaccaaggctcgagaactacgtgaagaatgcagaagcctcaggatgccgatgcgattcaactggaagaaagggtattcagcaatggaagtgaaaagatgaaacgcatgaaatgaaatgaaatgaagccgagaaggaaagtttagagaaaaaaagaataaaaagaaatgagccaaagccttgaaggaattatgggactatgtgaaaagaccaaatctatgtctgattggtgtacctgaaaggtgacggggagaatggaaccaagttggaaaacactctgcaggatatattatccaggagaacttccaccaatactagcaagggcaggcccaacgttcagtttcaagaaataccgaaaacggcacaaagatacttctcgagaagagcaactccaagacatataattgtcagattcaccaaagttgaaatgaaggaaaaaaggttaagggcagccagagagagaaaggtcgggttacccctcaaaggggaaggccatcagactaaacagtggatctctcggcagaaactctacaagccagaaaagagtgggggccaatattcaacattcttaaagaaaagaattttcaacccagaatttcatatccagccaaactaagcttcataagtgaaggagaaataaataagatcctttacagacaagcaaatgccgagagatttttgtcaccactaggccctgccctaaaagagctcctgaaggaagcgctaaacatggaaaggaacaaccggagaaagcaggaaagatccaaaattgacaccctaacatcacaattaaaagaactagaaaagcaagagcaaacacattcaaaagctagcagaaggcaagaaataactaaaatcagagcagaactgaaggaaatagagacacaaaaaacccttcaaaaaatcaatgaatccaggagctggttttttgaaaggatcaacaaaattgatagaccgctagcaagactaataaagaaaaaaagagagaagaatcaaatagacacaataaaaaatgataaaggggatatcaccactgatcccacagaaatacaaactaccatcagagaatactacaaacacctctacgcaaataaactagaaaatctagaagaaatggatacattcctcgacacatacactctcccaagactaaaccaggaagaagttgaatctctgaatagaccaataacaggctctgaaattgtggcaataatcaatagtttaccaaccaaaaagagtccaggaccagatggattcacagccgaattctaccagaggtacaaggaggaactggtaccattccttctgaaactattccaatcaatagaaaaagagggaatcctccctaactcattttatgaggccagcatcattctgataccaaagccgggcagagacacaaccaaaaaagagaattttagaccaatatccttgatgaacattgatgcaaaaatcctcaataaaatactggcaaaccgaatccagcagcacatcaaaaagcttatccaccatgatcaagtgggcttcatccctgggatgcaaggctggttcaatatacgcaaatcaataaatgtaatccagcatataaacagagccaaagacaaaaaccacatgattatctcaatagatgcagaaaaagcctttgacaaaattcaacaacccttcatgctaaaaactctcaataaattaggtattgatgggaagtatttcaaaataataagagctatctatgacaaacccacagccaatatcatactgaatgggcaaaaactggaagcattccctttgaaaactggcacaagacagggatgccctctctcaccgctcctattcaacatagtgttggaagttctggccagggcaatcaagcaggagaaggaaataaagggtattcagttaggaaaagaggaagtcaaattgtccgtgtttgcagacgacatgattgtttatctagaaaaccccatcgtctcagcccaaaatctccttaagctgataagcaacttcagcaaagtctcaggatacaaaatcaatgtacaaaaatcacaagcattcttatacaccaacaaccgacaaacagagagccaaatcatgagtgaactcccattcacaattgcttcaaagagaataaaatacctaggaatccaacttacaagggatgtgaaggacctcttcaaggagaactacaaaccactgctcaaggaaataaaagaggacacaaacaaatggaagaacattccatgctcatgggtaggaagaatcaatatcgtgaaaatggccatactgcccaaggtaatttacagattcaatgccatccccatcaagctaccaatgactttcttcacagaattggaaaaaactactttaaagttcatatggaaccaaaaaagagcccgcatcgccaagtcaatcctaagccaaaagaacaaagctggaggcatcacactacctgacttcaaactatactacaaggctacagtaaccaaaacagcatggtactggtaccaaaacagagatatagatcaatggaacagaacagagccctcagaaataatgccgcatatctacaactatctgatctttgacaaacctgagaaaaacaagcaatggggaaaggattccctatttaataaatggtgctgggaaaactggctagccatatgtagaaagctgaaactggatcccttccttacaccttatacaaaaatcaattcaagatggattaaagatttaaacgttagacttaaaaccataaaaaccctagaagaaaacctaggcattaccattcaggacataggcgtaggcaaggacttcatgtccaaaacaccaaaagcaatggcaacaaaagccaaaattgacaaatgggatctaattaaactaaagagcttctgcacagcaaaagaaactaccatcagagtgaacaggcaacctacaacatgggagaaaattttcgcaacctactcatctgacaaagggctaatatccagaatctacaatgaactcaaacaaatttacaagaaaaaaacaaacaaccccatcaaaaagtgggcaaaggacatgaacagacacttctcaaaagaagacatttatgcagccaaaaaacacatgaagaaatgctcatcatcactggccatcagagaaatgcaaatcaaaaccactatgagatatcatctcacaccagttagaatggcaatcattaaaaagtcaggaaacaacagcagccagatgccactgactagctcagataacactgctgtcaactgtaaaaaattaagatccaaaccagatgaaattgccaaagagtcagaagctcctccaggcttagccagctttcacctttgctcatcatacatctatggggctcctcttaactcacagatgggctag

SEQ ID NO: 137862 - DNA, 519 bp, Homo sapiens
attgacccttcgctgacgaattcggcacgaggcagctggggctgctcttcccgccggcggaggccctgcaggtgggcatagtggaccaggtggtcccggaggagcaggtgcagagcactgcgctgtcagcgatagcccagtggatggccattccaggtgaggcacggggcatggcgggcgcccgatgatgctggggagaccagaaggttctccacccaaaggttttctgtggacatcgtgacttcgggagactgttgataatcacagccatgtgggtgtcaggaggctgctgtaacaacgcagcacagaccgggtggcccagaccgcagaagctcatctcacggtgctggagaccagaggtgcaaaatcaaagtgtgggcaggactgcacttcctccctgcgttccagggaggctccttcctgccccgcccacttctgctggctccaggcctccctgggcttgtgggcgcctcgctctaatctctgcctccatccttacgcagctttctcccctgtgtt

SEQ ID NO: 137863 - DNA, 1102 bp, Homo sapiens
tagttgcgtgccgccccctccccaggaggcgagctcagcccgcgacctttatcccgcgcgttgcggtcaagatggcgctggtggcttctgtgcgagtcccggcgcgcgttctgctccgcgcgggggcccggctcccgggcgcggccttcgggcggacggagcgggcggccggcggcggagacggcgcagcggccgcttcgggagccagcgggtgctggtggagccggacgcgggcgcaggggtcgctgtgatgaaattcaagaaccccccagtgaacagcctgagcctggagtttctgacggagctggtcatcagccgtggagaagctggagaatgacaagagcttccgcgatgtcattctgacctcggacccgcccgggtgtcttctcggccgggcttgaccctaacggagatgtgtggggaggagccccgcccactacgcttgggtacttgaaaggccggttcaggagctgtggctgcggttgtaccagtcccaactgggtgctggtctccgccatcaacggagccctgccccgctggagggctgcctggtggccctgacctgtgactacaccattctgggcgggcaacccaaggtactgcataggactcaatgagcacccagcctgggcatcatcgccccctttctggttgaaagacaacccctggagaacacccatcgggcaccgggcggcggagtctgcccctgcagctggggctgcctcttccgccgccggcggaggccctgcaggtgggcatagtggaccagggtggtccctggaggagcaggtgcagagcactgcgctgtcagcgatagcccagtggatggccattcccaagccaatggctcacaagtttgaccaaggccataatgcgaaaaggccagggcccacccgcctggtcacgcaagggctatgcggacgtgcagaacttcggtcagcttcatctccaaagactccatccagaagtccctgcagatgtacttagagaggctcaaagaagaaaaaggctaacgattgggctgccacaggcttacggccacacgtgcccctgtgggtcccagggaggtcttaaacaaggtatttttcaacttaaaagtaaa

SEQ ID NO: 137864 - DNA, 3342 bp, Homo sapiens; identical to SEQ ID NO: 120797

SEQ ID NO: 137865 - DNA, 972 bp, Homo sapiens
atggtgaacccagatactggctacatcaactatgaccagctggaggagaacgcacgcctcttccacccgaagctgatcatcgcaggaaccagctgctactcccgaaacctggaatatgcccggctacggaagattgcagatgagaacggggcgtatctcatggcggacatggctcacatcagcgggctggtggcggctggcgtggtgccctccccatttgaacactgccatgtggtgaccaccaccactcacaagaccctgcgaggctgccgagctggcatgatcttctacaggaaaggagtgaaaagtgtggatcccaagactggcaaagagattctgtacaacctggagtctcttatcaattctgctgtgttccctggcctgcagggaggtccccacaaccacgccattgctggggttgctgtggcactgaagcaagctatgactctggaatttaaagtttatcaacaccaggtggtggccaactgcagggctctgtctgaggccctgacggagctgggctacaaaatagtcacaggtggttctgacaaccatttgatccttgtggatctccgttccaaaggcacagatggtggaagggctgagaaggtgctagaagcctgttctattgcctgcaacaagaacacctgtccaggtgacagaagcgctctgcggcccagtggactgcggctggggaccccagcactgacgtcccgtggacttttggaaaaagacttccaaaaagtagcccactttattcacagagggatagagctgaccctgcagatccagagcgacactggtgtcagagccaccctgaaagagttcaaggagagactggcaggggataagtaccaggcggccgtgcaggctctccgggaggagagaggaaatgcccatgtccacagcttgtacacactgccccctcactatcttgttatccagtggcatgccaaaggagaactgaattag

SEQ ID NO: 137866 - DNA, 165 bp, Homo sapiens
ttacgagcacgagctggccctgcagcagactgtggaggctggcgtcaatggcctgtgccgggagatgcttgctctgcgaggtcagaccggtggagaagtgaacgtggagacggatgccgcacctggcgtggacctgagctgcatcctgaatgagatgcgcaacca

SEQ ID NO: 137867 - DNA, 665 bp, Homo sapiens
gcgcagccaactgctcgctcgctcacctccctcctctgcaccatgactacctgcagccgccagttcacctcctccagctacatgaagggctcctgcggcatcgggggcggcatcgggggcggctccagccgcatctcctacgtactggccggagggtcctgccgcgcccccagcacctacgggggcggcctgtctgtctcatcctcccgcttctcctctgggggagcctatggattggggggcggctatggcggtggcttcagcagcagcagcagcagctttggtagtggctttgggggaggatatggtggtggccttggcgctggcttgggtggtggctttggcggtggctttgctggtggtgatgggcttctggtgggcagtgagaaggtgaccatgcagaacctcaacgaccgcctggcctcctacctggacaaggtgcgtgctctggaggaggccaacgccgacctggaagtgaagatccgtgactggtaccagaggcagcggcctgctgagatcaaagactacagtccctacttcaagaccattgaggacctgaggaacaagattctcacagccacagtggacaatgccaatgtccttctgcagattgacaatgcccgtctggccgcggatgacttccgcaccaagtatgagacagagtt

SEQ ID NO: 137868 - DNA, 1706 bp, Homo sapiens
  misc_feature (1)...(1706): n = a,t,c or g
atgggggcggcttcagccgcatctcctncgtcctggcgaaggggcctgcgcgtgcccccagcaccaaagggggcggcctgtcagtctccttctcgtttctcctctggggaagcatgcgggctggggggcggctatggcggtggcttcagcagcagcagcagctttggtagtggcttcaggggaggatatggtggtggccttggtgctggcttcggtggtggcttgggtgctggctttggtggtggttttgctggtggtgatgggcttctggtgggcagtgagaaggtgaccatgcagaacctcaatgaccgcctggcctcctacctggacaaggtgcgtgctctggaggaggccaacgccgacctggaagtgaagatccgtgactggtaccagaggcagcggcccagtgagatcaaagactacagtccctacttcaagaccatcgaggacctgaggaacaagatcattgcggccaccattgagaatgcgcagcccattttgcagattgacaatgccaggctggcagccgatgacttcaggaccaagtatgagcacgaactggccctgcggcagactgtggaggccgacgtcaatggcctgcgccgggtgttggatgagctgaccctggccaggactgacctggagatgcagatcgaaggcctgaaggaggagctggcctacctgaggaagaaccacgaggaggagatgcttgctctgagaggtcagaccggcggagatgtgaacgtggagatggatgctgcacctggcgtggacctgagccgcatcctgaatgagatgcgtgaccagtacgagcagatggcagagaaaaaccgcagagacgctgagacctggttcctgagcaagaccgaggagctgaacaaagaagtggcctccaacagcgaactggtacagagcagccgcagtgaggtgacggagctccggagggtgctccagggcctggagattgagctgcagtcccagctcagcatgaaagcatccctggagaacagcctggaggagaccaaaggccgctactgcatgcagctgtcccagatccagggactgattggcagtgtggaggagcagctggcccagctacgctgtgagatggagcagcagagccaggagtaccagatcttgctggatgtgaagacgcggctggagcaggagattgccacctaccgccgcctgctggagggcgaggatgcccatcttcacctcctcctcgtcctcttcgagccgtcagacccggcccatcctcaaggagcagagctcatccagcttcagccagggccagagctcctagaactgagctgcctctaccacagtctcctgcccaccagctggcctcacctcctgaaggcccggaagaagccagagaagggagccccccactactgtggcctaggagcttggaagacaatgctgagacagacatctgagctgtgggctccccaaatctgccagcaaaggactctcaaggatagagatgctttggaatccaccctgccagagacggaggcccgctatagctcccagctggcccagatgcagtgcatgatcaccaacgtggaggcccagctggccgagatccgggctgacctggagcggcagaaccaggagtaccaggtgctgctggacgtccgggcccggctggagtgtgagatcaacacgtaccggggcctgctggagggcgaggacgccca

SEQ ID NO: 137869 - DNA, 2368 bp, Homo sapiens
gctaggcagcttcgaaccagtgcaatgacgatgccagtcaacggggcccacaaggatgctgacctgtggtcctcacatgacaagatgctggcacaacccctcaaagacagtgatgttgaggtttacaacatcattaagaaggagagtaaccggcagagggttggattggagctgattgcctcggagaatttcgccagccgagcagttttggaggccctaggctcttgcttaaataacaaatactctgaggggtacccgggccagagatactatggcgggactgagtttattgatgaactggagaccctctgtcagaagcgagccctgcaggcctataagctggacccacagtgctggggggtcaacgtccagccctactcaggctcccctgcaaactttgctgtgtacactgccctggtggaaccccatgggcgcatcatgggcctggaccttccggatgggggccacctgacccatgggttcatgacagacaagaagaaaatctctgccacgtccatcttctttgaatctatgccctacaaggtgaacccagatactggctacatcaactatgaccagctggaggagaacgcacgcctcttccacccgaagctgatcatcgcaggaaccagctgctactcccgaaacctggaatatgcccggctacggaagattgcagatgagaacggggcgtatctcatggcggacatggctcacatcagcgggctggtggcggctggcgtggtgccctccccatttgaacactgccatgtggtgaccaccaccactcacaagaccctgcgaggctgccgagctggcatgatcttctacaggaaaggagtgaaaagtgtggatcccaagactggcaaagagattctgtacaacctggagtctcttatcaattctgctgtgttccctggcctgcagggaggtccccacaaccacgccattgctggggttgctgtggcactgaagcaagctatgactctggaatttaaagtttatcaacaccaggtggtggccaactgcagggctctgtctgaggccctgacggagctgggctacaaaatagtcacaggtggttctgacaaccatttgatccttgtggatctccgttccaaaggcacagaatggtggaagggctgagaaggtgctagaagcctgttctattgcctgcaacaagaacacctgtccaggtgacagaagcgctctgcggcccagtggactgcgggtggggaaccccagcactggacgtcccggtggacttttggaaaaagacttccaaaaagtagctccactttattcacagagggatagagctgaccctgcagatccagagcgacactggtgtcagagccaccctgaaagagttcaaggagagactggcaggggataagtaccaggcggccgtgcaggctctccgggaggaggttgagagcttcgcctctctcttccctctgcctggcctgcctgacttctaaaggagcgggcccactctggacccacctggcgccacagaggaagctgcctgccggaggacccccacctggagagatggatgagctcgtccaaaggggaactgttgacactcgggccctttgagggggtttcttttggacttttttcatgttttcttcacaaatcaaaatttgtttaagtctcattgttagtaattctgggacaggttattaaaggatttaaatttgaacctggctttctcacagctggacataattctaggaaaataaaatactatgtcgccacttggtcataatcatttagatggtggtgtagggcaaagctgttagaaagattgtagcgttttactctccctgggctttccttccgccttgctgcaacagagaggaaatgcccatgtccacagcttgtacacactgccccctcactatcttgttatccagtggcatgccaaaggagaactgaattagcttctgaggcttctgctgtaaatcagaagtgtatgttagtcaagagtaaacaagatgcaccagtatggtgggagggttgctgtcagtagctcaaagtatggtgtagaaatggcctcctccctccatcctgggaagtcccagtcccatcctggtgtgagaatcaaccaggctttcctgctccacctgagataaccaactccctcccgtaatcaggaagccaaatgtcaccttcccaaagaaattttattttcacgtagctgaagtgcaaaacatagatgaccatttttaataagcacaatcaaatttttaaccacagaatgtctacaagaattatagctttaaaaaatacaaccaatttttatatttcaaaaatatttgaactcaaataaattaatttcttaaaaagtaaaaaaaaaaaa

SEQ ID NO: 137870 - DNA, 2474 bp, Homo sapiens
tctctcatcccaccccacgagaaacacccacaggtgtggaggggcaggccaccccttcagtcctcggtgctgcaccagcctctcaggccaaggccacgcccaccctgggcagacctcatgccagtgatcgtggggaggtggctcagctggatgaatggagctgccaggcccagcgtgggatctgtggacacaggagagagaactgctgggaacggatccccagccagtcctgtttctacaggccaactgctcgctcgctcacctccctccttggcacgatgagcacctgcagccaccagttcacctcctccagatccatgaagggctcctgcagtatcgggggcagcatcgggggcggctccagccgcatctcctctgtcctggccggagggtcctgccatgcccccagcacctacgggggggcctgtgtgtctccttctctcgcttctcctttgggggagcctgcgggctggggggaggctatggcggtggcttcggcagcagcaccaacttttggagtgtgcttcgggggaggatatggtgcgggccttggtgctggcttcggtggtggcttgggtgctggcttgggtggtggctttgctggtggtgatgggcttctggtgggcagtgagaaggtgaccatgcagcacctcggtgaccgcctggcctcctacctggacaaggtgcgtgctctggaggaggccaacgccgacctggaagtgaagatccgtgactggtaccagaggcagcggcccagtgagatcaaagactacagtccctacttcaagaccatcgaggacctgaggcacaagatcattgcggccaccattgagaatgcgcagcccattttgcagattgacaatgccaggctggcagctgatgacttcaggaccaagtatgaggcacgaactggccctgcggcagactgtggaggccgacgtcaatggcctgcgccgggtgttggatgagctgaccctggccaggactgacctggagatgcagatcgaaggcctgaaggaggagctggcctacctgaggaagaaccacgaggaggagatgcttgctctgagaggtcagaccggcggagatgtgaacgtggagatggatgctgcacctggcgtggacctgagccgcatcctgaatgagatgcgtgaccagtacgagcagatggcagagaaaaaccgcagagacgctgagacctggttcctgagcaagaccgaggagctgaacaaagaagtggcctccaacagcgaactggtacagagcagccgcagtgaggtgacggagctccggagggtgctccagggcctggagattgagctgcagtcccagctcagcatgaaagcatccctggagaaccagctgggaggagaccaagggccgctactgcatgcagctgtcccagatccagggactgattggcagtgtggaggagccagctggcccagctacgctgtgagatggagcagcagagccaggagtaccagatcttgctggatgtgaagacgcggctggagcagaagtattgccaccctaccgcagctctgctggagggcgaggatgcccacctttcctcccagcaagcatctggccaatcctattcttcccgcgaggttttcaccttcctcctcgtcctcttcgagccgtcagacccggcccatcctcaaggagcagagctcatccagcttcagccagggccagagctcctagaactgagctgcctctaccacagcctcctgcccaccagctggcctcacctcctgaaggcctggccaactgctcgctcactcacctccctcctcagcaccatgagcacctgcagccgccagttcacctcctccagctccatgaagggctcctgcggcatcgggggcggcatcgggggcggctccagccgcatctcctccgtcctggccggagggtcctgccgcgccaccagcacctacaggggtggcctgtctgtcgcctcctcctgcttctcctctgggggagcctacaggctggggggcggctatggcggtagcttcagcagcagcagcagcttcagtagtggctttgggggaggatatggtgatggccttggtgctggcttcggtggtggcttgggtggtggctttgctggtggtgatgggcttctggtgggcagtgagaaggtgaccatgcagaacctcaacgacagcctggtctcctacctggacaaggcgcgtgccctggaggaggccaacgctgacctggaggtgaagatccatgactggtaccagtggcagcggcctgctgagatcaaagactacagtccctacttcaagaccatcgaggatctgaggaataaggcaatagaacaggcttctagcaccttctcagcccttccaccatctgtgcctttggaacggagatccacaaggatcaaatggttgtcagaaccacctggaaacaaagttggacatgtagaaatgcaggcgaattctatgccgtga

SEQ ID NO: 137871 - DNA, 365 bp, Homo sapiens
ggaggatttgctcgacttggacgaggagcttcgctacagcttggctacctccagggccaagatgggtcgccgagctcaacaggagtcagcgcaggccgagaatcacctcaatggcaagaattcctctttgactctgactggagagacttcctctgctaaattacctcgctgccgacagggaggctgggcaggtgattccgtgaaggcttcgaacggtacccaaacaggcaaacaacagctggatctgaacgcatgctatcacaaaacgcatcacagagatttggggctggcttcattggaagaggcagatattcctatcattccggatctggaggaagtacaggaagaagactttgttttgcagg

SEQ ID NO: 137872 - DNA, 464 bp, Homo sapiens
cggagatggaggatttgctcgacttggacgaggagcttcgctacagcttggctacctccagccccgagtgcgaacttccccagaacagatcgatcacagggtgataggggagccccggccgggttcgcactcgctcccatcctagagtttttcctttgggacacctcgtcgcagaagttcctgcaaaagccgcactgttttatgcatggaagggagagggccaagatgggtcgccgagctcaacaggagtcagcgcaggccgagaatcacctcaatggcaagaattcctctttgactctgactggagagacttcctctgctaaattacctcgctgccgacaggaggctgggcaggtgattccgtgaaggcttcgaagtttaggaggaaggcttctgaagaaatagaagatttccgcctcagaccacagagcctgaatggatcagattatggaggagatattcct

SEQ ID NO: 137873 - DNA, 935 bp, Homo sapiens
aggatttgctcgacttggacgaggagcttcgctacagcttggctacctccgtgaggaccaattcgggggccttgggggccaggatttggcgggtggggaggagcgaccccgccggccccgacttctctgaggcgactcagggcggcaggcctcgcgccgcgccgggtgaggcccagaaggaggcagcctcaccgccccgcccccaggccactgtgggctccgccgctgctggcctggggtttgctttctttaaaatcctcagaaagtagaaaacaccctgtccccgccggcgtctaggaccgtgggaaatttccgagcctttctccgttttctagagccccgagtgcgaacttccccagaacagatcgatcacagggtgataggggagccccggccggggtcgcactcgctcccatcctagagtttttcctttgggacacctcgtcgcagaagttcctgcaaaagccgcactgttttatgcatggaagggaggcaggcagggacggcctttcttcccgagggccaagatgggtcgccgagctcaacaggagtcagcgcaggccgagaatcacctcaatggcaagaattcctctttgactctgactggagagacttcctctgctaaattacctcgctgccgacagggaggctgggcaggtgattccgtgaaggcttcgaagtttaggaggaaggcttctgaagaaatagaagagtacgtttccagcattcttattcttatggtatcctatgttgatcttgggcaacagggcaggcttggtggtcatgatctgttccacctatgttgaacactgtgttagaagtctggggctagaattattgatgccctgctgaatccaaggtttggttaatcccgcttcctcaactgaaggtctggaccctggcattgatgcccatgtcctatctcccactgtgtg

SEQ ID NO: 137874 - DNA, 571 bp, Homo sapiens
tcatgaagtactcagccattcagacactggatggggagatcgacctgaaactcctcaccaaagtgctcgcgccggagcacgaagtccggtaggtacagtggtggcagcaattccccggtctctcaactctggcaatccccataaacccagccgaactccccgggctggccctgtgcctcccctgaaggccctggaatgggagggagaaagtcagcctacagttaagggaaaaggccctttctttgtcttacccagcgaaacccttcttggcaggatgatgtcggctgggactgggaccatctgttcactgaggtgtcctcagaggtcctcactgaagtgggacccactgcagacggagaaggaggaccctgcggggcaggccaggcacacctgagcccgtcacccatgctctagacatgaagaaatgcaatgagcttaaagctaaagaagcttgtaagcagctccgaatttttacctggaatattttgtaataaaaatatttatattcagtcaaccacattggataattcaattgcaataaattgcttcttctgtgccaaaaaaaaaaaaa

SEQ ID NO: 137875 - DNA, 958 bp, Homo sapiens
tttcgtggaggatttgctcgacttggacgaggagcttcgctacagcttggctacctccgtgaggaccaattcgggggccttgggggccaggatttggcgggtggggaggagcgaccccgccggccccgacttctctgaggcgactcagggcggcaggcctcgcgccgcgccggagggccaagatgggtcgccgagctcaacaggagtcagcgcaggccgagaatcacctcaatggcaagaattcctctttgactctgactggagagacttcctctgctaaattacctcgctgccgacagggaggctgggcaggtgattccgtgaaggcttcgaagtttaggaggaaggcttctgaagaaatagaaggatttccggcctcagaccacagagcctgaatggttcagaattatggaggagatattcctattcattccggatctggaggaagtacaggaagaagactttgttttgcaggtgggcagcccctcccagcattccagataaagcgggtgatgacctaccgtgacctgggacaatgacctcatggaagtactcagccattcagacactggatggggaagattcgacctgaaactcctcacccaaaaggtctcgcgccggagcacgaagtccgggagcgaaacccttcttggcaggatgatgtcgggctggggacctggggccccatctgttccactgaggtgtccctcagaaggtccttcactgagtgggaccccactgcagacggagaaggaggaccctggcgggcaaggccaggcacacctgagcccgtcacccatgctctagacatgaagaaatgcaatgagcttaaagctaaagaagcttgtatgcagctccgaatttttacctggaatattttgtaataaaaatatttatattcagtcaaccacattggataattcaattgcaataccccgcttattctgtgccaaaaaaa

SEQ ID NO: 137876 - DNA, 444 bp, Homo sapiens
atgtccttcaactgctccacaagaaattgctcttccaggcccattggaggacgctgcattgttccagtggcccaagttaccacgacttccaccactgatgctgactgcctgggcggcatctgtttgcccagttccttccagactggctcttggctcctggaccactgtcaagagacctgcttggatgtcagcccctgggaggcatctccagtgtctgccaaccagtgggcggcatctctactgtctgccaaccagtgggaggagtctctactgtctgccagccagcctgtggggtctccaggacgtatcagcagtcctgcgtgtccagctgccgaagaacctgctaagtgtgtaggagccagtgagcgaatcaagactccacgacctgccagctgtttccaggatcttccagcatgctgcttgtccctgaatagctcttcatag

SEQ ID NO: 137877 - DNA, 913 bp, Homo sapiens
cccacgcgtccgcttcagcaagctacctgcagccctctgtctgacatcatgtccttcaactgctccacaagaaattgctcttccaggcccattggaggacgctgcattgttccagtggcccaagttaccacgacttccaccactgatgctgactgcctgggcggcatctgtttgcccagttccttccagactggctcttggctcctggaccactgtcaagagacctgctgtgagcccactgcttgccaaccaacctgttaccggcgaacttcatgtgtctccaacccttgccaggtgacttgctctcgacaaactacctgtatttccaacccctgctcaactacctacagccggccgctcacctttgtctctagtggaagtcagcccctgggaggcatctccagtgtctgccaaccagtgggcggcatctctactgtctgccaaccagtgggaggagtctctactgtctgccagccagcctgtggggtctccaggacgtatcagcagtcctgcgtgtccagctgccgaagaacctgctaagtgtgtaggagccagtgagcgaatcaagactccacgacctgccagctgtttccaggatcttccagcatgctgcttgtccctgaatagctcttcatagctgacccttcttgtgaccgcctgactgctggctactatccatgcacacgctgctttacactctaaattttctgccagccctaacttgtttagggtgctactgtgctgtgatgcctctggtgtgtccagaagctttaccatccacaccccagtctctgatgcttttgacatgttttcaccttgctgctgtatctcctggcctctggctttgtggctcacaaaaacagaacttgtctcaaccatgatttctcaataaacctgcattagttggcattgc

SEQ ID NO: 137878 - DNA, 2019 bp, Homo sapiens
tcagcgctgacgaggtctgccgaggacgcgtttctctctgcagcccggcaccagtctcaaggccatcggctccgacagcgtcacctcctgggaccttcccttcatgtatggtcccagcggcatgcgggcctggtggaggaggtcctggcctgccgcccagggatggccggtccaggcgcagggccgattgtccacttctggcccctcctgggtccctgtccgtcgggaagtcaggaagaagacgccgagtgaggtcacggtgcccacgagggtggattcccctcggcctgaccacgccaggaggtggccgaagggaagagggtggggcaggggctgctctgcaccctctagcagagcggcatccctgcaggtgtttgctctgacgaggagaagccccagagagcagttcgggactgtgcggattggctttagggagccagcttttaaaacgcgttggcccacggcctcctgcggcctggtcactggggacgggagcaggtatgcctggtccctgtgctgggccccacgggatgtaaagaagggccacctgggcacggcggggcctgcggtgcgggctggcctgtgggctccacagggttccatgcaggcattttgctcccataccccgatgtccaagcccggcctgctctcccctggaacgcctggaactagggtggtcaggctggggtggaggagctcccctggaatgttccagagcttcccccactcctgccgttctgagtcaccctgcctccccggaggaggaggaggatcagctgagccgccgcgctcacgtagtgtctggctgtctgcctgtctgcctcgctgtgagcagagtgggatgctgccgataaggcgcacgtgggccctgggaggagcccgaggcagccactcccgcacgtgggcaggaggagggctgctcacaccaccggccgagggaggaggactgcgggctgcgcccctgccccagccaggaccctctgcatcctttccatccttggcccatggtgtgtcctgccacatcttcccactctgtgcctgggccaggcccaggcagcgtcctgcagccagggtgctcacggctgctttgccggctgttcctgcactgcacgtctgcgtcacatccggtttttgtaagtgcccgttacaccctgtgtgcacacttgcggacgtgcacggctgcatcacatccggtttttctgtgatttctttgccacagacctgcgccccctggacatcctggcggaagtggtccctttctgactcctggcaggtggacgcctgcccagagagctgctgtgagcccccctgctgcgccaccagctgctgcgccccggccccctgcctgaccctggtctgcaccccagtgagctgtgtgtccagcccctgctgccaggcggcctgtgagcccagcccctgccagtcaggctgcaccagctcctgcacgccctcgtgctgccagcagtctagctgccagccagcttgctgcacatcctccccctgccagcaggcctgctgcgtgcctgtctgctgcaagccagtctgctgtgtgcccgtctgctgcaagcctgtctgctgcaagcccatctgctgtgtgcccgtctgctctggggcttcctcttcatgctgccagcagtctagccgccagccggcttgctgcaccacctcctgctgcagaccctcctcctccgtgtccctcctctgccgccccgtgtgcaggtccacctgctgtgtgcccatcccctcctgctgtgcccctgcctccacctgccagcccagctgctgccgcccggcctcctgcgtgtccctcctctgccgccccacgtgctcccgcctctcttccgcgtgctgcggcctctcctcaggccagaagtccagctgctgacgggcaggtcccgtttctccagagttgttccagggccatctctgacttccgaaaatccttgcagccctgagccctgtctgagtctcctctgcccatagccactgcacctccagccagcaatgctgagctttcat

SEQ ID NO: 137879 - DNA, 4404 bp, Homo sapiens
atggacgaaaagcggacccgacttcaaccggaagaagcggacgttccggcctatccaaaagtagccacagtcccgcagtcggaaaagaagccctccaagtatccactctgctctgcagacgcggctgtcagcaccacacctcctgggtcgccgccgcctccgccccctcttccagaaccaccggtgctaaaagtgctgtcatccctcaaacctgcagcccccagcccagccacagcagccacaacagcagcggcagcctccacggcagcttcctccaccgcttcgtctgcttccaaaacagcatcaccgctggagcacatcctgcagactctctttggaaagaagaaatcattcgacccgtccgccagagagcctcccgggtccaccgcaggtctcccccaggagcccaaaaccacagcagaggacggggtgccggcacctccgttgttagatccgatcgtccagcagttcggtcagttctcaaaagataaggctctagaggaagaggaggacgacaggccatacgaccctgaggaggagtacgacccggagagggccttcgacactcagcttgtggagcgagggcggcgccacgaggtggaaagggctcctgaagcagctgcagccgagcgggaagaggtggcctatgaccccgaggatgagaccatcttagaagaagcgaaagtgactgttgatgacctgcccaacaggatgtgtgccgacgtgagaaggaactccgtggagaggcctgccgagccggtggccggggctgcgacgccctccctggtggagcaacagaagatgctagaagagctgaacaaacagatcgaggagcagaagagacagctggaggagcaagaagaagctctcaggcagcagagggccgccgtcggggtctccatggcccacttctcggtgtcggacgccttgatgtctccaccaccaaagtcgtccttgcccaaggcagagctgttccagcaagagcagcagtctgcagacaagcccgcctcactgccccccgccagccaggcgtcaaaccacagggacccccggcaggcgaggcgcctggccactgagaccggtgagggggagggggagcctctctccaggctctcggcacgtggtgcccagggtgccctgcccgagagagatgcttccaggggtggcctcgtgggccaggcgcccatgccagtcccggaggaaaaagagccagcctcttccccctgggcttcgggcgaaaagcccccagcggggtccgagcaggacggctggaaggcagagcctggggagggcacccgccccgccacggttggagacagctcggccaggcctgcccggagggtgctgctgcccacaccgccttgcggcgccctgcagcccggcttcccgctgcagcacgacggtgagagggaccctttcacctgcccggggttcgcgtcgcaggacaaggctctcggctcagcccagtatgaggacccaagaaatcttcattctgctggaaggagcagcagccctgcaggtgaaacagagggggacagagagccacaggccagacccggcgagggcaccgccccgctccccccaccaggacagaaagtggggggctctcagcccccgtttcagggtcagcgggaacctggacctcatgctttggggatgtcagggcttcacggccccaatttcccgggaccaagggggccagcccctccgtttccagaagagaatatcgcttctaacgatgggccacgagggcctccgccagccagattcggagcccagaaggggcccatcccttccttattctcggggcaacatgggccacctccttatggggacagcagaggcccctcaccctcttaccttggtggaccacgaggagtggcaccatcccaatttgaagaacgcaaggatccccatggggagaagagggagttccaggacgccccgtataacgaggtgacgggcgcccccgcccagtttgaagggacagagcaagccccatttctgggaagcagaggcggcgcgcctttccagttcggaggccagagaaggccactgctgtctcagctgaaaggcccccgaggcggcccccctccctctcagtttggaggtcagagaggaccaccccctggtcatttcgtgggcccaagagggccccatcctagtcagtttgaaactgcccggggccctcatcccaaccagtttgaaggacccagaggccaagcgcctaactttatgccaggtcccaggggcattcagcctcagcagttcgaagaccagagggtccattcaccaccaagattcacaaaccaaagggcgcctgcacccctgcagtttggtggactacgggggtccgcacccttttctgaaaaaaatgagcagaccccttcgcgatttcacttccagggccaggccccgcaggtgatgaagccgggccccaggcccctgctggagcttcccagccaccccccgcagcaccggaaggaccgctgggaggaggccgggccgccctccgcgctctcctccagtgcgcccggacagggccccgaggccgacggacagtgggcatcggccgacttccgagaggggaaaggccacgaatacagaaaccagactttcgaagggaggcagagagagcggtttgacgtggggcccaaagagaagccgctggaggagcccgacgcccagggccggggcgtccgaggacaggaggagagagcgctaagcgcgcccgaaactggagccgaaagcgggatttgggaccggccccgggagtgggaccgacaccgggacaaggactccagccgggactgggacagaaaccgggagaggagcgccaaccgcgaccgagagcgcgaggccgaccggggcaaggagtgggaccgcagccgggagcggagcaggaaccgagagcgcgagcgagaccggaggcgcgaccgggaccggtcccggagcagagagcgggaccgagacaaggccagggacagggagcggggccgcgaccgcaagggaccggagcaagagcaaagagagcgctcgggacccgaagcccgaggcctcgagggcctccgacgctggcaccgcctcgcaggcctagacgccccggccgggcagagaccctttttaaagccacgttcgtaagatgcgttgaacaaatagcttttgaaatagccacgatcttagattcaggatagaatattctggacttaaacattactgtaattttgtgtaaatggtttcttacaagatttcacatctttacaattctgatgcttttttaaaaaaactaaactttaatatttccatttaaaattaaaagaaatgggaaattgcctacggagcatattgcttttcagatcatagttatcttttccaataactttattgtaaattttaagggagtttcgttggaccctagagccataccttcactgacatctcatccgtttgtgtttccaaaagctgcttttacaggtcttagccgccgccccggaggccggtgtgggcgtgacctgcaggcgtccaccctgcggctacgggagaagtcttagtagcttgtatctggagtcttgagaaacacaaaccttacaaatgcatctttcttttgtcataaaattggaattacaattttcaactgggaaacagaaacacatttcttagcgtgctcagattttatatatcaccttatcaattttttccaaaacatgatttaaagcaacatctgtcctagtataattgttgcattttaaataacaatttattgaaaaatgttaagttttaccagcctaaaaaaagtaacaaaccaatttaagtgtactttgggggggcggggagggagtccttgatttgaataatcaggagttttgttggtccagtttcgccttctgagcagttcttctgtatcccgggaaaagtacgctcggccccaaactggtatttgtcagacgatacatgtaaaagtttgtccttgaacgtggaacaagacttgtgtaaagttgtggaaacatggcgaggaagacctagctccagtatgcccctggggtcggccgcgtcccggtcagccacaccaagcaggaaaaggcccaggccccggagccctggcacccacaggcccacaaggcaccacagggtcactgagctgtagctccctgttctagcacagaggccgaggcagctccaagccctaaggacatcaagctggtcttgcacgataaatccatcccagcgttctgccgtcctctccagtgtgccaggaaagttctggatttcactgaatttagggtcagctaccattttcttttcccagattatccagagcacttgggcaaaagcctccaccccatttttactagaatgttcaatggcagccttggttccagaggcacttggttgaattttgcccat

SEQ ID NO: 137880 - DNA, 1398 bp, Homo sapiens
ggggggcctaaaggctgcagagcaatgaaagaaatggctacccccagtctggtggggaagacttaggttaaatttttttgtctttatcttcagagcaatgagaagccaatgaagaattttaagcaagggagtaacaatcagttattgatgagatcattctggctcctatgtggaatagattacaagaagccgccgccgccgcccgcgccgggacctgagtccgtggcgccggcgctgagcgggcccccgccgcccgcgcactcccgaggccctcgggcggttgttcgtgccgccgccgccgccaggcccgcgccaccggagccccgcggagccgccgccgccgccggggacggagcccagtgtggccacttactccatcaaggccagcaagagagtctctcagcaagacagatgtcacaatcttatgaaatcacaagagtgacatcccgtcactttgctgtattctcttgcaacgttaaaggcaagtcacaggtgctgcttgcactgaaggcgagaggactgcataaggccgtgaacaccagcagcaactcctcaggcttctacctggcgttgctctcgggattcaaggtgaccagcttgctacttgaggccacgtatgcctttaaccccctgaggcctgacgaggaggaggagagaggggaaaatgcctgctcacctgcacattgtcacgggaacaaaccatccccacagggactggcatttgactttctgcaagtgaccctggcctcatctctttctgaggactgtagacacctcagggagagggacactgtgtcggtttcctgtggctgctgtaacaaattcgcacagactgagagccttcgaacagcaggcatggatcctctcacggctctggaggccagaagcccaggatcaaggtgtcagcgagctctgcaggaggagatctgcatgacctcaaggacagcacaccccagggtggcagcccctggaaagcccagcaggagagccgtcagcggagggatgtcatgggagccagtggcatccctagcaacctgcactctcccaggtcccagccagatcgccagctcagccaagcaggagaaaatggctccctggaaccctccctggattcttccggcagtggagagggaggaggtgctgacgaaatctcacagggaagctgatgagaagcaacagccaagaactgcccactcgtgggagcagcctgtctcttcccacctctgccaggagggtgtggtcaccagaattccccagctggacaaaggaggtcgagggaaggtcacccctcccagcaaactaaagaaggccttcccgcttcctgctcagaaggcccaggccttgttggagtttgaagccaaagcaaaaaagaggcaggaccagtcgacctgggcgtga

SEQ ID NO: 137881 - DNA, 660 bp, Homo sapiens
atggagagcgctcgcggcggtggggcccggcctgcgggcccggggcggcggagaagacccctccctgcgacgcgggagccgcgggagccgccccaggcgccccggggcatgctgggaacccaggcctgggctccgggccagactatgatgagagaagccacctgcatgcaccttcacccagatgacccatgccctgcaggagctggctgctgcccaggatcctttgaggttgccttccctgatgctgcggagaaaatgaagaagtcattacacagcttaaagaaggggtgctactctagggtctgcgacctcccgctggactgcccaggatgtgacagtgactcggggcgccaggctatgttttcttgcatcgtaaacttccagctgccaaaggaggagtcacctattcctggaagttcgcaggaggagtcctcggggccctcgcacagcgagtgcgacagtgttggcgtggactggagggggcagcgggtgagccgaaagctccaagctcctaatcatagcctagtcttgctggtgaccagcctcttccaggagaccaccaagagtcacttgaatagaacaaacgatgctgtatcacccaggaaattcaagagattaggagctctatactggggcaaagtggaagcaggcatcctgtga

SEQ ID NO: 137882 - DNA, 889 bp, Homo sapiens
ccagcgcagcacttcccggaacgaggcctgcaactctgatcctccgcggggcgggcccgtcacgttaagaaagaagtagagccgggccagggggcgctggtcttgcttgatcacgcaggagaacgttccgcggtgcgtgagctgagccggccggatccgcgccaggtatccttcggcccgcggcatatctcggaaataggacaagtcctgagtccggagctcctcctgcgaacttacaggaataggtgatctcctcctttggcagctggaagtttacgatgcaagaaaacatagcctggtcggcccggagtcactgtcacatcgtgaactgggcagtccagcgggaggtcgcagaccctagagtagcacccgctgcagaggaaacgccgggcgaactcctggagaccgcagggagggatgcaagcctgggcttctttaagctgtgtaatgaccttcttcattttctccgcagcatcagggaaggcaacctcaaaggatccctgggcagcagccagctcctgcagggcatgggtcatctgggtgaaggtgtcatgcaggtggcttctctcatcatagtctggcggtgagggagggagcaggggctgggggaggcagctccccgcaacaccatgtccctaatgcgaacattctgtttctgagtctctgccctcccaagtctgtataaacccctcaaagactctttgccccacagtcgctatgcttcctgagtccctcccaagtctctatcctcacctctctgtgagtctctatcctccctgagtctctgcccccgaccagtcgctatcctgcttcccctagtctctgcatcatctcatatcctcccctctctgggtttccatcctctgtgagtctccgtcttccaccctct

SEQ ID NO: 137883 - DNA, 612 bp, Homo sapiens
atgaagttgccattcaccaagaaggcagagccgccgacttgggcacaattaaagaagctgacacagttagctaaaaaaggccttgagaacacaaaggtgacacaaactccagagagtatgctgcttgcagctttgatgattgtatcaatggtggtaagtctccccatgcctgtaggagcagctgcagctaattatacctactgggcctgtgtgcctttcctgcccttaattcgggcagtcgcatggatggataatcctattgaagtatatgttaataacagtgtatgggtacctggccccacagatgatcactgccctgccaaacctgaggaagaaggaatgacgataaatatttctactgggtatcgttatcctcctatttgtctagggagaacaccaggatgtttaatgcctacaatccaaaattggttggtagaagtacttacttactgtaccaccagtagattcacttatcacatggtgtacccaacagctccaaagagacagcgaccatcgagaacgggccatgatgacgatggcggttttgtccaaaagaaaagggggaaatgggaaaagagagatcagactgttaccgtgtctatgcagaaataa

SEQ ID NO: 137884 - DNA, 1752 bp, Homo sapiens
atggtgctccgggccagggtgaaggtacgctcgagtgtggtcattgaggacaagtccacaagagatcccgagtacgtctacagtcagccttgcgtatggaatgattgggccattattaaagcagctttagaaccatttcaaacagaagaagatagcgtttcagtttctgatgcccctgaaggctgtgtaatagattgtaaagaagaggcggggaggaaatcccggaaagaaatggaaagtttacattgtgaatatgcagtagagctggtaatggctcagtcaatgcaaaatgttgactataatcaattacagcaggtgatataccctgaaacgttaaaattagaagaaaaaggtccagaattagtggggccatcagagtctaaaccacgagggacaagtcctcttccagcaggtcagatgcccgtaacattacaacctcaaacacaggttagagaaaataagacccaaccaccagtagcttatcaatactggctgccggctgaatttcagtatcggccacccccagaaagtcagtatggacatccaggaatgctcccagcaccacagggcagggcgccataccctcagccgcccactatgagacttaatcctacagcaccacctaatagacagggtagtgcattacataaaattattgataagtcaagaaagcaaggagatattgaggcgtggccattcccactaatgttagaactgataccacctggagaaggagcccaagagggagagcctcccacagttgaggccagatacaagtctttttctataaaaatgctaaaagacatgaaagagggaataaaacagtatggacccaactccccttatatgaggacattattagattccattgcacacggacatagactcattccttatgattgggagattctggcaaaatcgtctctctcaccctctcaatttttacaatttaagatttggtggattaatggggcacaagaacaggtccgaaaaaatagggctgctaatcctccagttaacatagatgcagatcaactactgggaactggtcaaaattggagcactattagtcaacaagcattaatgcaaaatgaggccattgagcaagttagagctatctgccttagaacctgggaaaaaatccaagacccaggaaccgcctgcccctcatttaatacaagacaaggctctaaagagccctaccctgattttgtggcaaggctccaagatgttgctcaaaagtcaattgccgatgaaaatgcccgtaaggtcatagtggagttgatggcatacgaaaatgccaatcctgagtgtcaatcagccattaagccattaaaaggaaagtttcccgcaggatcagatgtaatctcagagtatgtaaaagcctgtgatggaatcggaggagctatgcataaagctatgcttatggctcaagcactaatgggagctgctttaggaggacaagttagaacatttggagggaaatgttataattgtggtcaaagtggtcatttaaaaaagaattgcccagcctcaaataaacagaatataactattcaagtgactacaacaacaggagaaaatcagcttcctgtttggatacccactagacatttgaagttctacaatgaatccatcagagatgcaaagaaaagcgcctccacggacatggaaacaccagtcacatggatggataatcctattgaagtatatgttaatgatagtgtatggggtacctggccccacagatga

SEQ ID NO: 137885 - DNA, 470 bp, Homo sapiens
gacaagtcgacgagatttccgagtacgtctatagtcagccttgtgacatttgatgttctacaatgaacccgtcggagatgcaaagaatagcacctccacggagacagagacaccgcagtcgagcaccatcggctcacaagatgaacagaatggtgatgtcagaagaacagatgaagttgccatccaccaagaaggcggagccgccgacatgggcacaattaaagaagctgacacagttagctaaaaaaaagcctagagaacacaaaggtgacacaaactccagagaacatgctgcttgcagctttgaagactgtatcaacagtgtctgcaggtgtacccagcagctccgaagagagcgaccatcgagaacgagccatgatgacaacggtggttttgtcgaaaagaagggggaaatgtggggaaaagaaagagatatcagactgttactgtgtctatgtagaaagaagtaa

SEQ ID NO: 137886 - DNA, 1398 bp, Homo sapiens
atgagtgaactcccattcacaattactacaaagagaataaaatacctaggaatccaacttacaagggatgtgaaggacctcttcgaggagaactacaaagcactgctcaaggaaataagagagggcacaaacaaatggaaaaacattccaggctcatggataggaagaatcaatatcgtgaaaatggccatactgcccaaagtaatttatagattcaatggtatccctatcaagataccattgactttcttcacagaattagaaaaaacttctttaaatttcatatggaaccaaaaaagagcctgcattgccaagacaatcctaagccaaaagaacaaagctggatgcatcacaccacctgacttcaaactatgctacaaggctacagtaaccaaaagaggatgccgccccatctgggaagtgaggagcgcctctgcccggccgctccgtctgggaggtgaggagcgcctctgcctggccgctgtgcaatcttccaagtgtgaagtgacagcctttctgcaggtgtacccaacagctccgaagagacagcaaccatcgagaacgggccatgatgacgatggcggttttgtcgaaaagaaaagagggaagcgttgtgcctgtcagcttttccggagaggaaaggacagaaaagttcggggagattggctgcagcagaaaagagcaagctctcaggacattattagaaaggtgaacttaactgctccaggggccacctgtagcactgaggtggtggcttcagtggttatgttaactgaagtgaaccaggaggcaaggaaaagagttactatgctggcaggagtgattgacattgattatgacaaagagttagagtttatgctgtataacacaggttgtaacacattgcgaagaaaagaagggccatggcagtttacaaatgccatggtgatgtcaggaagttaccctgtatggtctaaaaagggaaggaagaacatacttcgtttcttagatgcagaacgagatgtgtcagtggtcaagagcagttttaagcctggtgatgtcatacactatgtgcttgacaggcgccggacactaaacatttctcatgatctacatagcctcctacctgaagtttcaccaatgaagaatcgcaggtttaagacctgtgcagttgttggaaattctggcattctgttagacagtgaatgtggaaaggagattgacagtcacaattttgtaataagtttgtattcagctgctgataaagacatgcctgagactgggaagaaaaagaggtttaattggacttacaattccacatggctggagaggcctcagaattatggtgggaggcgaaaggcccttcttacatggcggtggcaagagaaactggggaagatgcaaaagcggaaaccctag

SEQ ID NO: 137887 - DNA, 825 bp, Homo sapiens
atggcgtatatggccatcgacacagtccgtggtttacagccaaatgcgtgtggtgatggtattgagtgttctgatgcactttgtgagtggccacacatcaacaggcacgaaggttgtctagtggatgtgtcgctacaaaactggggatctatagatcgaaatgcagcttgcaaccaatctagcaggaagagtggaaaggcaaggcgcttttctgctggcacccttgtagtcacaagaagtcagatatttaacaagtggagtttctatgacaacacaagaaacacaagtctaatagctagaaactcagtttctgagtcgagaggacagccagccgagcttgaagcaccttcaggtggtagagccatcatggcggatatggccatcgacacagtccgtggtttacagccaaatgcctgtggtgatggtattgagtgttctgatgaaccttctgagtggccacacatcaacaggcacgaaggttgtctactggatttgtctgaggagcgcctctgcccggccgccctgtctgggaagtgtacccaacagctccgaagagacagcgaccatcgagaacaggccatgatgacgatcgcggttttgtcaaaaagaaatgggggaaaatggaggcgccgccccggcctcacattaggacataaggagatcgggattccagatcaccccaaaatagacatgcagagaaagtcctcaattgcagatgttataatctccccacagtcctctctgagtatgtctgtgtcaaagggagctactggacagggaacaaacagcagaaagcagagtcctggcacagttgtattcacatga

SEQ ID NO: 137888 - DNA, 4560 bp, Homo sapiens
aaaaaccagtgtgggtaaatcagtggccgctaccaaaacaaaaactggaggctttacatttattagcaaatgaacagttagaaaagggtcatattgagccttcattctcaccttggaattctcctgtgtttgtaattcagaagaaatcaggcaaatggcgtatgttaactgacttaagggccgtaaatgccgtaaacgccgtaattcaacccatggggcctctccaacccgggttgccctctctggccatgatcccaaaagattggcctttaattataattgatctaaaggattgcttttttaccatccctctggcagagcaggattgtgaaaaatttgcctttactataccagccataaataataaagagccagccaccaggtttcagtggaaagtgttacctcagggaatgcttaatagtccaactatttgtcagacttttgtaggtcgagctcttcaaccagttagagaaaagttttcagactgttatatcattcattatattgatgatattttatgtgctgcagaaacgaaagataaattaattgactgttatacatttctgcaagcagaggttgccaacgcaggactggcaatagcatctgataagatccaaacctctactccttttcattatttagggatgcagatagaaaatagaaaaattaagccaccaaaaatagaaataagaaaagacacattaaaaacactaaatgattttcaaaaattgctgggagatattaattggattcggccaactctaggcattcctacttatgccatgtcaaatttgttctctatcttaagaggagactcagacttaaatagtaaaagaatgttaaccccagaggcaacaaaagaaattaaattagtggaagaaaaaattcagtcagcgcaaataaatagaatagatcccttagccacactccaacttttgatttttgccactgcacattctccaacaggcatcattattcaaaatactgatcttgtggagtggtcattccttcctcacagtacagttaagacttttacattgtacttggatcaaatggctacattaattggtcagacaagattacgaataataaaattatgtggaaatgacccagacaaaatagttgtccctttaaccaaggaacaagttagacaagcctttatcaattctggtgcatggcagattggtcttgctaattttgtgggaattattgataatcattacccaaaaacaaagatcttccagttcttaaaaatgactacttggattctacctaaaattaccagacgtgaacctttagaaaatgctctaacagtatttactgatggttccagcaatggaaaagcagcttacacagggccgaaagaacgagtaatcaaaactcaatatcaatcggctcaaagagcagaattggttgcagtcattacagtgttgcaagattttgaccaacctatcaatattatatcagattctgcatatgtagtacaagctacaagggatgttgagacagctctaattaaatatagcatggatgatcagttaaaccagctattcaatttattacaacaaactgtaagaaaaagaaattttccggccgggcgcgggcctttgactaaagcaaatgaacaagctgacttactggtatcatctgcactcataaaagcacaagaacttcatgctttgactcatgtaaatgtagcaggattaaaaaacaaatttgatgtcacatggaaacaggcaaaagatattgtacaacattgcacccagtgtcaagtcttacacctgcccactcaagaggcaggagttaatcccagaggtctgtgtcctaatgcattatggcaaatggatgtcacgcatgtatcttcatttggaagattatcatatattcatgtaacagttgatacttattcacatttcatatgggcaacttgccaaacaggagaaagtacttcccatgttaaaaaacatttattgtcttgttttgctgtaatgggagttccagaaaaaatcaaaactgacaatggaccaggatattgtagtaaagctttccaaaaattcttaagtcagtggaaaatttcacatacaacaggaattccttataattcccaaggacaggccatagttgaaagaacaaatagaacactcaaaactcaattagttaaacaaaaagaagggggagacagtaaggagtgtaccactcctcagatgcaacttaatctagcactctatactttaaattttttaaacatttatagaaatcagactactacttctgcagaacaacatcttactggtaaaaagaacagcccacatgaaggaaaactaatttggtggaaagataataaaaataagacatgggaaatagggaaggtgataacgtgggggagaggttttgcttgtgtttcaccaggagaaaatcagcttcctgtttggatacccactagacatttgaagttctacaatgaacccatcggagatgcaaagaaaagcacctccgcggagacggagacaccgcaatcgagcaccgttgactcacaagatgaacaaaatggtgacgtcagaagaacagatgaagttgccatccaccaagaaagcagagccgccgacttgggcacaactaaagaagctgacgcagttagctacaaaatatctagagaacacaaaggtgacacaaaccccagagagtatgctgcttgcagccttgatgattgtatcaatggtggtaagtctccctatgcctgcaggagcagctgcagctaactatacctactgggcctatgtgcctttcccgcccttaattcgggcagtcacatggatggataatcctatagaagtatatgttaatgatagtgtatgggtacctggccccacagatgatcactgccctgccaaacctgaggaagaagggatgatgataaatatttccattgggtatcgttatcctcctatttgcctagggagagcaccaggatgtttaatgcctgcagtccaaaattggttggtagaagtacctactgtcagtcccatcagtagattcacttatcacatggtaagcgggatgtcactcaggccacgggtaaattatttacaagacttttcttatcaaagatcatttaaatttagacctaaagggaaaccttgccccaaggaaattcccaaagaatcaaaaaatacagaagttttagtttgggaagaatgtgtggccaatagtgcggtgatattacaaaacaatgaatttggaactattatagattgggcacctcgaggtcaattctaccacaattgctcaggacaaactcagtcgtgtccaagtgcacaagtgagtccagctgttgatagcgacttaacagaaagtttagacaaacataagcataaaaaattgcagtctttctacccttgggaatggggagaaaaaggaatctctaccccaagaccaaaaataataagtcctgtttctggtcctgaacatccagaattatggaggcttactgtggcctcacaccacattagaatttggtctggaaatcaaactttagaaacaagagatcgtaagccattttatactgtcgacctaaattccagtctaacagttcctttacaaagttgcataaagcccccttatatgctagttgtaggaaatatagttattaaaccagactcccagactataacctgtgaaaattgtagattgcttacttgcattgattcaacttttaattggcaacaccgtattctgctggtgagagcaagagagggcgtgtggatccctgtgtccatggaccgaccgtgggaggcctcaccatccatccatactttgactgaagtattaaaaggtgttttaaatagatccaaaagattcatttttactttaatagcagtgattatgggattaattgcagtcacagctacggctgctgtagcaggagttgcattgcactcttctgttcagtcagtaaactttgttaatgattggcaaaaaaattctacaagattgtggaattcacaatctagtattgatcaaaaattggcaaatcaaattaatgatcttagacaaactgtcatttggatgggagacaggctcatgagcttagaacatcgtttccagttacaatgtgactggaatacgtcagatttttctattacaccccaaatttataatgagtctgagcatcactgggacatggttagacgccatctacagggaagagaagataatctcactttagacatttccaaattaaaagaacaaattttcgaagcatcaaaagcccatttaaatttggtgccaggaactgaggcaattgcaggagttgctgatggcctcgcaaatcttaaccctgtcacttgggttaagaccattggaagtactacgattataaatctcatattaatccttgtgtgcctgttttgtctgttgttagtctgcaggtgtacccaacagctccgaagagacagcgaccatcgagaacgggccatgatgacgatggcggttttgtcgaaaagaaaagggggaaatgtggggaaaagcaagagagatcagattgttactgtgtctgtgtag

SEQ ID NO: 137889 - DNA, 717 bp, Homo sapiens
atggggctcgtggggaggggaaaacgtatggggctggggtcgctctggaggccggggactcggactcgggtagccgcggaggcctttctcaccatcgcgccaaactctcttcgctacagcagctgccgacaccgccgccgttacacgagcttaactacaacgccgctaacagccaatcctcgcgagaggagccgccggaagtcgtcgaaagtgcaacgcaaaagagccttttggatcatagaggcacagtcacttccggcagctagagcagctactgactctgtttcagccatcttcgataaaggcaaaaaggtgggtttcactgtgctccgccgccgccgcctagcgcgcatcggatcggatttctcttcctggaacctgaccgtgtctgtgtcggcatttggcactcaacgccagtctggagctatccgtgcagtgtgtgtccgtgatttatctgcgcgcctggcccgcgctccctgggaccagctgttccatccgcttccgctcctttcggagttggcgtttggggtgaccggctcattttcaggccagggagatgccggccgggccccaggggaccgcctcctcccggcaggcaggccacgtcgtgtctacttgtttccaggcttgtgccaagtgaaggacccaggaatgctgcgactctggcttcagcaccggcatctgtctgtcagctgggcccagcccaagtatccctga

SEQ ID NO: 137890 - DNA, 900 bp, Homo sapiens
aggattggctgttagcggcgttgtagttaagctcgtgtaacggcggcggtgtcggcagctgctgtagcgaagagagtttggcgcgatggctttgactgctcaggttattacagtctcacgaccattttgctggtacagcctaccaagaggcccagaaggcagaacttatgctgactacgaatctggtaaatgaatgcatggaaggtgtttgtaaaatgtatgaagaacatctgaaaacgaatgaatccccaacggtccctccatccacataataccacaagtcagttgtttgatttcatcgatggatctggcagacctcagctgcctggtttaccgagcttgatacccagacatacccagccttataaccaaagactggattaaagacgaagatcctacggtgctcctttcgtcgggcaaggcccaacaggctcgggaaataattgtcgttggaagccactgggggggttggggtggggcttgggacacaggtgtgtaacagcgtgcctgttagtggaagttttgtattcatagtaaatccctgtttcccactttgttatactctagcccaagattgacctgtattagatgaaatgtgaggttcttgttcaatcgggaaacccccgttacctcctcctttttctttcctcctttctattttttcttttttaccttaaacatcttttatgatgatttagatggaagttgttcttcgtcgacttaatgttggttccagtccttcaactgttcatatctactttataacattcacatactaacccttctggggttcaagatggggtggggggtggaaatgcagttttagccatgtcctcaagataaagtaattggtaaaaataaataaatggtcctttagttataaaaaaaaaaaaaaaaaaa

SEQ ID NO: 137891 - DNA, 438 bp, Homo sapiens
  misc_feature (1)...(438): n = a,t,c or g
ccaagagaaaggctgaaggggatgctaagggagataaagcaaaggtgaaggacgaaccacagagaagatccgcgaggttgtctgctaaacctgctcctccaaagccagagcccaagcctaaaaaggcccctgcaaagaagggagagaaggtacccaaagggaaaaagggaaaagctgatgctggcaaggaggggaataaccctgcagaaaatggagatgccaaaacagaccaggcacagaaagctgaaggtgctggagattccaagttgaagtgtgtgcattttttgattaactgtgttacttctggtgactgtacagtttgaaatactattttttatcaagttttataaaaatgcagaattttggtttacnnnnnnnnnnnnnnaaaaagctatgtggtaaccaccacaaaacacttctttgttgttttgggggaag

SEQ ID NO: 137892 - DNA, 1023 bp, Homo sapiens
ggacggtcaagtgccaaggtttgcatgcttcaggtcgacttttaaagaatccttgtggaaagagtcagaaaaagagcaagagagcttgattcggaggccgtgcctctcagagtggcctcccgatccttgaatcggagcccgtgcctatcagcctggcctcctgatccttgaatcggaggccgtgcctctcagcgtggcctcccaatccttgaatcggaggccgtgcctctcatcgtggcctcccgacctagcatggtggagagcgccccctgccggtagatcctgggccggcacactgagagcggcaggccccgccggaggggccagcgcaggaccggggagaatggagctcacccagtgcctagccctgcgtttactctcagtttcctgctggagagcaatgcctcaaactacacagtccggcggaggcgagtccgccagctctggaagcctctgaggcacagacgaggaaagcgcctgaatgtggatctggggtaccagaagttgccggtggctcttgcccctgtcttcttctttgccttccaagacaccaagctgttcccacccaaggtcctggcacttactctccctgcacctcacaccagccccacatcttcccaaggccagctgctccccatcacctgggtctcctccaaaacccgcacaatgctgcatcctgcatccagtgcctatatcccgctggggtggccaccaccatgcccaggagaaaggctgaaggggatgctgaaggagataagccaaggtgaaggacgaaccacagagaaggcccgcaaagttgtctgctaaacctgctcctccaaatccagaggccaagcctaaaaatgcccctggggtcacactgtcacttcgtggaactgccacaaggttctgaccctgaagggtccacacttgctgattcaaatcattaatagtcccagtaataggtttacacaccaacgtagatggaatgatgtgcatggacatggccgaaagcctctgctcctccacatagcccaagcccat

SEQ ID NO: 137893 - DNA, 2572 bp, Homo sapiens
acgccagcttggacgagggagccgcagtgtatttttgctggccaacgtgcgcactgcgaatgcgtgtgtatttgtgtatcggcggtcccgcaggtcccgggatgttgcggacagtatgaggcaagcgcagggggacggggaccagcagctgtcgccgccgctctcagggggaagagggaacagaaatctttgccccctgactttggaaatctcgtttaaccttcaaactggcgatgtcaagggttccaagtcctccacctccggcagaaatgtcgagtggcccccgtagctgagagttggtgctacacacagatcaaggtagtgaaattcctcctacatgtgggacccatcaataactttagctttttgccgggaggaaatgggttgaagtccattaaaagttcaacattttcatcaggagcaaatgataaactgaaatggtgttttgcgagtaaaccccaaagggtttagatgaagaaagcaaagattacctggtcacttttacctgttacctggtcagctgttccaaagagtgaagttcgggcaaatttcaaattctccatcctgaatgccaagggagaagaaaccaaagctatggagagtcaacggggcatataggtttgtgcaaggcaaagactggggattcaagaaattcatccgtagagattttcttttggatgaggccaacgggctttctccctgaatgacaagcttaccctcttctgcgaggtgagtgttgtgcaagattctgtcaacatttctggccagaataccatgaacatggtaaaggttcctgagtgccggctggcggatgagttacgaggactgtgggagaattccccggttcacagactgctgcttgtgtgttgccggccatgaattccaggctcacaaggctatcttagcagctcgttctccggtttttagtgccatgtttgaacatgaaatggaggagagcaaaaagaatccgagtttgaaatcaatggatgttggagcctgaagtttttaaggaaaatgatgtgcttcatttacacggggaaggctccaaacctgaccaaaatggcctaatgatttgctggcagctgctgacaagtatgccctgggagcgcttaaaggtcatgtgtgaggatgccctctgcagtaaccctgtcccgtggagaacgctgcagaaattctcatcctgggccgacctgcacaagtgcagatcagttgaaaactcaggcagtggatttcatcaactatcatgcttggggatgtcttggagacctctgggtggaagtcaatggtgttgtcacatcccccaacttggtggctgaggcataccgctctctggcttcaagaacagtgcccttttctggggacccccacgcaaaacgccttgaagcaatccctaaagatcctgctttgttgttaaggattccgttttaattttccagaaggcagcagcccactgtttgcttgccattgaaccaccagggtaggacagcgcaatctgtgggagctttttactcttgtttgttgagggggaagagattggcatttttggccccagattttttaaaaacagcactaaataacttgggggggaaacggggggagggaaaatggaaatgaaaaccctgttgctgcgtcactgtgttccctttggcctggctgagtttgatactgtggggattcagtttaggcgctggcccgaggatatcccagcggtggtacttcggagacacctgtctgcatctgactgagcagaacaaatcgtcaggtgcctggagcacaaaggaataaaaaccaagaaaaggactttgagttttaacagaagggaaaaggaaagaaaaaaaaatttttgcaaaatttctcaaaaatcagttgggggattccagtagtatttatatggagagaaacaaattttagtccttttaactgtgcctaaaacctggatatttgtgaaaactcccttacccacccatacaagcatcagaagagcctctcttgttgttagcaccttattgtttgccaagaacagaatacatccttttatccttttatgaaaaatgacaagtgaaggcaaaaggggaaggttatttgatctgggaagatgagtgttctgatgtggtggcttttgcaaaaatcttttattgggtgttggaaaactgggaaaaaataactccatccagaattccatattgtcttgacaagaactatggttctctgttttttaggatattgtggggaaatgtttttggggcatttttctctgattttatttcttctcccccacccctttttctaaaaaacaaacaaaaaaaaaaaaacacacaaaacaaaaacagaacaaaagaagagagaaggaaattttatcaattaaaaatgctgtgtgataaaatcccagcccagattgctcagctgtttgtacctgacttgccgcctgcataggagccagttctgttccttctgactagcccctcttcctccaggggagaacttccaaatgttaatttttttttttttgaaaatataaataattactattttgtaaaaaaaaaaaaaaaaaaaaaaaaaaaaaaaaaaaaaa

SEQ ID NO: 137894 - DNA, 609 bp, Homo sapiens
tttcgacacagaaaaattatatactagaatctgcttaagcaagaggactccataaatgtgacagagatgacttccatcagggcctcagtggacatcctcatcccagaccctccacccaaggatgatgagatggatacagataagcaggagaagaaagaagtccctaagtgtggatttctccctgggaatgagaaagtcctgtccctgcttgccatggttaagccagaagtctggactctcaaagagaaatgcattgtggtgattacatggatccaacacctgatccccaagattgaagatggaaatgattttggggtagcaatccaggagaaggtgctggagagggtgaatgccgtcaagaccaaagtggaagctttccagacaaccatttccaaatggattaccgggccttggtgcatgagcgagatgaggcagcctatggggagctcagggccatggtgctggacctaagggccttttatgctgagctttatcatatcatcagcagcaacctggagaaaattgtcaacccaaagggtgaagaaaagccattaatgtaccccacccgggactagaaggaaaataaatataatatatgttgaaaaaaaa

SEQ ID NO: 137895 - DNA, 1095 bp, Homo sapiens; identical to SEQ ID NO: 135055

SEQ ID NO: 137896 - DNA, 457 bp, Homo sapiens; identical to SEQ ID NO: 135056

SEQ ID NO: 137897 - DNA, 1436 bp, Homo sapiens
  misc_feature (1)...(1436): n = a,t,c or g
aacctgacgctgtggctgagtacgtctgcccgggtcgacccacgcgggcggagacagaagcagcatggccaagccgtgtggggtgcgcctgagcggggaagcccgcatacaggtggaggtcttgagacagaatcttttccaggaggcgtgaggaattcctctacagattcttgccacagaaaatcatatacctgaatcagctcttgcaagaggactccctcaatgtggctgacttgacttccctccgggccccactggacatgcccatcccagaccctccacccaaggatgatgagatggaaacagatgagcaggagaagaaagaaggtaagtgaagataagaggtgactagggaaggggagatggcacattgactactggatgagaaagggcctgaatcccctctttctcacagtcaagattacagtgggcatctaagtcatctttgtctttgtgacacccaccccttcccaccacattcatcttcaggctggacataggtgccactcaataaatgctttttgaatgaatgacacacgccagaagggaatccacacaacatatagatcatttattttcccttctagtccccgggttcagtacatagatgggcttttcttcaccccttggggttgacaattttctccaggttgctgctgatgatatgataaagctcagcatagaaggccctcaggtccagcaccatggccctgagctccccataggctgcctcatctcgctcatgcaccaaggcccggtaatccattacatgagtctccttgggaggccttggcccacaagcatccccacgttctgaagaaagtacttgggaaatgggggtggctgggaaagcttcccactttgggtctttgacgggcatttcaccctttttccagcaccttcttcctggaattgctaacccccaaaaatccattttccatctttcaatcctggggggatcaagggttgttgggatccaatgtaaatcaccaagaatgcaatttctctttgaaaagtcccagacttcctggctttaacccagggcaaagcagggaacaggactttcctcaattccccagggagaaatcccacacttaagggacttctttccttctccctgccttatctgtttccatctcatcatccctggggtggaggggtctggaatgggcatgtccagtggggccccggacgaaaggttcaaggtcaagccacattgaaggggaagtcctctttgcaagaagctggattcagggtatatgattttctgtggcaagaactctgagaagaaattccttcagcctcctggaaaagattctgcctgaagacctccacctgtttgcgggcttccccgctcaggcgcaccccaacacggcttggccatgctgcttcagtagctagaacccnnctcttccggctagtcgcccgggctttca

SEQ ID NO: 137898 - DNA, 1215 bp, Homo sapiens
atgaagcaaaaggtggctgcagaggcaggcaggggccagatcctgcaggccaaggtcctgccctctggaacccttagcaggctggcagaagccctttttggggtccagacttatgaccaggatgcctatggcttcctaacccccagtgctcagagcatgaaagttttctgctgtctttggaaacttgtctgcaagcagctcgaaggagacgtggcccaagggctcgccatcgacggcgatgtcaaaaaacacagtgggctggagtggcaagtggagaccattcagaacctggtggactcgtacatggccattgtcaacaagaacatgcaggacctcatgcccaagaccatcatccacctcatgatcaacaacaccaaggagttcatcttctcggagctgctggccaacttgtactcgcgtggggaacagaacacgctgatgggggagtcggcagagcaggcacaggggcgcaacgagatgcggcgcatgcaccacgtgctgagggaggcgcccagcatcatcggtgacatcaagacgaccatcgtcagcacacccacggggtcgcccaagtccagccccacgacgcagtgccgactccccgccgtgcccccagcccggcccgggttgcggagccctgctcctgggcctctgcctgctgcgtccaccctgggggaagcgcccgtcgtaccctccacaccgggggcttcccctgaccccttaggccctccccctgcaggtgccctcgcgcccctcccggggtccccagccccaagacagaatgccatgcggattggcaggagacctcactgtggggttcttggagccaaccctccaggccatcatccggtggtctttgctcctccgtccccccgccaactcgccagagagccagagctgagcgtccttcacatccagacatctgatgctcccctcagccctgcagagagccagcatgctggctgcttttcagatggggaaactgatggccaagagggaaacgtgcttccaatcttccaggaaaaattgaaggctccggatgagaaaaagcaaacaaaggacagtgggaccatgggcgtccccacccccaccacccgcaggccccacactcaaaccagcgcccgtgcccacgcccatgcagccgtcctccgccaggccccaagaacggctgttactttgggggtaattgaaaatgtcgatcattattctagagcataa

SEQ ID NO: 137899 - DNA, 432 bp, Homo sapiens
atggatgatgatgatgatgatgatgatgatgatgatgatgatgatgatgatgatagttttagaagtacttggctacatgctgaatataagatttgtagttctcggatgcagcagctgtggccaggcagcccagtttcgggaaggctctcggtgcaccacagcctgcagacacccagcccacaccctccatgccgccaagatgtccaggaggaagcgaaacaaagcccaaaaaggcagcaggaaaggataaatcttcagacaaaacaaaacaaaacaaaaaaacaaatgaaagcagaaaaaggaggaaaagaaaaacaggctgaagtggctgatcaagaaactaaagatttatctgcagaaaatggagacactgaaaacaaggagagtccagcctcggatgaagccacagagaaagacactaagtctgactga

SEQ ID NO: 137900 - DNA, 1677 bp, Homo sapiens
acatggatgtttatagcagctgtattcagaattgccagcacttggaagcaaccaagatatttttcagtaggcaaacaggatcagaagcggacctccagaaaactccagcagacctgcagcagaggggcctaatggttagaaggaaaactaacaaacagaaaggaatagcatcaatatcaacgaaaaggacatccacgcaaaaacacaatccaaaggtcaccaacattaaagaccaaagccaatatcatactgaatgggcaaaagctggaagcattccctttgaaaactggcacaagacaaagatgccctctctcaccactcctattcaacatggtattggaagttctggccaggtcaatcaggcaagagaaagaaataaaagtattcaaataggaagagaggaagccaaattgtctctctttgcagatgacatgattgtatatttagaaaaccccatcgtctcagcccaaaatctccttaagctgataagcaacttctgcaaagtctcaggatacaaaatcaatgtgcaaaaatcacaagtgttcctatacaccaataacagacaaacagagagccaaatcatgagtgaactcctattcacaattgctactaagagaataaaatacctaggaatccaacttacaagggatgtgaaggacctcttcaaggagaactacaaactgctgctcaaggaaataagagaggacacaaacatatggaaaaacattccaggctcatggataggaagaatcaataagcctccgctgctgatacccaggcaaacagggtctggagtggacctccagcaaactccaacagacctgcagctgagggtcctgactgctacaaggaaaactaaccaacagaaaggacatccacaccaaaaccccatctgtacatcaccatcatcaaagaccaaaggcagatcaacaagacagaaagttaacaaggatatccaggaattcaactcagctctgccccaagtggacctaatagatatctacagaactctccaccccaaatcaacagaaaatacattcttctcagcaccacaccacacttattccaaaattgatcacatagttggaagtaaagcactcctcagcagatgtaaaagaacagaaattataacaaactgtctctcagaccacagtgcaatcaaattagaactcaggattaagaaactcactcaaaactgctcaactacatggaaactgaacaacctgcttctgaatgacaactgggtacataacgaaatgaaggcagaaataaagatgttctttgaaaccaatgcgaacaaaaacacaacataccagaatctctgggacacatttaaagcattgtgtagagggaaatttatagcactaaatgcccacaagagacagcaggaaagatctaaaactgacaccctaacatcacaattaaaagaactagagaagcaagagcaatcacattcaaaagctagcagaaggcaagaaataactaagatcagagcagaactgaaggagatagggacacaaaaaatccttcaaaaaatcaatgaatccaggagctggttttttgaaaagatcaacaaaattgatagactgctagcaagactaataaagaagaaaagagagaagaatcaaacagatgcaataaaaaatgataaaggggatatcaccaccgattccacat

SEQ ID NO: 137901 - DNA, 1200 bp, Homo sapiens
agccaatatcatactgaatgggcaaaagctggaagcattccctttgaaaactggcacaagacaaagatgccctctctcaccactcctattcaacatggtattggaagttctggccaggtcaatcaggcaagagaaagaaataaaagtattcaaataggaagagaggaagccaaattgtctctctttgcagatgacatgattgtatatttagaaaaccccatcgtctcagcccaaaatctccttaagctgataagcaacttctgcaaagtctcaggatacaaaatcaatgtgcaaaaatcacaagtgttcctatacaccaataacagacaaacagagagccaaatcatgagtgaactcctattcacaattgctactaagagaataaaatacctaggaatccaacttacaagggatgtgaaggacctcttcaaggagaactacaaactgctgctcaaggaaataagagaggacacaaacatatggaaaaacattccaggctcatggataggaagaatcaataagcctccgctgctgatacccaggcaaacagggtctggagtggacctccagcaaactccaacagacctgcagctgagggtcctgactgctacaaggaaaactaaccaacagaaaggacatccacaccaaaaccccatctgtacatcaccatcatcaaagaccaaagactttaaaccaacaaagatcaaaagagacaaagaaggccattacataatggtaaagggagcaattcaacaagaagagctaattatcctacatatatatgcacccaatacaggagcacccagattcataaagcaagcccttagagactcacaaagagacttagactcccacacaataataatgggagactttaacacccctctgtcaacattagacagacccacgagacagaaagttaacaaggatatccaggaactgaactcagttctgcaccaagtggacctaatagacatctacagaactttccaccccaaatcaacagaatatacattcttctcagcaccacatcgcacttattccaaaattgaccacatagttggaagtaaagcactcctcagcaaatgtaaaagaggagaaattataacaaaaatcaaactagaactcaggattaagaaacagacgcaaaaccgctcaactacatggaaactgaacaaccttcttctgaatgactactga

SEQ ID NO: 137902 - DNA, 378 bp, Homo sapiens
ctagagatgaggttttggtgtggatgtcctttttgtggatgctgatgctattcctttctgttcgttagttttccttctaacagtcaggtccctcagctgcaggtctgttggagtttgctggaggtccactccagaccctgtttgcctgggtatcaccagtggaggctttctttcttgtttcttctgcgtctccataacatgcaggcgctccatgaggctagaaatgccctgctccaagctgtcaatagtgtggtgctgaggatcgtggccactgaagctgttgcgcaggctgcggagagcatctcgaacaagctgcaagtcgctggtcagtagtgatgatgatttccccatgtattccaggacttgtgcattacacat

SEQ ID NO: 137903 - DNA, 873 bp, Homo sapiens
atggcagagaaaaaagatccaacaaaggagcctgaaaagaaacatttgctggcttggatgaacaaattgctatatgagttggaccccaaatataagaatgactcaaacacagatggttcagctgttgtgcacaagattataatagcatgtgataagcctgtttcccctccaccatctgccatgattggaagcttcccgaggccctcatcagaagcagatgctggtgccatgctttgtgtacagcctgccagaactaaaatcctcggcattcttgggcttaaagccacatcactccagtatctccgtcttcacactggcaagcctttactaccaaagatagatgaatccacgaagatggggagaaaccagcccaaaaaggctgaaaattccaaaaaccagaacgcctcttctcctccaaaggatcacaactcctcgccagtaagagaacaaaacaggatgcagaatgagtttgacgaattgacagaagtaggcttcagaagggatagatcttccaaaaggaactcagttgtcattaaggctcttccaagacatctcatcaaccaggggagatcacaggagtggagactaggaataggggcgcgggacagccccaaaaccagcgggcggagagggaaaagcccagccggcccaaaccgcacgaccgtccccgaggatgaacaagccgctcgcggccacgacccatcccaacccgccaggcagaccccaggaccccacccccaacccgctcggaaaaagaacccagctgtctctggctacggaccaaatgtgcccatcccttgcaccactgataaaataaccccaggaaagttgataatggaagcagagaatttctatatgaatggaacatcttga

SEQ ID NO: 137904 - DNA, 3507 bp, Homo sapiens
ttaagctgaagggaggtcttgtggtaaggggtgatattgtggggatgttagaagaaacatttgtcgtatagaatgattggtgatggcctggatacggttttggatgaattgagaaactaaacggaagatacaaggtccaaataaaagaaggagaaaaatgggtattaaaggactaacaattgggaggacccaggacatccaattagagagtgcccaaggggattcagcataattacttgcttggttggcaagtttttgggctctatccttgagtttttttatgttgtcatacactaggccagattgatttaggtaaaaacaacactcttcatttaagaatatacagagtcctcctttttcagcagtgagtaagtcaaggcctcggagttgtccttggaggacaactgcagctaaagagtcaacttgggcctggaggactgataaagtttgtgatatgtctgtgatgctagcagagaagtcattagacaggctacggaaggtcatgacagacgttgaaatgcctgctattccagtaccgagagcaacagtggaggcagaaagtcctaaaccgaccatcaagggaattagtggaataactcttttttgttgtgtcggtgtcatgaggggaacagggagctcttcggtcccatttgcaaattgaattttgggggtaaggaagactagtgtacatgtgcctgtccaattggcaggtaggcacatgtaggtagaggatccacagaggaagaagagaccttgtgcgaggcaaaactggagatgtaaagtaaaaaggtgagaaggagtgctgaaaggggtgtcttgtacccagactcctagggatccagctagggcggcagctgtcagaggttgtaatggggactgatggggtaactgcgtagaggggaaggttcgattttcatggtgtatgagaaaacgtcgagtatctacgagcaatctttcactgttattttcggggctgggtataagtaaacaagaagagggcctgggaggagagtctgatgagcaaggggaagatagccaaggatggagtgaaatacagggcaagtgtcttcctaagcaataattactgctaatgtttttaagtttgtcagtattgatagagggcttgtctgtaatatggagctggaaggctccaattgtttcattgatgtttgtagttggacttcggagatgaagagtaaaggaacatcgagaaggtgaaagattacctaggggaattccagtgggtctttgccaagagatacacaaaggagcggccacaggaatagtagtttgtgttgtgagaggtccaaatatggggggagtagagttgatataaggagaaaggttttttaaataagtgcgaaggagggcggcagcttgctgatgtgaaatgtctggggaagtcttgctggacctgtctagaaagtaaatgagttcttcaggagggtaaaggtgagggctgttaaaggaagttcggaggtgtagggagatgggagatgttgcccagtctgtctgtaaggcggggacagctgtgtaggcatgttcttcagaaatatgagtgagtttaagggaagtgggggagagtacttgcgacttccaggaggaagaggagggattaggctggctgtccgatggacacagctttattctggaatggtgaacccagtggggaggattctgcaggcagacggcagtcggggtactatagatgactaagtagggtccggtccatcgaggttgtagagtttgaggggtcagattcttaacaagaactgatcgtccagctaggttgtcttcatatggctggggatctggagtaggcaagagaagattagcagcctggcgaatttcctgtctagcctgctggagtactggaagatagtcgcctagagggctggtgtctgggatgaggttggggccaagcaagaaagtgcgtccatataaaagttcaaatggactgtatcctgtagcatctcgaggacaggctctgattttgagaagagcaagaggtaaaagtgctgtccaatcctttgtaagttggaggctaaacttggtgaggtgtgcctttaaaagaccattagtccgttccacctttcctgaagattgaggacggtaaggggtatgaaggttccactgaataccaagagcctgagaaactacttgggtgatttggctagtaaaggctggtccgttatcagactgtatagaggtgggaaggccaaaccgaggaattatgtctacatagaagaggttatgaaatgatgacagaatagaatgggcctgtgaggctggaagaagatattttccttggtctaagaaccatttgccttgtgtgggaagagattgataggtggaagtttcagtgggggagtaggtgggagtgactgaagtgaaggagaaaaactggccgtgagggacagaagttggagagctagctgcttgtctagccactttatcaacataagcattgcctagagcaatgggatctgatgccttttgatgccccttgcagtgaatgaccccagcttcttttggaagtaaagcggctttgagcagagtttttattaaagaggcattaatgatggaggacccttgtgtagtgaggaaacctctttcagcccatatgactgcatggtggtgcaggatatggaaggcatatttagaatcagtatagatattgacgcatagtccttttgcaagagtgagggcttgagttaaggcaactagttcagcttgctgagaggtagtggagggaggcagagcagtagcctcaatgatagatgtggaagatactatagcatagcctgccttcgctggtgagtggcgattaggcctggtggaactgccatcaataaaccaagtgtgatcagggtgagaaacagggaagaaggaaatgtggggaaatggggtgaatgtcaggtggatcagagagatgcagtcatgagggtcaggtgtggtatccggaataatgtgggaggccggattgaagtccgggccaggaacaatggtaattgtgggagactcaacaaagtgtaagtatagctgaaggagtccgggagcagaaagtatatgtgtcaggtgtgaggaagaaaatagattttggaaattatgagagctgtagagagtgagttgagcatagtttgtgattttgagggcctctaaaagtattagggcagcagcagcggctgcacggagacatgatggccagcctaaaacagtaagatcaagttgtttggacaaaaaggctacaggacgcgatcctggtccttgtgtaagaattccgactgcacagccctgcacttcggctgtgtgtaatgaagcaggttgggatgagtcagggagagctagagtgggggcagtttctaaagctgtcttcaaggaacagaaagaggagtggggaaaggatttaggatctatggggtcagctaagtttccttttgtgagtttatataatggttttgttaggatggcaaaaccaggtatccaaaggcgaaagtatccaaccat

SEQ ID NO: 137905 - DNA, 1287 bp, Homo sapiens
atggaagtcctagccagagtattcagacaagagaaagaaatgaaaggcattcatattggaaaagaggaacacaaattgttcctctttgcagacaacatgaccttgtgtttagaaaaaacaaaagactccgtcaaaaaacttgtagagcagccctccagctttggctccgtggactggctctgcctgagcagctgctcagggtcgacccacacccccaggcctgccgacgtctcccccgggagcctccctggcccgggccagacgttcggcacccgggagccccctcaggctgtcagtaccaaggaggctagctcgtcaaatctgcatgcgccggagaggactgtggctgggttgaccttcaccacggagcaggtccgtgccttggagggcgtcttccggcaccaccagtacctgggccctctggagcggaattggctggccagggagatgcagctctcagaggtccagataaaaacctggtttcaaaatcgccggatgaaacacaaacggcaaatgcaggactcccagctaaacggccccttatcggggtctctccacgggccccctgctttccactcaccatcttctggccttgccaatggcctgcagctgctgtgcccttgggcacccctgcctgggtcccctggctgccccttggctccttctggggtctccgacaaatggatcaagaggccctggcctcttcgtgggcttcctgctgcgggcagcctctggcataccaccccccacgcccaggaagtggtgcgcataagctgggaccagccctgtccacggggccccggggcctgtgtgctctgccagagacaggggatgcatttgaggaaacgcctccgactacatgcctcccacacaagcggtctgtgcagatcgcatctgacgcctacccggaggactcagctgttctgtttacatcgtggcggcacctctcaccctgaccctcgcaaaggttctggagatttctggagaatatatttgttaaagtcacctcttcacttaaaaaaaaaaaaaaaaaaaaaaaaaggacaaaaagcaatagatactggtgaagtgtggagaaaagggaactcttatacactgttggtgggaatgtacattagtacaaccattgtggaaaatactgtagagatttatcagaaaactaaaaatacagctaccatattcatcagcaatcccactactgagggtctatccaaaggaatagaaaccagtgaatatatcaaagggataccggcactggcatgtttatcacagctctattctcgatag

SEQ ID NO: 137906 - DNA, 1334 bp, Homo sapiens
atggaagcgtttgatgctaattacacattccagtcaggaccctcagctgcaggtttgttggtgtttgctggaggtccactccaggccctgtgtgcctgggtatcagcagtggaggctgcagaacagtggatattgcagccctccagctttggctccgtggactggctctgcctgagcagctgctcagggtcgacccacacccccaggcctgccgacgtctcccccgggagcctccctggcccgggccagacgttcggcacccgggagccccctcaggctgtcagtaccaaggaggctagctcgtcaaatctgcatgcgccggagaggactgtggctgggttgaccttcaccacggagcaggtccgtgccttggagggcgtcttccggcaccaccagtacctgggccctctggagcggaattggctggccagggagatgcagctctcagaggtccagataaaaacctggtttcaaaatcgccggatgaaacacaaacggcaaatgcaggactcccagctaaacggcccccttatgggttcttttccaggggccccctggctttccactcaccattttttggcccttgccaaaggcctgcaagttgctgtgcccttgggcaacccctgcctgggtcccctggctgcccccttggctccttctggggtaccccgacaaatggatcaagaggccctggcctcttcttgggctggctgctgcgggccagcctctggcataccaccccccacgcccaggaagtgggatagatcttccaaaaggaactcagttgtcattaaggctcttccaagacatctcatcaaccaggggagatcacaggagtggagactaactacagtacaagaaacaacaatggaaaaacaaggtgtgcctctagtggaaaatattgcaggaaagccgtggaagagaagattggaaagcagtaagtcaaggtctcggcggttttggaggacaactgcagctaaagagtcaaaatgggcctggaggactgataaagtttgtgatatgtctgtgatgctagcagagaggtcattaaaaaggctacggaaggtcgtgacagaagtcgaaatgcctgctattccagtactgagagcaatagtggaggcagaaagtcctaaaccgacaagcaagggaattagtggaataactcttttttgtcgtgtcggtgtcatgaggggatctgggagctcttcggtcctatttgcaatttgaattttgggagtaaggaaaactagtgtgcatgtgcctgtccaattagcaggtagacacatgtaggtagaggatctacagaggaagaagagaccttgtgcgaagcaaaa

SEQ ID NO: 137907 - DNA, 239 bp, Homo sapiens
gcaatgtgcagaatatacacaaggaagataaacctttaagtctgagtatgcctgtaattacagaagaagaagagaatgaaagtttgagtggaacagaggatccccctaccagctgcttgtcatccaattatgtatccaaacagcctggctatggccataacaatgctgtgtgctccccaaaccacattcactttctttctgggcacataagaacacgaagtttcccagtatctcttctg

SEQ ID NO: 137908 - DNA, 1906 bp, Homo sapiens
gtccgttagaggcgtgcgggcttcggaggcgtgcgggcttcgggtgccatggggactcctcccggcctgcagaccgactgcgaggcgctgctcagccgcttccaggagacggacagtgtacgcttcgaggacttcacggagctctggagaaacatgaagttcgggactatcttctgtggcagaatgagaaatttagaaaagaacatgtttacaaaagaagctttagctttggcttggcgatattttttacctccatacaccttccagatcagagttggtgctttgtatctgctatatggattatataatacccaactgtgtcaaccaaaacaaaagatcagagttgccctgaaggattgggatgaagttttaaaatttcagcaagatttagtaaatgcacagcattttgatgcagcttatatttttaggaagctacgactagacagagcatttcactttacagcaatgcccaaattgctgtcatataggatgaagaaaaaaattcaccgagctgaagttacagaagaatttaaggacccaagtgatcgtgtgatgaaacttatcacttctgatgtattagaggaaatgctgaatgttcatgatcattatcagaacatgaaacatgtaatttcagttgataagtccaagccagataaagccctcagcttgataaaggatgatttttttgacaatattaagaacatagttttggagcatcagcagtggcacaaagacagaaagaatccatccttaaagtcaaaaactaatgatggagaagaaaaaatggaaggaaattcacaagaaacggagagatgtgaaagggcagaatcattagcgaaaataaaatcaaaggcccttttcagttgtcatacaggcatccaaatcaagaaggcatcgtcaagtcaaactcgactcttctcctcttgattctgcatctggtcaagggcaagtaaaagccactaggaaaaaagagaagaaagaaagattgaaaccagcaggaaggaagatgtctctcagaaacaaaggcaatgtgcagaatatacacaaggaagataaacctttaagtctgagtatgcctgtaattacagaagaagaagagaatgaaagtttgagtggaacagagttcactgcatccaagaagaggagacaacactgaacaaagagcctggtgtagtttttaattttgagttttctgacagaagaaaagattgatattttgtgtattgaacaggaagactgccagtattaaaaaaaatccttctgggaatcttgtaggttattttcttggaaattgccaatacggtagttctagaataaaagtacaaaaaaattagaataagaattctttaacattttctttaatgatttgcataaatggagataaaacttgtatttagtatgtaatagaaaaaattctgttattcgcagattgttactatttcctataaggttttgtgatactatactgtcctaatacagtctggtaatactattctattttatttaaaatattttttattgaaatattaatgtttattacatgcaaataactaattattttgtatctatcagtcggataatggattttttattttgtatatttattctattttgtatattggtaagtgcaataaagtttttgccttgctttattttttaatacataaaacttacattctcataacgtgattgataacttaggaagttcacaatgtattttctacttctgcaattaaatattctttagtgcttgtttattattactaaatactaattaagtactaacaagtacttaaatactaatgtattaagtatttaagtactttctaataaaatctttaacaataataatgtaaatttcagaatgtgtctctggtacagaatagttgatattaacagaaaaaaa

SEQ ID NO: 137909 - DNA, 447 bp, Homo sapiens
  misc_feature (1)...(447): n = a,t,c or g
atntcggaacgaggngtgaactgtgacaaagcaaactgctcaaccacctgctttaatggagggacctgtttctaccctggaaaatgtatttgccctccaggactagagggagagcagtgtgaaatcagcaaatgcccacaaccctgtcgaaatggaggtaaatgcattggtaaaagcaaatctgtctgcgagcctggctgtggtgcacatggaacctgccatgaacccaacaaatgccaatgtcaagaaggttggcatggaagacactgcaataaaaggtacgaagccagcctcatacatgcccttaggccaagcaggcgcccagctcaggcagcacacgccttcacttaaaaaggccgaggagcggggggatccacctgaatccaatttacatctgggttgaactcccgacatctggaaacgttttaagttacaccaagttcatag

SEQ ID NO: 137910 - DNA, 2009 bp, Homo sapiens
  misc_feature (1)...(2009): n = a,t,c or g
ccctggttgagggagctgcagggcagcataatatctgacggcgccaggttgcgtaggtacggcgctaggagttttcccggcagcgatgaggtcctgagcagcatggtccggaggagcgccttccctggcgccgcgctctggctctggagcatactcctgtgcctgatggcactgcggacggaggccgggccgccgcaggaggatagcctgttcctatggatcgatgctcaccaagcaagagtactcataggatttgaagaagatatcctgattgtttcagaggggaaaatggcaccttttacacatgatttcataaaagcgcaacagagaatgccagctattcctgtcaatatccattccatgaattttacctggcaagctgcagggcaggcagaatacttctatgaattcctgtccttgcgctccctggataaaggcatcatggcagatccaaccgtcaatgtccctctgctgggaacagtgcctcacaaggcatcagttgttcaagttggtttcccatgtcttggaaagcaggatggggtggcagcatttgaagtggatgtgattgttatgaattctgaaggcaacaccattctccaaacacctcaaaatgctatcttctttaaaacatgtcaacaagctgagtgcccaggcgggtgccgaaatggaggcttttgtaatgaaagacgcatctgcgagtggcctgatgggttccacggacctcactgtgagaaagccctttgtaccccacgatgtatgaatggtggactttgtgtgactccttggtttctgcatctgcccacctggattctatggagtgaaaatgtgacaaagcaaactgctcaaccacctgctttaatggagggacctgtttctaccctggaaaatgtatttgccctccaggactagagggagagcagtgtgaaatcagcaaatgcccacaaccctgtcgaaatggagggttactgcattgggtaaaagcaattgtaagttgttcccaaagggttacccagggagacctcttgttcaaagcctgtcttgcgagcctggtttgtgggtgcacaatggaaccctgccatggaacccaacaattgccattgttcaagaaggttggcatggaagacactgcaataaaaggtacgaagccagcctcatacatgccctgaggccagcaggcgcccagctcaggcagcacacgccttcacttaaaaaggccgaggagcggggggattcaccntggaatccaattacatctggtgaactcccgacatctgaaacgttttaagttacaccaagttcatagctttggttacccttcagtgtgtgaatggtcaaaataatgtcccattaccacttaagaaatactggccctgaattttaataagctttcattataaatcactgagctgataatttactccttccttttaaagttttctaaagtacgtctgtagcatgatggtatagattttcttgtttccagtgcctttgggaccagattttatattatgtccaattgatcaggttaaaattttccagtgtgtagttggcagatattttcaaaattacaatgccatttatggtgtcctgggggcaggggaaccataagaaaaggttaaaattgggcaaaaatgcgtaagtcacaagaatttggatggtgcagttaatgttgaagttacagcatttcagattttattgtcagatatttagatgtttgttacatttttaaaaattgctcttaatttttaaactctcaatacaatatattttgaccttaccattattccagagattccagtattaaaaaaaaaaaaaattacactgtggtagtggcatttaaacaatataatatattctaaacacaatgaaatagggaatataatgtatgaacbbttttgcattggcgybtgaagsvratataatatattgtaaasaaaacacagctcttacctaataaacattttatactgtttgtatgtataaaataaaggtgctgctttagttttctg

SEQ ID NO: 137911 - DNA, 1297 bp, Homo sapiens
tgtcgggtcgcggggtctcgcggcacatggcggactacctgatcagcggcggcaccggctacgtgcccgaggatgggctcacagcgcagcagctcttcactggtgcagcagctcgcgaccgcctcacctacaacaatttcctgattctcccaggattcatagacttcatagctgataaggtggacctgacctcagccctgacttggaagatcacgctgaagatgccactgatctcctcccccatggacgctgtgacagaagctgacatggccatcgcaatggctctgatgggaggtattggtttcattcaccaccactgcaccccagagttccaggccaatgaggtgcggaaggtcaagaagtttgaacggggctttatcatggaccccgtggtactaagcccctcacacactgtggggcgatgtgctggagggcaagatgcggcatggcttctctgggcatccccatcactgagacaggcaccatgggcagcaagctggattcccacaagcagctgctgtgcggggcagctgtgggcacccgtgaggatgacaaataccgcctggacctgctcacccaggtgggcgttgacgtcatagtcttggacttgtcccaagggaattcattgtatcagatggccatggtgtattacatcaaacagaagtacccccacctccaggtgattggggggaacatggtgacagcagcccaggcgaagaacctgattgacgctggtgtggaagggctgcacgtgggcatgggctgcagctccatctgcatcacccaggaagtgatggcctacagctggccccagggcactgctgtgtacaaggtggccgagtatgcccggcactttgaccatggggaacatggcaaggccctggcccttggagcctccacagtgatgatgggctcccttctggccgccaccacggaggtccccagcaagtacttcttctcagatggggtgtggctcaagaagtaccggggtatgggctcactggatgccctggagaagagcagcggcagccagaaacaatacttcatggagggggataagttgaagatcgcgcagggtgtctccagctccatccaggacaaagggtccattcagaagttcgtgtcctacctcatagcgggcatccagcatggctgccaggatactggggtctgcaacctgtctgtccttttgtccatgatgtactcaggggagcgaaagtttgagaagtggaccatgttggcccagatcaagggtggcgtccaaggcctgcactcttacaagaagaggctgtactga

SEQ ID NO: 137912 - DNA, 1011 bp, Homo sapiens; identical to SEQ ID NO: 135659

SEQ ID NO: 137913 - DNA, 1828 bp, Homo sapiens
atgacccgatggtccagttacctgttgggatggacaaccttccttctctattcctatgagtcaagtggagggatgcatgaggaatgtgtctttcctttcacctacaagggatctgtttacttcacttgcacccatattcatagcttatccccttggtgtgccaccagagccgtgtacaacggccagtggaagtactgccagagtgaagattacccacgctgtatcttccctttcatctatcgaggaaaggcttataacagctgcatctcccagggcagcttcttaggcagtctgtggtgctcagtcacctctgtcttcgatgagaaacagcagtggaaattctgtgaaacgaatgagtatgggggaaattctctcaggaagccctgcatcttcccctccatctacagaaataatgtggtctctgattgcatggaggatgaaagcaacaagctctggtgcccaaccacagagaacatggataaggatggaaagtggagtttctgtgccgacaccagtaatctggggatgggggttggaccgacgccgcgacaccaccgacgcgcctccacccgccactcccgcccaccgcccgccgaccccgacggcgggggagaaagaccaaggacagcggacgaccgccaggacgacgccaccgaggacgacgggacgcgatgcagaggacggcagaccaggacccaggccaccaatgcgaacgccaaccacaagaaaagcaaccgaacaaagccaccaccacgacacaaacccaacaaagcaaaaagacacacaaaaaaagaaacaccccaaaacacctgggaacacaggacaaaaatccagattcgggtcgcccaaagctctttaggagggcctgtattacgagtaccgggacacgtggggaactatggactcgttcgcgggaacatccagcgaaacgaaggaaggcggagtggaaagcaaaggctcagaccatgggaccgcatgctaagcccagactggcacagggctcagcgtatagcccaggtttggaagcctgagcaggaggatggcttaagcataggatttggagaccagcctgggccacacagtgacacctcgtctcgacaacaagtgaggaggagcaaggccacagagatgcatgtgggtggccgtgtagactttgatgactttgtggagctgatgacccccaaattgcttgcagaaacagctgggatgatcggtgtccaggagatgcgggatgccttcaaggagtttgacacgaatggagatggggagatcaccctggtggagctacagcaggccatgcagagactcctgggggagcggctcaccccccgggagatctctgaggttgtccgggaggctgatgttaatggagacggcacagttgactttgaaggtgacattgacggggcgtgggggcgccatggaacgcagggccctcactggccctggggactgggtgacgtcaggggtgagcctctggtgattggctaacctcacaatgcgtaagatcaaagggcctaaagaaactataactcattttccagaagttacagatggggagtgtgtctttccattccactataaaaatggaacatattatgactgcatcaagtccaaggcaagacacaagtggtgctcgttaaacaagacctacgaaggatactggaagttttgcagtgcagaagattttgcaaactgtgtatttcccttctggtacagacgcttgatctactgggagtgtactgatgatggggaagcatttgggaaaaaatggtgttcactgaccaagaattttaacaaggaccgaatttggaaatactgtgaatga

SEQ ID NO: 137914 - DNA, 1709 bp, Homo sapiens
  misc_feature (1)...(1709): n = a,t,c or g
ttttttttttaatttatgaagaaaaagaggtttaatgaactcacagttccatgtggctgggaggcctcacaatcatggtggaaggcaaaaggcacatcttacatggcagcagacaagagagaatgagagccaagcaaaaggggaaaccccttattaaaccatcagatctcgtgagacttattcactaccnacccagaacagtaagggagaaaatgccccctatgattcaaattatctccccaccaggtcccctccccacaattaagggagcctacaatttaaggtgatatttggatggggacacagcccaaaccatatcattctctcccctggcccctccccaaatctcatgtcctcctcattttaaaaatcaatcaatgccttccccaaaaagtccccccaaagtctttaactcatttccagcattaactcaaaaggtccatacttccaaagtctcatctgaaacaaggcaagtcccttcccacctatgagcctgtaaaatcaaaggctagttagttacttcttagatacaacgggaggtacaggcatttggctgaaatacacccattttcaagtgggagaagttggccaaaaacggaagtggctaaaggccccatgcaagtctgaaatccagcagggcagttaaatcttaaagctccaaaatggtctcctttgactccatgtctcacatccaggtcacactgatgcaggaggtgggttcccatggtcttgggcagctccacccctatggcattgcagggtacagcctacttctcggttgcttttacacggctggcgttgagtgtctgtggcttttccaggctcacggtacaagctgtcagtgggtctaccattctgggatctggaggatggtggccctcttctcatagctccactaggcattgccccagtagagactctgtgtgggggctctgactccacattcccttctaccctgtcacatcccactaactctgggaagttgttgattatctggtgtcgtggtggcaaaaccacttcccgaggccagaagtccaaagtcagggtgtcagcaggattggttacttcttggggactcctggggagagcctggtccgggctccgggcgaagagtctggtctgtgtccctcgctaagcttctgctggctgttggcagtccttggcgttcttttgctggaagctgcttgactccagtctctgcttccattgtcacatggccattttgcttttgtgcatctgtgtcttaacatggcattcttctctctgtgcctctttgtctcttcttttcttataagaacaccaagtcatattgggattaaggggcccccaccccctctcccagcatgcccctcaccctaacctaatgacatcctgcaatgganccctatttcctaaataaagtcacattcctgaggttcctaggaaggacataaattttggggggatgctatgcaaccccagtataccctacatgactttcaatttaaagtaggctgtgttattggagctatacagtagtcctcccttcttcgcgggggatacgtttcaagacccccagtagatgccagagatgtcggttagtactgaaccctatatatagtatgttttttcctatacatacatacctgtgataaagttttatttataaattaggcacaataagagattaacaacaataatgaataataaacaactatgacacattaaaa

SEQ ID NO: 137915 - DNA, 453 bp, Homo sapiens
  misc_feature (1)...(453): n = a,t,c or g
ttctgatcgctctcggaccatcgagatcctccgancgacccacgcgnncgccagtacccacccggtcggcccggcacagccatgatctttgcgatcctaatctttaacaaccacgggaagccgcggctctccaaggtctaccagccctacagtgaagatacacaacagcaaatcatcagggagactttccatttggtatctaagagagatgaaaatgtttgaaatttcctagaaggaggattattaattggaggatctgacaacaaactgatttatagacattatgcaacgttatattttgtcttctgtgtggattcttcagaaagtgaacttggcattttagatctaattcaagttcacaatattcttgcagaaatggtgatggggggaatggtattggagacaaatatgaatgagattgtacacaaatggatgcacaaaataagctggaag

SEQ ID NO: 137916 - DNA, 456 bp, Homo sapiens
  misc_feature (1)...(456): n = a,t,c or g
aattgatgacatctgaccangcggnggtagatggacggatcgcaggcgagattacgaggcgaggctcgcgcgcccgcccccgccctggcccccagtgcccacccggtcggcccggcacagccatgatcaaggcgatcctaatcttcaacaaccacgggaagccgcggctctccaagttctaccagccctacagtgaagatacacaacagcaaatcatcagggagactttccatttggtatctaagagagatgaaaatgtttgtaatttcctagaaggaggattgtatttgtggaaacattagacaaatgttttgaaaatgtctgtgagctggatttgattttccatgtagacaaggttcacaatattcttgcagaaatggtgatggggggaatggtattggagacaaatatgaatgagattgttacacaaattgatgcacaaaataagctggnaat

SEQ ID NO: 137917 - DNA, 403 bp, Homo sapiens
cgaggctcgcgcgcccgcccccgccctggcccccagtgcccacccggtcggcccggcacagccatgatcaaggcgatcctaatcttcaacaaccacgggaagccgcggctctccaagttctaccagccctacagtgaagatacacaacagcaaatcttcagggaaactttcctttgggatctaagaaagaagaaaaaggttggaatttcctaaaaggaggattattaattggaggatctgacaacaaactggattatagacattatgcaacggtatattttgtctttcgggggggatttttcaaaaagggaactgggctttttaaatctaattcaggaatttggggaacctttagacaaatgttttgaaaaggtctgggagctggatttgattttccatgtag

SEQ ID NO: 137918 - DNA, 599 bp, Homo sapiens
atgtcggaggagccgcagtctgtgttgcagcttcctacttcaattgctgctggaggggtaggacttacggatgtctccccagtcacaaccaccccggagcccccgtcttccgctgcagtttccccgggaacagaggaacctgctggcgacaccatagaaaaaaaaagaaagattgttgaaacagaccaaggttttggcactggaggtatgttaggtttcctggggatgcccacccggtcggcccggcacagccatgatcaaggcgatcctaatcttcaacaaccacgggaagccgcggctctccaagttctaccagccctacgtgagtatccagccgccgctgatccgggcgagggggagtcgttggcgacgggcagcgcccagcgcggctttctcagagcgaccccctccggcgcgctgcggcccttgtcccgtcccggccgcctggcgctcgccagctgtcagcctcctgagtgaagatacacaacagcaaatcatcagggagactttccatttggtatctaagagagatgaaaatgtttgtaatttcctagaaggaggattattaattggaggatctgacaacaaactgatttatc

SEQ ID NO: 137919 - DNA, 1319 bp, Homo sapiens
  misc_feature (1)...(1319): n = a,t,c or g
gggaaggatcgcaggcgagattacgaggcgaggctcgcgcgcccgcccccgccctggcccccagtgcccacccggtcggcccggcacagccatgatcaaggcgatcctaatcttcaacaaccacgggaagccgcggctctccaagttctaccagccctacagtgaagatacacaacagcaaatcatcagggagactttccatttggtatctaagagagatgaaaatgtttgtaatttcctagaaggaggattattaattggaggatctgacaacaaacgtgatttatagacattatgcaaccgctatattttgtcttctgtgtggattcttcagaaacgtgaacttggcattttagatctaattcaagtatttgtgggaaacattagacaaatgttttggaaatgtcctgtgagctgggatttgattttccatgttagacaaggttccacaatattctttgcagaaatggtgatggggggaatggtattggagacaaatatgaatgagattgttacaccaattgatgcacaaaataagctggaaaaatctgaggctggcttagcaggagctccagccccgtgcctgtatcagctgtaaagaatatgaatcttcctggagatcccaagaaatattaacattgggtgacatcagtattaaaagtgccaaacctgccctctttttaaataaaaatgttaaaaagggccactcccaggtaaaatccagggggaagagtcatctaagtttaccatgcagttggtttaccaaaaatagaggaggagagtcttaacttttgctcttgggatttaagtcaaaggtactgtataggaagttgtgtaaaatccagtatggaaagttcaatgttgctgttcttgctcagtgattttaaaggaaattgagtagttcctatgtgatttttttttttcttcttttctaaactggcattccctgtgccccaccttacggcatgcccnctatgtattgggctactacagtgtttttaaaaagtgttttcagatatttctataattatgtacaaccctaaaatgttgggtgttttgtatgggatcacaagtgcagcattccttaattccttctgctatatgtcacacagttgttatttggagaaccaaagtatgtattgcatgaaaccaattatgacttttctctcttagtttaaataaactccaaggtaactggacttctaaagcaccctttctgtttgcctgatatctactttagcaataattttttttacaaccctctgactcaccaaacgtaaataaaagtatattttatcactaaaaaaaaaaaaaaaaaa

SEQ ID NO: 137920 - DNA, 726 bp, Homo sapiens
atggatgctgggtcctgggatagggattttggacatgtatgctgggacctgggaccgggatgccagacacggatgctgggccccgggacggggatgccggacatggatgccgggccccgggacggggatgacggacatggatgccgctgggcccagggacggggatgccggacatggatgccgctgggcccagggacggggatgccggacatggatgccgctgggccccgggatggggatgccggacatggatgccgctgggccccgggacggggctgctggacatggatgccgctgggccccgggacggggatgctggacatggatgctgggccccgggatggggatgccggccatggatgccgctgggcagaaatgtttaatccaggtgagaaacaccagactggtagtgtttgcgatttctgtggtgtagatactcccaccatggctaattccaagctgctggtgtggtcactgaaggcggagttgagaaaaggtgagaagccctttgagtgtaagctctgccaccagcgctcccgggactactcggccatgatcaagcacctgagaacgcacaacggcgcctcgccctaccagtgcaccatctgcacagagtactgccccagcctctcctccatgcagaagcacatgaagggccacaagcccgaggagatcccgcccgactggaggatagagaagacgtacctctacctgtgctatgtgtga

SEQ ID NO: 137921 - DNA, 1156 bp, Homo sapiens
atggatgctgggtcctgggatagggattttggacatgtatgctgggacctgggaccgggatgccagacacggatgctgggccccgggacggggatgccggacatggatgccgggccccgggacggggatgacggacatggatgccgctgggcccagggacggggatgccggacatggatgccgctgggcccagggacggggatgccggacatggatgccgctgggccccgggatggggatgccggacatggatgccgctgggccccgggacggggctgctggacatggatgccgctgggccccgggacggggatgctggacatggatgctgggccccgggatggggatgccggccatggatgccgctgggcagcttgcaagtggtcactcgccctgagctggatttgggcagggggattggatgggcagtcctccaggctgctgttggaaatttctcagagaaggacctgctgtgctgcacggaccttcctggaagtccaacccaggggctctttgagagagggggaatcaggaagtgtaggagtgagcaaagtgattctgggcagaaacctgaatggatatgacaaggacgagggatcctttgtccgggagctgtggcccatcagccctctcgctgcttctaaccgcttgctgctgctgttggtccccatgtgtgcccagagtcactggcttcaaacacagctgcactgcaccattcctctgtctgatcctcccaccggccatgtttcctcctggcccagagtgttcacagacactattccatcttccggattccgccattcacctggtgttctgggcactgacatggccgtcttctgtctgctgtgtgggaagcgcttccaggcgcagagcgcactgcagcagcacatggaggtccacgcgggcgtgcgcagctacatctgcagtgagtgcaaccgcaccttccccagccacacggctctcaaacgccacctgcgctcacatacaggcgaccacccctacgagtgtgagttctgtggcagctgcttccgggatgagagcacactcaagagccacaaacgcatccacacgggtgagaaaccctacgagtgcaatggctgtggcaagaagttcagcctcaagcatcagctggagacgcactatagggtgcacacag

SEQ ID NO: 137922 - DNA, 360 bp, Homo sapiens
atgggactgagcattgctcaggcacagagactctgggaagcgggtgccaaagcctttgtctgtgatcagtgcggtgcacagttttcgaaggaggatgccctggagacacacaggcagacccatactggaaaggggtcccaggaggaagggagttgcctgatgacagggagcgctgaaaatgtcactaaagctattggagtgggaaaagccaggtgggagaccaggtaccgttgggaagccaacgggagagtaggggaagccactcaaccagatgcaaatgttgagatgctggttctcatccactgtgttgtcggctgcaagagtcttgcagtccagaaacggcatacctctggcggctga

SEQ ID NO: 137923 - DNA, 1371 bp, Homo sapiens
atgtttacacattctgaaagcagttctaagtctgtcatcgtcagattgtctctgacccgcgcgggtgccaaagcctttgtctgtgatcagtgcggtgcacagttttcgaaggaggatgccctggagacacacaggcagacccatactgggggattggatgggcagtcctccaggctgctgttggaaatttctcagagaaggacctgctgtgctgcacggaccttcctggaagtccaacccaggggctctttgagagagggggaatcaggaagtgtaggagtgagcaaagtgattctgggcagaaacctgaatggatatgacaaggacgagggatcctttgtccgggagctgctgaggagccccatccacaagatctctggggaaaaaacaaaaggcccagaccaccacattcagaccttcagcttatttcaagaacagggcatgtgcctgagttggtcaccatcatatccccagcagtggcccatcagccctctcgctgcttctaaccgcttgctgctgctgttggtccccatgtgtgcccagagtcactggcttcaaacacagctgcactgcaccattcctctgtctgatcctcccaccggccatgtttcctcctggcccagagtgttcacagacactattccatcttccggattccgccattcacctggtgttctgggcactgacatggccgtcttctgtctgctgtgtgggaagcgcttccaggcgcagagcgcactgcagcagcacatggaggtccacgcgggcgtgcgcagctacatctgcagtgagtgcaaccgcaccttccccagccacacggctctcaaacgccacctgcgctcacatacaggtaggaaagaggattcggctttaaaggatgagatccagggtggactgaaggaaagggatgaaacagtagaagaggtgaagggagttcaagatgaacaaagccagggggagccaggggaagtctgtttcaccaggacagtgctgggcctcattgagaatagcagtcgacactgcattagagagctcctggtgggaaatccagcaggccagtccaggatgtggggtattttgggagtgaagatgctatggagaactttcctggtgcctgaaattacgcaaggagcaaatctggaagccatccacagtgatgttttcatgagccacactggtgacgggcagagcagtcaaggccaccctgcagggcagaagcggtgctggctggagggggtccagtgcaccatctgcacagagtactgccccagcctctcctccatgcagaagcacatgaagggccacaagcccgaggagatcccgcccgactggaggatagagaagacgtacctctacctgtgctatgtgtga

SEQ ID NO: 137924 - DNA, 639 bp, Homo sapiens
atggggcccaaggctgcatgtcagcaccaactgcccaggtcctgctcgacaggaccaggaagtttgcatggtggctggtggaggctgataatctcagatggcccacgtgcaattaaaccttatgaaaagacaggactagattgggaagatgtgagtgtgtggaagctgcacagtgggatgaagacgtacgggtgcgagctctgcgggaagcggttcctggatagtttgcggctgagaatgcacttactggctcattcagggacttacaccttgtatcttcatgcttcccttcagctttgtacgctacttaaggttcagagtgtggcgggtttcatgaactatctgcctaccaggctctgtgcacttaacagtgaagactgctacaacatccctgccctcaaggagcttaagtctagagtgggagatgagtatgactatgcaatcatcatacaagatgaccagcattttggccagggtgcccagtttgagctcatttaccaaaggaagggaaagggaagtacccccaagcagccagcagtcagcactggggcctctagggaagagtggattggtgttgttttgctgtggtttgctgtgcgttttccagaatctctcttggatgactatcagattcagtga

SEQ ID NO: 137925 - DNA, 2407 bp, Homo sapiens
tttcgtgctaacctcgcagcagagaggagttgagggctatgagagcggttactgcgaactgccgggcgatgctgtcgctgccgccgtgatacggagagcaacagttccccagcaacacccctccccgacacaggcacacaccccccgacaggcacgcacacccaccccacagtgcccggctcggctgcgcctcctctattggcccaggaagcccacccagccccgccacgcagagcccagaaggaaagaaagcctcatgcctgagccgaggggagcaccatggatctgacaaaaatgggcatgatccagctgcagaaccctagccaccccacggggctactgtgcaaggccaaccagatgcggctggccgggactttgtgcgatgtggtcatcatggtggacagccaggagttccacgcccaccggacggtgctggcctgcaccagcaagatgtttgagatcctcttccaccgcaatagtcaacactatactttggacttcctctcgccaaagaccttccagcagattctggagtatgcatatacagccacgctgcaagccaaggcggaggacctgtgatgacctgctgtatgcggccgagatcctggagatcgagtacctggaggaacagtgcctgaagatgctggagaccatccaggcctcagacgacaatgacacggaggccaccatggccgatggcggggccgaggaagaagaggaccgcaaggctcggaacctcaagaacatcttcatctcgaagcattccagcgaggagagtgggtatgccagtgtggctggacagagcctccctgggcccatggtggaccagagcccttcagtctccacttcatttggtctttcagccatgagtcccaccaaggctgcagtggacagttcgctgaccataggacagtctctcctgcagggaactcttcagccacctgcagggcccgaggagccaactctggctgggggtgggcggcaccctggggtggctgaggtgaagacggagatgatgcaggtggatgaggtgcccagccaggacacgccctggggcagccgagtccagcatctcaggagggatgggggacaaggttgaggaaagaggcaaagaggggcctgggaccccgactcgaagcagcgtcatcaccagtgctagggagctacactatgggcgagaggagagtgccgagcaggtgccacccccagctgaggctggccaggcccccactggccgacctgagcacccagcacccccgcctgagaagcatctgggcatctactccgtgttgcccaaccacaaggctgacgctgtattgagcatgccgtcttccgtgacctctggcctccacgtgcagcctgccctggctgtctccatggacttcagcacctatggggggctgctgccccagggcttcatccagagggagctgttcagcaagctgggggagctggctgtgggcatgaagtcagagagccggaccatcggagagcagtgcagcgtgtgtggggtcgagcttcctgataacgaggctgtggagcagcacaggaagctgcacagtgggatgaagacgtacgggtgcgagctctgcggggaagcggttcctggatagtttgcggctgagaatgcacttgctggctcattcagcgggtgccaaagcctttgtctgtgatcagtgcggtgcacagttttcgaaggaggatgccctggagacacacaggcagacccatactggcactgacatggccgtcttctgtctgctgtgtgggaagcgcttccaggcgcagagcgaccttgcagcagcacatggaggtccacgcgggcgtgcgcagctacatctgcagtgagtgcaaccgcaccttccccagccacacggctctcaaacgccacctgcgctcacatacaggcgaccacccctacgagtgtgagttctgtggcagctgcttccgggatgagagcacactcaagagccacaaacgcatccacacgggtgagaaaccctacgagtgcaatggctgtggcaagaagttcagcctcaagcatcagctggagacgcactatagggtgcacacaggtgagaagccctttgagtgtaaagctctgccaccagcgctcccgggactactcggccatgatcaagcacctgagaacgcacaactgcgcctcgccctaccagtgcaccatctgcacagagtactgccccagcctctcctccatgcagaagcacatgaagggccacaagcccgaggagatcccgcccgactggaggatagagaagacgtacctctacctgtgctatgtgtgaagggaggcccgcggcggtggagccgagcggggagccaggaaagaagagttggagtgagatgataggaaggactatgacaaataaaaaaggaaaagaaaaaa

SEQ ID NO: 137926 - DNA, 245 bp, Homo sapiens
aagaagaggaggaggaggaggaggaggagaaggaggaggaaaaagaagaagaaggagaagaagaggaagaagaagaagaagaagaagaagaagaagaagaagaagaagaagaagaagaagaagaagaagaagaagatgttgttgttgagtcttccgatgatcaggccaagactaccacatcctcgttgggcttcatctccatcctctatggttgccaaaccatagtgtgcattagagtcgcttag

SEQ ID NO: 137927 - DNA, 456 bp, Homo sapiens
cctgggcgtgaggccgctgacaggctcagtggcggcggctgacggctgcaggcggcagggagctgagacatctgttgcccacgcggctgcctgccctccgaggaaaggcctccacacgtcacagctgcggctgcggcagcagcagcagcaacagccttgtttggagctgactggggatgcaggccccaggcaggcagtctgggagaaggtttgccaggaagagcctcctttgtcccccaaagtcacgcggcagcagctcaggcccaaggagccaggatggctgaggttgggtttgggtgggattgctgcattcttcttcttcctcttcttcttcttcttcttttcttcttcttcttcttcttcttcttcttcttcttcttcttcttcttcttcttcttcttcttcttcctcttcctcttcttcttctttcctcttcctcttcttcttctttggctt

SEQ ID NO: 137928 - DNA, 378 bp, Homo sapiens
atagtgattcccctgatggagccgagcaaagtaaattaaaaaccttctggaaagaattctccattctagatgccattaagaatacttttgatgcatggcgaggaggaggaggaggaggaggaagaagaagaagaagaagaagaagaagaagaagaagaagaagaagaagaagaaggaagaagaagaagaagaagaagaagaggaagaagaagaagaagaagaagaaatacttcaaataaaaacaaaacattataccaccaaagagcaagaaaaagaagaacagggtataaagctagtgcaaggaagtaataatgatcagagcaggaaaaaaaaggagaatataaaaacactggggaaaaaaactcaatgaaacaaagt

SEQ ID NO: 137929 - DNA, 159 bp, Homo sapiens; identical to SEQ ID NO: 117049

SEQ ID NO: 137930 - DNA, 2502 bp, Homo sapiens
atggaggtcttgtccatcgacaacttggcaggacacaaagtattttaccaaaaggaatctcacagctggaagcagcagaagcaagacttgatgtcaggaaaaaggctttctgctgctaaccctctacctgcccttcttctccctgttctctggacaacaggacaggctcccagccctggccctggtggtgaccccatcctgcagctctgggatgatgctcagcaaatggcaggttctccgaggacaaagaagaagggctgtaccagaaactcacaagcagcaaggctttccttccagagcaggggtgggcagggtagcctcactgagaagatgatatttgagcaaagatttggaggaggcaagggagagagtcgcaaagatgccattgccatcattgttgttgacatcgtcacactgcagccttgcaggacagtcgagtgggtgccgacacgtcccttccgttccctgcaaggccatttccagggaggcttacgaagacagcagatgatggtgatggaaggagtctgggtgctgagctgtgccatggacctgacctctccccgggactgcctgcccttctgtgtttcacttcctgtcctcctcttaagtgctcccctgtgcagctgctccacagctggtggctctccggtcacctccccccaccacttccctgttgaagggggcctggggagagtcagaaggtgctacatcaatgagcctgtggtgaccactctgggctgggagtccgtgtgctgggtcagcttctggctcctgctgaggattcgctatagcaccagtggacaggcagcttgtcatgcggaaagtcaggaactaaatccacgtggatttggctgtctggggcacagaaatgtcacctgggtcaaatgcctgctccctgctctccagccggaaggctccgttcccttcttggaactcctagagccttttatctttgcctctgcctctaagacatttgttgcagccaaccttgtgacttgggtggcttgttttctgctggttcaggccgccttccagctgagtgagtataggcagggggtcggcatccctgtggctgatagaactggagatgctccgaccttggggctttcatatgaggctgatgttgcagaaggtcatggcttcttcctggatcaagaatctgtcattcagattattccagagcccctgccccagttctacttatgcctcctggatgctgagctgacaggcgtgcaaggcgagcctgcactgccctccatgcagattttctcctccccagaggctgccactggagtccacaatgacaggggagctgaacatttcccagtcagtcgccagccctcagcagagcttggcctgaggcccatgcaggcatctcaggagaggaaaatcaactttcctggacccagccctggctttccacctaagcgacagaacaagactctgtcaagaagagagaagaaagaagaagagaaggaggagaaggaggaggaggaggaagaagagggggggaggaggagaaagaaaaagaagaggaagaggagaaggaggaagaggaggaggaggaagaagaagaaggaggagaagaagaagaagaagaagaagaagaagaagaagaagaagaagaagaagaagaagaagaagaaaaatggctttaccagtatgatcctgaagacaaagcacagtcaaagcaatggctatcaagaggtggaagtggtccagtcaaagcgaaagcagactggtggagagcaaaggaaatccatagtctccagccacgacaggttattccaggaataccgagcatgtgatgtgtggctgcagaagcagcacacgaaggctagaaaatgtcctgggacctggaagaaccagatcagggctcttcctagcattccttatctcacccttcctgaaaaacgggagaactgttccttcctaccctactcccagactcaatttaccctgaagctaaggaaaagttgcattcttctctgtatctcagacaacaagagcttgctgaagaataattttactgaaggtggccatgatattggtgtttttcacctcttggtaataagcaaagatccccgcaaccagagaatccgggcagaacatgaattctcagaactggtgggactttccaaccagttgcttctcatgcagaggcagaaaaatgaggggatcaacagcccaggcctcaggggcacccttcttggcccttacagctttctctggcactgtttggcacagaagcagcagagcccctgggctcctgggtactgtgtggccttgcatcagttatctcagtgtaaccagtggggacaaatggccagtgaccacgcatgcaccccttccagtgatgctgggaaaatagggaggaacattgaagagaaagacctcttctccacacctttgtctaatgatgttcttctgcaggaggaaggagaactgcagaatactggtcctatattggggagtggagaatccaaggcttttaaggggtag

SEQ ID NO: 137931 - DNA, 845 bp, Homo sapiens
ttaggaacaaaagcctgttttccacttgatatacagtgggaaggtgtgggaaatgctcacttccagcatccaggtgtctatgacagcagggacaacagaggaccacatgtagatgggaatacgcttcctgtgacccatgatggctttggtgctggaataaatgattgctgggtgggcaaggccacgggcttcagggtgtccaaagggcagaggttctcgcaggcctctgctccagcatttctgacccgtggggtttttctgggctgccctggcaaacaggtccctctgccctcttgccctgcttccatgtgctttgcagccgtcatcaatgtttttctgctcattgtccatctccctcgtggatcgaggggtgccaggcaggccaggagtgtgtctggtccacagctgagtttcccagcacctagagcggagcttggcccatagcaggtgctcagtaaataccaggaggaagcaacggcctggaggccgaggggccaccgccacctccactgcccgtcgctgcagtcctggctctggctccggaggcctggctgtggcctcctgtgctttcaccatctgtgcactgcgctggccaggcgtgccctgctctagggtgcccatctggacgccaagctgacagcacatccggctcgagcagggcatcttacaaaccatcgttagacctgtcaggcttccagcaattttgtttggttttggtttggtttggccccactcctctccctcatttccacaatgcaccattggttccacagccctgtgcattgcgatggtaccagggtatgaaactgggcggtgagggtcatcatgggccatcttggagactg

SEQ ID NO: 137932 - DNA, 439 bp, Homo sapiens; identical to SEQ ID NO: 132756
  misc_feature (1)...(439): n = a,t,c or g

SEQ ID NO: 137933 - DNA, 416 bp, Homo sapiens
  misc_feature (1)...(416): n = a,t,c or g
caggaattctgcacgagcctcnnnnnnnnnnnnnnnnnnnnnnnnnnnnnnnnnnnnnnnnnnnnnnnnnnnnnnnnatgtgcatgaaatttggtgccgtgactcggatcgggggacctcccttgggagatcaatcccctgtcctcctgttctttgctccatgagaaagatccacctacaacctcaggtcctcagactgaccggcccaaggaacatctcatcaattttaaatcaggagcttgctacacgtgccggaaatctggccactaggccaaggaatgcctgcagcctgggattcctattaagccgcatctcatctgtgtgggaccccactgaaaatcggactgttcaactcacctggcagccactcccagagcccctggaactctggcccaaggctctctgactgactcctt

SEQ ID NO: 137934 - DNA, 751 bp, Homo sapiens; identical to SEQ ID NO: 124292

SEQ ID NO: 137935 - DNA, 453 bp, Homo sapiens; identical to SEQ ID NO: 114501
  misc_feature (1)...(453): n = a,t,c or g

SEQ ID NO: 137936 - DNA, 462 bp, Homo sapiens; identical to SEQ ID NO: 137647

SEQ ID NO: 137937 - DNA, 741 bp, Homo sapiens; identical to SEQ ID NO: 122393

SEQ ID NO: 137938 - DNA, 366 bp, Homo sapiens; identical to SEQ ID NO: 124300

SEQ ID NO: 137939 - DNA, 783 bp, Homo sapiens
atggaattttgtatttcattaggccggaaaataactttttcaaacatttttccctacaacggggccaattggaaggttttcttaaaaaagtcccaaccattattgaatgcactggttgagcaggatgatgccgaacgcttgttccgccgcttccgagcggcaggggatttaccgtatggcgcttttggtgaaattttctgggaaacacagtgccaggagatgcagcagcttgccgacagagtcattgcctgtcgccagccggggcagagtatggaaattgatctcgcctgcaacggtgtgcagataactggctggttgccgcagctttgggatgctgaagggatcagcttcagtgtcttcagctttgggatgctgaagggatcagcttcagtgtcttcagctttgggatgctggagcttgctacacatgctggaaatctgccactgggccaaggaatgcccacagcacggtattcctcctaagccacgtcccatctgtgtgggaccccaccgaaaatcggactgttcatctcacctggcagccactcccagagcccctggaactctggcccaaggctctctgactgactccttcccagatcttctcggcttagcggctgaagactgacactgcccgatcgcctcagaagcctcttagtctgggtagacactttcactagatgggtagaggcctttcctacagggtctgacaaggccaccacggtcatttcttcccttctgtcagacataattccttggtttggccttcccacctctatacagt

SEQ ID NO: 137940 - DNA, 513 bp, Homo sapiens
ttttatgcctgctaggactccggctcttgggtttcccgacattgtcattgttttggatcttctcttcagcttggtctttgctcttgctgcggctcttgccagcgctatggctgcggctgcaggctcttgtccttgctggggctcctgcttttctctttcttgctccggctccgactctggctccggctccggctcttgctccgggagcgggagcccgacctgaggagacatgggatacctgttgtgtccatgtgacttcatgctggcagccactcccagagcccctggaactctggcccaaggctctctgactgactccttcacagatcttctcggcttagcggctgaagactgatgctgcccgatcgcctcggaagccccgtagaccatcacggacgccgagcttccggtaactctcacagtggaaggtaagcccgtccccttcttaatcaatacggaggctacccgctccacattaccttctttccaagggcctgtttcccttgcctccat

SEQ ID NO: 137941 - DNA, 1161 bp, Homo sapiens
tcagctaaacttaaccagctgcctttctcttaacttcaaggctacaaggatgtagtagccagtgatgatagccagagggagaaagaagccaaagaaaaagtgggctgttgtgaccagcgtttggtgccatggaatgataatctctttccaaagttggtgacttccttgagtttcattctgcagatcatactggttgtacaaagagggtgacactttccaccacgagtttccttgaagatcaagtagggaacagagaaacaaattgccaaaagccaggtcctcaagggccccagagttgcctttgctggtgtgcaattgttccaggactagattggccacaggatcacaagtcagtggtccatggagatgagggtcagaaggaagacacgtgttgactgtgcaggacatgtggaatccaactacccaaatgacaaggccattgccagccaagcctaggaagaaagtcactgtgtagatgatcatggaaaagatgtcaagagcagacttgaccctctccaaagagtcatcacaatagtcaaacatggacgtgggactctccacagtcaacagtgacaatgcagacacattctccatgctactgctctcttgattgtagctggaggtcatgggtgagtttgctctcagattccgagctccaccaacttgtgttctgagctctatgtgtttatttgagcaatagttaggctggactgagtccaggattgaattggatttgataattaatccaactgtgtcagcaacaacataaacattcagctggtacaaagctgcgacttgtgaatttcctactgacattaaagaagacttgtgaattccgtaatgagactgaagaagtctttcatgatggtgacagagaatggtgtcaattcctaaagtttggtcaatctctctgacacccactcccagagcccctggaactctggcccaaggctctctgactgattccttcccagatcttctcggcttagtggctgaagactgacactgcccgatcacctcggaagcccccctcagggcggaatacagaacctcgccattgtcatctccacctccaacactcatttgttcattttcgggccaatagccagagtaactacaaaggctgatggtcaccagcaggaagatagttaccagcttcat

SEQ ID NO: 137942 - DNA, 708 bp, Homo sapiens
atgagaacacatggacccaaggacgggaacatcacacatcagggcctgttggaggacacatgtgacatttggtgccaaagacccgggacaggaggactccttcaggagactggccccctgtccttgccctcattctgtgaggagatccacctacaacatcaggtcctcagaccaagcagcccaaggaatatctcaccaatttcaaatctggctgctccttgcaaggccacagcaagtccctcagcctctgctcccccaccctataatccttctatcacttccactcctcacacccggtctggcttacagtttcgttccgcgactagccctcccccacctgcccgacaatttcctcttaaagaggaggctggagctaaaagcacagtcaagggatcttgcttcaagtgccagaaatctggccactgggccaaggaatgcctgcatcccgggattcctcctaagccgtgtcccatctgtgtggaaccccactggaaatcggatggtccaacttgcctggcagccactcccagagcccctggaattctggcccaaggctctctgactgactcctttccagatcttcttggcttagtggctgaagactgatgctgcccgatcgcctcggaagccccctacaagaccatcacggatgccgagcttcgcgtaactctcacagtggagggtacacatccagatggccggttcctg

SEQ ID NO: 137943 - DNA, 726 bp, Homo sapiens
tcagaaggaacgaactctggacacgccgcctttaagaactgtgacactcaccacgagggtccgtggcttcattcttgaagtcagtgagaccaagaacccaccaattccagacacagtattactggcagccactcccagagctcctggaactctggcccgaggctcactgactgactccttcccagatcttctcagcttagcagctgaagactgacactgcccgatcacctcggaagcctgtttaagttgcgtttccgagttgacgtgcacatcacagatttcacagtgaaatgttttattttggaggcctgtgtttcctttattaacaggtcctttgcctttcactcctgccctaggaaaggctttgatagtgccacttccattccgggcttctaacatggttttgtgcttagtaccactgttgtgcgcctccagctgcgaggcagagttgacagcaaccttgcatagcgaacagtaaagaagccgttttgccttttcttcctcggtctcagtagaaggacatgagctattgccagtggctgtcgttgggcttttttccactttagaggtgatctcagttgtcataaccctgcttttgcggatttcccccgttgtcgtcgttgatattgctggtgtccctgcagtaccgtcttgacttgggtcaggcaactgagggttaagctccttgggcagggctgtcaaggttttattgaggagggtgctcat

SEQ ID NO: 137944 - DNA, 1593 bp, Homo sapiens; identical to SEQ ID NO: 124303

SEQ ID NO: 137945 - DNA, 433 bp, Homo sapiens; identical to SEQ ID NO: 135219

SEQ ID NO: 137946 - DNA, 534 bp, Homo sapiens; identical to SEQ ID NO: 129830

SEQ ID NO: 137947 - DNA, 1604 bp, Homo sapiens
atgcctggcgataagtacggcgatggcattaccttaatcaagtacatcaagcgccatttcccaagcctgtcgatcattgttctgactatgaacaacaacccggcgattcttagtgcggtattggatctggatatcgaagggatcgtgctgaaacaaggtgcaccgaccgatctgccgaaagctctcgccgcgctgcagaaagggaagaaatttaccccggaaagcgtttctcgcctgttggaaaaaatcagtgctggtggttacggtgacaagcgtctctcgccaaaagagagtgaagttctgcgcctgtttgcggaaggcttcctggtgaccgagatcgctaaaaagctgaaccgcagtattaaaaccatcagtagccagaagaaatctgcgatgatgaagctgggtgtcgagaacgatatcgccctgctgaattatctctcttcagtgaccttaagccagataagacgcgttagtgtcttatctggcatttgcaccgattgccggatgcggcgtaaacgccttatccggcctacgattcccattatttcaacaaattacattaaagtaggccagataagacgcgtcagcgtcgcatctggcatttgcgctgaatgccggatgcggggtaaacgctttatcgtcctaggaattccgggatttctggacctctcggggtataacgcagcgtctgggaagcgccaaagcttgcatgcctgcagccgcgtaacctggcaaaatcggttacggttgaaacgttttccttcaattcatgggccttttaatgaagcttcacaagaagcggcgcgtcgtaagtcgattgagaaagagctggaatgggtacgtcaaggtactaaaggccgtcagtcgaaaggtaaagcacgtctggcgcgctttgaagaactgaacagcaccgaatatcagatcactgtattacacacaggaggaaaatcagagttaggaagggggcttccgaggcgatcgggcagtgtcagtcttcagccgctaagccgagaagatctgggaaggagtcagagagccttgggccagagttccaggggctctgggagtggctgccagtttatgagctaggaaccctccatgcaggctctgaacctggtggagctcttccttgggtttctgctgagatgtctgctgttagtctgatgggcttccctttacagatattgggtacatgtagaagggagaggtctttggggacctggtcgagaaaaagtggctatgtgatgagtggcagggatgggaagtcagtgaagaagtcaaagctcttggacagaaagaagagtcagagcaaaaagcttatggaaccaagaggatgctcacctggagactgcactgccgcttctagattaccatgggtagcaagtacccaagaacaccctttccaaatggctctaagcccatctccagacctgtgcaggcttttcctaagatatatcttccaaaaaatggaccttgtcattggtgtgcatatacctgaacccaagcattggccaaggggcaacggtttgcagctcctggttatcaccactctactatctgtttcaacgggtttgactatattagatcccacaaataagtga

SEQ ID NO: 137948 - DNA, 1785 bp, Homo sapiens
ggggcttccgaggcgatcaggcagcatcagtcttcagccactaagccaagaagatctgggaaggagtcagtcagagagcctcgggccagagttccaggggctctggcagtggctgtcagactttcaaacttaacaccagtggtttgtcagtggctttcaagccttcagcgacagactgaaggctgcattgtcagcttccctacttttgaggtttggggactcagactggcttcctagctcttcagcttgcaaatgtcttatgctgggacttcactttgtgattgtaggtaacatctgtgctacactcaaggagaaatactcctcaatgctccatttagatgtgaccatgaagaaaaatggggagaaaagaacaaggctccaaaaaagaaagaagggaatgcctccacatccggcttatgaggacctaaacatagctgccatcactctccctgccaatgttgtccttcatcagccaagtggcttcagaacttcagggcagctggaccccgtttggtggtctcttgacacggacgcgcatgaaatttggtgccaagacccgggacttggatcaggggacttcccttgggagatcactcccctgtcctcctactctttgctccatgagaaagatccacctacgacctcaggtcctcagaccgaccagcccaagaaacatctcaccaatttcaaatccaagacaaaggagacaggttttatccatggacccaaaactccggcaccggtcacggactgggaaggcagccttcccttggtgtttaatcattgcagggacacctctctgattattcacccatgtttcaagggtgtcagaccacgcagggatgcctgccttggtccttcacccttagcggcaagtcccgcttttctggagaaggggcaagatttaattaacctcgccttcaaggtgtacaataatagaaaaaagttgcaattccttgcctccactgtgagacaaaccgcagccacatctccagcacacaagaacttccaaatgcctgaaccgcagcggccaggcgttcctccagaacctcctcccacaggagcttgctacatgtgccggaaatctggccactgggccaaggaatgcccgcagcccgggattcctcctaagccgcgtcccatctgtgtaggaccccaccgaaaatcggactgttcaactcacctggcagccactcccagaggccctggaactctggcccaaggctctctgactgactccttcccagatcttctcggcttagtggctgaagactgacactgcccgatcgcctcggttgaagccccctagaccatcacagaagccgagcttcgggtaactctcacagtggagggtaagtccatcccctgtttaatcgatacgggggctacccactccacgttgccttcttttcaagggcctgtttcccttgcccccataactgttgtgggtattgacggccaagcttcaaaacccctgaaaactcccccactctggtgccaacttggacaacactcttttatgcactcttttttagttatccccacctgcccactccccttattaggccgaaatattttaaccaaattatctgcttccctgactattcctggagtacagctacatctcattgctgcccttcttcccaatccaaagcctcctttgtgtcctctaacatccccacaatatcaccccttaccacaagacctcccttcagcttaatctctcccactataggttcccacgccgcccctaatcccacttgaagcagcctgtaacgagatgac

SEQ ID NO: 137949 - DNA, 977 bp, Homo sapiens
cccaccacctccccgggtcctccgcacaggcggcggcgctagccttactgcgcaggcgccaggtacacctcggaggcctcaggagggggagccagtaactccgggtcgttcactagggctccgctctagctgccaagcttccgtttctctactgctccccgtaatagttgcctgcgcgagcttggagccgggtagagggcgggccttccgggacgagggcgcgtggaatacccgcgtttccgctgccgtaatttcctctcaggcgcaattactctcttccatattggttaacagtagaaggctcagtttctctgctcatcacacggccttcggcactgtagctttgggtgaatatgccttccgcatgttttcgtctcagtgcccggctatttgggtgaagtcacccaggcctactaattcccaagtcttatgaaagtggtgaaactgtttagtgaaactggcccttggccaagaagaaggagacttatgattgggtatccaaatcaccacacttacggctggaactcatggcaggacggctccgatttcttgggactcttacagaggatgaggcattcagggattttatggggatggaggcaaaaacggacttaaaggaagctttcgtgggaaagggaggaaacccaaaggaaagggagaaggggaaaagagcagccaaaaagggaaatagttgtttggtcccttcaaggaggggagactttctttcctcagtggcggagagaagaaagttgcatttattgtctttcccacatattggaggagatgtcatcttcctaaatggaagtttatttgggaggaacacgagtcatctccttggtgaaatctaatccggttacattggtggctgggtttcttgaacacattcctaactgtgcaaaattatcttggccttggccgtgtaatgtgaggtttacctgattctctaatgaaataaatacctaagttattgtttgaaa

SEQ ID NO: 137950 - DNA, 451 bp, Homo sapiens
ttcccgggtcgacgatttcgtgtggagggcacgtgcggagctgtgtctggggtctgcttccatatataccaccccgagaacaggtgactctcctggcaatgaaacctgggccaccagcccagagaggcctctcaccacagcagggaccaaggctgcctttgtgcaaggcaccagccccaccccccaaggcctgccccagcggctgaacctgaccggagcagtcagggtgctctgtgagatcgagaaggtggttgtcgccatccagaagcgcttcctgcagcaggaatccatccccgagtcctcgttgcacctcagccacccctcctgcaacgtgagccacagcaatggcacacacgtgctcctggaggccggctggagcgagtgtgggaccctcatgcagagcaacatgacgaacaccgtggtgaggaccacgctgaggaacgacctgtcc

SEQ ID NO: 137951 - DNA, 645 bp, Homo sapiens
atgtcccaaccccaggccgcaccctcgctttccatccaacccggcaactgctgcccgtggagggccacagtctccgaagtggaatgtggaaaaggaaaagtcattcgggctgtgataagaaagccgagcttcttcaaaggcattgaaactgaacctgctctggggcaagaagggagctggagtgggaagtttgggcacaaggacctcaagaggaggcatcattaccccatcttagagaatagactcagggctctcagggcagaagactcaccctgtatccactggcttggcacatccccggcatcaggtccctcggtctttgcctcgggggcccatggcctgccccagcggctgaacctgaccggagcagtcagggtgctctgtgagatcgagaaggtggttgtcgccatccagaagcgcttcctgcagcaggaatccatccccgagtcctcgttgtactcagccacccctcctgcaacgtcaccagcgccctgcaaccaatggcctccaccgtccaccacctgcactcagcccctgggaacgcctccaccacagtgtcgcggctgctactgggcctgccacgccactcctgtggctgacgtctccaccctgctgggtgacattgcgaacgtgtctatgaagtga

SEQ ID NO: 137952 - DNA, 1887 bp, Homo sapiens
ccatgaggaggaacaagccccggcagcgcggcgtgcgggaggcgcggcctgcgggaggcgccgggccgggctggcgcggggcccgttgttccggcgcaggtgagggaggtggcggcgagcgacgcggttcacctcccgctgccctcgccctcgccccggcgagcggcccccgcaggaactttcctcccgacgcgagatgtcttatttaccaacaaatccaccagggagcattcttacttgctggctcggcgtctctctcggcagtcaccggagtgcccgagggggaagcacgatttacggaagactattgcccagaagaaaagatgtttggttttcacaagccaaagatgtaccgaagtatagaggggtgctggtatttcaggagctaagtcctccagttctcgattcactgacagtaaacgctatgaaaaaggacttccaagagctgttttggattgcatgagactcgttcaggagacatctggcaatgcctgtgtcctgcttgtgaaaagatggaagaagttgccagcaggatcaaaaaaaaaactggaatcatgtggtagatgcaagggctggacccagttctaaagactacatttgaaccaaaagaaagtgaaaactctatctggggaacaggattaaaaggcacccagatcagtaaactgcagaaggaatttaaaccgttctaattctgatgctcacagtaccacctcaagtgcctccccagctcaatctccttgttacagtaaccagtcagatgacggctcagatacagagatggcttctggttctaacagaacaccagttttttcctttttagatctcacttactggaaaagacagaagatatgttgtgggatcatctataaaggccgttttggggaagtcctcattgacacacatctcttcaagccttgctgcagcaataagaaagcagctgctgagaagccagaggagcaggggccagagcctctgcccatctccactcaggagtggactgagtgtccagacctctcactggttgtcagctggaggcccccgcttagttccttgccagctgggtgctccctgcatggcctggctgctgactggaccactgacatgattactgtcactaccagcaagtgtcgagagccaagctgccagcaagaggggtcttttcagagaagaaaagcctttcccaagcggctgccgaagatggcggaggtgcaggtcctggtgctttgatggtcaaggcccatctcctgggcccgcctggcgggccatcgtggctaaaccaggtactgctgggccggaaaggtggtggtcgtacgctgtgtagccaacaccatttctgccaatttctacagaaacgaggttaaagtacctggctttcctccgcaagcggaatgaacaccaacccttcccgaaggcccctaccacttcgggggcccccagccgcatcttcgtggcggacccgtgcgaggtatgcatgccccacaaaacccagccgaggccaggccgctctggacccgtctcaaggtgtttgacggcaatccccccgccctacgacaagaaaaagcgggatggtggttcctgctgccctcaaggtcgtgcgttttgaagcctacaagaaagtttgccctatttggggcgcctgggctcccgaggttgggctggaagtaccaggcagtgacagccccccctggaggagaagaggaaagagaaagccaagatccactaccggaagaagaaacagctcatgaggctacggaaacaggccgagaagaacgtggagaagaaaattgacaaatacacagaggtcctcaagacccacggactcctggtctgagcccaataaagactgttaattcctcaaaaaaaaaaaaaaaaaaaagggcggccgct

SEQ ID NO: 137953 - DNA, 380 bp, Homo sapiens
gctccttctccctggcctcaatcatcttggccaatttccaagacagtacagcacttgctaggaacagtggagtaagggccaaaataacggttgtaaggaagccataggggtcctttgcagcccattccacaacatactcagcccaagcctttaaaactggggcttatgcttgagtagtgatcccttaactttgtcctggtgttattagtgacccaatcacgacttcagatgacccttggtagtctgtcttcttgagttctactgtacacatctgagagacggtttaaattctgtacaattggcctatcggggctgcagacccacggaggccacgttcactcctgcccgtcggccttggcaagcgcgggccccttgtcgcg

SEQ ID NO: 137954 - DNA, 500 bp, Homo sapiens
agacaacccccatcccctgctgtagcgggacagttggagggtcatgggtgggtgaagtgtttggctgagggaaactcagaccaaagagcagcggcaagaaagcagttgggtccccacaaaacgcccgaagtcaaggtgagggtcacacaacgactcttgacgattccggcgagttcatcctggtgcacatcccactccatgcctctctcttctggttggacaatagttacatccttacgaaaaggaggcaagctgctgggccttggtggatccactcaaccttgttaccaagggacatgccgccatgctatgtgaaaaggggggttttgttgtttgtttttaatttaagtatctaattcgtttcacgaaagaatgatcaataccggcccagagtaaacttgataagtaattaaactgtcagggcatagagttcccataaaggtgcttgttctttcaatacacaaataaagggatgcaaaagtcaaaaaaaaaaaaaaaaa

SEQ ID NO: 137955 - DNA, 2286 bp, Homo sapiens
ctatacttccttattggtatagaggctgtaagacgcagcaatttgtctttcacttcggagaggatatctcgacactgccctgagcactggacctctaaaaactttactaatgtgactgttctctgaatcttcagtgtttatctcccatcctctggcattcaggtatcttaccaaggccttcaccatactagctatctcttcctcatcctgtcctataagtaggatgttgtcaataaactggatcagtgtggtgttcttgacttcgggcgttttgtggggacccaactgctttcttgccgctgctctttggtctgagtttccctcagccaaacacttcacccacccatgaccctccaactgtcccgctacagcaggggatgggggttgtcttccgatcgacctcggggggcaaaggcaaaagtccctagctgcttcggaaccgctcctcgagtcctgaagccgctccacgcctcctcgcccaccacttggtccccgcaggacgtggcagtctcgggctccagcgcccggctggcggctcgggtcgcctgtgggcgggacgcaaaggccgcgacttccgccttcctgcttccggtctggcggtgagtggggagtgggatccgatcccgtggggctatgtaggggaagttggtggctgcagctgccagtggttttctcctggtgtccagcagaaacggcggcggcgcaaggtgtggctgggccaaccgcaggatctcccaggaccctccgctctggccgacaaggggcccgcgcttgccaaggccgacgggcagagagtgaacgtggcctccgtgggtctgcagccccgataggccaattgtacagaatttaaaccgtctcgtcagatgtgtacaggcataacccaagaatacagactaccacgggtcatctgaagtcgtgattgggtcactaataacaccaggacaaagttaagggatcactactcaagcataagccccagttttcattaagactgctgtgaagatgtttgatataaaggcttgggctgagtatgttgtggaatgggctgcaaaggacccctatggcttccttacgaccgttattttggcccttactccactgttcctagcaagtgctgtactgtcttggaaatttggccaagatgattgaggccagggagaaggagcaaaagaagaagcaaaaacgccaagaaaacattgcaaaagctaaacgactaaaaaaggattgaaggactgaacaggctttgcaaccagaggaaaatcatttggaaaattacacagcttttggaagaatccactaaagtttcttctttggatttcttgacagtatgatttagtaaatgaaatttgaccaaatggaagaatcatgttagttctgacctcaatactatagtaacttttaggcgtgggtgtagaagtttataggtttctattgacagttattgtaaattagcatttactgtggtacaaattctttataactgacttagtcatttgccgcttagcaggttatatactgaaatgaaaacatctttgtgggaaaaagtgactttagattatgaactcaattcaaatgaactctatttaaaatggggtcctattttggacaaaggaaattaagaatgtaaaagtcagaacagtcttgaggtaaaaagtgtgctttggcttaaaagggatacagtatattaattacatcttttattattattgggtatttcttagaatcatttctggctttctcaaaacaaaataatattaatgagcacttctatttgctgcatttttcttattacagcctttgagacagctggtaattataagtcattttccattttttaaaacataattttataaagaattctcttatctcgactatgtagaataccacctactgggacagaacaatttttgtactcacaaacactgccattttctttagaggatggcttgagaggagtaacactatggtttaaagcttgcagtaaaaatgccaaacactgtagtaccttggaacccagtttattcttgtgctaagcagaactgtaaaatagttaaaatgtcttatcaagtaattcgccgattacaaagacaccatttgttttttatttcattctttgttttaactcatgtggtagtgatatttaatactttctgatcaaacaggttcaaagtaaaacgttaaatttcacatttcttttaaagaactcttaaagtgtaacagttacgccatacttcataagtggtaaagaaaggtataaaatttggaaacattttgttgggcatagta

SEQ ID NO: 137956 - DNA, 1220 bp, Homo sapiens
  misc_feature (1)...(1220): n = a,t,c or g
atgtcttacaaggtcacccaagaaatcagcaaagaattgaggtggatttcagcagttctagtcacatgggacttgagaggggagactggcaccagggtctgcattgcaatgggagtgtcaaggatgcagtatagtataatggctaagattgtaggcagtggaaacaatctggagttgaatcctgccgctgacaaactggataatcttggggcccagtgcggactcgcctccgtgaaggtgagcgcccgggctgcgccaccctttgccccggccaccctcgtggcgctgctggaggcccgggctgcggagctgccgctgcccccgcccccgggagtctctctgcgctgcgtggaggcccctgatgtcaggggccggggaagagggggtggagagggctcgggcgtgacgcggctcctcctgccgccaccgccaccctctggggcgtccttcctgcagcgaggacgcccagtcactccggcgctgttccaggccgggtgggggagggcggccgaccggccggggcctgcggacctggccggcggcgcgggcgggaggtcggggggaaggaggatgcttcctcgttccccaggtgctgcccttcgggaccgcagcgctctggaggatgggatagtggagggatacggcccacttggagagcccgaagagggaagtagaagctctttcctggagagtaaggtggcttttaattactgtaacaaagttgctcctttggactttgggaatgaggcagtggagcagtgtcacaccatgtctgaccggaaggcagtgatcaagaacgcagacatgtctgaggacatgcaacaggatgccgttgactgcgcccacgcaggccatggagaagtacaatatagagaaggacattgctgcctatatcaagaaggaatttgacaagaaatataaccctacctggcattgtatcgtgggccgaaatttttggcagctacggtccnacacaccgaagacaagcacttcatctatttttacttgggtcaagttgcaatccttcctcttcaagtcaggctaggtgggccatggtgaaggtgtcagtggcggcggcagcgatggcaagcaggcggcgttgctgggactgttttgcactggagccagcatcaggaatgtcctctccaatgggctngtgctactgcatggactgtatactcgatttcatgtgtatgtcgcagtaaacaaaaccaaacctc

SEQ ID NO: 137957 - DNA, 427 bp, Homo sapiens
ggcacgagggttgaggaggagggagcgcttgagggggactggcctggcgtgcactccgcacctcggggacattattgcgcgtggaacggctgcttttggaagattctgatgctcacagtaccacctcaagtgcctccccagctcaatctccttgttacagtaaccagtcagatgacggctcagatacagagatggcttctggttctaacagaacaccagttttttcctttttagatctcacttactggaaaagacagaagatatgttgtgggatcatctataaaggccgttttggggaagtcctcattgacacacatctcttcaagccttgctgcagcaataagaaagcagctgctgagaagccagaggagcaggggccagagcctctgcccatctccactcaggagaggcgactgaggtttttatg

SEQ ID NO: 137958 - DNA, 780 bp, Homo sapiens
atgactagcaagaagagtattccttcagttggatatgaagtgtttgaaaggagatatgatcaacgctctaagaatggaaacaggcaggtgagggaggcggcggccagcgacgcggttcacctcctgctgtcctcgccctcgccccggcgagctgcccccgacgcgagatgtcttatttaccaacaaatccaccagggagcattcttatttgctggctcggcgtctctctcagcagtcaccggagtgccggagggggaagcgcgatttacggaagactattacccagaagaaaagatgtttgtttttcacaagccaaagatgtaccgaagtatagagggctactgtatttgcagagctaagtcctccagttctcgattcactgacagtaaacgctatgaaaaggacttccagagctgttttggattgcatgagactcgttcaggagacatctgcaatgcctgtgtcctgcttgtgaaaagatggaagaagttgccagcaggatcaaaaaaaaaaactggaatcatgtgtaaccagtcagatgacggctcagatacagagatggcttctggttctaacagaacaccagttttttcctttttagatctcacatactggaaaagacagaagatatgttgtgggatcaactataaaggccgttttggggaagtcctcattgacacacatcccttcaagccttgctgcagcaataagaaagcagctgccgagaagccagaggagcaggggccagagcctctgcccatctccactcaggagtggtga

SEQ ID NO: 137959 - DNA, 1114 bp, Homo sapiens
  misc_feature (1)...(1114): n = a,t,c or g
atctttctagacaaggcagtcgatgaggagggagcgcttgagggggactggcctggcgtgcactccgcacctcggggacattattgcgcgtggaacggctgcttttggaaggcacaacttcctgaatggaccatgactcccaccaaagatccctgtctctgattcaccaaacagccttcaacccctgaaaccaggacgagaagttgacaacatctgagtggacagctaattgacctaagacttcagaccaggcctactattgcccagaagaaaagatgtttggttttcacaagccaaagatgtacccgaagtatagaggggtgctggtatttcaggagctaagtcctccagttctcgattcactgacagtaaacgctatgaaaaaggacttccaagagctgttttggattgcatgagactcgtttcaggagacatcttgcaatgcctgtgtcctgcttgtgaaaagatggaagaagttgccagcaggatcaaaaaaaaaactggaatcatgtggtagatgcaagggctggacccagtctaaagactacattgaaaccaaagaaagtgaaaactcttatctgggaacaggattaaaaggcacccagatcagtaaactgcagaaaggaattttaaacgtcaataattcctgatgctcacagtacccaccctcaagtgccctcccccagctcaatcccccttgtttacagttaaccagttcagatggacgggctcagatacaggggtgggcttctcnggttctaaccggaaccacccagttttttcctttttagatctccacttactggaaaagacagaagatatgttgtgggatcgatctataaaggccgttttggggaagtcctcattgacacacatctcttcaagccttgctgcagcaataagaaagcacgctgctgagaagccagaggagcaggggccagagcctctgcccatctccactcaggagtgggtgactgaggtttttatgtagaaggggaacaaaaaaaaatatctgaattttgaaaaaccacaaagctacaaacttgaccctcttttttttttgagacggagttttgctccttgttacccaggctggagtgcagtggcgtgatct

SEQ ID NO: 137960 - DNA, 1090 bp, Homo sapiens
gtgcctactgcctctcagtgtctgacttcgacaacgccaagggcctcaacgtgaagcactacaagatccgcaagctggacagcggcggcttctacatcacctcccgcacccagttcaacagcctgcagcagctggtggcctactactccaaacacgccgatggcctgtgccaccgcctcaccaccgtgtgccccacgtccaagccgcagactcagggcctggccaaggatgcctgggagatccctcgggagtcgctgcggctggaggtcaagctgggccagggctgctttggcgaggtgtggatggggacctggaacggtaccaccagggtggccatcaaaaccctgaagcctggcacgatgtctccagaggccttcctgcaggaggcccaggtcatgaagaagctgaggcatgagaagctggtgcagttgtatgctgtggtttcagaggagcccatttacatcgtcacggagtacatgagcaaggggagtttgctggactttctcaagggggagacaggcaagtacctgcggctgcctcagctggtggacatggctgctcagatcgcctcaggcatggcgtacgtggagcggatgaactacgtccaccgggaccttcgtgcagccaacatcctggtgggagagaacctggtgtgcaaagtggccgactttgggctggctcggctcattgaagacaatgagtacacggcgcggcaaggtgccaaattccccatcaagtggacggctccagaagctgccctctatggccgcttcaccatcaagtcggacgtgtggtccttcgggatcctgctgactgagctcaccacaaagggacgggtgccctaccctgggatggtgaaccgcgaggtgctggaccaggtggagcggggctaccggatgccctgcccgccggagtgtcccgagtccctgcacgacctcatgtgccagtgctggcggaaggagcctgaggagcggcccaccttcgagtacctgcaggccttcctggaggactacttcacgtccaccgagccccagtaccagcccggggagaacctctaggcacaggcgggcccagaccggcttctcggctt

SEQ ID NO: 137961 - DNA, 1699 bp, Homo sapiens
atgcgcccctgcgccctctgctggcgctctgcggtcaccgcagccccggagagggccgttttggagagccgcggcggtgccccagacactccacgcagacttcactccttcactcagacccgttcactctccccacaggcacacgctgggccacacacacggctacacccccgccagggacacgcacacatgcggggtggaggcagggtcacagacacccgcagacacatccccaacgcagatgtacccagatacaaactcacatgcacaggtggagtgaccacctttgtggccctctatgactatgagtctaggacggagacagacctgtccttcaagaaaggcgagcgggctccagattgtcaacaacacaaaaggagactggtggctggcccactcgctcagcacaggacagacaggctacatccccagcaactacgtggcgccctccgactccatccaagctgaggagtggtattttggcaagatcaccagacgggagtcagagcggttactgctcaatgcagagaacccgagagggaccttcctcgtgcgagaaagtgagaccacgaaaggtgcctactgcctctcagtgtctgacttcgacaacgccaagggcctcaacgtgaagcactacaagatccgcaagctggacagcggcggcttctacatcacctcccgcacccagttcaacagcctgcagcagctggtggcctactactccatgtcccactgcccgcctttctctgcagctggctggtatggagggggctgccctgaggagccccagaaacacgccgatggcctgtgccaccgcctcaccaccgtgtgccccacgtccaagccgcagactcagggcctggccaaggatgcctgggagatccctcgggagtcgctgcggctggaggtcaagctgggccagggctgctttggcgaggtgtggatggggacctggaacggtaccaccagggtggccatcaaaaccctgaagcctggcacgatgtctccagaggccttcctgcaggaggcccaggtcatgaagaagctgaggcatgagaagctggtgcagttgtatgctgtggtttcagaggagcccatttacatcgtcacggagtacatgagcaaggggagtttgctggactttctcaagggggagacaggcaagtacctgcggctgcctcagctggtggacatggctgctcagatcgcctcaggcatggcgtacgtggagcggatgaactacgtccaccgggaccttcgtgcagccaacatcctggtgggagagaacctggtgtgcaaagtggccgactttgggctggctcggctcattgaagacaatgagtacacggcgcggcaaggtgccaaattccccatcaagtggacggctccagaagctgccctctatggccgcttcaccatcaagtcggacgtgtggtccttcgggatcctgctgactgagctcaccacaaagggacgggtgccctaccctgggatggtgaaccgcgaggtgctggaccaggtggagcggggctaccggatgccctgcccgccggagtgtcccgagtccctgcacgacctcatgtgccagtgctggcggaaggagcctgaggagcggcccaccttcgagtacctgcaggccttcctggaggactacttcacgtccaccgagccccagtaccagcccggggagaacctctag

SEQ ID NO: 137962 - DNA, 1484 bp, Homo sapiens
atggatccgggcgccgcgctgcagaggcgggccgggggcggcggcggtctgggcgcgggctccccggcgctgtcgggcggccagggccgccggaggaagcagccccccaggccggccgacttcaagttgcaggtcatcattatcggctcccgcggcgtgggcaagaccagcctgatggagcgcttcaccgacgacaccttctgcgaggcctgcaagtccaccgtgggtgtgtgacttcaaaatcaaaactgtagagctaagaggaaagaaaattagattacagatctgggacacagcaggtcaggagagattcagcagcattacctcagcttattacagaagtgccaaggggatgatattagtatatgatatcactaagaaggagacatttgatgatttgccgaaatggatgaagatgattgataagtatgccttcagaagatgcagatcttctcttagttggaaataagttggactgtgaaacggacagagaaatcaccaggcagcagggggaaaagtttgcacagcagatcactgggatgcggttctgtgaagcaagtgccaaggataacttcaatgtggacgagatatttttgaaacttgtcgatgacattctgaaaaagatgcctctggatattttaaggaatgagttgtccaatagtatcctgtcgttacaaccagagcctgagataccgccagaactgcctccaccaagaccacatgtccgatgctgttgatttcctactttggagacaaagtggaaatgattcctggaaaggggaaaaaacgttctattctgcactacaatcattttgacaattttccctttcgcactttgtaattccaagtcagggctattacactaacttgtaaatatgccatatatgcaatcctgggtaagttttggttataagttacctatttccctccaaattattatatttcattcattacccccagtgtctagtgtccatacactgggaaccctggtacttctaatatgaaggaatggggagaaatgaaaggtattaatgtttcttgaaaataaattaatataaattgtccttattaattatattatgaggaccagaagatattcctgataagagagaaccgtggtgctttgccttaccgttttaaagaaaaatttgtaaaactaaagactttttggaaaaaaagccattcttaagtgctttttctttatttacaagacatttcccccagtggtagcatctgaagtattggagtgtttctgccacgaagcaaagctccattcatggccgtcatggaaggttatttattaatgttacataatggtagaatattactagttagagggttggatttgacttggtcctaaggccacagaatctctctcatggcttcctaagggatgtacctttatgcttttaagaactacaaagattcaataaagaaagaaatgtttttgaaactatagaaaaagattttaaaacacgctgtat

SEQ ID NO: 137963 - DNA, 493 bp, Homo sapiens
  misc_feature (1)...(493): n = a,t,c or g
gtgggcgnnccatcgagncccttngnattgtagatcactagtccagtgcgggggaattcgcagaatcgacaccaaccagcatcatgtccatgacactggggtactgggacatccgcgggctggcccacgccatccgcctgctcctggaatacacagactcaagctacgaggaaaagaagtatacgatgggggacgctcctgactatgacagaagccagtggctgaatgaaaaattcaagctgggcctggactttcccaatgtggggagacagaagaggagaagattcgtgtggacattttggagaaccaggctatggacgtctccaatcagctggccagagtctgctacagccctgactttgagaaactgaagccagaatacttggaggaacttcctacaatgatgcagcacttctcacagttcctggggaagaggccatggtttgttggagacaagatcacctttgtagatttcctcgcctatgatgtcctn

SEQ ID NO: 137964 - DNA, 432 bp, Homo sapiens
  misc_feature (1)...(432): n = a,t,c or g
aaanccgtccgctggggtactggaacatccgcgggctggcccattccatccgcctgctcctggaatacacagactcaagctacgaggaaaagaagtacacgatgggggacgctcctgattatgacagaagccagtggctgaatgaaaaattcaagctgggcctggactttcccaatctgccctacttgattgatgggactcacaagatcacccagagcaacgccatcctgcggtacattgcccgcaagcactaaagccagcctgaccttccttcctgttagtggttgtgtctgctttaaagggcctgcctggcccctcgcctgtggagctcagccccgagctgtccccgtgttgcatgaaggagcagcattgactggtttacaggccctgctcctgcagcatggtccctgccttatgcctacctgatggaag

SEQ ID NO: 137965 - DNA, 263 bp, Homo sapiens
  misc_feature (1)...(263): n = a,t,c or g
ctgaatgaaaaattcaagctgggcctggactttcccaatctgccctacttgattgatggggctcacaagatcacccagagcaacgccatcttgtgctacattgcccgcaagcacaacctgtgtggggagacagaagaggagaagattcgtgtggacattttggagaaccagaccatggacaaccatatgcagctgggcatgatctgctacaatccagaatttggcttggngaagatctctgcctacatgaagtccagccgctt

SEQ ID NO: 137966 - DNA, 416 bp, Homo sapiens
tgtgtggggagacagaagaggagaagattcgtgtggacattttggagaaccagaccatggacaaccatatgcagctgggcatgatctgctacaatccagaatttgagaaactgaagccaaagtacttggaggaactccctgaaaagctaaagccctttgaagcctcagctacccactatccttcgtgaacatcccctcccatcattacccttccctgcactaaagccagcctgaccttccttcctgttagtggttgtgtctgctttaaatgcctgcctggcccctcgcctgtggagctcagccccgagctgtccccgtgttgcatgaaggagcagcattgactggtttacatggccctgctcctgcagcatggtccctgccttaggcctacctgatggaagtaaagcctcaaccac

SEQ ID NO: 137967 - DNA, 264 bp, Homo sapiens
  misc_feature (1)...(264): n = a,t,c or g
ggtattgggacatccgcgggctggcccacgccatccgcctgttcctggaatacacagactcaagctatgaggaaaaaaagtacccgatgggggacgcccctcgcctgtggagctcagccccgagctgtccccgtgttgcatgaaggagcagcattgactggtttacaggccctgctcctgcagcatggtccctgccttaggcctacctgatggaagtaaagcctcacccccnnnnnnnnnnnnnnnnnnnnnnnnnnnnnnnnn

SEQ ID NO: 137968 - DNA, 481 bp, Homo sapiens
cccccggtctgtctgcagaatccacagcaaccagcaccatgcccatgacactggggtactggaacatccgcgggctggcccattccatccgcctgctcctggaatacacagactcaagctacgaggaaaagaagtacacgatgggggacgctcctgattatgacagaagccagtggctgaatgaaaaattcaagctgggcctggactttcccaatctgccctacttgattgatgggactcacaagatcacccagagcaacgccatcctgcggtacattgcccgcaagcacaacctgtgcggggaatcagaaaaggagcagattcgcgaagacattttggagaaccagtttatggacagccgtatgcagctggccaaactctgctatgacccagattttgcactccctgaaatgctgaagctctactcacagtttctggggaagcagccatggtttcttggggacaagatcacctttgtgga

SEQ ID NO: 137969 - DNA, 714 bp, Homo sapiens
atgcccatgatactggggtactgggacatccgcgggctggcccacgccatccgcctgctcctggaatacacagactcaagctatgaggaaaagaagtacacgatgggggacgctcctgattatgacagaagccagtggctgaatgaaaaattcaagctgggcctggactttcccaatgggatgctggggagcctggtggcccaactgagcttcgccggtttcccatccatccagctgccctacttgattgatggggctcacaagatcacccagagcaacgccatcttgtgctacattgcccgcaagcacaacctgtgtggggagacagaagaggagaagattcgtgtggacattttggagaaccagaccatggacaaccatatgcagctgggcatgatctgctacaatccagaatttgagaaactgaagccaaagtacttggaggaactccctgaaaagctaaagctctactcagagtttctggggaagcggccatggtttgcaggaaacaagatcacttttgtagattttctcgtctatgatgtccttgacctccaccgtatatttgagcccaagtgcttggacgccttcccaaatctgaaggacttcatctcccgctttgagggcttggagaagatctctgcctacatgaagtccagccgcttcctcccaagacctgtgttctcaaagatggctgtctggggcaacaagtag

SEQ ID NO: 137970 - DNA, 381 bp, Homo sapiens
tcccgatattcccgggtcgacgatttcgtcaaagtctgagccccgctccgctgatgcctgtctgcagaatccgcaccaaccagcaccatgcccatgactctggggtactgggacatccgtgggctggcccacgccatccgcttgctcctggaatacacagactcaagctatgtggaaaagaagtacacgctgggggacggtaatggcaccctcgtgtccgggccctgcccactcacgctgagttggcaccaagcaacccatggtggccacctgtggctgcctctgcaggcctcccctgctggagctgcaggctgtcccttccctgagccccgaagccagtggctgaatgaaaaattcaagctgggcctggactttcccaat

SEQ ID NO: 137971 - DNA, 1342 bp, Homo sapiens
ggggctgaacactcggaggtggcggtggatcttactccttccagccagtgaggatccagcaacctgctccgtgcctcccgcgcctgttggttggaagtgacgaccttgaagatcggccggttggaagtgacgaccttgaagatcggcgggcgcagcggggccgagggggcgggtctggcgctaggtccagcccctgcgtgccgggaaccccagaggaggtcgcagttcagcccagctgaggcctgtctgcagaatcgacaccaaccagcatcatgtccatgacactggggtactgggacatccgcgggctggcccacgccatccgcctgctcctggaatacacagactcaagctacgaggaaaagaagtatacgatgggggacgctcctgactatgacagaagccagtggctgaaatgaaaaattcaagctgggcctgggactttcccaatctgccctactttgattgatggggctcacaagatgcacccagaggcaacgccattcctgtgctacatttgcccgcaagcacaacctgttgttgggggagacaggaaggagggagaagatttcgtcttgggacattttgggagaaccaggctatggacgtctccaatcagctggccagagtctgctacagccctgactttgagaaactgaagccagaatacttggaggaacttcctacaatgatgcagcacttctcacagttcctggggaagaggccatggtttgttggagacaagatcacctttgtagatttcctcgcctatgatgtccttgacctccaccgtatatttgagcccaactgcttggacgccttcccaaatctgaaggacttcatctcccgctttgaggtttcctgtggcataatgtgatggtcaattttctgcatcaacttgactgggctaagggatgctcagatggcaggtaaaatcattgtgcttgtgagggtgtttccagaagagatttgcctttgaatcagaagacagcaaagatttccttcagcaatgaaggaggcatccaccaaactgtcagggcccagagagaagaaaaagacaggaagggtgaatttgacctctctgactgggacatccatctctgcctatcctgggacctccacactcctggttctctggccttcagacttgatcagggactaacaccatcgcctcccacccccacctttgttctgaggcctttagcctctgaatgataccactggctttcctgcttctctatcctgcagtcggcagatcatgggacttcttcactccaaaattgtgtgagccaattcccataacagatagataaatttataaataaacacacaaatttcctac

SEQ ID NO: 137972 - DNA, 1276 bp, Homo sapiens
atagataccgtatgatttgattaacctcagcttggcacgaggcctcgtgccacgctccgctgatgcctgtctgcagaatccgcaccaaccagcaccatgcccatgactctggggtactgggacatccgtgggctggcccacgccatccgcttgctcctggaatacacagacgtcaagctatgaggaaaagaagtacacgatgggggacgctcctgaattatgacagaagccagtggctgaatgaaaaattcaagctgggcctgggactttcccaatctgccctacttgattgatggggctcacaagatcacccagagcaatgccatcctgcgctacatttgcccgcaaggcacaacctgtgtgggggagacagaaggagggagaagatttcgtgttgggacattttggagaaccaggttatgggataaccacatggagctggtcagactgtgctatgacccagattttgagaaactgaagccaaaatacttggaggaactccctgaaaagctaaagctctactcagagtttctggggaagcggccatgcttcttggggagacaagatcacctttgtagattttctcgtctatgaatgtccttgagacgaaaccaagtatttgagcccaagtggcttggacgccttcccaaaatctgaaggacttcatctcccgatttgaagggcttggagaagatctctgcctacatgaagtccagcccgcttcctcccaagaacttgtgttctcaaagatggctgtctggggcaacaagtagggctttgaaggcccagggaggtgggagtgaggagcccaatacttcaagcttgctggcccaaggctgttgcagcgcagtgggaacttcttgcatcccaagcaacctgcctccttcgttcccttttcttcctgttttattcccaatcttttaatcccaagacttcaattgtccctcttcactcccccctaaacccctgtccccatgcaggcccctttgaagcctcagctacccacttatccttcgtgaacatccccctcccaacactacccttccctgcactaaagccagcctgacctttccttcctgtttagtgggttgtgtctgctttaaagggcgctgcctggcccctcgcctgtggagctcagccccgagctgtccccgtgttgcatgaaggagcagcattgactggtttacaggccctgctcctgcagcagtggtcccctgccttaggcctacctgatggaagtaaagcctcaaccacatttaaaaaaaaaaaaaaaaaa

SEQ ID NO: 137973 - DNA, 431 bp, Homo sapiens; identical to SEQ ID NO: 136360

SEQ ID NO: 137974 - DNA, 328 bp, Homo sapiens
ggcaggccagatggggctcaggctgtcggggcgctcacacctggcgctttggctgtcgtaggtgcggctgactgcacagaagtcactggggcctttgacttctacacactccctgtggggctccgcactgtgcccgtcaccgagagccagtgggctctgtatgtggatgtgatccgtgtgaacagctactactcttggtatcgcaactacgggcacctggagttgattcagctgcagctggccgcccagtttgagaattggtgtaagacatcacaatcccattattcagagcgcgtatggagtggaaacgcttgtagggtttcaccag

SEQ ID NO: 137975 - DNA, 490 bp, Homo sapiens
  misc_feature (1)...(490): n = a,t,c or g
tgaggggnnnnnattgannnatcgtagtccctagtccatgtggtggaattcnnnnnnnnnnnnnnnnnnnnnnnnnnnnnnnnnnnnnnnnnnaactcaagctccatgaggagatgtttcattgtcgagagcagtcatgatggcctgcactccacacaatgcaacagagtgaaagagcaggttctgcttctttggtgtagtcctgaagcttcctaagaaacttcacatcaggtgatggataggagcaaccctgtaaaaccagccttagactatttttcaaacagatggtgattgctcacaccaaagccttggacccctcccagcctgtgacctttgtgaccaactccacctacgcagcaaacaagggggctctgtatgtggatgtgatccgtgtgaacagctactactcttggtatcgcaactacgggcacctggagttgattcagctgcagctggccgcccagtttgagaattggtgtaagacatcacc

SEQ ID NO: 137976 - DNA, 939 bp, Homo sapiens
cagtatgcattgtggggcattcccgtttgtgtgacccaggtcatgtccctccctaagccctggtctctcttgcctcctgcagggctggtgaattaccagatctccatcaagtgcagtaaccagttcaagttggaagtgtgtcttttgaatgcagaaaacaaagtcgtggacaaccaggctgggacccagggccagtcttcctgctgtagggcaggccagatggggctcaggctgtcggggcgctcacacctggcgctttggctgtcataggtgcggctgactgcacaggacagagaggatgggagggtgtctgagcctttcccggactgacggaacctgtgtcttctctcttttgtggacaggatggtgattgagcccccacagcatgtgagtactgagtcatgtggtcttgtggttgctgaatgggctctgctgctctggtcctaggctctgtatgtggatgtgatccgtgtgaacagctactactcttggtatcgcaactacgggcacctggagttgattcagctgcagctggccacccagtttgatttggttttttattcttgcgatagtttactgagaatgatgatttccaatttctccctggctgtctttaccctagcatcagtgagtcctgcagtcactacatcccccagtgaggacagatattttggtcaccatcaagtggatctttatttttatctaacatttacaattctgccagttcttactcgtaattctctttgccttgaatcccaggatccacctctgatgttcagtgaagagtaccagaaaagtctgctagagcagtaccatctgggtctggatcaaaaacgcagaaaatacgtggtaggaaagctcatctggaattttgccgatttcatgactaaccagtgtaagcagcagtttagcgcatgggataatgtacccgtcctcatt

SEQ ID NO: 137977 - DNA, 687 bp, Homo sapiens
atgtccccggcagggctggtgaattaccagatctccgtcaagtgcagtaaccagttcaagttggaagtgtgtcttttgaatgcagaaaacaaagtcgtggacaaccaggctgggacccagggccagctgaagggcaggccagatggggctcaggctgtcggggcgctcacacctggcgctttggctgtcgtaggtgcggctgactgcacagaagtcactggggcctttgacttctacacactccctgtgggcgtccgcactgtgcccgtcaccgagagccagtggcccattcactcctgtgttcaagagctatttcaggaagtgaacctcatttctggcagtgttcagtccagtgacctcagctctgtgtacccggcagggtggctacgcctctgggggagttggattcaggggatggtgattgctcacaccaaagccttggacccctcccagcctgtgacctttgggaccaactccacctacgcagcagacaaggcggctctgtatgtggatgtgatccgtgtgaacagctactactcttggtatcgcaactacgggcacctggagttgattcggctgcagctggccgcccagtttgagaattggtgtaagacatcacaatcccattattcagagcgcgtatggagtggaaacgcttgtagggtttcaccaggtaagcggtgttga

SEQ ID NO: 137978 - DNA, 629 bp, Homo sapiens
tggagcaggaacacctctgcccaatcccccatagtcctgatgagctcccagaggaggcccgagagcgtgaagcaggtctgccacatctacaacctgaggtccgtgaccaccttcaggtagcacttgttggctgtgtggatgtcctcatcattggggttgagtttgaaggtgccctgggcccactcctcaaccacactggttagtcatgaaatcggcaaaattccagatgagctcttccaaccacgtattttctgagtttttgatccagacccagatggtactgctctagcagacttttttggtagtcttcactgaacatcagaggtggatccttccttctttcattccatcattcattctctcatcaaatcctggcccctccagattcttctctcaaggagccctgacctggctgggcatgagacagtatggtcaccccagggggaagagccctacggaaggggcagacacgagaataggggccttgggaatccagccggaggtgggattggatttggggaggacctgacaggcagaaggaaccacctgagcctgaaggccaggaaatggagccttttccaggaagtgagggctgcaggggacctcttgaccaccctaggcccgtcctg

SEQ ID NO: 137979 - DNA, 822 bp, Homo sapiens
acccggtcacgtcaaccgcccaacggctgaggagtgcggcagcgcgccagaaactggcgggcagctccgcccgcggccgggatgcactaggcaaagccagctgggctcctgagtccggtgggtacttggagaacttactacgtctagctggaggattgtaaatgcaccaatcagcatgctgtgtctagctcaagaactcaagctccatgaggagatgtttcattgtcgagagcagtcatgatggcctgcactccacacaatgcaacagagtgaaagagcaggttctgcttctttggtgtagtcctgaagcttcctaagaaacttcacatcaggtgatggataggagcaaccctgtaaaaccagccttagactatttttcaaacagatggtgattgctcacaccaaagccttggacccctcccagcctgtgacctttgtgaccaactccacctacacagcagacaagggggctctgtatgtggatgtgatccgtgtgaacagctactactcttgggtatcgcaactacaggcacctgcaattgattcagctgcagctggccgcccagtttgagaattggtgtaagacatcacaatcccattattcagagcgcgtatggagtggaaacgcttgtagggtttcaccaggtaagcggtgttgaacttcctgcttgtgtattctctctgcctcagccaattaaactgtgttgtctctgcagtgcgttttatcacaagaacatgaccttcaagcacaagaacaccttgtactccaccactaaaaacagaaatgacatctaccttcactgcttccctatttctctccat

SEQ ID NO: 137980 - DNA, 718 bp, Homo sapiens
cgtgagtctggagaaacagttacggccatcccagccctggccaaggggaaaatgccggaagactccagggtgggaggaagcgcgtcccaaggcccaggatctgcgaggcgacttggggaaaacgcaggcaggacctgctgaagctcacacccgtggaccacccagactgcctgccgctacaggatgccctccgcatctcccaggacttctttccggcatcagtgtggacattgaccccactggactgcagtcacagtggactcccaaggggcaggatccacctctgatgttcagtgaagactaccagaaaagtctgctagagcagtaccatctgggtctggatcaaaaactcaaaaaatacgtggttggagagcttatctggaattttgccgatttcatgactaaccagtgtaagcggcagtttggctcatgggataatgtacccgtcctcattttttcaggttgccttgcccattctggacacttagattgtaagaatattggaaacaaagcgaggagctggtttaatccatgcaggttgcgttgaggatttcctaggaaaagtgagttgtgcttagtaagtaggaaagcagtcaggcccctgcttcccaaatacagtcaaaaagcaaacaggagagtctgctatagtgagatgtaaatggctagcttgcctttttcttgtctatttcatagccaaggaggaaggaaaaactggaaa

SEQ ID NO: 137981 - DNA, 699 bp, Homo sapiens
tttgaaatacagcttgtacttgcaatagtacttgggtgttgaacttgttaagagtgcatatcctttttttcagatccatctatcatttcctagttgtatgtggttgtgtgggttatttctcctcttttacattgattttctcaccttgatgtgtggagacaagccgttgatttgtaagaaacaccaattatcagcttccacttgtgcttcacaatctgctgaggcgctttaacacttttgatggaaattgagcaagggccttgtgatctctcctgtgccagccgtgaagtgtccactgcacgcagcttggcagaactattttcagggccataggatgttatggcagtattaataattatcaccaaataactattacagaaaacttcctcagaaagtaaaattagggtgaaggtatcacaggttggcactattttcattccctaccaagaaactgacacctgagaaagtatctctttgttgcaggtttttggaaatgggctatattttttgaatcataaccgatatgtactgccataaacaagaggatttcaagccagctccatctgggtcgaaaattattttatttattacttaagcttctcagccttttaccctcctctggaataatgagtgtatcccaaaagtaaatccataatgaggtccagtttttccttcatccttggactggttagtcatgaa

SEQ ID NO: 137982 - DNA, 1508 bp, Homo sapiens
ggtcgacgacgtggcagccgggatgcactaggcaaagccagctgggctcctgagtccggtgggtacttggagaacttactacgtctagctggaggattgtaaatgtaccaatcagcatgctgtgtctagctcaagaactcaagctccatgaggagatgtttcattgtcgagagcagtcatgatggcctgcactccacacaatgcaacagagtgaaagagcaggttctgcttctttggtgtagtcctgaagcttcctaagaaacttcacatcaggtgatggataggagcaaccctgtaaaaccagccttagactattttttaaacaggctggtgaattaccagatctccgtcaagtgcagtaaccagttcaagttggaagtgtgtcttttgaatgcagaaaacaaagtcgtggacaaccaggctgggacccagggccagctgaaggtgctgggtgccaacctctggtggccgtacctgatgcacgaacaccccgcctacctctactcgtgggaggatggtgattgctcacaccaaagccttggacccctcccagcctgtgacctttgtgaccaactccacctacgcagcagacaagggggctctgtatgtggatgtgatccgtgtgaacagctactactcttggtatcgcaactacgggcacctgggagttgattcagctgcagctggccacccagtttgagaattggtgtaagacatcacaatcccattattcagagcgcgtatggagtggaaacgctttgtagggttttcaccaggtaagcggtgttgaactttctgcttgtgtattctctctgggcagagatgccacttgcctcccccaccatgccatctctgaagaatattacagaccattttggagcatggtgaataagaaattttcaccttaggagttcagttgaatagtcatttttatatttgtgactgcaagtcactcttaggggctgtacttccttagtactggtagcattattatccaatggacttttatagctttcattaggttttcttttgtttttgttctttaaagaacgttttacttatcttagtatttcatttttcatctatattatgaggcagtaagagtcttctgtttttccaaagttgagactgctttatatttatttcgtattgtctacagctgtagtgttcaatacattagccactagccacatgtggttatttaaataagataaaataaaaattggccgggcgtggtgggtcacgccggtaatcccagcactttgggaggccgaggcgggcagatcattaggtcaggagatcgagaccatccttactaagacggtgaacccccatctctattaaaaatacaaaaaattagccgggcgtggtggcgggcgcctgcagtcccagctactcaggaggctgaggcaggagaatggcgtgaacctgggaggcagagtttgcagtgagccgagatggcgccactgcactccagcctggggacagagcgagactccatctcaaaa

SEQ ID NO: 137983 - DNA, 697 bp, Homo sapiens
tgtttcatagggcaaggatctagaggaggaggggaaagctgcctggctaatactacttagcgaagggattgtcatcagaagatttctgtgactcacactccttctctgatattttatggatatattggagccgcgctataaactacaccaagtacgtgcttattgatcagtattgatcgcctaaagcttggccagcttactgcacgacaatcacagtctcccatttgttcatcttttatgttaaaaagctcgcacatttgacttggaagcaatgtttgaacaaactcgaagaacagctgtggaaagaagttgcaaaacactggggctggtgaattaccagatctccatcaagtgcagtaaccagttcaagttggaagtgtgtcttttgaatgcagaaaacaaagtcgtggacaaccaggctgggacccagggccagctgaaggtgctgggtgccaacctctggtggccgtacctgatgcacgaacaccccgcctacctgtactcgtgggaggatggtgattgctcacaccaaagccttggacccctcccagcctgtgacctttgtgaccaacgtcacctatgcagcagacaagggggctctgtatgtggatgtgatccgtgtgaacagctactactcttggtatcgcaactacgggcacctggagttgattcagctgcagctggccacccagtttga

SEQ ID NO: 137984 - DNA, 1787 bp, Homo sapiens
gcaaagccagctgggctcctgagtccggtgggtacttggagaacttactacgtctagctggaggattgtaaatgcaccaatcagcatgctgtgtctagctcaagattttctccatccccttattttgggccagtggctgtcattacatatgagatgagtctcttgaagactacagatgaactcaagctccatgaggagatgtttcattgtcgagagcagtcatgatggcctgcactccacacaatgcaacagagtgaaagagcaggttctgcttctttggtgtagtcctgaagcttcctaagaaacttcacatcaggtgatggataggagcaaccctgtaaaaccagccttagactatttttcaaacaggctggtgaattaccagatctccgtcaagtgcagtaaccagttcaagttggaagtgtgtcttttgaatgcagagaacaaagtcgtggacaaccaggctgggacccagggccagctgaaggtgctgggtgccaacctctggtggccgtacctgatgcacgaacaccccgcctacctgtactcctgggaggatggtgattgcttcacaccaaaagccttggaccccctcccagcctgtgacctttgtgaccaactcccacctacgcagcagacaagggggctctgtatgtggatgtgatccgtgtgaacagctactactcttggtatcgcaactacgggcacctggagttgattcagctgcagctggccgcccagtttgagaattggtgtaagacatcacaatcccattattcagagcgcgtatggagtggaaacgcttgtagggtttcaccagggctcggtgaattaccatatctccgtcaagtgcagtaaccatgttcaagttggaaggtgtgtcttttgaatgcagaaaacaaagtccgtggacaaccaggctgggacccagggccagctgaaggtgctgggtgccaacctctggtggccgtacctgatgcacgaacaccccgcctacctgtactcgtgggaggatggtgattgctcacaccaaaagccttggacccctcccagcctgtgacctttgtgaccaactccacctacgcagcagacaagggggctctgtatgtggatgtgaccccgtgtgaacagctactactctgggtatcgcaactacgggccacctgggagttgattcggctgcaggccctgcagctggccgccccagtttgagatttggtgtaaggaccatcacaatcccattattcagagcgcgtatggagtggaaacgcttgtagggtttcaccagtctttcccagggaactccgatgaagtgttccaacaaaatgagcgagtgaaccaagaagaggatgacattagatccaggagatacaacagaggagataatctccaggatgcctgtgaagaaagatccctggatcccaggatgattataggacaagttgttcataatccagcaggccagaagacttccagggaaactcatttcaagatgaaaatggaccagccgcagtggctcacgcctgtaataccagcactttgggaggctgaggcgggcggatcacttgaggtcaagagtttgaaactagcctggccaacgtggcaaaactccatctctattaaagatacaaaaattagccaggcatagtggtgcatgcctgtagtcccagctacttgggatgctgaggcaggaagaattgcttgaacctgggaggcagagtctgcggtgaccgagatcatgccactgcactccagcctgggtgacagagccagactccgtctctact

SEQ ID NO: 137985 - DNA, 426 bp, Homo sapiens; identical to SEQ ID NO: 134865

SEQ ID NO: 137986 - DNA, 444 bp, Homo sapiens; identical to SEQ ID NO: 134867

SEQ ID NO: 137987 - DNA, 633 bp, Homo sapiens; identical to SEQ ID NO: 124004

SEQ ID NO: 137988 - DNA, 620 bp, Homo sapiens; identical to SEQ ID NO: 134868

SEQ ID NO: 137989 - DNA, 1587 bp, Homo sapiens
gctcggcagtccagcccggcccggtcatggtggtgggccgaggctgctcgcgccgcagcctcgccgcgctgggagccgcctgcgcccgccgaggcctcggtccagccctgctgggagttttctgccacacagatttgcggaagaacctgaccgtggacgagggcaccatgaaggtagaggtgctgcctgccctgaccgacaactacatgtacctggtcattgatgatgagaccaaggaggctgccattgtggatccggtgcagccccagaaggtcgtggacgcggcgagaaagcacggggtgaaactgaccacagtgctcaccacccaccaccactgggaccatgctggcgggaatgagaaactggtcaagctggagtcgggactgaaggtgtacgggggtgacgaccgtatcggggccctgactcacaagatcactcacctgtccacactgcaggtgggggtctctgaacgtcaagtgcctggcgaccccgtggccacacttcaggacatatttgttacttcgtgagtaagttgggagggctcggagccctttgtcgtgttcacaggtgacaccttgtttgtgggctggctgcggggaagttcttatgaagggactgcgggatgagatgtgtaaagctcttcttgaggtctttgggccggctccccccggacacagtaggcagcgcctccctgcgggccgggagagtctactgtggccaacgagtacaccatcaaacaaacctcaaagtttgcacgcccacgtggaaaccggcaatgcccgccatccgggaaaaagctgccctgggcccaaggagaagtacagcatcggggagcccacagtgccatccacccctggcagagggagtttacctacaacccccttcataaaagtgagggaagaaagacggtgcaagcagcacgacaggtgagacggacccggtgaccaccatgcggcccgtgcgcagggagaaggaccaagttcaaagatgccccgggacctgaggccgcccctgcaccttcagcaggatttggggattaaggctcttttagacagactcttctgagtggaggggcagagcggtcctgggacctaggagcaagcctggcccgaggcttgtggattgaagaggaaggctggcactgcacttcatagacacatgcatgccctccccccggaggggtcactggtctgttccgcaataactcgccagtacccctctgggatgcccacggaaagccaggccgtgtgtgaaggaggcagggcagactgctttctccggcttttcttctcccactacccccaccccagcgcaaagagtttgttctattgttcagcaaatattcttaggccagaatcttaaatgtttccattctataacaaacactgtgctcatttgtcaacatggagaaacctgatctctactaaaaatacaaaaattagctgggcgtggtggcatgtgcctgtagtcccagctactctggaagctgaggcacgagaatcgcttgaacatggaagcagaggttgcagtgagccaagatcatgccattgcactccagcctgagtgacagagtgagactttgtctca

SEQ ID NO: 137990 - DNA, 753 bp, Homo sapiens
atgcccggcctactcaaagacattattaagagaaaagagaactggaatgtggagcagagagtgctggatatttccacacggcaagagcaagagtttttcactgtgaagccacctgtggtccccggtctcagagcctctccaggcctgttccttctgctcattagggacaaataccgatactttgcttgtttgatgagagcccggtctgaagaacatacgaacgaaaaggatatgatgaaggccatccggctgctgaaggaggctgaggaagaattctggtaccatcagcatccacagccatgcatcttccctgactctcctaggggtacctcctatgtgacacacgagtgctacaaggtcccagaatggtgcttagatgactggcatccttctgagaaggcaatgtatcctgattactttgccaagagaaaacagtggaagaaactgcggagggaaagctggaaaagagaggttaagcagctgcaggaggaaacgccacctgccggaaaggaagaatgtaagctccatgaaggcatgaattatgttgtgctcacttgtatccctggtgccattaaacagtacctggcatgtagcaggtattcaaaaacaccaggtccccgcgacagctgttgggaggtgcagtcggacaatcaatgttggtggtggctggattccggggcccatggtcttgtcaccagcttcaagggtgtgatgatgacagtggaggctaccaccatggcagcagttttctga

SEQ ID NO: 137991 - DNA, 756 bp, Homo sapiens
ttcccgcgtcgacgatttcgtgctcggtcacccgcagcaggcgtgcagtttcccggctctccgcgcggccggggaaggtcagcgccgtaatggcgtccttggcgtcgggaccctacctgacccatcagcaaaaggtgttgcggctttataagcgggcgctacgccacctcgagtcgtggtgcgtccagagagacaaataccgatactttgcttgtttgatgagagcccggtttgaagaacataagaatgaacaggatatggcgaaggccacccagctgctgaaggaggccgaggaagaaattctggtaccgtcagcatccacagcccatacatcttccctgactctccttgggggcaccctccttatgagagataccgattgctacaaggtccccagaatggtgcttagatgactggcatccttctgagaaaggcaatgtatccatgattactttgccaagagagaacagtggaagaaactgcggagggaaagctgggaacgagaggtttaagcagcttgcaggaggaaactgccacctggtgggtccttttaacttgaagctttgccccctggcccgaaaaggaaggtgattttgcccccactgtggtggttatattgtgaccagacccccgggagcggcccatgttagaaagagagagacctcatctttcatgcttgcaagtgaaatatgttacagaacatggcacttgcccctaataaaaaatcagtgaaatggtaaaaaaaaaaaaaaaaaa

SEQ ID NO: 137992 - DNA, 510 bp, Homo sapiens
tcttcatccccttccttggcaccttccatttaagccaaacattagaaatgtaaagatatggcttgtttctggagtttccagtttggtgcattcgtcgagtcaggggggcttctttggacaatgctgtctgcagccctgggcccactcgaaggggaggcgatggactgtaggtctgtggagctcagcacagggctgtgccacggacttgggtgtcagtgaagtcacgctcattttcagacggaattctcctccccgatgtgaacaatgaaccgacggtgtcattttcataggattgtcctggagcccacggagatgcgggcttgggattcaacgtgatgctgagcggatcttttttgctttagaccaggcctcatgtggcttcactattcatccacacatagatgctgcagagacaccgaggggactcacaaatgcacctgtgcagaaggtgtcaacgtggacaatcgcaggcagagaaactcccatgagcccgtgtgccacatgcagtga

SEQ ID NO: 137993 - DNA, 1560 bp, Homo sapiens
atggtgcacctgggggccccggtaatggcgctgaatctccaggggaagcacctatgtgatagcacggcctcgtcactattgccgaggagaagggaatccaacagcgatgacacggcccgggaagacgcccgccagaaacggccagcgaacacagacatgcgaacccaggaactccaaacccgcgaaaccggccagggcacggcccgggaaaccgaggtggccaccccgctctccgggcccagcgcgggtgactcgccgccagccgccagtgagatgtcctgcggtcagctcgtcctcgctctcctcctcctcttcttcctcctcgtctggaacacagggaccaagtccggctcggggcgggtggcccggctcgcgcagctcgcccatgactgcgatgggggtctcgcccttggcctgtgctacgcggtgctcgatcagagatctgtggtccaggccactccacaagcgcccaaacccggcccggtgcagccgctgaccgtgcagggcctccagccagtccacgtggctcaagagagctcaggcaacgagatcaccgctagaaggcagagcgcgagatcccggccacgcggcgacaggaccgcgcccagccgccgcgtgacgcggagaccgaagcatgcgcccgagcgagcgcccatacagcagggcaacatagtgaccgtgcgtgccccaactgcccggaaaaaatggcggccggcggtcggcacacccacaggggcacacccggtgtgcaccgcaaaaggcaccggcggcaggccaacaccaacccaagcccacactaggtacaccgaacgtgaccctatccgaaactccgctgaactcaccggtagccgcccctgtaccgggcgcgaacgaagcggcgtcgaagcctgtaaagcggcggtgcacaatcttcttggcgcaaacggggtccagtgggctgatcattaactatccgctggatgacccaggatgccattgctgtggaagctgcctgcactaatgttccggcgttatttcttgatgtctctgaccagacacccatcaacagtattattttctcccatgaagacgatgtgtggcggacaccgctggttgcaccgactaacctcaatactaggtcgagccagccggcccggcatcaccgcgccggcgctgtgcggcgacaccacatgacggtggctcgtagcgcgacggcgcacgctcggttgcgccgacacgcaaagcctcaggggcgagagaggatcaaaccctcgggggcgagagagggatcagaacccctcgggggcgagagcgggatccgaacccctcgggggcgagagcgggatccgaacccctcgggggcgaaagcgggatccgaacccggccggattcccgagactcttcccaggtgcaaaggggaaacagaggcaaagtgctgggctcggggcaatttccatactgctcagggatcttggccaagaggggggcgttcaagatgggagcccctcgaagcccctgccctctcccaacaggcccatggcggagagctccctctaccggcagcggctagaagtcatcgct

SEQ ID NO: 137994 - DNA, 309 bp, Homo sapiens
gtggcttgtggtgcggcctcaccatacaggaacagggcagacgttagcgtgagtgatcactctcaatcccggggacccggtggccttagtctttcaggtggaacggtgtgcgacatgggaagaaaccaagcggacagctgacagttcttcttcagaggatgaggaggagtatgttgtggagaaggtgctagacaggcgcgtggttaaggacaagtggaatatctactgaagtggaaaggcttttctgaggagcacaatacttgggaccagaaaagatcatttgggcacagattcctgtggtgatttaat

SEQ ID NO: 137995 - DNA, 355 bp, Homo sapiens
gcttgtggtgcggcctcaccatacaggaacagggcagacgttagcgtgagtgatcactctcaatcccgggaaggagtccaggtcatcctgagaagagttcgcttgtccagagtccaagatgcagatttgttggatttctgtaagccactcgaagccacatattcatttctgatgacagctttacacttgtgctggaagaacacccactgtgacaactgctgcctatgtttagtctgtccaggagcctctaccaactagcatgtttgcagaaaaacctacactgttcttgttagcagctatgtaaatattagatctttctgagtttctcttctcagatctgccaatttctttgggg

SEQ ID NO: 137996 - DNA, 433 bp, Homo sapiens
cttagtgtggtggaattcttggcgttgcgcagaaggcggcggcggtggtggcttgtggtgcggcctcaccatacaggaacagggcagacgttagcgtgagtgatcactctcaatcccgggtaagtggcagacagtcttatctacccatagtaggtcttgaactgactccatttgggcccgttattgtgtgaaatgaatggacggcggggtggggggatagtgaaggggcagcggtgggtcgggccaaccaatagaagaacagggggcgggatgttttaatccccgtaggttctttggagctgtgcagccgaagactttgactggcttgtgtataggccaattgggtctgccttgagctgccgactgatcggcccttgggccatcggaatgtgggagacgggttttccccttctgagcagcgtctcactgagcc

SEQ ID NO: 137997 - DNA, 2347 bp, Homo sapiens
tcaatgctcttgttcgttgtcctctcttgtcggcgttctgcttttgttcccggcccgtgttggttctctgctgggttcggttcttctgcttcttcgggctttctcgtccttctgcatgttctttcccctcttcctttctctgtgtgtggctttcttgctctctttgttagcgtgccgctttcctcctttctctgtttcgtctctgtcttctgtgtgtctgcggtggcctgctcttccttgtcttggctcgctttcgcttgtcgctcggtagccgtccgctcctgttcctgtcgcgttctcgtgcgcttctccgtttctgtgtctccctgtattctttgttgtgtgctcttctggtgttttctcggcccttgggttccagcccgtggtgaagacggcaggagtaggcagtgaacctacggcgcctgcgtgttggcgggagtttgtcctagctttgcgcatgcgtagtgggcggagaaaaaaggtccggtcccaggattggttgcgcaggcgcagggaaggatccgttttggcgggcggttggcgttgcgcagaaggcggcggcggtggtggcttgtggtgcggcctcaccatacaggaacagggcagacgttagcgtgagtgatcactctcaatcccggggacctggtggccttagtctttcaggtggaacggtgtgcgacatgggaaagaaaaccaagcggacagctgacagttcttcttcagaggatgaggaggagtatgttgtggagaaggtgctagacaggcgcgtggttaagggacaagtggaatatctactgaagtggaaaggcttttctgaggagcacaatacttgggaacctgagaaaaacttgggattgccctgagctaatttctgaatttatgaaaaagtataagaagatgaaggaggggggaaattaataaagtcagggagaagtcagaaagtagcaagaggaaatccaatttctcagacagtgcggaggacatcaaatgtaaaaaaaagagagagcagagcaatgatatcgctcggggctttgagagaggactggaaccagaaaagatcattggggcaacagattcctgtggtgatttaatgttcctaatgaaatggaaagacacagatgaagctgacctggttcttgcaaaagaagctaatgtgaaatgtccacaaattgtgatagcattttatgaagagagactgacatggcatgccttttcctgaggatgcggaaaacaaagagaaagaaacagcaaagagctaaaggaggggatggtctctgtcatttctctttgtacataatacattcacctccctgcctcctctcctttctacccacccctttctatcctaaacacatccataaaaaatgtgcttatcactgtgctccacaggagaaatgttgggtattggttctcttgtaacataactgatggtctgattaatgataagtgtctctctgtgaagaccaggcatttacatactgagtgtaatacccacaattttttttttcctttgccctgatctcttccttctgcttccctgtgaccctcaaagatgagtttcaactttttaatcaccttagagtcttgatcttttcagggttggtcgctttttaggttgggggattttgttacaatgatgttgaattttggtttcttgctttggttcttagaacatgttgctgactagctggccttttgttctgacatgttgagatggaaaaggatgttgcccatctgttaaaaagccaatagcaactgcctacctgttgggggccttcccaacctggttcagctctacccaggagaatacagggtttctggtgtggtcttctgggccaccctctgttgttcatcctcactcatcctcccagaattactccatcctttggaagatttgaaattttacactgaaatctgtcaagacactctttttagccccaggactttcggtattgcttttagcactccccacttctgcttctgtaaagtgatatcaatttgtgataaaatgacaagattattaactgtgcagatttgtagctatagtacatgaggatgatggggtagggtacaattgtctttattatcatatatggtatgtatgtatgatttctttccattcctcatatttagactgagtatttatgtacgtgtgagtgattgcctggtgcttgcttgtgcccaggagctaggcaccctccaaccctgccaacttttgtggcctcccaaagcattcctgttaccaaagaggcttcaaacctgaccctcacttctcagtggacccgagtttcccttccatgccattattttcagtggggaagttttagaggtgagctgttggccacat

SEQ ID NO: 137998 - DNA, 325 bp, Homo sapiens
  misc_feature (1)...(325): n = a,t,c or g
ccgcgatggtaggcggcggcggggtcggcggcggcctcctggagaatgccaaccccctcatctaccagcgctctggggagcggcctgtgacggcaggcgaggaggacgagcaggttcccgacagcatcgacgcacgcgagatcttcgatctgattcgctcctgagcctggcctttgacccctcagcctgcatactggtatcctggtcccagctcctgccagggctgttaccgttgttttcttgaatcactcacaatgagaaactaacattttgctttttgtaataaagttaatttatattcnnnnnnnnnnnnnnnnnnnnnttt

SEQ ID NO: 137999 - DNA, 945 bp, Homo sapiens
atggtcatttatccacttgacaaacatttcacgagcccctgccggtccaagctgtggggacgccgtactcccgggcctatgtgccccctgagacctggttctggcctctacgtttcagcccgctactggctcgcacgacccagcgccgccgtggtcccttctcagcgccttctgctccagcgaccatcatgttcccgggtccgagcagccagggccgcggtcaccgcttctctcgcacctcaggccgagaacccacaacgcggcgtgtccctcgcgcgactccgtcgccacgccacgcccccttcccgttctccggaagtgcgcgggttggagcggaagcgcacgcctgctaggatcagcggtggtggttccgcgatggtaggcggcggcggggtcggcggcggcctcctggagaatgccaaccccctcatctaccagcgctctggggagcggcctgtgacggcaggcgaggaggacgagcaggttcccgacagcatcgacgcacgcgagatcttcgatatccgccgctgctgggcgcgggcggaggagttgaacgtagtagagcaggtgcgggttcaggtgagtcacttccgaggggagcgagttgttccagagagtcagaaaggtttctgtgcagcaggagctggcgtgctctatgctcacgaacaccgaagggttagcgaccccgagagtacagtggctgtggctttcacaccaaccattccgcactgcagcatggccacccttattggtctgtccatcaaggtcaagcttctgcgctcccttcctcagcgtttcaagatggacgtgcacattactccggggacccatgcctcagagcatgcagtgaacaagcaacttgcagataaggagcgggtggcagctgccctggagaacacccacctcttggaggttgtgaatcagtgcctgtcagcccgctcctga

SEQ ID NO: 138000 - DNA, 470 bp, Homo sapiens
ccgcgatggtaggcggcggcggggtcggcggcggcctcctggagaatgccaaccccctcatctaccagcgctctggggagcggcctgtgacggcaggcgaggaggacgagcaggttcccgacagcatcgacgcacgcgagatcttcgatatccgccgctgctgggcgcgggcgggttccgggggcttgcggtggggggagcagtgatatcgagcagctggtggagccgcatcccagcagggcgttcctggcagagggttctaagtgggcaagggcgcagagtcccttttccttcacttcccacaatttgattcgcttccttaatgaccccggagcattcactgacgctagaggagttgaacgtagtagagcaggtgcgggttcaggttagcgaccccgaaagtacagtggctgtggctttcacaccaaccatttcgcactggagcatgggcacccttattggggtgtgcg

SEQ ID NO: 138001 - DNA, 738 bp, Homo sapiens
cgcacgctcgcataggatcagcggtggtggttccgcgatggtaggcggcggcggggtcggcggcggcctcctggagaatgccaaccccctcatctaccagcgctttggggaagcggcctgtgacggcaggcgaggaggacgagcaggttcccgacagcatcgacgcacgcgaagtctttcgatctgattcgctcccatcaaatgaccccggagcatcccactgacgctagaggagttgaacgtagtaagagcaggtgcggcgttcaggttagcgacccccgagagtacagtggctgtgggctttccaaaaccaacccattccggcacttgcaggcatggcccacccttaattggtctgtccaatcaaggtcaaagcttctgcgctcccttccttcagcgttttcaagatgggacgttgcacatttactcccgggggacccattgcctcaagagcatgcagttgaacaagcaactttgcagattaaggaagcggggtgggcaactgcccttggaagaacacaccaccttttggaggttgtgaattcagtgcctgtcgagcccggctcctggaacctgggcctttgtacccctcagcctggcataattggtatcctggtcccagctcctgccagggctgttaccgttgttgtgggtgggtcactcacaatgagaaactaacattttggctttttgtaataaagttaatttatattcagttcccaaaaaaaaaaaaaaaaa

SEQ ID NO: 138002 - DNA, 1005 bp, Homo sapiens
ctgcatcgtgaagtccactctagaggatccccgatcaaaacacatgatctagattctggatttaatggagaaatcctatgccaactaaaaggaaacttcccctttaaaatcgttcaagataccaaaaacacatacaggttggtgacagatggagccctggaccgggagcagatcccagaatacaatgtgacgatcacagctaccgacaaaggcaatccaccgctctcctccagcaagaccatcactctgcacatccttgatgtcaacgacaacgttcccgttttccaccaggcctcctacaccgtgcatgtagctgagaacaatccgcctggagcctccattgcgcatgtcagagcctcggatcccgacttgggacctaatggccttgtctcctactacatcgtggccagtgacctggagccgcgggagctgtcgtcctacgtgtccgtgagcgcgcggagcggggtggtgttcgcgcagcgagccttcgaccacgagcagctgcgtgccttcgagctcactctgcaggcccgcgaccagggctcgcctacgctcagcgccaacgtggcagacaccaacgataacccacccaccttcccccactcatcctactcagtctacatcgctgagaacaaccccagaggggcctccattttcttagtgactgcacaggaccacgacagtgaggataatgcccagatcacttattccttggccgaagacaccatgcagggggctccagtgtcctcctatgtctccataaactctgacactggagtcctgtacgcgctgcaatcctttgattatgagcagttgagagaactacaactaagagtgactgcacatgacagcggggacccgcctctcagcagcaacatgtcacttgacctgttcgtgcttgaccagaatgacaaccacgccgagatcctgtacccggcccttcccacagattgttctacttgcatggagcttgcaccccgcttcgcagagcctgcttacctgtga

SEQ ID NO: 138003 - DNA, 2588 bp, Homo sapiens
tttcgttaaactcaagcctctatcctgctggattctgagctccccttcctaagacagaggggtccacccggatacacccgcattctgaagcacttcccgagatcggcgcctaagcaagagaagcaggacgactatggcggctcagccgaggggcggggactacagaggatccttcctgctctccatcctcctggggaccccctgggaagcctgggcaggacgtattctctactccgtgtcggaggagacggacaaagggtcctttgtgggagacatcgccaaggacctggggctggagccccgggagctggcggagcgcggagtccgcatcatctccagaggtaggacgcagcttttcgccctgaaccagcgcagcggcagcttggtcactgcgggcaggatagaccgggaagagatctgcgctcagagtgcgcggtgtctggtaaactttaacatcctgatggaagataaaatgaatctttaccctatagacgtggaaataatagatattaatgacaacgttccaagattcttgacggaagaaataaatgtaaaaataatggagaatacagctcctggggttcggtttccgttaagcgaggctggggatccagatgtgggcacgaactccctccagagttaccagctcagccccaatcgccacttctccctggctgtgcaaagtggagacgatgaaactaagtacccggaactggtgctggagcgggtgctggaccgggaggaagagcgggttcaccacctggtcctcacagcctctgatggcggcgacccgccccgatccagcaccgcccacatccaggtgacagtggtggatgtgaatgaccacacgcctgtcttctctctgcctcagtaccaagtaactgtccccgagaatgtgccagtgggtacaagactgctcacggtacatgctatcgacctggacgagggagtcaatggggaagtgacatattcttttcggaaaataactcctaaacttccaaagatgtttcatctgaactcgcttacaggagaaatatcaactttagaaggattagattatgaagaaactgccttctatgaaatggaggttcaggctcaagatggtcctggtagtctgacaaaggcaaaagtactgatcacagttttagatgtaaatgataatgctccagaagtgactatgacgtctttaagtagctcaatccctgaagacacacctcttgggacagtcattgctcttttctacctacaagacagagattctggaaagaatggtgaggtgacctgcaccattccagaaaacctaccttttaaattagaaaaatcaatagataattattatagattgaaaaacaaccaaaaacttggaccgggaaacactctctttgtataacatcacactgaaagccacagatggtggaactcctcccttgtccagggaaactcacatattcatgcaggtggcagacaccaacgataacccacccaccttcccccactcatcctactcagtctacatcgctgagaacaaccccagaggggcctccattttcttagtgactgcacaggaccacgacagtgaggataatgcccagatcacttattccttggccgaagacaccatccagggggctccagtgtcctcctatgtctccataaactctgacactggagtcctgtacgcgctgcaatcctttgattatgagcagttgagagaactacaactaagagtgactgcacatgacagcggggacccgcctctcagcagcaacatgtcactgagcctgttcgtgctggaccagaatgacaacccgcccgagatcctgtacccggccctccccacagatggttctactggcatggagctggcaccccgctccgcagagcccggctacctggtgaccaaggtggtggcggtggacaaagattcaggccagaacgcctggctgtcatacctcctgcttaaggccagcgagccaggactctttgcggttgggctgtacacgggcgaggtgcgcacggctcgggccctgctggacagagatgccctcaagcagagcctcgtggtggccgtccaggaccacggtcagcctcctctgtcagccaccgtcacactcaccgtggctgtggctgacagcatccccgaagtcttggccgacctgggcagccttgagccctccgacggtccttacaactatgacctcacgttgtacctggtggtggcggtggccacagtctcctgcgtcttcctagccttcgtcctcgtactgctggcgctcaggctgcggcgctggcacaagtcacgcctgctgcaggcttcagaaggtggcttggcgaacgtgcccacctcgcactttgtgggcatggacggggtgcaggctttcctgcagacctattcccatgaggtctccctcaccgcggactctcggaagagtcacctgatcttcccccagcccaactatgtagacatgctcatcagccaggagagctgtgagaaaaatgattctttgctaacatccgtagattttcaggaatgtaaagaaaacctgccaagtattcaggtgagcccagcccttcctttatttccatga

SEQ ID NO: 138004 - DNA, 371 bp, Homo sapiens
  misc_feature (1)...(371): n = a,t,c or g
atttcggcacnaggggctgactaggttttcggaccgcggcgccnggcgaangagagactgcggcgggagggccaggccgtgggagagacgcgggaaagnaaggnttcaaagnctcttnaccaccccgccctaggccgacccgnggacccggcgtctggtcccaggtctccccgctgcgctgcttgaggctcagcatggccagcagagagccctgccccagagcaaggagacgctgctgcagtcctacaacaagcggctgaaggacgacattaagtccatcatggacaacttcaccgagatcatcaagaccgccaagattnaaggacgagacgcaggtntcacgggccactcaagggttgaacaaggacaat

SEQ ID NO: 138005 - DNA, 860 bp, Homo sapiens
gcggggctgagaggctgcggcggctgactaggttttcggaccgcggcgcggcggggaagagagactgcggcgggagggccaggccgtgggagagacgcgggaaagtgcgggtcgcagaggcacttgtaccaccccgccctatgccgacccggcggacgcggcgtctggtgtgcgggcgctggggcgggtcccaggtctccccgctgcgctgcttgaggctcggccatggcccagcagagagccctgccccagagcaaggagacgctgctgcagtcctacaacaagcggctgaaggacgacattaagtccatcatggacaacttcaccgagatcatcaagaccgccaagattgaggacgagacgcaggtgtcacgggccacttcagggtgaacaggacaattacgagatgcatgtgcgagccgccaacatcgtccgagccggcgagtccctgatgaagctggtgtccgacctcaagcagttcctgatccttcaatgacttcccctccgtgaacgaggccattgaccagcgcaaccagcagctgcgcacactgcaggaggagtgcgaccggaagctcatcacgctgcgagacgagatctccattgacctctacgagctggaggaggagtattactcgtccagtccaggaccatccttggtctcccagcagttgtccgagcagcagctcctcagctctgcctggacagcctggcccaaggtcactctctcctcattggcacctggtccccagtattcagtgaatggacctgctgccatcattgcacatccaggcacctgtgcctctgctggcatctcatcctcactgctaccagagccggtgctcctagtgccggtattttag

SEQ ID NO: 138006 - DNA, 1263 bp, Homo sapiens
atgatagaagatataaatgataacccacctcattttccccaaaatagcattgttttacaaatcaatgaactagcaattccaggcattcggtttggcctggaatctgctatagatgcagatgtagggcctcactctctccagagttaccagctcagttctaatgaacatttctctctgatgatggacaagactaaaggcaagaacgctccagaattagtgctggagaagcccctgggccaggagcaacagagctctcatctcctggtcctggaagcaatggacatgggtgacccagtcccaactggcactgctgcaattcaaattgaggtcactgatgccaacgataatgccccagtttttagccaggatgtatacaaagtcagccttagagagaatgtgcccccaggcacctctgtactaaaggtgacagccactgaccaggatgagggtgtcaatgcggagatcacctactctttcaaatccctacgagatgatattggaaatatgtttgtgctagaccatcaaaatggggaaattaaatccaaagacttaatagacttcgaatttcgtagcagttataccatgagagtagaagctaaggatggtggaggcatgaccagcgaatgtaaaattatagtagaaatccagatccgctacaggattcccgaggaaatgcccaagggctccgtagtggggaacctcgccacggacttggggttcagcgtccaggagttaccgactcgaaaactgcgcgtcagttcggagaagccttacttcaccgtgagcgcagagagcggggagttgcttgtgagcagcaggctagacagggaggagatatgcgggaagaagccagcttgtgctctggaatttgaggctgttgctgaaaatccactgaacttttatcactacccgcctttccgggatgaagagttaaaagtaaaagttaatgaaaatgcggctgcagggacacggttagtgcttcccttcgcgcgggatgcggatgtgggtgtgaactctctccggagttaccagctcagctccaatctgcacttctctctggatgtggtaagcggaactgatggacaaaagtatccggagctggtgttggaacagcccctagaccgcgagaaagagactgttcacgacctcctcctcacagctttagatggcggagacccggtactctccggcaccacgcacatccgtgttacggtcctcgacgcaaacgacaatgcgcccctgttcaccccatccgagtacagc

SEQ ID NO: 138007 - DNA, 2530 bp, Homo sapiens
tttcgtctggaactggaactaaagcccgttctgagatccttaaatctacaatacagaggttatttgtaacctggcgtctccaggctggtgagcaagctgaggagagcaagagggatggggagcggcgccggggagctgggccgggctgagaggctgccagagctctttctcttcctgctgactttgttctgcccggcgctctgtgagcagatccgctacaggattcccgaggaaatgcccaagggctccgtagtggggaacctcgccacggacctggggttcagcgtccaggagttaccgactcgaaaactgcgcgtcagttcggagaagccttacttcaccgtgagcgcagagagcgcggagttgcttgtgagcagcaggctatacagggaggagatatgcgggaagaagccagcttgtgctctggaatttgaggctgttgctgaaaatccactgaacttttatcacgtgaatgtggagatcgaggacattaatgaccacacgccaaaattcacgcaaaattcctttgagctgcaaataagtgagtctgcacagcctggcacacgatttatattaggatctgcccatgatgcggatattggtagcaacacactgcagaattaccaactcagtcccagtgatcatttctcactgataaataaagagaaatcagatggcagtaaataccctgagatggtattgaagacacctttggacagagaaaagcagaaatcctaccacttgactttgactgccttggactttggagctccacccctaagcagcactgcacagatacacgttctagtgactgatgccaatgataatgctccagtgttcagtcaagacgtatacagggtgagcctttcagaaaacgtgtacccggggaccacggtgctacaggtgactgccacggaccaggatgagggtgtcaatgccgagattactttctctttcagtgaagctagccagatcacccaatttgacctgaactctaacaccggggaaattactgttttaaatacattagattttgaagaagtcaaagaatattccatagttttggaagcaagggacggtggaggaatgattgcgcaatgcacagtggaggtagaagtcatagatgaaaatgacaacgccccagaagtgatattccagtctctacccaacctaattatggaggacgccgagctgggaacacatattgctttgctcaaagtccgtgacaaggattccagacacaatggagaagtgacttgtaaattggaaggtgatgttccatttaaaatattaacttcttcaagaaacacgtataaattagtgacagatgctgttctagaccgcgagcagaatccagagtacaatataaccgttacggcaacagatcggggcaagcctcccctctcctccagttccagcatcaccctgcacattggtgatgtaaatgacaacgctccggttttctcacagtcttcctatatagtccacgtggccgagaacaacccgcctggagcctctatttcacaagtcagggcttctgatccggacttggggcccaacggccaagtctcttactgcatcatggccagtgacctggagcagcgggagctgtcatcctacgtgtccataagcgcggagagcggggtggtgttcgcgcagcgcgccttcgaccacgagcagctgcgcgccttcgaactcacactgcaggcccgcgaccagggctcgccagcgctcagcgcgaacgtgagcctgcgcgtgttagtggacgaccgcaacgacaatgcgccacgggtgctgtaccccgcgctgggtcccgacggctctgcgctcttcgatatggtgccgcacgctgcagagcctggctacttggtgaccaaggtagtggcggtggacgcagactcaggacacaacgcctggctgtcctaccacgtgctgcaggctagcgagcccgggctcttcagcctggggctgcgcacgggcgaagtgcgcacagcgcgtgccttaggcgacagggacgccgtccgccagcgccttctggtcgccgtgcgtgacggtggacagccaccactctcggccactgccacgttgcacctggtcttcgccgacagcttgcaggaggtgctgccggatatcactgaccgccccgacccctctgacctccaggctgagctgcagttttacctagtggtggccttggccttgatctcagtgctcttcctcgtgggccatgattctggccattgccttgcgcctgcgaacgctcctccagccccgcctcctggagctgcttccagcctgggtttctgtgtttaaaatccgaatccgtgggtttccccccaactacagcgaggggactttgccttattcctacaatctatgtgttgcacatacaggaaagacggagtttaatttcctaaaatgtagtgagcagttgagttcaggacaagacatactttgcggtgattcatctggggccttatttccactttgtaattccagtgaattgacttcccatcaggtgagtttcctt

SEQ ID NO: 138008 - DNA, 273 bp, Homo sapiens
  misc_feature (1)...(273): n = a,t,c or g
gngctcctttccnaactccactggctgcggcatctgtgggaaaagtgtggctgggtcttcgaggagccgcaccaatggcttccgtgctgtcctacgaaagcctggtccacgncgtggccggagccgtggagtggttaatntgttgctaacaactccactctgggtggtaaacaccagactgaagnttcaaggagcaaaatttaggaattaagacattgtaccaacaaactacaaaggtatcattgatgctttntcatcagatcattcgcgatg

SEQ ID NO: 138009 - DNA, 1236 bp, Homo sapiens
tgctctttgaaggtatgcatggtatgtgtttccatggacttcttcgtattctcatagtatgggttccatcctatgctcaccaccatcttctgaccatctctacttccagcactggcccaaccataataaatgccactggatatatcggctggcagattatctaccacttgctcaggaaaattagctgtgggggatgcccagctgcttgtagccacggccgaagccccataccacttggtcccggcaggagtatgacagatgcttcgtaatgcagtctgctcgaggcatgggctgcagcccggtccctgcgtcctacagagacaccgtccacgcggtgcccggaccccggaccagccacggggtgggaaggggcgtgagctctgccgcgggggtgcaccaggggcccgacgatgccgatgacacgccacggaggatccctgatgccagcgactcaggagctgggtctcccaaccattttcattttctttctttccttctttccctaccttttaaaatattttatgtttgtttgtttatttagaggtagagtttccctcttgttgcccaggctggagtaacaactgggcaaaaagctctggaaaagctctggaggcaaattgagtccacagagctacagtccaccctttaccctgggtcttagagaactcatctcagaggctttcactcttagttcttagcttccctcctgcagtactgatccatccttcgtttgtctcctttgctggtgcaatcttattttctcggcctcttaatggttagcctgctccaagactcagtcattgagattcttctgtcagtccatacacacttccctagtcaaagatgcggaccctgagcgggcacgtgtgaacacggctctctaccccgcagtctctaggagaccaggaggtggcggagtctcggcccttaccccgaattcctccaacaactttccgccaatggcccattcctctctgccccacagtcatgacagtggaccccaacccacactacctccctctcagacccatccctcaggcatatagacccagccacacttttcccacagatgccgcagccagtggagttaggaaaggagcaccggagctcagggtgtgagagtcgcaatccccgccctctcaaacccgcccgcctgccctagaaccacttccgggtctaatggccttcttttactctggtgacaaagatggggaaactcaatgagactccagtctc

SEQ ID NO: 138010 - DNA, 425 bp, Homo sapiens
tcggcacagggcggggattgcgactctcacaccctgagctccggtgctcctttcctaactccactggctgcggcatctgtgggaaaagtgtggctgggtcttcgaggagccgcaccaatggcttccgtgctgtcctacgaaagcctggtccacgccgtggccggagccgtggtgagacggggtcttcacgcccgggccgcaacgggttataaggcttctcgggggccagtcccgggatatgcctgagggatgggtctgagagggaggtagtgtgggttggggtccactgtcatgactgtggggcagagaggaatgggccattggcggaaagttgttggaggaattcggggtaagggccgagactccgccacctcctggtctcctatagactgcggggtagagagccgtgttcacacgtgcccgct

SEQ ID NO: 138011 - DNA, 1079 bp, Homo sapiens
gggcggggattgcgactctcacaccctgagctccgtgtgcttctttcctaactccactggctgcggcatctgtgggaaaagtgtggctgggtcttcgaggagccgcaccaatggcttccgtgctgtcctacgaaagcctggtccacgccgtggccggagccgtgggaagcgtgacagcaatgacatgtggtttttcccctggatactgctagtatcttcgacttcagtgttgatttttaaaagaaaatccaaaactacacacatggtggtcctggagatcattaaagaagaaggactcctggcaccatatcgagggtggtttccagtgatttccagtctctgctgctccaattttgtctatttctacacttttaatagcctcaaagcactctgggtcaaaggtcaacattctaccactggaaaagatctggtagttgggtttgttgcaggagtggttaatgtgttgctaacaactccactctgggtggtaaacaccagactgaagcttcaaggagcacaatttaggaatgaagacattgtaccaacaaactacaaaggtatcattgatgcttttcatcagatcattcgcgatgaaggaatctcggctttatggaatggcacatttccctcattgctgttggtcttcaatcctgccatccagttcatgttttatgaaggtttaaaacggcagcttttaacctttgctttccagctttcttccttggatgtgttcatcattggtgcagtagccaaagcgattgccaccacggtgacctatcccctgcagacggtacccctctttcctcagtttgggcgtcatagactaaacccagaaaacagaacattgggaagtcttcggaatattctctatcttcttttacaaatattcagaactccttcagaaagagaacccttctatacttcagtcaccctgagtgtgctttcatcagtggcatatcctatgatgcctcttagcaatataacatctgcctatagaataggagtactggagaagggagggggcagtggaaaaagtgataatagtgatgatgatgatgataatgatgatggtggtgttg

SEQ ID NO: 138012 - DNA, 2454 bp, Homo sapiens
  misc_feature (1)...(2454): n = a,t,c or g
atgcattcgtcagtgtcatctgccttttccagtaaatgggttggcattcaatttccaaagggggatcctctagaatcgactacggcattcactactaatgttattggtgtggtaaacgatgagactgtagatggcaaccaaaaagtggatgaacgaggtacaacaaataacactcatattatcaaccatggccagcagaatgttcatggcggggtatctaatggaagtcttattgaatctggtggatatcaagatataggaagtcataacaattttgtggggcaggctaataatacaaccattaacggtggcagacagtcaattcatgacgggggtatttccacaggtacgacaatcgagagtggcaatcaggacgtttataaagggggtatcagcaatggaacgacaattaagggcggtgcttcacgcgtagagggagggagtgcgaatggaatactcattgatggtggtagccagatagtaaaagttcaagggcatgctgatggtacaacgataaataagtctggctctcaggacgtagtacaaggaagtctggcaacgaacacaaccataaatggtggtcgacagtatgttgaacagagcacagtagaaacaacaaccattaaaaatggcggtgagcaaagagtatatgagagccgtgcgctggacacgacgattgaaggcggaactcagtctctgaatagtaagtcaacggcaaaaaatacgcatatctattctggtggcacgcaaattgttgataacaccagcacctcggatgttattgaagtttattctggtggcgtgcttgatgttaagggtgacataaacgcatatggttcggcaaacaagacgattattaaagataaaggaacaatgtcagttttaaccaatgctaaagctgatgcgacccgaatagataatggcggggttatggatgttgcaggaaacgcgacaaataccataattaatggtggcacacagaatattaataattatggcatagccacaggcaccaatatcaacagcggaacgcaaaatatcaaaagcggcgggaaagctgacacaacaattatatcctccgggagccggcaggttgttgagaaagatggtacggcaattggcagcaatattagcgccggaaaatcgctgattgtctataccggccccattgcacatggggttaaccaggagacgggcagtgctttagttgccaacacgggtgcagggactgatatcgaaggatacaacaagctctctcacttcactattaccggaggggaggctaattatgttgtgctggaaaataccggcgaactgacggtagtggctaaaacctcggcgaaaaatactaccattgatactgagcaacncgnagtgccgcgcgtgccgtttgctatcaacgtactgacccacagcagacagcgatatcgacgtaacttacgcttctatgctgatgacccaacgattcgcgtcgtggcccgacctaccattgggtacgcgaaagctgaagaggaacgcgtggtggataaccgcatgcatgaccgtttttgtgaactccgcaccgccgcgggccatcctgtcgaaggaggacggccgttggtaattaaaggcataactcacccagcggaaaccgctctacagaggtttaaatttcttatgtaccaggttgttgcgtctgatttagatggcacgttactttctcccgaccatacgttatccccttacgccaaagaaactctgaagctgctcaccgcgcgcggcatcaactttgtgtttgcgaccggtcgtcaccacgttgatgtggggcaaattcgcgataatctggagattaagtcttacatgattacctccaatggtgcgcgcgttcacgatctggatggtaatctgatttttgctcataacctggatcgcgacattgccagcgatctgtttggcgtagtcaacgacaatccggacatcattactaacgtttatcgcgacgacgaatggtttatgaatcgccatcgcccggaagagatgcgcttttttaaagaagcggtgttccaatatgcgctgtatgagcctggattactggagccggaaggcgaaaccaaagccctgctgactcccggcaaactgaaaaacttcctcgtcgagaaaatgcgtaccctcggtactgcagcctgcccgccgtaccatatcgcgtttgtgattggcggtacgtctgcggaaaccaacctgaaaaccgtcaagttagcaagcgctcactattacgatgaactgccgacggaagggaacgaacatggtcagggttccgcgatgtccagctggaacaggaactgctggaagaggcccagaaactcggtcttggcgcgcagtttggcggtaaatacttcgcgcacgacattcgcgttatccgtctgccacgtcacggcgcatcctgcccggtcggcatgggcgtctcctgtccgctga

SEQ ID NO: 138013 - DNA, 1386 bp, Homo sapiens
atgggcggtgcgatctccacattatttctgcaacgccatccaggtgtatgtgacgccattgcgctaactgcgccaatgtttgggatcgtgattcgtatgccgtcatttatggcacggcagatcctcaactgggccgaagcgcatccacgtttccgtgatggctatgcaataggcaccgggcgctggcgcgcgttgccgtttgctatcaacgtactgacccacagcagacagcgatatcgacgtaacttacgcttctatgctgatgacccaacgattcgcgtcggtgggccgacctaccattgggtacgcgaaagtattctggctggcgaacaggtgttagccggtgcgggtgatgacgccacgccaacgcttctcttgcaggctgaagaggaacgcgtggtggataaccgcatgcatgaccgtttttgtgaactccgcaccgccgcgggccatcctgtcgaaggaggacggccgttggtaattaaaggtgcttaccatgagatcctttttgaaaaggacgcaatgcgctcagtcgggctccaagccatcgtcgatttttcaacaggcataactccccagaggaaaccgtctacagagctgtatgtcttcgtcataactagtcaagcctttcaaatctctttacaattcaatcctctcacctgcaggtcctgtgcttcttccctcacaatcatgtctgaggacaccctgaaatggaggctgtgggccagcttaccgaatggaaaggcagacaagaacctgaagtcagctagcaatttctccaacaaagacgaaggaaatttagattttaccaaccaggtccagagacggagccagagttgcttcaccttctttccatttagccgggcaaacttcacctgggtgagaagctacgtactgtgctgctttgattttacgcagcaggtcagacgcgtcacggccaatgccttcagcggtaacttcgattgcctggatgataccctgcgggtcaacaacgaaggtcgcacggtcagccagaccttcatcttcacgcatgttgtcgaagttacgggtcagggcgccagtcgggtcgccgatcatcgcatatttgattttagcgatggtttcagagctgctgtgccatgctttgtgggtgaagtgagtatcggtagatactgcgtatacgtctacgcccagtttctgcagttcttcgtagtggtcagcaacgtcacccagttcggtcgggcatacgaaagtaaagtcagccgggtagaagaagaagacgctccagcggccttcggtatctttttcggtgatttcgatgaattcgccgtttttgaatgcctggtttttaaaaggtttaattttggtgttatcaacgacatctatacttcctccgtgtttcgatga

SEQ ID NO: 138014 - DNA, 1609 bp, Homo sapiens
  misc_feature (1)...(1609): n = a,t,c or g
atgcattcgtcagtgtcatctgccttttccagtaaatgggttggcattcaatttccaaagggggatcctctagaatcgactacggcattcactactaatgttattggtgtggtaaacgatgagactgtagatggcaaccaaaaagtggatgaacgaggtacaacaaataacactcatattatcaaccatggccagcagaatgttcatggcggggtatctaatggaagtcttattgaatctggtggatatcaagatataggaagtcataacaattttgtggggcaggctaataatacaaccattaacggtggcagacagtcaattcatgacgggggtatttccacaggtacgacaatcgagagtggcaatcaggacgtttataaagggggtatcagcaatggaacgacaattaagggcggtgcttcacgcgtagagggagggagtgcgaatggaatactcattgatggtggtagccagatagtaaaagttcaagggcatgctgatggtacaacgataaataagtctggctctcaggacgtagtacaaggaagtctggcaacgaacacaaccataaatggtggtcgacagtatgttgaacagagcacagtagaaacaacaaccattaaaaatggcggtgagcaaagagtatatgagagccgtgcgctggacacgacgattgaaggcggaactcagtctctgaatagtaagtcaacggcaaaaaatacgcatatctattctggtggcacgcaaattgttgataacaccagcacctcggatgttattgaagtttattctggtggcgtgcttgatgttaagggtgacataaacgcatatggttcggcaaacaagacgattattaaagataaaggaacaatgtcagttttaaccaatgctaaagctgatgcgacccgaatagataatggcggggttatggatgttgcaggaaacgcgacaaataccataattaatggtggcacacagaatattaataattatggcatagccacaggcaccaatatcaacagcggaacgcaaaatatcaaaagcggcgggaaagctgacacaacaattatatcctccgggagccggcaggttgttgagaaagatggtacggcaattggcagcaatattagcgccggaaaatcgctgattgtctataccggccccattgcacatggggttaaccaggagacgggcagtgctttagttgccaacacgggtgcagggactgatatcgaaggatacaacaagctctctcacttcactattaccggaggggaggctaattatgttgtgctggaaaataccggcgaactgacggtagtggctaaaacctcggcgaaaaatactaccattgatactgagcaacncgnagtgccgcgcgtgccgtttgctatcaacgtactgacccacagcagacagcgatatcgacgtaacttacgcttctatgctgatgacccaacgattcgcgtcgtggcccgacctaccattgggtacgcgaaagctgaagaggaacgcgtggtggataaccgcatgcatgaccgtttttgtgaactccgcaccgccgcgggccatcctgtcgaaggaggacggccgttggtaattaaag

SEQ ID NO: 138015 - DNA, 1782 bp, Homo sapiens
ttacgcctcctcttcatgacgggcaaagcggcttttggtccacaatgccaggcggtcgaacagcaaataaatcaccggcgtggtaaacagcgtcagcacctggctgacaatcagaccgccgaccatgccgatacctaacggacgacgcagttccgcgccgaccccggtactcaacatcagcggcagcgcgccaagcagagccgccagagtggtcatcaggatcggacgaaaacgcaacagacaagcctggtagattgcctcgcgcggcgacatgccttgctcgcgctcagcagccagcgcgaagtcgatcatcatgatggcgttcttcttcacgataccgatcagcaaaataatgccgataatcgcaatcacatccagttcgctaccagcaatcagcaacgccagcagtgcgccaacccctgcggtgggtagcgtcgagagaatggtgatcgggtgaataaagctctcgtacagaatgccgagcacgatatacatcgccaccaccgccgcgacaatcagccagacagtgctgcccagcgccgactggaaggcgagggtgctgccctggaactgcgtggtgatatccaccggcagattcagcgtcttttcggtgtccataatcgcctgcaccgcatcgcccagcgaatagttattcggcacgttaaaggagatggtcgttaccgggaactgatccaaatggttgatggagagcggcgcaaaacgctgctcaattttgggcattgagattacggcgcggagtttgcggtacaggttatgccatgtctttcgcagattggcagtggttcgctgccggttgatcgccccatgatggacgcggtagccaccttgagtcattaaccgcccgctggcgtgaattggcagtgccggtgattggtcgtatttatgacggacgattggggctggatttacgctgccttgaagatgagcaacggtttttggagatgttggtgaaatgattattgcgactggcggacacgttgaccacggcaaaacaaccttattgcaggcgattactggcgtaaatgctgaccgtctgttgttgaggttgaccccccggtaaaggagggtttttgggaaaaacgtttttgttggggaaaactgtttttcacccccgtcgaattcgagctcggtacccacggctaacggcaggttttcggcaatcatggtcacggctttcagtgcacaagcgtcagtgatcggcgtggcggcaatagaaacatatgcttcgatagcgtgcgttaaggcatccatacccgttgcggcggtcagtgacttcggcataccaatcatcagagaggagtcattgacagaaagcagcggagtgacatgtttatcaacaatcgccattttgatatgacgcgcttcgtcagtgatgatgcagaaacgggtcatttcagaggccgtacccgccgtggtattgatggcgatcatcggcagctgcggttttgcagagcggtcaacgccttcgtaatcgcgaatatcgccgccattggctgccaccagcgcaataccttttgcgcagtcgtgtggagaaccaccgcctaaggagatcacgctatcgcaattattctctttaagtaatttcaaacctgcggcgacgttttccgtggtggggttaggttgggtgccatcataaataacgctaaaaatattgcgttcttccagtgctttttgcacatcgcccgccatacctaatttcgttaacatattgtcagtgacaattaaggtacgggtaaatccataatctgccatcatattcat

SEQ ID NO: 138016 - DNA, 1344 bp, Homo sapiens; identical to SEQ ID NO: 132057

SEQ ID NO: 138017 - DNA, 2054 bp, Homo sapiens
ttccaaatcagaatcgactccagcgtacggcaggtggtgcctttgccattcgtacccgcaacggtaaacacaaatggcgctggtttcaggacgccaagacgcgccgcgaccaggctcacgcgctcaaggccgagatcgatagttttacacgtcaaatagacctttctcaccatgaccgggtggtagtcatctgcccggggcgtattgagagctacgtaaaatatgcggaactggcctatgacctgttccatttggggtttgatgtcttaatcatcgaccatcgcgggcagggacgttccggtcgcctgttagccgatccgcatctcgggcatgttaatcgctttaatgattatgttgatgatctggcggcattctggcagcaggaggttcaacccggtccgtggcgtaaacgctatatactggcacattcgatgggcggtgcgatctccacattatttctgcaacgccatccaggtgtatgtgacgccattgcgctaactgcgccaatgtttgggatcgtgattcgtatgccgtcatttatggcacggcagatcctcaactgggccgaagcgcatccacgtttccgtgatggctatgcaataggcaccgggcgctggcgcgcgttgccgtttgctatcaacgtactgacccacagcagacagcgatatcgacgtaacttacgcttctatgctgatgacccaacgattcgcgtcggtgggccgacctaccattgggtacgcgaaagtattctggctggcgaacaggtgttagccggtgcgggtgatgacgccacgccaacgcttctcttgcaggctgaagaggaacgcgtggtggataaccgcatgcatgaccgtttttgtgaactccgcaccgccgcgggccatcctgtcgaaggaggacggccgttggtaattaaaggtgcttaccatgagatcctttttgaaaaggacgcaatgcgctcagtcgcgctccacgccatcgttgattttttcaacaggcataactcacccagcggaaaccgctctacagaggttgttgcgtctgatttagatggcacgttactttctcccgaccatacgttatccccttacgccaaagaaactctgaagctgctcaccgcgcgcggcatcaactttgtgtttgcgaccggtcgtcaccacgttgatgtgggacaaattcgcgataatctggaaattaaagagggcgataacggcggccagtgcttcctcttcctgtggaccggtcgcttcaacttcaatctgccgtcctttggcagaatccaacatcagcagcgcaataacgctgttggcttcagcctcgtaattgcaggtgccgatgagtggcaggaaattgaagattttggacatgaaagacttgaatggctaaagaaatatggtgattttgataatggcattccggtcgatgacaccattgcacgcgttgaaagcaaagtggcacagctggcaacggcgttcgaacgtagcggactgcataacgtcgataacgtctccacgatttcgcgttcgatgatgaataaagccatcgaaaaaggcgtggcggcggaaaacgtcatcttcttccccaactggtcggaaattgcccgttttcagcatgttgcagatgccgatgttgatgcccttcgtaaccagcttgacctgccggataacaaaaaaatcattctttactccggcaatattggtgaaaagcaggggctggaaaacgttattgaagctgccgatcgtctgcgcgatgaaccgctgatttttgccattgtcgggcagggcggcggcaaagcgcggctggaaaaaatggcgcagcagcgtggactgcgcaacatgcaatttttcccgctgcaatcgtatgacgctttacccgcactgctgaagatgggcgattgccatctggtggtgcaaaaacgcggcgcggcagatgccgtattgccgtcgaaactgaccaatattctggcagtaggcggtaacgcggtgattactgctgaagcctacacagaactggggcagctttgcgaaaccttccgggggtacgagcagagttag

SEQ ID NO: 138018 - DNA, 2410 bp, Homo sapiens
atggggggagcagatatagcggggcccaggcgggaacacaacgcgaagcaccccaccgttggccttggaagcgccgcacagacaacgtgtctccccggaccaaaacagaagggggaccccacgcggcaccaacccgtggataaacgaaacgacgtggggccccgccagcacttttggtgctggcgagttgagatccacaaggaaaagcgtatgaaaacgggaccgttaaacgaaagtgagttggaatggctggacgatattctgaccaaatacaacactgaccacgccatccttgatgtggcggagctggacggtttattgacggcggtgttgagttctccgcaagagattgaaccggaacagtggctggttgccgtgtggggtggggctgactatgtgccgcgctgggcgtcagagaaagagatgacgcgctttatgaatctggcttttcaacatatggccgataccgcagagcgtctgaacgaattcccggagcagtttgagccgttattcggcttgcgagaagttgatggcagcgagctgacgattgtggtcccacctggtggtagaacagccaccaatgctctttcttgtggctctctctttggagaggaaacttctcccagaggtccctctgcagacagcacctcacagtccattggcggtggttctccacacgactgcgcaaaaggtattgcgctggtggcagccaatggcggcgatattcgcgattacgaaggcgttgaccgctctgcaaaaccgcagctgccgatgatcgccatcaataccacggcgggtacggcctctgaaatgacccgtttctgcatcatcactgacgaagcgcgtcatatcaaaatggcgattgttgataaacatgtcactccgctgctttctgtcaatgactcctctctgatgattggtatgccgaagtcactgaccgccgcaacgggtatggatgccttaacgcacgctatcgaagcatatgtttctattgccgccacgccgatcactgacgcttgtgcactgaaagccgtgaccatgattgccgggatatccactttcttcgccagttcacggatggcgttaatgcaggcttcagcaccttccgcgtcgtttttacctgtcacgttcacgcccattgcagcggcacagtcacgcagacgtgcagcggcgactgggtaccgagatcgatggttatgtcatggtgatgtgttgctacagatttgcgccaacacccaggacacggttatccatgcgctgcgcgatatcatcaaacacaacagctgcccggacgactgttcggtccagcacgacgccgttattgacgacggctgcgactttatcgactacctggggggcagcgaaactgtcgtagctctcaatacgccccgggcagatgactaccacccggtcatggtgctgtgcgcgaaaacggacaaagcgcaccggaatgtcatccacaccagtaaactctgcttcatcacgctgacgccagaaatcagtcagcggtcccatggtaaaagcagcaaacgcgttttctcttgtttcccagtctttttgctgctgaaacatcggcgtattgtggcacaaaaatatgcggaactggcctatgacctgttccatttggggtttgatgtcttaatcatcgaccatcgcgggcagggacgttccggtcgcctgttagccgatccgcatctcgggcatgttaatcgctttaatgattatgttgatgatctggcggcattctggcagcaggaggttcagcccggtccgtggcgtaaacgctatatactggcacattcgatgggcggtgcgatctccacattatttctgcaacgccatccaggtgtatgtgacagccattgcgctaactgcgccaatgtttgggatcgtgattcgtatgccgtcatttatggcacggcagatcctcaactgggccgaagcgcatccacgtttccgtgatggctatgcaataggcaccgggcgctggcgcgcgttgccgtttgctatcaacgtactgacccacagcagacagcgatatcgacgtaacttacgcttctatgctgatgacccaacgattcgcgtcggtgggccgacctaccattgggtacgcgaaagtattctggctggcgaacaggtgttagccggtgcgggtgatgacgccacgccaacgcttctcttgcaggctgaagaggaacgcgtggtggataaccgcatgcatgaccgtttttgtgaactccgcaccgccgcgggggtaccgagacgatggtatacaacaggaggtttttccgatgcttatctttatcccgattctcatttttgtcgcgctggtcattgtcggcgcgggtgtcaaaatcgtaccgcagggctatcagggtttacgccgtctattactctagatagagagtaa

SEQ ID NO: 138019 - DNA, 3399 bp, Homo sapiens; identical to SEQ ID NO: 121454

SEQ ID NO: 138020 - DNA, 14934 bp, Homo sapiens; identical to SEQ ID NO: 131207

SEQ ID NO: 138021 - DNA, 714 bp, Homo sapiens; identical to SEQ ID NO: 115286

SEQ ID NO: 138022 - DNA, 310 bp, Homo sapiens
ttcatgcctgtcacctctgtcaaacccagtcgaatgttctgtgactggtccctgctgtgctacaaggattggttttatgccagaaatccttgagattaagggagacgtaagcactcctctttccgatcagcacatggagcacccctcttggcacacagcaagcaccacagtgcgtgtaaccaactccaatgccaatgcggccagtcccctcatagttgctggctacaatgtgtctggctctgtccgaagtgatggggagcccatgaaaggcgtgaagtttcttctcttttcttctttagtaactaaagag

SEQ ID NO: 138023 - DNA, 4713 bp, Homo sapiens; identical to SEQ ID NO: 134616

SEQ ID NO: 138024 - DNA, 3723 bp, Homo sapiens
tcaagtccgccttgtcttctgtttcttggcttgtctctttgcatcttctgggccgctattgtcagaggctgcctggccgagcgcgcggactccctgtagccggcttgtcaactgcagcagcaaaggaatgagcttgtcatggttgtaaccggccagcagaaccagcagcgtcaatggcagggcaatgtaggatccttgtgcgatgtcctgttcaggcagcttcctcgtgggattaaaaatcaaggtggtgtgtttatggtagcccactgcggtgaaagaaacttgaggcaagatgtagtcatactgggatctggggagtgtggagtccagaagcacaacatagttctcgccgtctctgagcagtggggggaaatggaagaacagggactggccaagggaaactgtctggattggattgtcgaggttttcgcttttgtaaagcttgacccataatgtaggaaggtattcagaggaagtgatcacatttccacttaaatcaaattgattaatctgccggaaaactatgatgtttacatcatcgatgtcattattcccaacctcaatcaccctatggtgggggagcgcccgctcaatgtggtcgttgccttctgccttgagctgaacgtggtacacacatcccggcagcaatccacgtaatctgaacttgccctcttcgtctgtcacggtgtcttctccgtaaatgctgcagtcgttctggcccaccgcttccatggcaaccccttgttcgggctctccgtttaaggaagacactgtgccatagcaactgtaagcggttcggtaccccgtgatggtgatcttcaggttctggccttcctgcacctcgatcatctgtgaggatggctcaaaccggaactccttcatcatgggtttgaagtaatactggccagggctcaggtttgagaatgtcagaatgccgttgtcctgggtcaagaggttggaacgaaacaggccaccgctcagggataagaggactcccgggaggggctggtcatcctcagcttttatctcaaagcttacgcctgccagggcataggccttgaagtctccgatggttccttccaccgcagtcagaacatagccctccttctgtgaggtcaccgtgtactccaggtcactgtgcagggggccaacactgtaggcacctttgtcatcagtaaagactgtgatcagcggtgaacttgcccccttttcactgatgacaatctcgactccttccaactcggggtggatctggccttctaaaaacaggcctgccttcccatggatctcgatcagcttccctgggcagctttctccactgacaacggcttccattgaagggggataaaagagcagctctttagatgacggtgtaacagtgattttctctccagaccgcgcccagtaagagaaatcatacgagaaggggccttgtaactcatctaccatctcctgcacgggaggcttggtcattctttcttcgccttcctcattgccgtttttctccctctcctgcctgcgggcctcgatctcagccagctgctgctccctccgcagctcctgcacagacttcagagggcctaagaccaaggcgggttcactgtcgatggaagacttgatagtcacagtgacatccatcattttgtcggtggtgatagttccaaggacatggtggcgaatggctgtcaatgtaaagatactaggtgaagacgtgtcatagatatagaacgcttgctcaaaccggtggcaggagcgaggggtcactttgtacacaccaggcttggacaggcagaatcggttgactcctttgaagaggctataaatccccacattctcacgcccatttccatcctgataaaattccagagtgatggcgtgagacagggaacatctcagcatgtagcccgtctgcctgaactcaactgcagacatgtcatcctccagcacttccacctccaggctcttgttcttccagcaccaatcctcatgcatgatgcttattttgtattttccagggagcacgttgtcaaaggtgaaagtcatggcgttgaccttgccggagagctggaggctccgcttctcaccctggcggctcagggactgtagagtcaccagcaagtcaccacaggtgttcaagcaagagactttcccagaaactgatgccaagaactgtacaaaggccacatccatcatgggcctgttggtcacagtaagaggaaatgtctggggtttcaacgtcagccctgctctggtttctgcctcaggaaccatcacctgcactttgtaagtccctggttttgctttaaaacaaaatgatccatgagcatctgtctccacggtgaccaaagacttgtccttgtcttgagatgacaggacaactttgtatttattcatctgcttgacggtgtcggggaagcgaatgattgatatctgaccacagacactgaaccctgttgcaataatgtcagccagctgaggtgtgttcggtgcaattttgatggtgaccgtttcaaagtagaggtgctctttctgagcatggatggtgtatgtccctgtggttatgttctcaaggcggaatgagccatcagcttttgttttaactttgatttggttattcagggtgactactgcttctggaacaccatctccttcgggtccgttcaagaccctcccggtgacggagaatcccatgacgtggaacacgggctcgattttcaagctgtcatgctccactgtgaagtcaagtctggaaggcgccacatcaaaggtaatcctctcccctcgatagaacggaatcacagtgtagcccccacttggcaaggaatagaaagagaacgagccatcttctctggagaccgtgtagcacaaatacaccagactctcgtcttggggctggaacccaggcactggtgagacattgcagcccaggacatcctctttagttactaaagaagaaaagagaagaaacttcacccctttcatgggctccccatcacttcggacagagccagacacattgtagccagcaactatgaggggactggccgcattggcattggagttggttacacgcactgtggtgcttgcctctttcaacgcccaggttggatgagttgcgaggatttcataatctccaggcagaactttaaaaaatgcaaactttccgccagcgctgtgtagctgtggcctggatctttgcttcggtcccagtgtttctcagagacacctgaactcccgcaggacccaggggctgccatttgctgaggaccttgccattcacagagaacccagtgaagacaaagttgatgtccccaccctttgtgcagatgtcactgactccatccacatggagctccacggtcgtcggctcaaaactccaccctaggggaggctcaatcttcagaatgaaatcccccttatcatacaaagggatcataaagtaaccattattaggggcacagtctgtctggtatttcaaagtcccatgcttggtgtacagctttatctcgatgagagagtagttgatctccacgtccgacttgacgaagccaccgcagcccaccacgatgtcctccgagccgtgcgccggccccacgccgctcagcagcagcaccaccgcggcggtgaccaccgcgggccccagcggccccgcgccctggcccaccagcatggcccgacctcccccagctagacccaccgccggcagccgggtcccgcccctca

SEQ ID NO: 138025 - DNA, 1163 bp, Homo sapiens
aggaattcggcacgagccatcgtcatcgtgggactgactttggtggaagtccttggttacttatcattactgtgtttctgagaagttataaatttgccatctccctctgcacaacttacctttgggttatcaatactctggctgaccatcgtcatcgtgggactgactttggtggaagtccttggttacttatcattactgtgtttctgagaagttataaatttgccatctccctctgcacaacttacctttgtgstgtctttcctgaagactatcttcccgtctcaaaatggacatgatggatccacggatgtacagcagagagccaggaggtccaactgccgtagacaggaaggaattaaaattgtcctgggaagacatctttactttatggagacaggtggaaaccaaagttcgagctaaaatccgtaagatgaaggtgacaacaaaaggccacccgccttaccaaaataaaggaaagaaggaaaaccgcccaagaccattggaggaaactaagcatgaaagaacgtgagcacagagaagaggagaggcaggtgtcagaggcagaggaaaatgggaaattggatatgaaagaaatacacacctacatggaaatgtttcaacgtgcgcaagcgttgcggccggcgggcagaggacttactacagatgcaaaatcaccccttctgcaagaaagcctctttgcaaccgggtcagaatggcggcagcggagcatcgtcattcttcaggattgccctactggccctacctcacagctgaaactttaaaaaacaggatgggccaccagccacctcctccaactcaacaacattctataattgataactccctgagcctcaagacacctcccgagtgtctgctcactccccttccaccctcagctctaccctcagcggatgataatctcaagacacctgcggagtgtctgctctatccccttccaccctcagcggatgataatctcaagacacctcccgagtgtctgctcactccccttccaccctcagctccaccctcagcggatgataatctcaagacacctcccaagtgtgtctgctcactccccttccaccctcagcggatgataatctcaagaaactaaggaagaataaataaataatataaaaataaaatgaatactgcag

SEQ ID NO: 138026 - DNA, 1149 bp, Homo sapiens
atgagtcagcaaaacaccagtggggactgcctgtttgacggtgtcaacgagctgatgaaaaccctacagtttgcagtccacatccccaccttcgtcctgggcctgctcctcaacctgctggccatccatggcttcagcaccttccttaagaacaggtggcccgattatgctgccacctccatctacatgatcaacctggcagtctttgacctgctgctggtgctctccctcccattcaagatggtcctgtcccaggtacagtcccccttcccgtccctgtgcaccctggtggagtgcctttacttcgtcagcatgtacggaagcgtcttcaccatctgcttcatcagcatggaccggttcttggccatccgttacccgctactggtgagccacctccggtcccccaggaagatctttgggatctgctgcaccatctgggtcctggtgtggaccggaagcatccctatctacagtttccatgggaaagtggaaaaatacatgtgcttccacaacatgtctgatgatacctggagcgccaaggtcttcttcccgctggaggtgtttggcttcctccttcccatgggcatcatgggcttctgctgctccaggagcatccacatcctgctgggccgccgagaccacacccaggactgggtgcagcagaaagcctgcatctacagcatcgcagccagcctggctgtcttcgtggtctccttcctcccagtccacctggggttcttcctgcagttcctggtgagaaacagctttatcgtagagtgcagagccaagcagagcatcagcttcttcttgcaattgtccatgtgtttctccaacgtcaactgctgcctggatgttttctgctactactttgtcatcaaagaattccgcatgaacatcagggcccaccggccttccagggctacagaagaagtttccaaaaatctggttgccatgaaagaaattctgtatggcacaaatgaaaaagagcctcagacagaagcagtagctcaacttgctcaagaactctataatagtgggctccttagcaccctggtagctgatttacagctcattgactttgaggccagcttggggctccacggcctggagcaggcagtggacttggcactgcccatcgcacaagcccag

SEQ ID NO: 138027 - DNA, 2492 bp, Homo sapiens
tttcgtggggagcggcgcggcctgggagacacagagccttcaggcgccggggcgggggcacaggcggaagacaacggaagacagccccgtagcacaggcggagtgcagcggaggcccctgccgctgccgtcatgccgttcccgtttgggaagtctcacaaatctccagcagacattgtgaagaatctgaaggagagcatggctgttctggaaaagcaagacatttctgataaaaaagcagaaaaggctacagaagaagtttccaaaaatctggttgccatgaaagaaattctgtatggcacaaatgaaaaagatcctcagacagaagcaggagctcaacttgctcaagaactctataatagtgggctccttatcaccctggtagctgatttacagctcattgactttgagggcaaaaaagacgtggctcaaattttcaacaatattctcagaagacaaattggtaccgagaactcctactgttgaatacatctgcacccaaacagaatatttttgttcatgttattgaaagggtatgaatctcccagaaatagctctaaatttgtggaataatgttaagagaatgcatcagacatgaaccacttggcaaaatcattttgtggtcggaacagttttatgatttcttcagatatgtcgaaatgtcaacatttgacatagcttcagatgccatttgccacattcaagggtttacttacaagacataaattgctcagtgcagaatttttggaacagcattatgatagatttttcagtgaatatgagaagttacttcattcagaaaattatgtgacaaaaagacagtcactgaagcttctcggtgaactactactagatagacacaacttcacaattatgacaaaatacatcagtaaacctgtggaacctcaaatttaatgatgaacctgctgcgagacaaaagtcgcaacatccagtttgaggcctttcacgtttttaaggcagtttgtagccaatcctaacaagacgcagcccatcctagacatcctcctcaagaaccaggccaaactcatagagttcctcagcaagtttcagaacgacaggacggaggatgagcagtttaacgacgagaagacctatttagttaaacagatcagggatttgaagagaccagctcagcaagaagcttaatctccaataaacatctatgttaaatccaaattcagcatttgctgttagctattcagcatcagggcactctttatttgatttcatggagggaacattactgctaatctgctgttaagtgaacggtttttcattttacccttttgtttttcagtccaggttggagatcgtagctgctgctgcttgcacactagggcacatgtgggctttgtcttgatctttgtgtcatttcagaattcaaagactgtgctacgggagttctgaacatggctgggttcatgaaggcaaatgtatggatgagagtgtggtttaggaaagagggcactgatatcagattagacctatgtgtttgcacccatctttgttggcgatctgattgcagtgcggtaagtgcacacctggcatccctgcgtcagatcgtgcaccttcaggtcgcgcaccttcgctgaaggaagatgacgcatagctttatctgaaatcagaggggagctatccaaaatgggagtttgggggcagctaatgttgacatgcgaataaattgatactgaaacttatccacttcttaaaagtgtttagaagcctcataagatcataaggaaaatgtatatatgcttttcacagctttctagaattttttgacatttgattttcttgagacttgtaaacctggatatgttgaagggtatttgttaattttaccttttccaaagatacctttaaaacagtagagcctagcaatgacacccttgcattttcatttcaacactgccttcaagggtttccttttgtatataattcttagaatgctcatttcttttaaatggtttaatttgtacagcagagggaatgttattgtaggtaggtatgtaactattaacctaatactgagttttttgcaaaaaacaatggaatgctcatatgtaattggaaatacttcagatcacatgaaaatgctgatttaacatttaagtatcacagcattaaaagaaaaagaaagtagaccagtcctttgtattcagttacctaatggggtgccatcaataaggctgcggatacagcccggggagctcagtcaggccacaccttcctggcatcctattgggccttatttcatttttaaatgagttaatgaatctgccagatctgtgaatgatagaggattatgctaaattaatgctgattctttgtgtgtgtgggaaatctctgtagagcaccctttcttttcttaggactaaggaacccagtacaataggttgtggaactgaataatttaaaactttggcttctcttaggaaaagacgacttcctagtcataggtgtcctatgggg

SEQ ID NO: 138028 - DNA, 420 bp, Homo sapiens
  misc_feature (1)...(420): n = a,t,c or g
ggggtaaaggctactttgacgcacacgctcttgccatggacttcatgagcataggattccgagagtgcctaacagaagttgcgcggtacctgagctccgtggaaggcctggactcctcggatccgctgcggagtcagcttaaaacctctgcaccctgaaggtagccatacagatgccgacagatccacaaaggaacaataaagctatttgagacacannnnnnnnnnnnnnnnnnnnnnggggggggccctttaaaaaaaacaaatttaaaaacccgggggggggaaataaaaattttttttaaggggccccaaaaattaaattcgggggccgggttttaaaaannnnnnnnnnnnaaaaaccggggggtaccccaaaaaaaagcgccgtgtgggaagnnnnngnnnnnnngnnnnnnnt

SEQ ID NO: 138029 - DNA, 2539 bp, Homo sapiens
tcggcgtccgagcttccggccgggctgtgccccgcgcggtcttcgccgggatgaagcgcccctgcgaggagacgacctccgagagcgacatggacgagaccatcgacgtggggagcgagaacaattactcggggcaaagtactagctcctgtgattagattgaattctccaacaacaacatctcagattatggcaagaaagaaaaggagagggattatagagaaaaggccgtcgggatcggataaataacagtttatctgagttgagaagacttgtgccaactgcttttgaaaaacaaggatctgcaaagttagaaaaagctgaaatattgcaaatgacagtggatcatttgaagatgcttcaggcaacagggggtaaaggctactttgaccgcacacgctcttgccatggacttcatgagcataggattcccgagagtgcctaacagaagctgcgcggtacctgagctccgtggaaggcctggactcctcggatccgctgcgggtgcggcttgtgtctcatctcagcacttgcgccacccagcgggaggcggcggccatgacatcctccatggcccaccaccatcatccgctccacccgcatcactgggccgccgccttccaccacctgcccgcagccctgctccagcccaacggcctccatgcctcagagtcaaccccttgtcgcctctccacaacttcagaagtgcctcctgcccacggctctgctctcctcacggccacgtttgcccatgcggattcagccctccgaatgccattccacgggcagcgtcgccccctgcgtgccacttctctccacctctctcttgtccctctctgccaccgtccaacgccgcagccgcaacagccaccgcggctgcacacagcttccctctgtccttcgcgggggcattccccatgcttcccccaaacgcagcagcagcagtggccgcggccacagccatcagcccgcccttgtcagtatcagccacgtccagtcctcagcagaccagcagtggaacaaacaataaaccttaccgaccctgggggacagaagttggagctttttaaatttttcttgaacttcttgcaatagtaactgaatgtcctccatttcagagtcagcttaaaacctctgcaccctgaaggtagccatacagatgccgacagatccccaaaggaacaatacccctatttgagacacaaacctcacgagtggaaatgtggtattctcttttttttctctcccttttttgtttggttcaaggcagctcggtaactgacatcagcaacttttgaaaacttcacacttgttaccatttagaagtttcctggaaaatatatggaccgtaccatccagcagtgcatcagtatgtctgaattggggaagtaaaatgccctgactgaattctcttgagactagatgggacatacatatatagagagagagtgagagagtcgtgtttcgtaagtgcctgagcttaggaagttttcttctggatatataacattgcacaagggaagacgagtgtggaggataggttaagaaaggaaagggacagaagtcttgcaataggctgcagacattttaataccatgccagagaagagtattctgctgaaaccaacaggttttactggtcaaaatgactgctgaaaataattttcaagttgaaagatctagttttatcttagtttgccttctttgtacagacatgccaagaggtgacatttagcagtgcattggtataagcaattatttcatcagttctcagattaacaagcatttctgctctgcctgcaggcccccaggcacttttttttttggatggctcaaaatatggtgctgctttatataaaccttacatttatatagtgcacctatgagcagttgcctaccatgtgtccaccagaggctatttaattcatgccaacttgaaaactctccagtttgtaggagtttggtttaatttattcagtttcattaggactatttttatatatttatcctcttcattttctcctaatgatgcaacatctattcttgtcaccctttgggagaagttacatttctggaggtgatgaagcaaggagggagcactaggaagagaaaagctacaatttttaaagctctttgtcaagttagtgattgcatttgatcccaaaacaagatgaatgtatgcaatgggatgtacataagttatttttgcccatgcctaaactagtgctatgtaatggggttgtggttttgtttttttcgatttcgtttaatgacaaaataatctcttaatatgctgaaatcaagcacgtgagagtttttgtttaaaagataagagacacagcatgtattatgcacttcatttctctactgtgtggagaaagcaataaacattatgagaatgttaaacgttatgcaaaattatacttttaaatatttgttttgaaattactgtacctagtcttttttgcattactttgtaacctttttctatgcaagagtctttacataccactaattaaatgaagtcctttttgactatt

SEQ ID NO: 138030 - DNA, 1419 bp, Homo sapiens
atgcccggcaacttgaccaggaaggaatcctcctcccccctcacagacaggcactgccacacatcttcccagttctcacataggttcaatgccatctctccctttccacctgctgaacttggctgtgaccatgtggcctcagctgctgcggatcccctgggcgtgccaggggtagcaactcagtgggcagggggcctgtccgcagctctggcggctccccgcaggccccactcatgccggcggttgcaggtactgggtgctcttggcattctcaagagcgcaggaagagtcaattttaggtgttttgggccactaagtatccgcggcaagccgaagaccccgctctgggagcaagagaagccgaagctgcagacagggtcagcgggatcccagcagaagagggtgatgctgaagccttcccggggcgcggaccgagtgctagggcgaggtagtcagcgacccgctgagaccgaccgagagacgacggatctgaggcagagaaagaggatgaaggaaggaaaagagagaacactaagagcggcccgcggagagacgcggagaagcaacgggaatctagcccggcagactgtacccgagggctgccgaagtcagacccaagcactacaggttgtgcggaacgcgaggacccctccctgtatccccaacctggaccgacccccggaagcctgctcctccgggtctacaggtggcatgatgcccttgcgagtcgcccccagtcctgtggcgtctggcgaatcctcgcacctgagcagcggacggggcgatagggggttggtgcgctgcaaagtcgaggagctgcgtttccagcctgtcgccttccccgagttcatcccgccacccaccagcccccgtgccgactccgagagcggagactggtgttgcacagtcctagctaatccctcgaaaacaggaagcggaggctgggagcagcggaagacagaatgccgcccaaggccggacccagaacccgcagcaaagaggatctgcaaccttgtcctcctcactgctggccaagagtccacgccgcggaggtcgcagctgactaggagtcccgcggccgagcggcgcacagaggagcaaggagaggaccggaagaaccgtgctcttggctgcaatttgtttccaagagtgccaagacatgcccgagactctcagcgcgctctcagagcatcaactcaagcaccgaaaaaatctacctttgccttcccggggattcattctggggctgtttgctccaagaggcggatttgtggggtccagggcgaaccctttcctcttccctttgccagtcagtgctcctcctgcctaaaaattttaccctcaccaggaccaacgaaagagctgacctcttacctcctccacagcggctgtggctttctagacaagctgcgtgtctga

SEQ ID NO: 138031 - DNA, 350 bp, Homo sapiens
ccaagaagctggagaaactaaaaaagcggactcagagggccattgccgagctgatccgtgaaaggctgaaaggccaggaagacagcctagcctctgcagtggatgctgccaccgaacaaaagacctgtgactccgactgaggcatgccctgccccaccactcgcccatcaagtctgaaacccccatggatgaggtcagctccttgtctgctgggtggcccctgccattctgaatggaggcagaaccagcaacaactctgggcgtgcctgtgtctgcacatgtggatgtacatatgtctgtatatatgtatatattttgaactttctaaaaaaaaatctggaaatagaaac

SEQ ID NO: 138032 - DNA, 1157 bp, Homo sapiens
tcagctggtggaattccgcgggcaagatggaggcgactacggctggtgtgggccggctataggaagaggcgttgcggcgaaaggaacggctgaaggccctacgggagaaaaccgggcgcaaggtgagaagtgtggagtgagggtcgcagttgaggcgtccagcgttcggggtccgggtcgcgcttgaggagagcaaagggctaataaggaaagacagctgccgagggcgcgcatgcgcgggcgctaacgcatgcgcgagaagacggcgccctcccacgatgtctggggctgcttggcgtgggactcctctggcgctggtgcggtcgtcgcgcacgcgcggtgtgtgggcttggcagtggtcagcgacccgcagtccatctgactcctgcttcccgggtgttgctcgtgacaaggaagatggggagccaaagaccaagcatctcagagaagaggaggaagaaggcgagaagcacagggaacttaggctgcggaactatgtcccggaggatgaggacctgaagaagaggagggtgccccaggccaaaccggttgcagtggaggagaaagtgaaggagcagctggaggccgccaagcccagagcccgtcatcgaggaggtggacctggccaacctcgctcctcggaagcctgactgggacctcaagagagatgtggccaagaagctggagaaactaaaaaagcggactcagagggccattggccgacttgatccgtgaaaggctgaaaggccaggaagacagcctagcctctgcaagtggatgctgccaccgaacaaaaggacctgtgactccgactgaaggcatgccctgcccccaccacttcgcccatcaggccttgtcctgcaggggaatggtcttgggccagggatgggggctaggcttgccatcacctccaagtttggcttctgagcagagactccctgcccatcaacgtctgaaacccccatgaatgaggtaaggtcctttgtttggtgggtggcccctgccattttgaatggaggcagaaccagcaacaactctgggcgtgcctggtgtctgcacatgtggatgtacatatgtctgtatatatgtatatatttttgaactttctaaaaaaaaaatctggaaatagaaacaagtaaacccctgtgtgtggcaaa

SEQ ID NO: 138033 - DNA, 585 bp, Homo sapiens
  misc_feature (1)...(585): n = a,t,c or g
aagggaccgtcggtggcgtctgcggccccaggaggagctcatccgccagcccccaggagcaagaccaagaccgcaggaaggactggggccacgtggagctgctggaggtgctccaggcgcgggcactcttcaccgccgtgcccctgtctgaggaggatcgggccactgttctgaaggccgtgcacaaggtgaagcccaccttcagcctcccgctgcagctgccgcccccggtcaacacctccaagctgctcagggacgtgtatgccaaggatgggcgtgtgtcctacccgaagctgcacctgcccctgaagaccctgcagtgcctctttgagaagcagctccacgtggagctggccagcaggatgtgcgtggtgtccgtggagaagcccacgttgccaagcaaggaggtcacgcacgcgcggaaganccctgaagaccctgcgggaccaatgggagaaagcactgtgccgggagctacgggagaccaagaaccgcctagagcgccaggtgtacgagggccggttctcactgtaccccttcctgtgcctgctggacgagtgcgaggtggtgcggatgctcctgcag

SEQ ID NO: 138034 - DNA, 3835 bp, Homo sapiens
  misc_feature (1)...(3835): n = a,t,c or g
atgcgcaggcgcgggccggtggggtggcctggagcggcgtgcgtaatgtcggcactttgctggggccgcggagcggcggggctcaaacgagccctacggccttgcggccgcccgggactccccggcaaagaagggaccgccggtggcgtctgcggccccaggaggagctcgtccgccagcccccaggagcaagaccaagaccgcaggaaggactggggccacgtggagctgctggaggtgctccaggcgcgggtgcggcagctgcaggctgagagcgtgtcggaggtggtggtgaacagggtggatgtggcgcggctcccagaatgtggcagtggagatggtagcctccagccacccaggaaggtccagatgggggccaaggatgccaccccggtgccctgtggccgctgggcaaagatactggagaaggataagcggacccagcagatgcgtatgcagcggttgaaggcgaagctgcagatgccattccagagcggggagttcaaggcgctgaccaggcgcctgcaggtggagccccggctcctgagcaagcagaatgggtgggtgcctggaggactgcacgcgccaggcccccgagagcccctgggaggagcagctggcccggctgctgcaggaggcccctgggaagctgagcctcgatgtggagcaggccccgtcggggcagcactcgcaggcccagctctcaggtcagcagcagaggctcctggccttcttcaagtgctgcctgctcactgaccagctgcccctcgcccaccacctgctggtcgtccaccacggccagcggcagaagcggaagctgctcacgctggacatgtacaacgccgtgatgcttggctgggcgcggcagggtgccttcaaggagctggtatatgtgttattcatggtgaaggatgccggcttgactccggacctgctgtcctatgcggctgccctccagtgcatggggaggcaggaccaggacgccgggaccatcgaaaggtgtctggaacagatgagccaggaggggctgaagctgcaggcactcttcaccgccgttctgctgtctgaggaggatcgggccactgttctgaaggccgtgcacaaggtgaagcccaccttcagcctcccgccgcagctgccgcccccggtcaacacctccaagctgctcagggacgtgtatgccaaggatgggcgtgtgtcctacccgaagctgcacctgcccttgaagaccctgcagtgcctctttgagaagcagctccacatggagctggccagcagggtgtgcgtggtgtccgtggagaagcccacgttgccaagcaaggaggtcaagcacgcgcggaagaccctgaagaccctgcgggaccaatgggagaaagcactgtgccgggcgctgcgggagaccaagaaccgcctagagcgcgaggtgtacgagggccggttctcactttaccccttcctgtgcctgctggacgagcgcgaggtggtgcggatgctcctgcaggtcctgcaggcgctgcccgcccaaggtgagtccttcaccaccctggcccgggagctgagtgcgcgcactttcagccggcacgtggtgcagaggcagcgggtcagtggccaggtgcaggcgctgcagaaccactacaggaagtacctctgcttgctggcctccgacgccgaggtgcccgagccctgcctgccgcggcagtactgggaggagctgggggcgcccgaggccctgcgggagcagccctggcccctgccagtgcagatggagctgggcaagctgctggcggagatgctggtgcaggctacgcagatgccatgcagcctggacaagccgcatcgttcctctcggcttgtccccgtgctctaccacgtgtattccttccgcaacgtccagcagatcggcatcctgaagccgcacccggcctacgtgcagctgctggagaaggccgcggagcccacgctgaccttcgaggcggtggatgtacccatgctttgccccccgctgccctggacatcgccgcactctggtgctttcctggtcaggccccaccaagctgatgtgcacggtggaaggcgccacgcaggcaccaggagttgctggaaacctgcccgcccaccgcgttgcatggcgcactggacgccctcacccaactgggcaactgcgcctggcgcgtcaacgggcgcgtgctggacctggtgctgcagctctttcaggcccaggggctgcccccagctaggcgtgccggccccgccctccgaggcgccccagccgcccgaggcccacctgccgcacagcgccgcgcccgcccgcaaggccgagctgcgccgtgagctggcgcactgccagaaggtggcccgggagatgcacagcctgcgggcggaggcgctgtaccgcctctcgctggcgcagcacctgcgggaccgcgtcttctggctgccgcacaacatggacttccgcggccgcacctacccctgcccgccgcacttcaaccacctgggcagcgacgtggcgcgggccctgctggagttcgcccagggccgcccgctcggcccgcacggccctgnattggctcaagatccacctggtcaatctcacggagttgaagaagcgggagccgctgcggaagcgcctggcctttgcggaggaggtgatggatgacatcctggactccgcggaccaaacccttgacgggccgaaagtggtgggatgggcgcgggaggaaccctggcagacgctggcctgctgtatggaggtggcgaacgctgtgcgcgcctccgaccctgccgcctatgtctcccacctccccgttccatcaggaagctacttgcaacggcctgcagcattatgctgctctgggccgcgacagcgtgggcgccgcctcccgtcaacctggagccctcggatgtgccgcaaggacgtgtacagcggcgtggccgcgcaggtggaggtgttccgtaggcaggacgcccagcggggcatgcgggtggcacaggtgctggaaggtttcatcacccgcaaggtggtgaagcagacggtgatgacggtggtgtacggggtcacgcgctatggcgggcgcctgcagattgagaagcgcctccgggagctgagcgactttccccagaagttcgtgtgggaggcctctcactatctcgtacgccaggtcttcaagagtctacaggagatgttctcggggaccccgggccatccagcactggctgaccgagagtgcccgcctcatctcccacatgggctctgtggtggagtgggtcacacccctgggcgtccccgtcatccagccctatcgcctgggactccaaggtcaagcaaatagggaggtgggaattcagagcatcaccttacacccacaacggagacatcagccgaaagcccaacacacgtaagcaggaaggaacggctttcccgcccaattttcatccactcgctggactcctcccacatgatgctcaccgccctgcactgctacaggagtcctccgctctgccacaggaagggcctgaccttcgtctctgtgcacgactgttactggactcacgcagctgatgtctccgtcatgaaccaggtgtgccgggagcagtttgtccgcttgcacagcgagcccatcctgcaggacctgtccagattcctggtcaagctggttctgctctgagccccagaagatcttggaggccagccagctgaaggagacactgcaggcggtgcccaagccaggggccttcgacctggagcaggtgaagcgttccacctacttcttcagctgacaccccgtgagccttgtcagggggtaaataaagctcttttgccacccaaaaaaaa

SEQ ID NO: 138035 - DNA, 805 bp, Homo sapiens
acggctgttattaaaatgttttattcagacagctttattgaggtataatcgacttacaataaatgtcacatgtctaaagtgtacaatgtgaaaaatttgacatatgtatacgtccatgaaaccatcatcacagccaagatcatggatatctacaccacaccccaaagcttgctcctccctgtcctttccgctctccctggacaactggatgaacattaacctgcgagaagtcatctgcacgtccagggacggggacaagttctggcggatgcccgagtgctacatccgcggcagcaccatcaagtacctgcgcatccccgacgagatcatcgacatggtcaaggaggaggtggtggccaagccccgcggccgcggaggcctgcagcagcagaagcagcagaaaggccgcggcatgggcggcgctggccgagttgggtctcccctctccagtggacgtacctggggcgggaagacagccacacgttgcatccctccttcttggggttgcccttgcagcgctgcctcggaggctcccaaaccttcccgggcccccttcttgtcccttggccatgaaccgaggcccaggcagaggagccccgagacatgggactcagccctcgtctcagtgcgcgtcatggcggtcgtcagggcacatcaagtcacctccgcaagccccagtttcccctatgagagggaatggtggtgcccatctgtccaggccgctggcaactacacttggaaccttgcgtggctctatccagagccaaggtcggccgcccccaccggagatgatgaattggcataa

SEQ ID NO: 138036 - DNA, 1261 bp, Homo sapiens
catcccaggctggagggagccccagtcagccactcttgagccaggcccacgggcagaggataggagccagtcttccttgtgagtgcacaatgggggctgcgcctaccacaacccacccttgctcctgggtgaaggattgcctggggtcaggacagatcctgcctgcagggtggaccctttgccacgtatgtcccgggactgatactgtgcagcttgcaggggtggtacggggtgcaggctgggcaggatctgcagggcctcccgcgctcccagggctgggccagacggcccggtggtaagttaataacctgctccccttctccgcaggacggggacaagttctggcggatgcccgagtgctacatccgcggcagcaccatcaagtacctgcgcatccccgacgagatcatcgacatggtcaaggaggaaggtggtggccaagggccgctggccgcgaagggccttgccagcaagcagaaagccagcagaaagtgtccgcggcatgggcggcgcgtggccgatgtgtgtttggtggccggggccgagggatgggatcaccaatcacaggaccgatgccatccagataagaagcctggcagacaggcggggcaaacagtgagcgcccacccagaccggctgctgcgcccccttcttgccagggtgggcgatttccgctccacagtctcggaacggaatctgcttcagaaaggaagaggcaggccgcccaggggggaacccccctttcgtgttttggtgaccccttccctttttaaggtgaaagccccttttttcttgcctaaaaaccggcaaattctccgggttagaaaatgtttactttgttgtttttttggtttttgtgaaacggggccgtcccaaaagcttggctggaatcccctagaaagagtcttgtgtttgaaggcaatcttttcaagccccttcgcctctggtttctcaagggcaagccattttcccaggcggggtttgtttttgcattttcttgggagcctctccgaagcaagcaaccagacggggagatttttaattttaaagctgtttcatgctggggactgacagcctgcagggtttccttgggcgcggcccaaaaatttgccttcaaaacaaacccggggacgtttggaaaggcctttcgaaaccgtggcagggggatgcctcggggccctggcccttcgcttccttctcttgtgttatggaagctaaaaacaaataaaactacacactgcaaaaaaaaaaaaaaaaaaag

SEQ ID NO: 138037 - DNA, 531 bp, Homo sapiens
  misc_feature (1)...(531): n = a,t,c or g
cctgtgtccctggagtgttacacagtgcctcctgaagacaacctggccctccttcagctctacttccggaccctggttactggtgcgtccgcccacgttggtgccccgtgctctatgctgtggcnntgtggnctcatgtcaatagcttcatcttctctcagagacctaggatagttgatatagatggaaagatgggtacgttgtcctgtatccagcctttcaacagatgtctggccagacgaagaacattgtgtcctaatggtaggcaggagaccaaggagcagaaggcttgccttcctgggagcaggttgtttgagctgttttagagcagtgagccctaccattacatcctgatatctggggcttctgaaggtctgtgctgggagtgaagagtggcttagctatttacccgctctttggggacagggcaaactaaatgcatcccttcttacctaactcccaacccctgccctgggctgaggcatatgaatgctatagttgtgcattaaaataaatgttttttatctcctg

SEQ ID NO: 138038 - DNA, 343 bp, Homo sapiens
gcgacctggcggcatgcaagcttgtggactggccgccgttttaccaccgtctcgacttggtaaaacccctggcggtaccccactttattgggcttgtgcgcccatctcccatttcgcccgcttgcgcgtaatgccgaacaaggccgcacctgatcggccttttccaacaggtagttccctgcttttctgtctgcaggcagcgctgcagccactgccagccacccatgctgccctctatcatggtatggccttggccctgctgagccggctgctgcccggaagtgagtacctcacccatgagctgctgctgagctgtgtattccggctggagttcctcccgtaa

SEQ ID NO: 138039 - DNA, 712 bp, Homo sapiens
atggccaatttcatgctttttaatggctgcttctcagttcccagttttccccaacatctgctctgtagtctttaaccctgatccttgtgctagaaggacagatgtttgtctaggacctgatctctgccctcatgatttggtttcatgtgatcgttatccacacaccttatgtatgtatatacattcctaccctccccctcagcacgtcatttcccctgtcacagttgcctgtgtccctggagtgttacacagtgcctcctgaagacaacctggccctccttcagctctacttccggaccctggttactggtgcgctccgcccacgttggtgccccgtgctctatgctgtggctgtggctcatgtcaatagcttcatcttctctcaggacccacagagctcagtaagttacatctccatcttcagaggaaggaagggagctagcaattgagctgcctctgggccagctggggaagaggtaagtgtcaagcaaggccagtggtgggtaccagccctcggctcagtgccacctctccctgttctgcttctaggatgaggtcaaagctgcccgcaggagtatgctgcagaaaacatggctgctggcagatgagggtctccggcagcacctcctgcactataagcttcccaattccacgctcccagagggctttgagctctattctcagatgccccctctgcgtcagcactacctcc

SEQ ID NO: 138040 - DNA, 3158 bp, Homo sapiens
gaggagctcctcgacagcaccttctcttggtaccatggagctttgacgttccctctgatgcccagccaggaggacaaggaggatgaggacaaggatgaagaatgcccagcaggaaaagcaaaaaggaaaagccctgaagaagaaagccggcctccacctgacctggcccgacatgatgtcatcaaggggctcctggctaccagcctgctgcctcggctgcgctacgtgctggaggtgacatacccaggacctgcggtgggtccttgacatcctggctgtgctcatccgcctggcccggcattccctggaatcagccacaagggtcctggagtgccctcggctgatagagactatagttcgagagttcttgcccaccagttgggtctcctgtgggggcagggcctacccctagtctatacaaagtaccctgtgctactgccatgaaactacttcgtgtcctggcctcagctgggaggaatattgctgcccggctgttgagcagctttgatctccggagccgcctgtgccgcatcatagctgaggctccccaagaactggccttgcccccagaggaagctgagatgctgagcaccgaggccctccgtctgtgggctgtggctgcctcctatggccagggcggttacctttacagggagctctacccagtgctgatgcgggccttgcaggtggtgccgcgggagctcagcacccacccacctcaacccctgtccatgcagcggatagcctcactgctcactctcctcacccagctaaccctggcagccggcagtacccctgctgaaaccatcagtgattctgctgaggccagcctctcggccaccccttccttagtcacttggacacaggtgtctgggctccagcctcttgttgagccgtgtctaaggcagaccttgaagttgctgtccagacctgagatgtggagagccgtgggcccagtgcccgctgcctgcctgttgttcctgggagcctactaccaggcctggagccagcaaccaagctcatgcccggaggattggctccaggacatggagcgcctgtcagaggagctgctgctgccactgctgagtcagcccacactgggcagcctgtgggattcccttaggcactgctcccttctctgcaacccgctgtcctgtgtgccagcccttgaagctccccccagcctcgtgtcactgggctgctcgggaggctgcccccgtctcagtctggctggctcagcctcacccttcccattcctcactgccctcctctctcttcttaataccctggcccagatccacaaggggctgtgtggccagctggctgccatattggctgccccgggactccagaattacttcctccagtgtgtggctcctggggctgccccacacctcacacctttctctgcatgggccctgcgccatgagtaccacctgcagtacctggcactcgctctggcccagaaagcggcagcgctgcagccactgccagccacccatgctgccctctatcatggtatggccttggccctgctgagccggctgctgcccggaagtgagtacctcacccatgagctgctgctgagctgtgtattccggctggagttcctcccggaaagaacatcagggggtccagaggcagccgacttctctgaccagctgtcgttaggaagcagcagggtccctcggtgtgggcaagggacttttgctggctcaggcctgccaagacctccccagcatccgcaactgctacctgactcattgctcgccagcccgagccagtctgctggcctcccaggctctgcaccgaggggagctacagcgagtcccaaccctgctactgcccatgcctacggagccgctgctgcccaccgactggcccttcctgccactgattcgcctctaccaccgggcttcaaacaccccctcggggactctctcccacagacaccatggggcacagccatggcgggtcctgcagtgggtgctagttttggagagctggcgcccccaggctctctgggctgtgccccctgctgcccgcctggcacggctcatgtgtgtgttcctggtggacagtgagctgttccgggagtccccagtacagcatctggtgggcagccctcctcgcacagctctgtcagcctcaagtcttgccaaacctcaacctggactgcggactccgtggcctgacgtctttccctgacctctatgccaacttcctggatcattatgaggctgtctcttttggggaccacctctttggggccatggtcctcctgcccctgcagcgtcggttcagtgtcaccttgcgccttgccctctttggggaacacgtgggagccttgcgagctctgagcctgcctctgacccagttgcctgtgtccctggagtgttacacagtgcctcctgaagacaacctggccctccttcagctctacttccggaccctggttactggtgcgctccgcccacgttggtgccccgtgctctatgctgtggctgtggctcatgtcaatagcttcatcttctctcaggacccacagagctcagatgaggtcaaagctgcccgcaggagtatgctgcagaaaacatggctgctggcagatgagggtctccggcagcacctcctgcactataagcttcccaattccacgctcccagaggagctttgagctctattctcagttgccccctctgcgtcagcactacctcccagagactgacttccaacagtgcctccaaaaaatggggtatccaaagaccctaggaatagttgatatagatggaaaagatgggtacgttgtcctgtatcccagcctttcaacaagaatgtctggcccagacgaaagaacattgtgtccctaatggtaggcaggagaccaaggagcagaaggcttgccttccctgggagcaggttgtttgagctgttttagagcagtgagccctaccattacatcctgatatctggggcttctgaaggtctgtgctgggagtgaagagtggcttagctatttacccgctctttggggacagggcaaactaaatgcatcccttcttacctaactcccaacccctgccctgggctgaggcatatgaatgctatagttgtgcattaaaataaatgttttttatctacctggaaaaaaaaaaaaa

SEQ ID NO: 138041 - DNA, 821 bp, Homo sapiens
atggaatcaaaaagagcccgcattgccaagacaatcctaagccaaaagaacaaagctggaggcatcacactacctgacttcaaactatactacaaggctacagtaaccaaaacagcatgctactggtaccaaaacagagatatagaccaatggaacagaacagagccctcagaaataataccacacatctacaaccatctgatctttgacaaacctgacaaaaacaagaaatggggaatggattccctatttaataaatggtgctgggaaaactggctagccatatgtagaaagctgaaactggatcccttccttacaccttatgcaaaaatcaattcaagatggattaaagacttacatgttagacctaaaaccataaaaaccctagaagaaaacctaggtaataccattcaggacataggcatgggcaaagacttcatgacgaaaacacctaaagcagtggcaacaaaagccaaaactgacaaatggcatctaattaaactaaagagcttctgcacagcaaaagaaactaccatcagagtgaactggcaacctacagaatgggagaaaatttttgcaatctacccatctgacaaagggctaataaccagaatctacaaagaactcaaacaaattcacaagaaaaaatcaaacaaccccatcaaaacggacatggatgaagctggaaaccataattctcagcaaactatcgcaaggacaaaaatccaaacaccgcatgttctcactcataagtggaaattgaacaatgagaacacatggacacaggaaggggaacatcacacactggggcctgttgtggg

SEQ ID NO: 138042 - DNA, 613 bp, Homo sapiens
ggtggagactcaagaggtttactttgtaggaacaggccagttcatttcttcacacaagatcacaaaccacgtaatccgctggagaaagaacgaattcagaatgcaggtggctctgtaatgattcagcgtgtgaatggctctctggctgtatcgagggcccttggggattttgattacaaatgtgtccatccaaaaggtcctactgagcagcttgtctcaccagagcctgaagtccatgatattgaaagatctgaagaagatgatcagttcattatccttgcatgtgatcctatctgggatgttatgggaaatgaagagctctgtgattttgtaagatccagacttgaagtcactgatgaccttgagaaagtttgcaatgaagtagtcgacacctgtttgtataagggaagtcgagacaacatgagtgtgattttgatctgttttccaaatgcacccaaagtatcgccagaagcagtgaagaaggaggcagagttggacaagtacctggaatgcagagtagaagaaatcataaagaagcagggggaaggcgtccccgacttagtccatgtgatgcgcacattagcgagtgagatcatccccagccttccacccg

SEQ ID NO: 138043 - DNA, 1686 bp, Homo sapiens
tcagaatatctgctgagggcatggcccagaacatgctgaaatgtgccagttgtagccagaagggagatttttcaatgcagtgactttcatcacagatacagctttctcctggccatcagaaaaattaggcatgtctcctaatgctttccctccctccttcccccaccccacaacaggtcccagtgtgtgatgttccccttcctgtgtccaagtgttctcattgttcagttcccacctatgagtgagagtatgcggtgtttgtttttttggtcttgcgatagtttgctgagaatgatggtttccagcttcatccatgtcccataatttctggcagtaaatatcaggagcactttctttcctactcagtatctgattcaccagaaacttctgctggattttaagggcatctagaaaatggctacatcttattactcgcagtgctaccagccttatcaaatcatcatcatcttttacctgttcgctcacattcactaattctttgcctttcacttgcttctttgtgcctgttctgcaaacccccagttctggttggatccagctctctgcaaatacagcttgactacttttcccagtctccttgacagctggctgaagccctgggactgatttctggtcagtgaaatgtcggcagaaaaggtggcaactacccccgggcttgacccctaaacatctgtgaaactgtctgggtctttctcttatgatcgtgaaggaattttggtggacttcgaggttaggagtagggtgtggaggggatgtagttatagacactcgatgtggacaattgacgatgtgaagagcgactgctacccctaaacctggctgtgattgctttgccaagtggacttgaaaggtggtcattctttgctgtgtataacgggcatcctggttctcaggttgccaaatactgctgtgagcatttgttagatcacatcgccgataaccaggatttacagggtctgcaggagcaccttctttggaaaatgtaaagaatggaatcagaacaggtttccagagcctgaagtccatgacactgaaagatctgaagaagatgatcacttcattatccttgcatgtgatagtatctgggatgttatgggaaatgaagagctctgtgattttgtaagatccaggcttgaagtcactgatgaccctgagaaagtttacaatgaaatagtcgacacctgtttgcataagggaagtcaagacaacatgtgtgtgattttttctctggtttccaaatgcacccaaagtatcaccagaagcagcgaagaaggaggcagagttgggcaagtacaggcttaactccatcttgagtgaccagtgatttgctactttgtgcctctgataaagagaagctgcctccattcggaggtgcccattagggtctggacttgtcctcttcttgagacagacgatgcagttagggagagggtaagtcctgaccccaatgggaacggtgaatgcagacagcttctctaccagaggctccaagtagcaaattataacgccctttataaagcagcttctgacataaaaaacatgacctactgaggccttgtgacttgctggtctgatatccacattgggcagcgggcgggtctgtttggaatcaatgacaagttgggaagggcccaccgagccttggctggcaaaaggaagcagcat

SEQ ID NO: 138044 - DNA, 2717 bp, Homo sapiens
atgggcaaagacttcatgacgaaaacgccaaaagcaattgcaacaaaagccaaaattgacaaatgggatctaattaaactaaagagcttctgcacagcaaaagaaactttcatcagagtgaacaggccccagtgtgtgatgttccccttcctgtgtccatgtgttctcattgttcagttcccacctatgagtgagaatatgcggtgtttggttttttgttcttgcgatagtttactgagaatgatggtttccaatttcatccatgtccctacaaaggatatgaactcatcattttttatggctgcatagtattccatggtgtatatgtgccacattttcttaatccagtctatcattgttggacatttgggttggttccaagtctttgctattgtgaatagtgccgcaataaacatacgtgtgcatgtgtctttatagcagcatgatttatagtcctttgggtatatacccagtaatgggatggctgggtcaaatggtatttctagttctagatccctcaggaattgccacactgacttccacaatggttgaactagtttacagtcccaccaacagtgtaaaagtgttcctatttctccgcatcctctccagcacctgttgtttcctgactttttaatgattgccattctaactggtgtgagatgatatctcatagtggttttgatttgcatttctctgatggccagtgatgatgagcatttcttcatgtgttttttggctgcataaatgtcttcttttgagaagtgtctgttcatgtccttcgcccactttttgatggggttgtttgtttttttcttgtaaatttgtttgagttcattgtagattctggatattagccctttgtcagatgagtaggttgcgaaaattttctcccatgttgtaggttgcctgttcactctgatggtagtttcttttgctgtgcagaagctctttagtttaattagatcccatttgtcaattttgtcttttgttgccattgcttttggtgttttggacatgaagtccttgcccacgcctatgtcctgaatggtaatgcctaggttttcttctagggtttttatggttttaggtttaacgtttaaatctttaatccatcttgaattgatttttgtataaggtgtaaggaagggatccagtttcagctttctacatatggctagccagttttcccagcaccatttattaaatagggaatcctttccccattgcttgtttttctcaggtttgtcaaagatcagatagttgtagatatgtggcattatttctgagggctctgttctgttccattgatctatatctctgttttggtaccagtaccatgctgttttggttactgtagccttgtagtatagtttgaagtcaggtagtgtgatgcctccagctttgttcttttggcttaggattgacttggcaatgcgggctcttttttggttccatatgaactttaaagtagttttttccaattctgtgaagaaagtcattggtagctttatggggatggcgttgaatctgtaaattaccttgggcagtatggccattttcacgatattgattcttcctacccatgagcatggaatgttcttccatttgtttgtctcctcttttatttccttgagcagtggtttgtagttctccttgaagaggtccttcacatcccttgtaagttggattcctaggtattttattctctttgaagcaattgtgaatgggagttcacccatgatttggctctctgtttgtctgttgttggtgtataagaatgcttgtgatttttgtacattgattttgtatcctgagactttgctgaagttgcttatcagcttaaggagattttgggctgagacgatggggttttctagatatacaatcatgtcgtctgcaaacagggacaatttgacttcctcttttcctaattgaataccctttatttccttctcctgcctgattgccctggccagaacttccaacactatgttgaataggagcggtgagagagggcatccctgtcttgcgccggttttcaaagggaatgcttccagtttttgcccattcagtatgatattggctgtgggtttgtcatagatagctcttattattttgaaatacgtcccatcaatacctaatttattgagagtttttagcatgaagggttgttgaattttgtcaaaggctttttctgcatctattgagataatcatgtggtttttgtctttggctctgtttatatgctggattacatttattgatttgcgtatattgaaccagccttgcatcccagggatgaagcccacttgatcatggtggataagctttttgatgtgctgctggattcggtttgccagtattttattgaggatttttgcatcaatgttcatcaaggatattggtctaaaattctcttttttggttgtgtctctgcccggctttggtatcagaatgatgctggcctcataaaatgagttagggaggattccctctttttctattgattggaatagtttcagaaggaatggtaccagttcctccatgtacctctggtagaattcggctgtgaatccatctggtcctggactctttttggttggtaaactattgattattgccacaatttcagagcctgttattggtctattcagagattcaacttcttcctggtttagtcttgggagagtgtatgtgtcgaggaatgtatccat

SEQ ID NO: 138045 - DNA, 2796 bp, Homo sapiens
atgggccgggcgtcgcggctcacgcctgtaatcccagcactttgggaagccgagggccttagcagcggctgccgcagctcaatcgcggagcaactagccgggcgtctgcgggagccgagcgtgggacctgtgggcctaccacctggtgccctcatggagacaagaagccctgggttgaacaacatgaagccccagtcactgcagctggtactggaagagcaggtgctggcactacagcagcagatggcagagaatcaggcagcctcctggcggaagctgaagaactcccaggaggcccagcagagacaagcaacccttgtgaggaagctgcaggccaaggtgctgcagtaccgaagctggtgccaagagctggagaagcggctagaagccactggaggaccaatcccccagaggtgggaaaatgtggaggagccaaacctggatgagctgctggtccgattggaggaggagcaacagaggtgtgagagtctagcagaggtgaacacccagcttcgactgcacatggaaaaagctgacgtggtgaataaagcccttagggaagatgtggaaaaactgacagtggactggagccgggcccgggatgagctaatgaggaaggagagccagtggcagatggagcaggagtggagtctgctgttttccttgcttgtactcagagatctgatggagctaaaagctgagcatgtgaggctttcagggtctctgttgacctgttgtctgcgcttgactgtgggagcacagtctcgggaacccaacggatctggaagaatggatgggcgggagccggcccagctgctgctgctactagccaagacccaggagctggagaaggaagcccatgaaaggagccaggagttaatacagctgaagagtcaaggggatctggagaaggctgaacttcaggaccgggtgaccgagctctctgctctgttgacccagtctcagaagcaaaatgaagattatgaaaagatgataaaggctctgagagagacagtggagatcctggagacaaatcacacagaattaatggaacatgaagcatctcttagtaggaatgcgcaagaggagaagttgtctttacagcaggtgatcaaggatataacccaggtcatggtggaagaaggggacaatatagcccaaggctctggtcatgagaactctttggaattggactctagtatcttctcccagtttgattaccaggatgcagacaaggctcttactctggtgcgttcagtgctgactcggagacgccaggctgtgcaggacctaaggcagcagcttgcaggctgtcaagaggctgtgaacttgttgcaacagcagcatgatcagtgggaggaagagggcaaagccttgagacagcggctgcagaagctcactggggagcgggacactctggcagggcagactgtggacctccagggagaggtggactctctcagcaaggagcgagagctgctgcagaaggccagggaagagctgcggcagcagctggaggtgctagagcaggaggcatggcgcctgcgaagggtaaatgtggagcttcagctgcagggggactctgcccagggccagaaggaggaacagcaggaggagctgcacctggctgtccgggagagggagcgtcttcaggagatgctgatgggcctggaagccaaacagtcagaatcactcagtgaactgatcactcttcgggaagccctggagtcaagtcacctggaaggggagttactgaggcaagagcaaacggaagtgaccgcagcgctggctagggcagagcagtcaattgcagagctgtcgagttctgaaaacaccctgaagacagaagtagctgatcttcgggctgcagctgtcaagctcagtgccttaaatgaggctttggcgttagataaagttgggctgaaccagcagcttctccagttagaggaggagaaccagtctgtgtgcagcagaatggaggccgcagagcaggcgagaaatgctttgcaggtcgacctggcggaggcagagaagaggagggaagccctgtgggaaaagaacactcacctggaggctcagctgcagaaagctgaggaggctggggctgagctgcaggcagatctcagggacatccaagaagagaaggaagaaattcaaaagaaactaagtgagtcacgtcaccagcaggaggcagccacgactcagctggagcagctacatcaggaggcaaagcgacaggaagaagtgcttgccagggcagtccaggagaaggaggccctagtacgagagaaagcggctctagaggtgcggctgcaggccgtggagcgtgaccggcaggacctcgctgaacaactacaggggctcagctcagccaaggagctactggagagcagtctgtttgaagcccaacaacaaaattctgtgatagaggtcaccaaggggcagctggaggtccagattcaaactgtcactcaagccaaggaagtaatccaaggggaagtgaggtgcctgaagctggaactggacactgaacggagtcaggcagagcaggagcgggatgctgcagccagacagctggcccaggctgagcaagaagggaagactgccttggagcagcagaaggcagcccatgagaaagaggtgaaccagctccgggagaaatgggtctccaaggacaaacgggccctcaagttcatcaagaaaagagtggggacgcacatccgcactaagaggaggcaggaggagctgagcaatgtcccagccatcatgaggaaagctgatgccaagaaagactga

SEQ ID NO: 138046 - DNA, 442 bp, Homo sapiens
accgatcggccctctagtccagcgtggtggaattcgtagatccccgcgtggcaccagcccttctgccacagctgccattggagagcagcagccatggctctgtgctacccactatggccgtgtgccttgacaagggccacaagatgaccaagaacatgagcaagcccaggcacagctgccgccgcgggcgcctgaccaaacaccaaattcatgtgggacatgatccgagaggtgtgtggtttcgccccgtatgagcggcacgccatggtgttactcaaggtctccaaggacaaacgggccctcaagttcatcaagaaaagagtggggacacacatccgcactaagaggaggcaggaggagctgagcaatgtcccagccatcatgaggaaagctgatgccaagaaagactgagccccctgtcctgccctctctctgaaataaa

SEQ ID NO: 138047 - DNA, 851 bp, Homo sapiens
atgcatcctagaggcccccctcctcctgctcaggaagagagccacactgatgaaagcccaggcattgaccaccagagcctcgccaggagggcagggagagtggggagaactggcggtttttcccagctccttgcccagaccaatacttccatgctgtcttcaagccctgcttcctgcacatctcccagcccagatggggagaacccatgtaagaaggtccactgggcttctgggaggagaaggacatcatccacagactcagagtccaagtcccacccggactcctccaagatacccaggtcccggagacccagccgcctgacagtgaagtatgaccggggccagctccagcgctggctggagatggagcaatgggtggatgctcaagttcaggagctcttccaggatcaagcaaccccttctgagcctgagattgacctggaagctctcatggatctatccacagaggagcagaagactcagctggaggccattcttgggaactgccccccgccccacagaggcttttatctctgagctgctcagtcaactcaaagaaactccggagactcagccggcctcagaaataagcctgagagaccatctttagcagcctcagcactgccaggcctgccctgaaactccagatcctggctaagagggaaatagctccttgggacacaaacaagaaatgtggacaaggagggacatttgcatactcctactgtctgtgtggtcacagctagtttctgtcagctgggctctctgggagaaagctggctgttgtccaatgccttccttggcagccaagtggataaaacctttaggagccccaaaaaaaaaaaaaaaaa

SEQ ID NO: 138048 - DNA, 408 bp, Homo sapiens; identical to SEQ ID NO: 130228
  misc_feature (1)...(408): n = a,t,c or g

SEQ ID NO: 138049 - DNA, 678 bp, Homo sapiens; identical to SEQ ID NO: 133725

SEQ ID NO: 138050 - DNA, 555 bp, Homo sapiens
atgaacacctcttgcccaagaacctgcagcattccctggaccctgttgatcggaatagttgcactcactgatgcagcagcagaaactctagttttcctcctagaccacaaggaggaccaaggaagaagtacaggaaaagcggaagctggttctaggcaaaccaatggtcccaactccaaagagtcgggggttgttagagagccctttcccagtaagcctgacacccgtgtctttagtccagtggccgtactagtcgcttttaactggctgacaggtgatagtcccttagtggtcaccaagatgtgcccagttcttggtctcaatgacttcaagaatgaagctgcggaccctcacaatgagtgttacagttcttaaagatggtgtgcccggagtttgttccttcagatgttcagatgtgtccagagtttcttccttctggtgggtttgtggtcttgctgactttaggagtgaagctgcagaccttcatgcccagcatctccaaggcccacgaatatttctgaagcaagcaagggtgaatgtgtggcaaacatcaga

SEQ ID NO: 138051 - DNA, 1438 bp, Homo sapiens
atggtgtgcccggagtttattccttcagatgttcagatgtgtccagagtttcttccttctggtgggttcgtggtctttctgacttcaggagtgaagccgcaaaccttcgcgctgttacagctcataaagacctgtggtccaagagtatctctagcagttacagatgataaagaattattgctgcttttactttatggcctagtgctatttgaagacacaggaggaatgacctttcacctgcagatggaaacctggaggaaaagcaaggtccaggaaccctttggagtaaatgaatcaaatcttcaagtatatgcagcaataggatcaatggacagaaggagtgaagagcattccatttacagacaaatagcaggtactggggccctagctcaaagaaaggatgacccatatatgtatctattgaaagtaattactggcaatgtgtatgtcattctgaagagcagtgagaccttctacccactgatccaaacacaaaacagacactcagagctacagggagagaagctggtgggcatcatcaatgcaatatcaccaccacaggctaccattcccttgcagctgagctaccaggatgaaaaggacagaaaatttccaactggcagtgaaaaattacttggcaaagtagtatttggtgagaaatatgatggcgtccctgcttctggctacaggcaaagaaggaagctcctgccccctcctaaagccaaagccaaagtgaaggctttgcaaggccaagaaggcagtgttgaaagatgtccacagccacaagaaaaaaaaagatctgcaagtcacccacctttcggggggcccaagacactatgtactcgcgaagccccccaagtgtcttcaaaagactgcccccaggaaaaacaagcttgaccactgtgctatcaccaagtttccactgaccactaagtctaccacgaagaagatagaagacaacaacacacttgtgttcattgtggatgttaaagccaacaagcaccagttcaaacaggctgtgaagaagctctatgacactgatgtggccaagaatataacaaagcgatgggatgtcacttccataattacttcatgttatatacatctgcgtcttgctagcagacttgctctggaggatctccttgcaggattaatgaattgtttaaaaggaaccttttggaatgaagaatcaggtgaacgggtagagactagaccagagagtagatttaagcagcaatctaaactgatttacacaataaaaaacccaggaaggaaaaaatacggcgcagaagaaaagcgagcattttggtgtcatacagacctcctactccatgatcatgatgaacaagtgaatcacttcagttctccaagctccactttcaccaaatgtaaaagaagaaaaccattcctacttcgagagtttgtgtggattaaatga

SEQ ID NO: 138052 - DNA, 372 bp, Homo sapiens
cggacgcgtgggtcggaagagcgctcccaggagaaacaagcttgaccactatgctatcatcaagtttccgctgaccactgagtctgccatgaagaagatagaagacaacaacacacttgtgttcattgtggatgttaaagccaacaagcaccagattaaacaggctgtgaagaagctgtatgacattgatgtggccaaggtcaacaccctgattcggcctgatggagagaagaaggcatatgttcgactggctcctgattacgatgctttggatgttgccaacaaaattgggatcatctaaactgagtccagctgcctaattctgaatatatatatatatatatcttttcaccaaaaaaaaaaaaaaaaaaa

SEQ ID NO: 138053 - DNA, 831 bp, Homo sapiens; identical to SEQ ID NO: 114094

SEQ ID NO: 138054 - DNA, 951 bp, Homo sapiens
atgtggcaccccgaccgtggttcctggcacaggaacgagcaggagggtaaggacggctaccgtggaaccaacttggaagtgccgtgctgctcaacagccacccccacctccacaccgctttgggtaaaattgccgccgccggacacctcaaccaagcctgaactgcagcttgaagagctggatgcagattcttcctggatgcctttgcatggctcgtgtccaactggaaagctggcagtggatgctcgctcttccctcttcactgagcccgcttttccatactggaagaagatgaaacacacatttcagaatatcctgagctggagcaagtttactaatctcacctacagcgtgacacagctgtggctgttggtagtgatggctcaaaccagctatcctcattcactggtgggcaggaagcaggtaattctacactcatcttgcctgtactctctggataataaaacaagtttagccggtgatgatcatgatgacgatgaccatgatgataatgattcatcacctgcagagaagggccctccccccatcactaaatcactggacaaggctgatgagcagagccacctgcggttggcagtacttgagttaggcttttacaagcctgtgaatttactcttggtggccatgacagggtgtcttctgcagctgatgatgaaaaaagagcaatgtggaacccacgggggagaaggttctactctggaggggagccgtccagatgtcccccaagacctcttttccccaactctaggattctacggttctacatcactctcggccgacctgggggagaacgtcattcttaagctctacctgccatcgtttcctctgcaggaaagcgagcccagtgctgagcatggggagaacctctgggctctttatgtaggatttgaagagcgcagatctgaggcctcacttgcgaaagcaccgtga

SEQ ID NO: 138055 - DNA, 681 bp, Homo sapiens
aaacgtcagaacttggcttgcttcagtttgtcaatgtggtagcagagtttcagtgcgggtcccagcttcaggcccaggtacttcatgaccatgtcactcttcagcaacagcagagcgttgccatcaatctcgtgctttctgaagagctccacgtgaggccccagagcctgtgggtcggcgtccttcacaaaccacaccacgtcctccacagtccaggcggaggggttcctgctccgtggccgcctggcatcctgcgcatcctgagaagggcttgaggcacatctgtttccttcaagagaggtcgtgtttctcttggggctggaggctggaggcctcagcccaggtgccgaggggccaccagaagacatggggctagtgcggggaccaccagcggtgcaagcaggaccacccccaaggtggctgtctccagagttctgcctcttgcagtacagcgaggaggaggggtgcaaggagcccctgtggttaaaggtggaggcggaggtgtccacgctgtagcggttcatgcccacagggttcaccaggtactcttcggtggtgactgtcttgactgcagatgtatctgttttttattatttgtagcagttactctactttcctaagctcatgcatttgacttatccaaggcagggtctcacacagtgcttggaacagaagagggtt

SEQ ID NO: 138056 - DNA, 1125 bp, Homo sapiens; identical to SEQ ID NO: 120291

SEQ ID NO: 138057 - DNA, 2209 bp, Homo sapiens
atgggggtacagccattggataaatacagctgttccaaatgggagaaattggccaaaacaaaggggctacaggctccatgcaagtctgaaatccagtggacaatcaaatcgaaaagctccaaaatcatctcctttgacttcatgtctcacatccaggataatttcttgagaggagataactcccgtaaagttcagcaccagcagcagaggaaacccaggaaaaaaaccaagcctcctgcactaaccaaaaaacacaagaagaagagaaggcgtggacctcgtcgaccccaaaaacccattccacctgcagtcccccaagggaacctcagcatgcctgccagcgtctcactgccagtggaggcctctcacatccggagcccatccacgccagagctgagtgctgatgagttgccggatgacattgccaatgagatcactgacattccacatgacttggaattgaaccaggaggacttttcagatgtcctgccacggctacctgatgacttacaagattttgatttttttgaagggaagaatggagacctcctcccaactaccgaagaggctgaggagcttgaacgggccttgcaggctgtaacttctctcgagtgcctgagtaccattggggtccttgcccagtcagatggtgtgccagtccaggagttgtcagatagaggaataggggtgttctccacaggtactggagcttcaggaatacaatccttgagccgagaggtgaacacagacctaggggagctattgaatgggcgtatagtacatgataatttttctagtctagagctggatgagaacctgctccgttctgctaccttgtcaaacccacctacacccctggcagggcagatccaggggcagttctctgccccagccaacgttggccttacttctgccactctgatcagccagagtgcacttggggagagagccttcccaggacagtttcatggacttcatgacggcagccatgcctcccagaggccacatcctgcccagctgctgagcaaggcagatgacctaatcacctcacgacagcaatacagcagtgatcactcacactcctcaccccatggaagccattatgatagtgagcatgtgccgtctccctacagtgaccatatcacctctccccacacaacatcgtactctggtgataatatggcagctaccttttcagcagagatgcccatcatggcgcagcacttgctcccaacccaacttgaggtgccacttggaggcgtggtaaaccccagaactcactggggcaatctccctgtcaaccttgggagacccctctccatttaggcaaccttcttcggcgcagatgggacatcttctttccacttccctatccacgccacccaccacttcgaactcagagaccacacagcctgccttcgccaccgtgacccccagcagctccagtgtgcttccggggttaccacagaccagcttcagtggcatggggccttctgctgaactaatggcctccacctctcccaagcagcaactccctcagttcagcgcagcctttggccaccagctgagttctcacagtggcattcctaaggacctgcagcccagccacagctctatagcccctcctacaggcttcacagtaacaggagtgaagctgcagaccttcgcagtgagtgttacagttcttaaggctacctgcctggagttgttcgttcctcctggtgggtttgtggtctcgctggcttcaggtgtgaagctgcagactgtcacgcctcttcacttctcaggcaaccacccatctgctttctattactacaggttgtcatttgaaatggacaaaggaaagaaaagacagttcggagttgaaaaggagaagtgcggcagcctgggagggtttgttatgcttggcaatgaggagatgatcagaagagctgtaacactcatcgcatggaccaagattccattccttggcatccgtgaggccaagaaccccggatcagagaacataaggcttgccaccatcttggaagcgcccaccgccgtcttgggagctctgggagcaaggaccccctggagccccatactaccagccatgatcaaccccatcgtgtgtttcaacatcattgtcaacggcaagcccttgggccacatccccttcgagctgtttgcagacaagattccaaagacggcagaaaactttcactcctga

SEQ ID NO: 138058 - DNA, 1163 bp, Homo sapiens
tgggagaagtgactagctggaacagagggcgtggcctgcgcatctggagatatttcctgtttgggcctgtgcagaaaaccatgcgcctcctcttgtccaggttaacttactgctggctggagcaggatggacgagtctcttggcgacttggtttggaaattggcagcctccccactccggtgcctgtgcgtttgtgccctgctaaccggagccctccaatggtttgtggcaccaccggacgttcttcaagcaactcttccacggagaagcgcatgtgcacgtgctccagcagagctgcccttcattttctcaaagggcctgagggtggcaccctcatggaggagatcagagcccttataaaagagcccccagagagctccctcaccccttctaccagaggaggacacagtgagaaggcaccatctaagaaccaccaggcggccacggtcaacaccaccacgctgagccgcatcagccacatcagccacacgcacctcctgatacactgcacagggaaggagcagcatgagccctatgaggatgcggcaaccaggtcccgtcctgaagcagacctcagccgtcacgagcgactgacctgccggcaccttgatcttggactacctgacatgcagaaccgccagtgtgtgccggggagtcagggtctacggcccgtggggggcctggaagggcccaggcactggtgtttggttcgaagttcccggctcggtgtccttcctcggaggccacagggctgtgaggacgacgcgggtgggcttcagaggcaggactgtgggcagtggagagagctggtgcaactgcccacccctcctgctgccctggaggcgcctccccccatcccaagcccctcccagacctcccagatcctccagggagctcccggtgcttttgcctgctgccaggaacctgcccagccgcacccccagcggggtctccatctccgtgttctcaaagccctggctgtctgccccccgtacccactccctctgttctggaatgctgtacacaagtccttctggaagacagtaaaccacaaagtcatagaaactcggctccgcatctccagcccgggatctggagccatatacctggtagccacccttggtgtctggtgctggccgcagaaggctccacaagctccgtga

SEQ ID NO: 138059 - DNA, 2505 bp, Homo sapiens
atggaggccagagtggagcgtgctgtgcagaaaaggcaagtcttatttctttgtgtatttctgggaatgtcttgggctggcgccgaaccgcttcggtattttgtggcggaggaaaccgagagaggcacctttcttaccaacttggcaaaagacctagggttaggggtaggggaactgagagcccggggaactagaattgtttcagaccagaacatgcaaattttactgctcagttcgcttactggtgatctacttctaaatgagaaattggaccgagaggaactgtgtggccccagagagccctgtgtgctgcctttccagttgttattggaaaaaccttttcagattttccgtgctgaactatgggtcagagacatcaatgatcacgcttcagtatttctagacagagagatttccttgaaaatattagaaagtaccactccaggggcggcatttctcctagagagtgcacaggattcagatgttggaaccaacagcctgagtaactacaccatcagccccaatgcctatttccatattaatgtccatgatagcggggaggggaatatctatcccgaattggtgctgaatcaagtgctggatcgggaagagataccagagttcagtttaaccctcaccgctttagacggcggctctcctccaagatcagggaccgccctcgtgcgcattctggttctagacgtaaatgacaacgcccctgattttgtgcggtcgctctacaaggtgcaggtgcccgaaaatagccccgttggttccatggttgtctccgtgtcagccagagatttagataccggaagtaatggggaaatagcctatgcattttcttacgccactgaaagaattctcaaaacgtttcaaatcaatccaacatctggcagtcttcatcttaaagcgcaattggactatgaggcaattcaaacttacacattaactattcaggccaaagacggcggcgggctttctggaaaatgcactgtagtggttgatgtaacagatataaacgataatcgacccgagctgctcctgtcttcacttactagcccaattgcagaaaactcacccgagacagtcgtggctgtttttaggattagagacagagattccgggaacaatggaaagacagtgtgctccatccaggacgatctccccttcatcctgaagccatctgtcgaaaacttctatactctggtaacagagaaacctttggatcgagagaggaacactgagtacaacatcaccatcaccgtcaccgacttggggacacccaggctgaaaaccgagcacaacataaccgtgctggtctccgacgtcaatgacaacgctcccgccttcacccaaacctcctacaccctgtttgtccgtgagaacaacagccccgccctgcccatcggcagtgtcagcgccacagacagagactcaggcaccaacgcccaggtcatctactccctgctgccgtcccaggacccgcacctgcccctcgcctccctggtctccatcaacgcggacaacggccacctgtttgccctcagtccctggactacgatgcccctgcgagcgttcgagttccggaacaacagccccgccctgcatattggcagcgtcagcaccgcagagaccaacatccaggtcacctactcgctgctgccgccccggaacccgcacctgcccctcgcctccctggtctccatcaacacagacaacggccacctgttcgccctcaggtcgctggactacgaggccctgcaggagttcgagttccgcgtgggcgcttcagaccgcggctccacggcgctgagcagcgaggcgctggtgcgcgtgctggtgctggacgccaacgacagctcactcttcgtgctgttcccgctgcagaacggctccgcgccctgcaccgagctgatgccccgggcgggccgccgagccgggctacctggtgaccaagaacgcctggctgtcgtagcagttgctcaaggccacggagccagggctgttcggcgtgtgggcgcacaatgcactgacaggctgctgagcgagcgtgacacagccaagcacaggctgatggtcctggtcaaggacaatggcgagcctccgcgctcggccaccgccacgctgcacgtgctcctggtggatggcttctccctgccctacttgccgttccctgaagcggccccggccccagcccaagccgacttgctcaccgtctacctggtggtggcgttggccttggggtcgcgggtcttcctcttctcggtgctcctgttcgtggcggaggagcagggaggcctcattgggtcgctgctcggtgcccgaggacccctttccaggcatctggtggacgtgagcgacaccaggaccctatcccagaggtacaagtatgaagtgtttctgacgcgaggctccgggacaaatgaattcaaattcctgaagtctgttatccctaagcatccgggcgctgtgaatgatgggaggaaaagtccaactttgtaa

SEQ ID NO: 138060 - DNA, 1960 bp, Homo sapiens
atggaggccagagtggagcgtgctgtgcagaaaaggcaagtcttatttctttgtgtatttctgggaatgtcttgggctggcgccgaaccgcttcggtattttgtggcggaggaaaccgagagaggcacctttcttaccaacttggcaaaagacctagggttaggggtaggggaactgagagcccggggaactagaattgtttcagaccagaacatgcaaattttactgctcagttcgcttactggtgatctacttctaaatgagaaattggaccgagaggaactgtgtggccccagagagccctgtgtgctgcctttccagttgttattggaaaaaccttttcagattttccgtgctgaactatgggtcagagacatcaatgatcacgcttcagtatttctagacagagagatttccttgaaaatattagaaagtaccactccaggggcggcatttctcctagagagtgcacaggattcagatgttggaaccaacagcctgagtaactacaccatcagccccaatgcctatttccatattaatgtccatgatagcggggaggggaatatctatcccgaattggtgctgaatcaagtgctggatcgggaagagataccagagttcagtttaaccctcaccgctttagacggcggctctcctccaagatcagggaccgccctcgtgcgcattctggttctagacgtaaatgacaacgcccctgattttgtgcggtcgctctacaaggtgcaggtgcccgaaaatagccccgttggttccatggttgtctccgtgtcagccagagatttagataccggaagtaatggggaaatagcctatgcattttcttacgccactgaaagaattctcaaaacgtttcaaatcaatccaacatctggcagtcttcatcttaaagcgcaattggactatgaggcaattcaaacttacacattaactattcaggccaaagacggcggcgggctttctggaaaatgcactgtagtggttgatgtaacagatataaacgataatcgacccgagctgctcctgtcttcacttactagcccaattgcagaaaactcacccgagacagtcgtggctgtttttaggattagagacagagattccgggaacaatggaaagacagtgtgctccatccaggacgatctccccttcatcctgaagccatctgtcgaaaacttctatactctggtaacagagaaacctttggatcgagagaggaacactgagtacaacatcaccatcaccgtcaccgacttggggacacccaggctgaaaaccgagcacaacataaccgtgctggtctccgacgtcaatgacaacgctcccgccttcacccaaacctcctacaccctgtttgtccgtgagaacaacagccccgccctgcccatcggcagtgtcagcgccacagacagagactcaggcaccaacgcccaggtcatctactccctgctgccgtcccaggacccgcacctgcccctcgcctccctggtctccatcaacgcggacaacggccacctgtttgccctcagtccctggactacgatgcccctgcgagcgttcgagttccggaacaacagccccgccctgcatattggcagcgtcagcaccgcagagaccaacatccaggtcacctactcgctgctgccgccccggaacccgcacctgcccctcgcctccctggtctccatcaacacagacaacggccacctgttcgccctcaggtcgctggactacgaggccctgcaggagttcgagttccgcgtgggcgcttcagaccgcggctccacggcgctgagcagcgaggcgctggtgcgcgtgctggtgctggacgccaacgacagctcactcttcgtgctgttcccgctgcagaacggctccgcgccctgcaccgagctgatgccccgggcgggccgccgagccgggctacctggtgaccaag

SEQ ID NO: 138061 - DNA, 966 bp, Homo sapiens
atgggtcatcatctcatgatagataaactcgtcgcgctcggtggtttgtactacgccatccagcgccattacgcgaccaaatgcagcgttctcaaaaatgatcagatcctggtgatcggtcttttcatgatacagaacgttatctaccgcaaacatttcgccaacccgctgagcgctctgttcctgcaacaaggcatcgaactgtttgccgccattgcagaaattcacataactactgtcgccgagcgcaatcacgccataacgcagattcggctggaagcccagactatctttgattccctgaaagagtggcacaatgctatcaggaagtcgctggactacgaggccctgcaggctttcgagttccgcgtgggcgccacagaccgcggcttcccggcgttgagcagcgaggcgctggtgcgcgtgctggtgctggacgccaacgacaactcgcccttcgtgctgtacccgctgcagaacggctccgcgccctgcaccgagctggtgccccgggcggccgagccgggctacctggtgaccaaggtggtggcggtggacggcgactcgggccagaacgcctggctgtcgtaccagctgctcaaggccacggagcccgggctgttcggcgtgtgggcgcacaatggcgaggtgcgcaccgccaggctgctgagcgagcgcgacgtggccaagcacaggctagtggtgctggtcaaggacaatggcgagcctccgcgctcggccaccgccacgctgcaagtgctcctggtggacggcttctctcagccctacctgccgctcccaagagcggccccggcccaagcccaggccgactcgctcactgtctacctggtggtggcgttggcctcggtgtcgtcgctcttcctcttctcggtgctcctgttcgtggcagtgcggcctgtgcaggaggagcagggcggccccggtcggtcgctgctcggtgcttga

SEQ ID NO: 138062 - DNA, 2935 bp, Homo sapiens
atggaggtcatgggtaatatgggtagcaaaatcttgataacgggaataacatccacaaaacgcaaggtggcgctgctggctaaaaagagagagagaaaaataatttcacaaagaaaggatgttacagattccagagcaaagaggcaatctgaagagaaaagcataggaaaggaaacagtggtaataggaattgggctcatttcaaaggattccgctgctgccatttgtgagagccgctggaggctgagtgaaagtcattttgaaagactgatccaaagaagaatggaggccagagtggagcgtgctgtgcagaaaaggcaagtcttatttctttgtgtatttctgggaatgtcttgggctggcgccgaaccgcttcggtattttgtggcggaggaaaccgagagaggcacctttcttaccaacttggcaaaagacctagggttaggggtaggggaactgagagcccggggaactagaattgtttcagaccagaacatgcaaattttactgctcagttcgcttactggtgatctacttctaaatgagaaattggaccgagaggaactgtgtggccccagagagccctgtgtgctgcctttccagttgttattggaaaaaccttttcagattttccgtgctgaactatgggtcagagacatcaatgatcacgctccagtatttctagacagagagatttccttgaaaatattagaaagtaccactccaggggcggcatttctcctagagagtgcacaggattcagatgttggaaccaacagcctgagtaactacaccatcagccccaatgcctatttccatattaatgtccatgatagcggggaggggaatatctatcccgaattggtgctgaatcaagtgctggatcgggaagagataccagagttcagtttaaccctcaccgctttagacggcggctctcctccaagatcagggaccgccctcgtgcgcattctggttctagacgtaaatgacaacgcccctgattttgtgcggtcgctctacaaggtgcaggtgcccgaaaatagccccgttggttccatggttgtctccgtgtcagccagagatttagataccggaagtaatggggaaatagcctatgcattttcttacgccactgaaagaattctcaaaacgtttcaaatcaatccaacatctggcagtcttcatcttaaagcgcaattggactatgaggcaattcaaacttacacattaactattcaggccaaagacggcggcgggctttctggaaaatgcactgtagtggttgatgtaacagatataaacgataatcgacccgagctgctcctgtcttcacttactagcccaattgcagaaaactcacccgagacagtcgtggctgtttttaggattagagacagagattccgggaacaatggaaagacagtgtgctccatccaggacgatgtccccttcatcctgaagccatctgtcgaaaacttctatactctggtaacagagaaacctttggatcgagagaggaacactgagtacaacatcaccatcaccgtcaccgacttggggacacccaggctgaaaaccgagcacaacataaccgtgctggtctccgacgtcaatgacaacgctcccgccttcacccaaacctcctacaccctgtttgtccgtgagaacaacagccccgccctgcccatcggcagtgtcagcgccacagacagagactcgggcaccaacgcccaggtcatctactccctgctgccgtcccaggacccgcacctgcccctcgcctccctggtctccatcaacgcggacaacggccacctgtttgccctcaggtccctggactacgaggccctgcaggcgttcgagttccgcgtgggcgccacagaccgcggctcccccgcgctgagcagcgaggcgctggtgcgcgtgctggtgctggacgccaacgacaacttggcccttcgtgctgtacccgctgcagaatggctccgcgccctgcaccgagctggtgccccgggcggccgagccgggctacctggtgaccaaggtggtggcggtggacggcgactcgggccagaacgcctggctgtcgtaccagctgctcaaggccacggagcccgggctgttcggtgtgtgggcgcacaatggcgaggtgcgcaccgccaggctgctgagcgagcgcgacgcggccaagcagaggctggtggtgctggtcaaggacaatggcgagcctccgtgctcggccaccgccacgctgcacttgctcctggtggacggcttctcccagcccttcctgccgctcccagaggcggcccccggccagacccaggccaactcgctcactgtctacctggtggtggcgttggcctcggtgtcgtcgctcttcctcttttcggtgctcctgttcgtggcggtgcggctgtgcaagaagaagcagggcggcctctgtgggccgctgctcggtgcctgagggcccctttccacgacatctggtggacttgagcggcaccgggaccctatcccagagctaccagtatgaggtgtgcctgactggaggctccgggacaaatgagttcaagtttctgaaaccaattatccccaacctgctaccccagagcacaggcagggaagtggaagaaaatcgcccatttcagaataatttgggtttctgataaagaatgaaaaataaaacctgtgtttatgaatacatttataattaggaacttattgcgaggttcccttaagggagtgtctttacatcatttcaaatatgtactcttgaagtcaagcaataaatttctatacataaaataggatcctgatttagtatcaagaacccttcacaaagcatgaaatgtatatgtgtaatgttttatgtcaaacaattatgcttaatatacagtctattaaatgtaagtcttgtttgagatatttt

SEQ ID NO: 138063 - DNA, 993 bp, Homo sapiens; identical to SEQ ID NO: 118017

SEQ ID NO: 138064 - DNA, 4482 bp, Homo sapiens; identical to SEQ ID NO: 122662

SEQ ID NO: 138065 - DNA, 906 bp, Homo sapiens; identical to SEQ ID NO: 118015

SEQ ID NO: 138066 - DNA, 4974 bp, Homo sapiens; identical to SEQ ID NO: 122664

SEQ ID NO: 138067 - DNA, 10184 bp, Homo sapiens
ctttttttttttttttttttttgggagaatattattttattatcaaatgtacagtatattgaccttaaaaatacagtaaagcagtcatggaaataacaggtcgtgtattattcatgggcacaaactgactcatggctggggaagaagcagccaccttagaccagatggacaagccagatactgcagagaagtttctgggcttttcggggaagactctagattcaattctgtaaagttatgatgcagttttctccttcctctcctctcacctcctctgagcacagctttcaacaaaaactttgcatacaaggaaatctaatatcgcagccttccccactggagggttcctgggagaaggtaatataacagtggtgactgaatttgaaggaggttggagagaaattttttaaaattatatttccatgtctgctgtaatgtatccaagtcttgtaaagaccaataatttattaattttaataagacagaaagtatttctccttctagtctcatcgtctgatttgaaaggaaaaaatatatatataaacctttatataaaaagtgagttccaggaagaaatgtttttcttttttcatataaaatggtagctgtatgtatgtaactctgaattaaaatatatatatatatcagtccctctggttttaaatccttattgggcaagctggagttttaaagtgacagaggaaataactgaaagatgacttgtcaatctggaacaaagtctatcatgtaaaaactgcagcaggttaactaggtgatgcgtcttcaatggggtagtgaggtgttgttcatgtctatggcttatttttgatgaatgttcctcagatatcctatggacgcttatgaaggcagtcgagtggcatttgcaaaaaaagaaaaattgcagtcagagcacagacaccctgaatgaagcccctggcatgatgtaaacacaaaagaaagtgtctcagcaaggctgagccctccttctcgtgtctgcattgcttccttttcccaacaattgtagatcaagatcaacctcaacttgaaacccaccagaggccaccatgcactgtgacacattatttaagagctcctattccccaacctggcttcccttacaaaccccgctttgttgtcagttcctaagcaaatcattctggaatcccccatttcagaagcggtggatgtaagttgttttggagtcactgccgagaatgttttttgccatgcacttgtagaagccggcatctctctgtgtggcatgctgaatggtcagtgatccctgggggtgaagaaatctgtttccatacagacgagcctgaacccctgccttcagatgcgacttatccggtaactcccacgtgatgtcagctttgggaatccccatagccatgcagttcagtttcacggtgttcccgggccgggtgtagatgaccggggtgggctcgctggtgatccggggaggataggcgatcacaatcacggggatgctggtgaccgaagggccgtactccgtctccatcctgcatacataggtacccctgtcaaacaccgaggcctcacgacccgtgagggtgccattgtccagaagagaaacgaatcccagggtttgaaggccctccagatgcatgccattggggagcgtccaggagaaacgtccctgcccagccccgggaggggtgcaggggagcttcagggtctcaccattgatgatgctgaccaggttatgatactgcttgcttgcttctggcttcagtcccaccttcagggagaccagcctctccgtgtggccagcggcattgcgggccacgcagcggtaggccccggcgtccaccgaggagagaccgctaatgtgtagcatgccgtcagccttgtggtagaagcgctgcagctgctgtccactctgcagatcggtgccattgggaaggacccacaccaggctgggtgtcggggtccccgcggcagagcagttgaggctgatggtgtggccccgccatggccgtgatcttctcgctgatcgggtcgtggaagatgggtttctccatgggctccaggacagtgagctgcaggatcaacctggcctcccctccctcgttgcgtgccatgcataccagctggacggagtcgctcttcctcaaactcctgatgtccagggaaccgttgccatggacagtgatccggtttccatagtatggagctggcagaaccacaccctcgggaaaagcccataacaccctcggggtggggatgccttcagctttgcagtcaatcagtttccgactgcccccggctgctatctcccgcacagtggtgatggggttggggttaccgttgatcttgggtggctggacgttgacgtgaatccacaccgtcttcctatcctctcccgcgctgttcctgaccaagcaggtgtagttgccgctgtcagaacgctgggctttctgaataaggagagtgccatcttggtatatctgatacttctcagaggaggtggggatcaccttgttggttggggacaaccaagtcaccttgggcatgggttctcctttggcctcacaggctacagtgaccacgtctccatagggcacctgaaccgccaagcaagtcttgttccggatggtggcgggcgctgtcaccaccttgactctgactctcatctcgtccttcccgacctgattttcagcaaagcaggtgtagtctccttcctccctcatccccacttcgttaaagtagagtgtcccattgttgaagacgacatagcgcttggtgcgtccaccgctgtcatccgactgcatgaaggagttcaccagactcccgtctgggaggctccaggagatctcgggattgggaagcccggtggccacacagtccactttcaggtcacccccgtagaagactttgtggtcgttctcctccttgtgttcaatcttggccggtttcatcaccacatccactttgagcaccacgtagtcatcaccaaccttatttcgagctacgcacaggtaatctccggcatctttgtccgtcactgatttcaccaccagggtcccattggcaaacaccttgattctgctatcaaaactgaccttggcactatggacattgaaggtaggatggatgacaatctgtgatgggccatcctgtgcactgcagggtgttgagcaccgtccctggcctccacccaccagataccagaagcacccactgccccatttgtgataatcaaaggtgtcttcagatattgccaagtgttgtcttggggcaaaatcacccttggttgaaaagcactgccataaacctgtatatctgacgtccgtcctccgcggggaggtgcccgtgatgcgcgcgttggctgctgcacgctgcacgttcagctgcaccgtcctgcgcgcggagcctaccaggttggcggccacgcactcatagcgcccgctgtccttgggcgcgaggttgcggatgtagagcgtcccgttggggaaaacaaacaagttcccgtggaggaactgcgaggggcggatctgggtaccgtccccgagcacccagcgcacgctgggcaggggcgcagccttggcagtgcagtgaatgtgaatgctgagccccgggggcagcgagatgttctccagcttctcctggtggataacggggggcagtgccgccacgtgcaggcggatggccaggctgtccgccccggctgcattgctggccacgcacttatagacgcctctgtctgagaaggacgcctccttgatggaaagggtccggttttcgtgcagggtgatgcggccctccacgggggacacagtttgccacaccctcctgtcagggaagatccaggaaatttggggggctggggtccctttggccagacactccattgcaatggtgtctcccaggtagacagtgacgtcctggtagtgggaggctaggatttgaggttgctgcacggtgaccgaaagcaagaccaccatcctgtccaggccgtgcaggttgctggcggtgcacatatactggcctcgatcttgtacttgaaccttccgtatcactaaggtaccgttcttgagaacctcaaaccgttgtatcctggtattcggagtcataagagctcctgtggaaacctttgtccaagtaacgaaaggctttggttttcctgttgcctcacaggggaacacagtgtctgtctcagcggtgacggacacagtctgtggggacttggtgaggatttgtggcttttccccaagagaccagaatttggatgcaggaggtcctcctgcaaagaactttgagctgctctggtggaagcttcctgaggactggacagaagatgttataaaggagatagaactctgggtggaagagaccatagggatattctgtaagttagttgagggtgatcccgtggtctgcggagtgtgcaacaacggaggtgccggagggccaaagtccagatggaaggtgctatgggaatgtatcctgttgtaggaacctggaataacttttctctctctcattactggggcaggagaagtgggtatctggggtctccgggtgactcccaactgtggaaaagaaagagtcttgttggtaaagaaagggagtcttccattggaataatgaggaattcttggactgggaggctttccaactgggtttcttgcctcagggatgttgttatttccaaacactttggagtagccattgaattggtcagttcttcggtcagtaaacttactaggaatgctgggtttggacatgtgcaatgggagaggaattgttgtacttgataatcttggagttgtaaactgtttgttctctggcaaagccccagaaggatatgtagttatttccggtttgttggtccagtgacgaggtgactgggaagttacaaagtatctggaagcgctttgtgtggacatttcaggcagcctcactgttgctgttggtaggatgggtttggcagggactctggttagttgatgagaagcatgaactcttccatcctggcgttggctatctgggccacgtggtagactcctactaccaaatacttgcttttccaattccagctttgtagacaagttaaatgcatcctggtcggaagagggtgttgataattcatttggccctgacatatgctgtgttccttcattgttcactggggttgcttctgtttctggattccccacataattcaagaaaacattttccttggaatctctagatgcttgagatattcttggactgggaagtgctggcttagtggtggtggtttgtcccaaagacatgagaattgtggatggggacgaggatgctggctccttcatccgggcagcagtaggggtgtgattctgtggtctagtttcagaaaggagaatagccacagtggtttcaagatgatcttgatcaagggtggtggtttctgcctgacttgaagccacctccacttttatgcttgagagagttgtggaagaaccagcttcttcctggtgaaatggtgtggagactgtcaaagaggacaaaaactcggaagtgaaatccacatcctcaagctctttaagaaggggagggtctgtaagattttccccagaagtggtaacaggtatgcctgtctgtagcctcccaggctgggccgtccttgagggattccaggttggagttcctggaaagcctacaggagaggattcttccttaaattctcccatagtggagaccaaggagcgagaagttggtatggcattagtaattgattcaccagtgactaaaatgtcacttttatgtttgtcaacatttgtggcaacatcatccttaatttcttttccatctgatgtgggtttatatgtgactggaagtgtctcttggactttagggtaagatgaatatatttttctggtggttgtcatgtaatctaaggaatcataagggccctcagttttcagagaaacagttctaggcaaaagtatagtttctgaactgggagtaacaatgtttctatgtttattttctggagaagggctgggcttggatccggacgctcttgagctcactgtagaaggggtatatcgatgtttgtttggcctcttcccgtgttttctccgtggtgttcccttggatgtgggttctgcattcttctccatttccaactgtttgggggtattaactgtgttatccacccaagctgtaggaaccagagaactctccacttgacttgaaatcttaatgtcaggtgcttgagttggttgagtagaaaaagtctctgatggggcaaaagttgtgggtggggtttgcttgtgccggtggcggaatttgttggggcgtaatctccttctcccgttgggtctccttcgagaagggtgagtgctcatggtggatgacggagcaactttttgccttggtgttgttgttgctgttgtggtgtctttgtctaggagggtaccaactgtggtttccgcaggcttcttaactggagacatactgctcattatacccagtgtggagtcaggcaaagtgatggatttgctctcttggccctcactctcagaacttctggagtgtgtggggtctccctctagcatatttcctccctgtagtgtctgagacatctctttcataccctttttaatcagtaaggtgtcttgagtgcttagactacttttcacaaggtggatgttgtctgtcagtccttgtagatgtgattggcctgggacacctggttcccctatagtagaatcctcaaataactgtgatgtactggagtcattaacccagatggtgggggttggagtaaggtgtgcaaaggtgtcttctttcatcttatcctcatctggttgtgacttagtctccaaatctgggtcaaagtattgcatgggctcagactcagccaaggagacagcatccaatggaggctcatactcactggatgtgggctctggtgacgatccaacatctgctgcagaccaaccctctgttgccgtctcttcatgggtgggcttttcatagactgtgtctaatgtgtgcagagtaggagatggttcataaggctcagatataagtgtaggggctgctgtccccttcaggtctccttcagtggaagttatctcctcagtcttctcggaaaggtcatcaacaacttcctccagaggtgtgcttgttacttcaggttcaacaagaataactccattgtggttgtgttctagccccatgctggctgaggaaatggtacccaaaacgtgctcttcttcaccaagtagaggtacatctgctgaggattcttcagcactggttactgtctgcacaggagatgctgaggggggagaaatagcaggaaaaggtggtgtgacttctagactcaaggatggaggacttgtggttttaatcaatgggggtacttctgtgcccttagggagatttttcccacggactttggctaaaatatcagcccagcgctccggattaatctgtttgtttgccatgtttatccttcgtctagattcaaacactctgcgaccttctgcaacattggtctctggttctttttccgaatgcttccagagtttcagctttcttctccctttcttggctttcttgtctccattgatggcatcatcctttgttttgaggaacacctcttggtcctttggatgcagaagtctccttgaagtgttctcttcatctcccatgcccgagcccccttcatcctccacgatgtcttctctgactctggaaagagcctttgcacctgggcgtctgcctcttttggatggcaagccagaccctttcttggtcactgtgattcccaccgtaaaatggtctgccccttgctggttgacagccacacatctgtagtaaccactgtcactgacttggacctttgggatggaaagagttccatttggcaacatgtatacatgtgatgtgttagccaaatcattaattatccttctgtttggaagaatccagctaaggtgggcttcgggtattgctaaagcattgcaaggcaatgtcaccgactcccctgggttcttgccaattgtcactgtgtctttctcggctggctgagtggagggagactgcacaagtaccctatataccatgcggtccatttcatccctcacttgagcaatgcactggtacaagcctgagtcagatggctccatggacttgatcctcagccagccactgctgagaatggagaacttgctgtctgggtcatccatgggcgctttcaggatggagccatctggaagcacccagaagatagatggactctcagaagctttcacgttgcagctcaactggcatggacccccttccaggacagtctgatctctttgcacagctccactaggctcaatcattacccagcttctgccccgagcctgccttgtatctttggtggatattgtttgagaatactgggtgtagtaggaaagtagcaccttcttggccgtactctgacgtcggttcagctggatatctatggatggctgcatgacccattctggttctgcaagaatctgggctctcacacctgtgtagtaaagagcttcctcatcagcatcctgcctgtactggtagctgactctggggtctttgctgagcatgagctctctgtgtagcttcacgggaacttcactgtagtatgctatcaatttccatagcttttcatagttttctcgggtcattggacactcaaagtccaaggcaactgttgcatttatgtcaatatctggaggatccgtttggttcaagtgaatcttgtacacatccattggtttcttgatgtcacagaccaagttcaccatgttcccgtgctcgtcggtcatattcaaagagatgctccactggggcagttggaatttctccaggatgagctggctgccaccatcctcttcctgttcttgctcctcctcaatactcctgctcctgttctgtctcagaggggactctattgaaggcttcagacaagtcatgtccttcagcttgtgtatctcatgtttgtacaacttctttggactgaagcacattgcacacaactgaccgccttcataagctttgtcctttttacacttcagaattcgttgtcctcttggtctcctggatatgaaatcctctggaattttctccgtcctttctggccacaactgggtctcagtcactgcttcctcctcctcctctgcctgaatctttgctgactgggtcctccttgacttgagcctaagcccctttcctttctggtcggcttcagcgtcaatggcctctcgcatatgtgtggttccaattaccatccacccgccagtgatgactaccatatgtgcttctctagtccaaacacattccgtgagttccacaccccattgcctctttgacatgtactcacactcatacccacacacatacatgctgtgagacaaggcagcaagcacaagcaggagcatttcacaaaatcccttggccagctgaatttcatggctcagcgaatgagcgcagcctctacatgaatgccctctggattttgcatcccattccaaaaaccatctcatctcacaatcgcaggtccacggatttccctgcaagtaaagattctccagaagcggcatgttccgaagcatgctggcaggaagagttctaaccatgttctctgctaagtagaggtgccttatggtggagagtctgaaataatccaaaaatgtgaacgtggagaaggtgctggggtgcagctggtggaggagatttccttccaaatggagtagcctcagagacgttaagccgttgaaagcttgagggtggataaactcgatcttgttgtggtcaatgtgcagcctcattaagttagagagaccctggagggtctgtcctgtgatcactctcagcttgttgtagctgaacttgaaaacctgaagagagctgaggtctcttaaagctccatcggggatgcttgggatctcattgccgtgaatcataagtagctccaacttggtcagtcctgaacggagcccagaagaaggaggcagatcttcagacagaggagatagggctctgaggctctgtctctgaaatgggtcagaaacagctggatgttcctcagcacattttacttcaagggtgtgatatgttctccttccatagttgtggtcaccaaaaaggtctccagatgttgccaaatgttttccaggggcaaactcatccat

SEQ ID NO: 138068 - DNA, 1230 bp, Homo sapiens
atgggtggcagtcaggcccagtgctgggtggactgtgtggaacagctggccagagctgtggggatggtgacggcatttggtgggctcaggcagcacaggctggagatccagctcacctccgacttctcacccacggccaaccctcctcagtaccagaggcacctgttcgtgcacatcagccagcactgccccagccccggagcgccgccgctcgagagtgtggacgtccggcagatctacgacaaattccctgagaaaaagggtggcctccgagagctatatgatcgtggccccccccatgccttcttcctggtcaagttctggataagggaaaaggagactatctcctactgggccaaatggttcgatttgattcaaccctctatccccaggaatgctgaaatacttttaaagctgataaacctagggaaactgcctcctgatgccaagccccctgtcaacctgctttacaacccaacctccatctacaatgcctggctcagtggccttccccagcacatcaaaagcatggttctccgcgaggtgactgagtgcaacatagagactcagtttcttaaggctagcgagggcccaaagtttgcattcctgtcctttgttgaagccatgtccttccttcctccgtctgtcttctggtcttttatcttcttcctgatgttgctggccatggggctgagcagcgcaatagggattatgcagggcatcattactccactccaggacaccttctctttcttcaggaaacatacaaagctgctcatagtgggagtctttttgctcatgttcgtgtgcggcctcttcttcactcgaccttcaggcagctacttcatcagactgctgagtgactactggatagtcttccccatcatcgtcgttgtcgtatttgaaaccatggctgtatcctgggcctatggggccaggaggttccttgcagacctgacgatcctgttgggccaccccatctctcccatctttggttggctgtggccccatctgtgtccagttgtgctgctaatcatctttgtgaccatgatggttcatctttgtatgaagccgatcacctacatgtcctgggactcaagcaccgctcaacatcacgtggaagctgccaaggcttggggcttctactctctgaagccacagcccgagctgtacgttggcccctttcagccatggctggagtggctgggacacagggcaccaagtccctag

SEQ ID NO: 138069 - DNA, 923 bp, Homo sapiens
atccgcctccctgagaggtttggggatggggtgtttagaggtgtggacagggacggctggagtgtggggtcgctggttggtggagaagtgagaggtgactcctgggactgtaggtgaagaaaccgcattctgctgagtgggttcccttgtggggtcttcagcctggttggcgccagcctttccgctgcaattcaggatccgagaaagaactgaggcgacccgtgagcaactctcaagagatcttatcccctgtcacgatgaggaagccggcggtcagcgtctgctgtgacctgactctcagggaggcggccccaccatttcaaagacatgaaagaacttacactggagagaaaccttataaatgcaaacaatgtgggaaagccttcagtggtttctgttacactcaaatacttgaaaaggctcaaactggaaaacaaccctatgaaggcatgaaagaactcactggaaacaaaaccatgattgtacgcaatttggtaaagccttcagtttttccagttccctttgtatacatgaaaaaattcacactggagagaagctgtatgaatagtgtctggtttcatctctatgacataattacaaccaaaatcctaaaggaactgatttaccacactgtgtttgccataaggcccaatttgtacctgcagcagcagctgtatcatcccaactcacagctctaccctctaaaggctcaacaccatgcggaagctgccaaggcttggggcttcaaccctttgaagccacagcccaagctgtacgttcgcccctttcagtcacggctggagtggctgggacacagggcaccaagtccctacattgcacacagcacggggaccctgggcctggcccgtgaaaccactttttcctcctgggcctccgggcctgtgatgggaagggctgtgtaa

SEQ ID NO: 138070 - DNA, 494 bp, Homo sapiens
  misc_feature (1)...(494): n = a,t,c or g
tttcgagattttagtcagtgcggcggaattccccctttgctgactgcgggtgattgattccccagtcatcttcctcatggcctgaccttggatttctccttgggctgtcctgctgcacaccctccctaccagcctctcacatgctcactctcctatgccctggatctgacctgcccaacaccagaggggcctgtggcagtctcccactcaccaagccctgaccctgatgctctctgtccacagagaggactggaagccagtccttacgataaactccataatttatggcctgcagtatctcttcttggagagtaagaataggtggttgggtctggagagattgggcttctgtccctctggcctgataaccccccctacctgtactggccacaggagccccaccccgaggacccactgaacaaggaggccgcagaggtcctgcagaacaaccggcggctgtttgagcagaacgtgcagcgctccatgcggngtgg

SEQ ID NO: 138071 - DNA, 1065 bp, Homo sapiens
atgcacattggaaggtttcagtcaggagtagattcagcagcaaaccagtggaaacgcagcttagtcgccggaagtgacctgcaaggccgccgaagcgtcatctccatgaacggaaatgcccgagtccagccgaaggaggccgaaccccaaactccatcgctgagcaacgcgggtttgcggcggctgcgcaggcgcacaacgcaggccgggcgggaagagccaaagcgggcaggcggcggaaatatccgaagcggcggggcgcccgaggccgttgccgacctccgcgctaaagccgctgctgccgcggaagacgatcctccaccgcaccccctcgcggagggatcagctgagcggccaaacggcacggtcgggggagccccgagtccgcagctgcagcggggcctgagaccagagttggcgagggcaaggaaggagcggccccgggcagtgggggcggggccgggcgggcccgagaacagccgaatttggccgagcgctgccgagcgagtccgaggcgctgggccaggccggagccggactacgggagccgaggcgggccgcgcggtgggcgcggagaggagcggagcggcgcggcaggccgggcgggtggcggcagcagcggaggaggccgcagctgcgggtccgaggagcggaggcgacgcgggcggcggcggggggccgggtggccggggtcccgggccccgcggcggcggcagcggcggcggcggcggcaggatgatcaagctgttctcgctgaagcagcagaagaaggaggaggagtcggcgggcggcaccaagggcagcagcaagaaggcgtcggcggcgcagctgcggatccagaaggagaggtattgtaagagcaccccttttccttctcctgggcccaagaccttcatccccagtatgaggcagccacacaagcagcaggtgttacccaatgccagcagcagaccttggagcatcacctccccaccaggttccacaccactgtggggccccattgtccacatggagaacctgaggcttcagcaagtgccaggacaccagtcggggaagggagattaa

SEQ ID NO: 138072 - DNA, 1004 bp, Homo sapiens
gcgtcgacccacgcgtccgggcggcggcagcggcggcggcggcggcaggatgatcaagctgttctcgctgaagcagcagaagaaggaggaggagtcggcgggcggcaccaagggcagcagcaagaaggcgtcggcggcgcagctgcgggatccagaaggacataaacgagctgaacctgcccaagacgtgtgatatcagcttctccagatcccagacgaccctcctcaacttcaaagctggtcatctgtcctgatgagggcttctacaagagtgggaagtttgtgttcagttttaaaggtgggccagggttacccgcatgatccccccaaggtgaagtgtgagacaatggtctatcaccccaacattgacctcgagggcaacgtctggcctcaacatcctcagaggagactgggaagccagtcctttacgattaaactccataatttatggcctgcagtattctcttcttgggagcccaaccccgaggacccacatgaacaaggaggccgcagaggttcctgcagaacaaccggcgggctgttttgagcagaacgtgcagcgctccatgcggggtggcttacatccggctccacctacttttgagcgctgcctgaaaatagggttggcgcatacccacccgccgccacggccacaagccctggcatcccctgcaaaatatttattgggggccatgggttaggggtttggggggcggccggtgggcgaatcccctgccttggccttgcctccccttcctgccacgtgcccctagttattttttttttttttaacaccatgtgattaaggtcggcgctgcctcccccgacccactcagcgaatgggaaatgaattggcttgtctagcacccactgctgggtgcttgttcagcccccactctgggctgtggagtgggtgggcaacgggcctgggtagctgggcccaggcaacccacccctccacctctggaggtcccaccaggctattaaaggggaatgttactgca

SEQ ID NO: 138073 - DNA, 884 bp, Homo sapiens
atgagggacagagacaaactgcagctgttcttcctccacttgtccttcctggagagtgcaataaaaacacctcctttatttggtaacataaggaatgagaaaacccctttcaaagacacgccaaagaagagatcaactgccttagtaaacagatctacacgtaatgtagaccgccagttagggatgaagttagaatctcaccacatgatggattcctgtgtcttcaccttcgaccagtactgggatcctttcaagagtgtcatcagcaccttcacagatagctctgcaaaatggcggctaacctatggctccattgtcaagtcaacagcccacactatttcccaatacattgactcaggcacagcaagtacagctgaccaaaggcctccgaaagtggatggtgcaacacggtggggacggctgggtggtggaggaaaacaggacaaccgtgcctggggccccttctcagacgtgcttcgtgacttcattcaggtgaatgcccctgctatccaaagctggtgttgcaagaagcaggtcttggacctagaggaggagggtctgtggccagaactgctggatagtggcaggattgagatttgtgtctctgactggtggggagcccgacacgacagcggctgtatgtacagactcctcgtccaacttctagacgccaaccagactgttctagataaattctctgctgtgcctgatcccatcccgcagtgggaacaacaatgcctgcctttcacgttcacccacgtgtttttccaacattcaagatggggcgtccgtttttgtgtcttttcggaacaccgggggccagggacacacagttctggggctgggccactattgagcccgtgtgagcaacttcagtgtgaatg

SEQ ID NO: 138074 - DNA, 927 bp, Homo sapiens
gcggtggaattctaaagagaacaatgaaagctgggccggctccttcaagacccgcctcaaggtggcaccgcggcggcttggggaccaccatgagacccctgctggggaaaaaaaaactcactgatattggcctgagtgcctacgccggagctgcgcgcagatcatcatgtacggggcatttttttctacacggttattgctctgtcacccaggctggagttcatcagtgcgatcttggctcattgcagccttgaacctcccgggctcaagtgatcctccctcctcaacctcccaagtagctgggactacggctgggtgagctatgaacaggccaactgcaagggcgagcagtttgtgtttgagaagggcgagtacgcccactgggactggtggaccagcagccagaggacagacttcagcagcctgaggccccatcaaaagtggacagccaagagcccaaggtttcatctttatgaaaaccccaacttcaccgggaagaagatggaaatcatagatgacgatggtacccagcttccacgccccatggctaccaggagaaggtgtcatctgtgtgggtgcggagtggcatgtgggttggctaataagtaccctggctaccgtgggctgcagtacctgctgaagaagggagactacaaggacagcagcaacttttggggcccgtcaccctcaggttacagtccgtgcgctgcatccacgacatgcaggggcaccaatgtggtgccttccaccccttgggaactcaggaggaggaggaggcaggacagaaagagcagatggaacaggtacccttttggttagccagaggggacatttgtgaactaagtgggaagaaaagtgtcatttgattagaccatgtgcatccggagccctttcctttcttttggtggccacctctccttgaggggc

SEQ ID NO: 138075 - DNA, 541 bp, Homo sapiens
ttttttccattgtagttggatttatcagagtatctgcgcaaagactctctctgctgccttggccaggggttggtagagtagtcagggaggaacagcgtgggcccctctagtagcacacaggtgaccctgctctgatgtctcagtgccgcaatgccatgtccccagcaggatctactgagcagcttccataggaaggagcatgacagagaaagcccacgcaggccctaggcccggcaggaattaggcagatgctccatcttcctctgacacactgttccctccagacgcactcctctcaaaccaggctggacgcctggcctgctggctgttttcatacggcccacagactaagaatgattttcacatttttaaatagctgatacacgtggaatgcatttgctgctttgccccggagaaacactgaggggatccagacgttgatcagcgcccggtttgatatttcaaaatccgacaaactctggtcttcggacgtttgactcaaatctccaggcaccggtccccggagatcgatgagctcctg

SEQ ID NO: 138076 - DNA, 624 bp, Homo sapiens
gatgccaagtttgtggaggaacggagaaagcagctccagaattacctgcgcagcgtcatgaacaaagggatgcagatggtccccgagttcgctgccagccccaagaaggagaccctcatccagctgatgcccttcttcgtgtaagtactgctcccatggacatgggccgccagccctgccagcattttttttctcggtcgttttggaaggtcagggagtagagcggctctccgtgatgccctgatcgccatgggacccaggcgaactccaggggctgttccaggtgccaaagtggaggttggttctcagcgctttggagcttctaaagggatgggaagagagcaggcctgcaaatgagcattgttgacttgaggctcacaaagaaactttgggctctgtgattttgtactttcacacatttcgatcaagggaagattaattttctgtacagcccacgggtgctccaaaactgaaacaaattgtgtcagtgtttctcaagcttgggtaatgaacccaaggaaagttctcccagactcctaccagtattgacttaaattatttttatatgagttttacttaaaaatccacattaatattatttaaatgccttcttctctcttgaaa

SEQ ID NO: 138077 - DNA, 557 bp, Homo sapiens; identical to SEQ ID NO: 131536

SEQ ID NO: 138078 - DNA, 399 bp, Homo sapiens
atgggactgtcatctacagctcttatggatttggaaaaggaaaaggagagcatggatcttcgccctagtgaggaagacgtaccaaagcgaagatgttttgtgtttcctcaggatgccaagtttgtggaggaacggagaaagcagctccagaattacctgcgcagcgtcatgaacaaagtcatccagatggtccccgagttcgctgccagccccaagaaggagaccctcatccagctgatgcccttcttcgtgtcagggagcacagcggctctccgtgatgccctgatcgccatgggacccaggcgaactccaggggctgttccaggtgccaaagtggaggttgggtctcagcgctttggagcttctaaagggatgggaagagagcaggcctgcaaatga

SEQ ID NO: 138079 - DNA, 1179 bp, Homo sapiens
atggtgcctggagatttgagtcaaacgtccgaagaccagagtttgtcggattttgaaatatcaaaccgggcgctgatcaacgtctggatcccctcagtgtttctccggggcaaagcagcaaatgcattccacgtgtatcagcagagcatagcaggggtctcgggcatcgccaggaaaagagctttaatcccctttggaaaatcaaccttcagctacgtctgcatcaccaacataaaactcacggatgccctgcccagctgggactacacctgccatttcaacctgcccaaggcccagaagccaggggaaccaacaaagtgcatcctcaccatggagtggctggctctgctgcaaggagacccaggatcatggatacagaaagaatttattgttggaaaacggggcggcaagatggacaacattctctgggaccaacgggatgtgcagcctcctgggctcaggcctcaccagctcctgcacagtggtggggggccactgatcagcttcaggaatggtggtcccattctggtttgggaactgagaagaaagggagcctcggggaaggagattgtggggagcagatattttagggaaagtgatgaagttctagtgtggaaaaaccctaaaacactacagaaagaagatgaggaagtaaacagcacccaccccatgcacacctacccttgcactcactgtcaagtcttttgtgtaactgcagaaatcatcaatatttatctccaggcctgcatcgtcttggaaatgtccatgctgcccccaggggaaaggcccctgtttcttctgaggctgacaacagtcctggaagtgactgtctttgactctcaatggtctaggccataccacgtgtctgctgaccccagtgcctggaagcatcaccatcattatcatcatcaccatcattaccagttatcatcatcatcaccaaccatcaccattattaaccatccatcaccatcactagccatgcatcaccatcaccagccatccatcaccatcaccagccgtccatcaccatcaccagccgtccatcaccatcaccagccgtccatcaccatcatcatccgtccatcatccatcaccatcatcaaccacccatcacaggcatcatctatccatcaccatcatcagccatccatccctttcatcgtcagccatccatag

SEQ ID NO: 138080 - DNA, 2505 bp, Homo sapiens
atggggcctgaaatctgcacatccgacaagctctcagatgaggctgatgtcactgtgttggaagttctggccagggcaatcaggcaggagaaggaaataaagggtattcaattaggaaaagaagaagtcaaattgtccctgtttgcagatgacatgattgtatatctagaaaaccccatcgtctcagcccaaaatctccttaagctgataagcaacttcagcaaagtctcaggatacaaaatcaatgtgcaaaaatcacaagcattcttatataccaataacagacaaacagagagccaaatcatgagtgaactcccattcacaattgcttcaaagagaataaaatacctaggaatccaacttacaagggatgtgaaggacctcttcaaggagaactacaaaccactgctcaaggaaataaaagaggaacattccatcaaatggaagaacattccatcctcatgggtaggaagaatcagtatcatgaaaacggccatactgcccaaggtctacatccggataaaagacgatgaatggaatatttatcgccggtatacagagttcaggagtttgcaccacaagttacaaaacaagtaccctcaagtgagggcctacaacttcccacccaaaaaggccattggaaacaagtgtcatgggccacttgcatctttagaaaccatgcaacacagggaaagagcttgggctgtggattcagatcctgccccctcccacactggctgtgtgaccctggacaagtcctcagcctttgtggcactcagctgtcacatggtggtgagcacactgacagcatgggctgtggtgaagagtgaacaagcttatgccagtcaagtatttcccatggtgcggaccaatgacttcagaggactgaacaacaagggctctggggaggacagccacctggctgcaaccaagatcctaaggcatcttaagagttcttggcagaaaggccctgaagtaaaaaaaggtgatgagaccgaaatgctttctgaggctgtagacctggctgcagactgtgtgagtccaggggacagtgaccaaggcctgctctctgcatccctgatgcctagaacttcattatctcatggagaagccacaggatacatccatgaaactagcaatgagaatattgtgagcaaaccatgtcgattgataccaccattcccgctgcctaacaggcccatcttcctgatcaacttcaactcatccttaaaaactcaagtcaaacgtctcctctttgaaaccttccatgacataccccagcagatgcactcgtcggaaaatagctccatgaccatcttcttagagaagatgttcctcagggaaataattctggaacataatgactgcaatagtgttccttggggaaataattttgggaaatgctgctgtacctagcccatccctttggagaagcacggagcacccccatggtaattccaccaaggcaggcaccttatctgtctggttcatccctttatcgccggagcctatcacagtgcctggagatcccaagaggctccatacacatttgttgagagaacaaatacctgttgggataaaattagggaaggccaggcagaccataggaagaatggcctggaggatgttgcgaaagtccagagagagagaacaaagatccctggtggtggagtggacagactggcctggaagccagctccctgattccaaagagagccgaacaccagggagcaatgggagagaaaggcagctccagggcagggaggagcctgaagatgccaaagacagtagcttagggggaccacaagattcaggagcagaggggctgaggcttaattgcttatcacaagtcaagtggttatcagatcacaaaggtaacattcacagagtagctatggcccaagcatttcatatgtcatcacacacggtcacatccatgctgcaaggtgagtggtgtcccgtccctcctccttgttcctttctctgcagagcgaggctacctttaccccacacagcctgccttcttgctaaactagtgagactggtgacggtcagctcaatgtcaagtttggctcccactggttctgcaggtttggcacatgctgggcatatagcagaaccttgatcaacagctttgggacgaataaaggctttatactggaagggaaattttaaaaattcttcctgatacacgtggaatgcatttgctgctttgccccggagaaacactgaggggatccagacgttgatcagcgcccggtttgatatttcaaaatccgacaaactctggtcttcggacgtttgactcaaatctccaggcacctcatgacaaccagcctctgattgcccaagaaccctgctattggcaacagtgtcacacttgctatctgggacagtattctggttggccagtggactctctcttcgggttattttcgatgttcgctcttcaactgagcagcaagccacattcgccagcagcacctgtggcccatggaaactcat

SEQ ID NO: 138081 - DNA, 1238 bp, Homo sapiens
tttttttttgtcttctcgctctttctgtatctttcagtgcaggcctggcatctcttgggcacacaccgattcgtgcatgtagttgacagtgaataagctaaatgtgcatttgatgccactctagggcgtatgccagatactgggttaggcttcatgtgctccaggtgaccaaagtctgaccccctagcctggacaggtttcctgtctggccctcgctgatctctgaacctgtgccacttttgttctgctgccctgccattcctctcttacacacctgatgtctcctgcagttgtgccaaatctttggagtgttgatggagaagttacagtagctgaacagaagccgggagaaattgctgaagaactcgcaagctcctacgaaagaaagctcatcgaggtggcagagatgcatggcgagctgattgagttcaacgagcgcctgcacagggccctggtagccaaggaagccctcgtgtcccagatgaggcaggagctcatcgatctccggggaccggtgcctggagatttgagtcaaacgtccgaagaccagagtttgtcggattttgaaatatcaaaccgggcgctgatcaacgtctggatcccctcagtgtttctccggggcaaagcagcaaatgcattccaccgtgtatcaggtctacatccggataaaagaccgatgaatggaatatttatcgccggtatacagagttcaggagtttgcaccacaagttacaaaacaagtaccctcaagtgagggcctacaacttcccacccaaaaaggccattggaaacaaggatgccaagtttgtggaggaacggagaaagcagctccagaattacctgcgcagcgtcatgaacaaagtcatccagatggtccccccgagttcgctgccagcccccaagaaggagaccctcatccaagctgatgccccttcttcggtcgacatcaaccccgccccggagagccctgtgaacagcccggcccaaagcagcttcccgcttccccaaactgtcccggggtcagccccgggagacccgcaacgtggagccccagagcggtgacctctgacctcgacaaaaccgcagccacgggccctgtgcgtggcaccagctgcgtccaccccagccactgccgctggcccctcacctcagcgtgacaaccacgtcccactggtgatcctgagagcacacgattcccaacagttacacaacaccccgattaaactaatcagtcttcg

SEQ ID NO: 138082 - DNA, 702 bp, Homo sapiens
gtcaaaatgcggatcttcgtgaaaacccttaccggcaagatcatcacccttgaagtggagcccagtgccactatcgaaaatgtcaaagccaaaatccaagataaagaaggcaatccctgtgaccagcagaggctcatctttgcaggcaagcagcgggaagatggccgcagtctttctgactacaacatccagaaagagtcgaccctgcatctggtcctgcgtcggagaggtggtatgcagatcttcgtgaagaccctgaccggcaagaccatcaccctggaagtggagcccagtgacaccatcgaaaatactgaagaattaacagccacccctcaggcgcaggaccaggtgcagggtcgactctttctggatgctgtagtcagaaagagtgcggccatcttccaacttcttgcctgcaaagatgagcctctgctgatcgggggggatgccttcttcatcctggatcttggctttcacattttcgatggtgtcactgggctccacctccagggtgatggtctttccagtcagggtcttcacgaagatcttcataccacctctcagacgcaggaccaggaatgtgcccttaacccacgcacacaaaagacctcgctcaagttaacacaacttgtcattacaagcagaagaaagcaaagcattgtggtagttcatcttggaaatatctgtaaggtttttatctga

SEQ ID NO: 138083 - DNA, 1263 bp, Homo sapiens
tcaccgtcggtatttgtgcagggctttggcagttagtgtcttcacatgtcgggctctctcaaggatgggaattattaggaaccattggcttcgtcgccttttgcagtttttaccgcaggcggcggtaaatcggggtttatcagaagtctggcggttaattattccgggatggtgtgggcgtttttcgccgcgctgactgctggttggctggcctctgtaagtggactgtccgcgttccttctcggcggtagtggtctggcaagggcgtttctggttactgtcctttattcccggtggctttctcggcatgacgctgttttttgccagcgggatgaactggacggtgacgttactgggttttctggcgggtaacctggaagtggagcccagtgacaccatcgaaaatgtgaaggccaagatccaagataaagaaggcatccccccgatcagcagaggctcatctttgcaggcaagcagctggaagatggcggtactctttctgactacaacatccagaaggagtcgaccctgcacctggtcctgcgtctgagaggtggtatgaagatcttcgtgaagaccctgactggaaagaccatcaccctggaggtggagcccagtgacaccatcgaaaatgtgaaagccaagatccaggatgaagaaggcatcccccccgatcagcagaggctcatctttgcaggcaagaagttggaagatggccgcactctttctgaagccatcttcttggacgtgggcctgctcctctcctgcaggacagtgagctcctgtggggcttttatccttggctggagtgtggtcatcttgatccccgtcatcagcacacgagatgacacaagcacgactaaatagattgatacgacatgcacaaccactgcgcatacgcacgagactgcagcagcgaagaccatgcagacagctacacgcgacacgaacacgagccccagcacgacagcttgagcgtgaccatacaggaggatggtgcccaggtgagtaaggactgagcagatgaggaaggcactgctgtttagaacccagcccatcagggaggcagcactgtaaaggtattggttgaggaatctcttctgcaaggtcccatgtaagagttgtggccttttccacgttcagtatgatcttagctgtagggttgtctttacgcccttttgtgttgaggcatatgttttccacactaaattgtttagaggcttttgtcatgtaagaacgtttaattttgccaaatgctttcat

SEQ ID NO: 138084 - DNA, 977 bp, Homo sapiens
  misc_feature (1)...(977): n = a,t,c or g
accatcatttcgcctagcttggcccgaggggcggttggctttgttgggtgagcttgtttgtgtccctgtggttggacgtggaatggagaatggcaggatcctggtatccgctgacaggtcaggagggcacatttgtctgaaaacccttacccggcaagaccatcacccgttgaggtggagcccagtgacaccatcgaaaatgtgaaggccaagatccaggataaggaaggcatgtccccccgaccagcagaggctcatctttgcaggcaagcagctggaagatggcccgtactctttctgactacaacatccagaaggagtcgacccctgcacctggtccttgcgtctgagagggtggtatgcagatctttccgtgaagaccctgaccggcaaagaccatcaccctggaagttggagcccagttnacaccatcgaaaattttgaagggccaggttccagggtaaagaagggattccctcccgaccagcagaggctcatcttttgcaggcaagcagctgggaagatggccgcactctttctgactacaacatccagaaggagtcgaccctgcacctggtcctgcgtctgagaggtggtatgcagatcttcgtgaagaccctgaccggcaagaccatcactctggaggtggagcccagtgacaccatcgaaaatgtgaaggccaagatccaagataaagaaggcatcccccccgaccagcagaggctcatctttgcaggcaagcagctggaagatggccgcactctttctgactacaacatccagaaagagttcgaccctgcacctggtcctgcgcctgaggggtggctgttaattcttcagtcatggcattcgcagtgcccagtgatggcattactctgcactatagccatttgccccaacttaagtttagaaattacaagtttcagtaatagctgaacctgttcaaaatattaataaacctgcagcgcgggtcaaat

SEQ ID NO: 138085 - DNA, 448 bp, Homo sapiens
gcggtccccgttgatgctatgcaccttctccagacccagccagaactcgccgtggggatccccaaacccccccttgtaggttcccagggccggttgaagtccactgagccatcgtggcgcctctgaattactgtccagcctccatctgaggtcatcttgcagttcaccaaaaatggcggagacccctgaggctggatttcaaatagtccactctgcctctccccaacctggaacagctcctggcaatccctgggcagccggtgcaggcggctgacattgtgagccgggtcaactggctgggccatctcgggcagcctctttcttcgggcaggcttggccacctcatggtctaggtgcgaggactggagacgcggaggaccgggggtaagacccgcttggttgcagaagccgctggaaagaatcggatcacagtcgtggtacccaagtc

SEQ ID NO: 138086 - DNA, 431 bp, Homo sapiens
cttccccaaccaggtgcacggaaaagttcagcaactcggcgttgccatcccagtgcctcatctgcacggccaggcggctgttgcggtcccccgtgattctatgcgccttctccagacccagccagaactcgccgtggggatccccaaccccccccttgtaggcttcccaggcccggtagaagtccgctgagccatcgtggcgcctttgaattactgtccagcctccatgtgaggtcatcaggcagttcaccaaaaatggcggagacccctgaggctggatttcaaatagtccactaagcctctccccaacctggaacagctcctggcaatccgtgggcagccggtgcaggcggctgacattgtgagccgggtcaactggctgggccatctcgggcagcctctttcttcgggcaggcatgaccacctcatcc

SEQ ID NO: 138087 - DNA, 517 bp, Homo sapiens
  misc_feature (1)...(517): n = a,t,c or g
gagaagggtacggagagnccgctgggtgggacggtggtggcgcccagctggccggccacgggtgcagtgagctgcaggctataggccgtgtcctcgccacccaggtgcacggagaactgcagcaactcggcgttgccatccaagtcccgcagttgcacggccagcgggttgttccggtcccccgtaatgctatgcactttctccagacccagccagaactcgccgtggggatccccaaaccccgccttgtaggcttcccagggccggttgaagtccactgagccatcgtggcgcctctgaattactgtccagcctccatggtgcaggcggctgacattgtgagccgggtcaactggctgggccatctcgggcagcctctttcttcgggcaggcttggccacctcatggtctaggtgcttgtggtccaggaggccaaactggctttgcagatgctgaattcgcaggtgctgcttctccaggaaccactgctgctgggccaccttgtggaagagttgct

SEQ ID NO: 138088 - DNA, 667 bp, Homo sapiens
ctgtcgcccaggctggagtgcattggcgcgatctcggctcactgcaagctccgcctcccgggttcaggccattctcctgcctcagcctcccaagtagctgggactacaggcgcctgcaaccatgcccagctaattttttgtatttttagtagagacggggtttcgccgtgttagccaggatggtctcgatctcctgatctcatgatccacccgcctcggcctcccaaagtgctgggattacaggcgtgagccaccgcgcccggccaagagctccttcttaaccgcacaggcatgtgaggcccagaagactggctctgccaccagaaggaaggattgtttccttcaaccaaccttttggttgctaccatttcttgtccttgagaaaggtgctcctagtgcttgtagagggaaacgctacgtccgtgcagtatggctctccctttccacaggagcgatcctccagccctaccccaaactgcaggtttccaattggttatgatgtgccagagaccaggaaatgccagagggatgtttgtaacaaagctgccaaactctaagccttcttgttctaccccctaaggagaaaaaagatgtgtaagagattagcccatggaccccagctccacctgaacatcaatataccgtgaggacattccagagtccctgc

SEQ ID NO: 138089 - DNA, 512 bp, Homo sapiens
taggcactttcaaaaatgatcttatattactgatttcaaagagttattattaagctcccttaccctctgatttctcccattctgacacatcttcttaaaaaccgtcaaagagtctgaaaacatatccctccccaccctttttttcagccaagacctcactcttacaatgtccaagaaatattttatattaaaattaacaataaggggccgggcgtggtggctcacacctgtaatcccagcactttgggaggccgaggcaggcggatcatgaggtcaggagatcaagaccatcctggctaacacagtgaaaccctgtctctactaaaaatacgaaaaaaaattggccacgtgtggtggcgggtgcctgtggtcccagctactcgggaggctgaggcaggaaaatggaagtgaacctgggaaggtggagcttgcagtgagccgagatcaaaccactgcactccaagcctgggtaacagaagtgaaacctccatatcaaaaaaaacaaaaaaaca

SEQ ID NO: 138090 - DNA, 474 bp, Homo sapiens
ggaatatagcccgtgtcctcgccacccaggtgcacggagaactgcacaatctgggcgttgccatccaagtcccgcagttgcccggccaggcggctgttgcggtcccccgtgatgctatgcaccttctccagacccagccagaactcgccgtggggatccccaaaccccgccttgtaggcttcccagggccggttgaagtccactgagccatcgtggcgcctctgaattactgtccagcctccatctgaggtcatcttgcagttcaccaaaaatggcggagacccctgaggctggatttcaaatagtccactctgcctctccccaacctggaacagctcctggcaatccctgggcagccggtgcaggcggctgacattgtgagccgggtcaactggctgggccatatagggcagcctctttcttcgggcaggcttggccacctcatcctcgtgccaagcttggcgtaagcagagt

SEQ ID NO: 138091 - DNA, 400 bp, Homo sapiens
acacaggataaagttattcttgtcattttgaaactgtagagtccctatttcggtgtgatgaatcactgttgcctttgaaaaatcctcattatttctgggccgggcatggtggctcacccctgtaatcccagcactttgggaggccaaggcgggtggatcatgaggtcaggagatcaagaccatcctggccaacatggtgataccccgtctctactaaaaatacaaaaaaattagttgggcatggtggcatgcacctgtagtcccagctacctgggaggctgaggcaggagaattgcttgaacctgggaggcagaggttgcagtgagccaaaatcatgccactgcactcccgcctgggcaacagagcaagagtctgtctcaaaaaaaaaaagaaaaaaaga

SEQ ID NO: 138092 - DNA, 1247 bp, Homo sapiens
cgcggccgcgtcgacatttgagaaaacacatttcaaaaccagaaaagccaaaaacactccaaaaacaagcaaaacaatttggagctttagataaaaggaaaaactcccagttggtaaagtttatctttacttaggatttgtggctcacacctaaacaaagggggtcagggagtgggtacaaatttgagaaaatagaagggtaagggatggtcttgatctcctgacctcgtgatccgcccgcctcggcctcccaaagtgctgggattacaggggtgtgagagggggatccaaactttcacccagttggcgtggacagccacagatgcagggaaggatgaggaccacagagaaaccgtgggggccgtgaacttagagaaccgcgagtctgcatcggacacacgtggactgctgtggttcgagatgaacggagatttgggaataaagcacctacaactgtggtggcagcaaaagcccactttctgcggtggacctgacaaggagaggaccgcaatggcaagtggcggggtaggggtggccaccggagagcatcgaggggagacactcacggtgcaggcggctgacattgtgagccgggtcaactggctggccatctcgggcagcctctttcttcgggcaggcttggccacctcatggctagccacaagctctccaacaattactatcgcactcgcgatggccgccgggaatctgtgcccccttccatcatcatgtggtcgcaaaaggcgctggtgtcagggcaagccagcagagagggtttatggggatgccaatcatacggttggtaacatgtgcgcttcacggttagggggttatttagggtttagcatccggatagtggtgtttatatggtacttaggtctgtcagttgtggtcaatatgttagttggacggcaatgtgattggcagggattggtctatggtcaaccagagctgttggtgttctcgggtaatatgccgggggaagtagcacgggggaagcacaggaacgagaaggccccactgtctatgaggccagccagtcaatgccgtgtgttttgtgtgctcaagggttgttcagagaggtctcggcataaggaacaaactccagacacaaccatctttaagaactgtaacactcactgtgagggtccgtggcttcattcttgaagtcagtgagaccaagaacccaccaattttggacacattttggcgaccacgaagggactatcgcctatcacaagcggtga

SEQ ID NO: 138093 - DNA, 4951 bp, Homo sapiens
tcgatacgacttttttttttttttttttttgagacgggagtctcgcctcctgtggcccaggctggagtgcagtagcgtgatctcggctcactgcaagctctgccacccaggttcatgccattttcctgcctcaacctccagagtagctgggactaccggcgcccgccaccacgcctggctaattttttgtatttttttttagtagagacggggtttcactgtgttagccagggatggtctcgaacttctgacctcagtgatccccccgcctcggcctcccaaagttctgggattatgggtgtgagccaccacacccggccccccttcaattttaaagccatcactatgcaccctatgtctatgccaggcactaaaataagatgaagcaccttcttggagtttacatgctggtaattatgccagacagtaataaaataggtaagaacggctgtgggggaagtcagctgggttctagttacagtcgcatttcaggaaatgatttaacatgctgactttaacaacctaagcctcttctccatgtgtgcacacagggtagatctctgaacacaggtgaccctagaagtgctgtaacttctaggggaatggctgtgttgagtcaaggcaggatgacagttcagcctcctcccaggctagtgcaaagggctcttcactcggattaaaaccttctctcccagaccgaattgccaactcccaacacccctcctacagaaaatttggagtcctcgcttattccctggcagcccctacctaatagggtggtgaattaattatcaaacatgcgacagtttagcgaaaatggcaacactttggaataaatgactgtaatgtacatcctggcgcccattttgcaggtcagttgctctccctggaaggaagagtgttctcggatttcaccttaaaggaggaaggctgccagaactgaactagcacttctgaatatcctgaggcgaggtccggtgacttccttgggaagctctgccgcgcccccatcccaccctaccccaccctaccccaccacagcaggcgctggagtcctgggaccaccaggatctgaggcccaaatccttcctcactaaggggaggagaggggtgctccggcagggcaggatgggaaggcgtgcttgggcgggattgtgacatgagtgccctggtgacatggagcagttctgtggcataaataaaggtgtcataaagacagggcgggactcatgcttacaaggggcacgagcgtctcggagctgccagaatgacttccgctcagtgcccggcactagcgtgtgtcatgtccccgctgcgtttctggggcccatggcccctccttatgtggcaactattgtggctactagtcaaggaggctcagcctctggagtgggtcaaggacccgctccagctgacctctaaccccctggggccgcctgagccctggtcttcccactcctcccatttcccacgggaatctccccatgcgcctactctcccagcagacccgtgggactttgatcacctggggccctctgcttcctcagagatgccagccccaccccaggaatcgactgaaaatttggttccattcctggacacctgggattcagctggagagctgcccctggagccagagcagttcttggcttcacagcaggatttaaaggacaagctgagtccacaggaaaggctccctgtttcgcccaagaagctgaagaaagatccagctcagcgttggagccttgctgagattattggaattatacgccaattatccacacctcagagtcagaaacagactttgcagaatgaatattccagtacagatacaccgtatcccggtagcctgcctccagaactccgggtgaagtcagatgagcctccagggccctctgagcaagttggaccttctcaattccatctagagcccgaaactcaaaatccagagacccttgaagacatccagtcctcttcactccagcaagaagccccagcacagcttccacagctccttgaggaagaaccttcttcaatgcagcaggaggccccagctctgcctccagagtcctctatggagagtctaactctaccgaatcatgaggtgtcagttcaacctccaggtgaggatcaagcttattatcacttgcccaacattacagttaaacctgcagatgtggaggttaccataacttcagaggctaccaatgagacagaatcttcccaagctcagcaggagaccccaattcagtttccagaggaggtggaaccttctgcaacccaacaggaggccccaattgagcctccagttcctcctatggagcatgaactttccatcagtgagcagcagcagccagttcagccttctgagacttctagggaggtcgaatcttctccgacccagcaggagaccccaggtcagcctccagaacatcatgaagtcacagtttcacctccaggtcaccatcaaactcatcatttagattcacccagtgtctctgtgaagcctccagacgtgcagctcaccatagcagcagagcctagtgcagaggtgggaacttctctagtccagcaggaggctacaactcggctctcagggtcaggtaatgatatagaacctcccgccatccagcacgggggcccacctctgctttcagagtcatcagaagaagctggacctttagcagttcaacaggagacttcatttcaatctccggaacctattaataatgagaacccctctccaacccagcaggaggctgcagctgagcatccacagaccgctgaggagggtgagtcttccctaacccatcaggaggccccagctcagactccagagttccctaatgtagttgtagctcaacctccagagcattcacacctgactcaagccacagttcaacctttggatctggggtttaccatcactccagaatccatgacagaggttgaactttctccaaccatgaaggagaccccaactcagcctcctaagaaagttgtaccccaacttcgagtatatcaaggggtaacaaatccaacaccaggtcaggatcaagctcagcatccagtgtcacccagcgttacagttcaacttttggacctgggacttaccatcactccagaacccactacggaggttggacattctacagccccgaagaggactatagtttctccaaagcatcctgaggtgacacttccacatccagaccaggttcagactcagcattcacacctgactcgagccacagttcaacctttggacctggggtttaccatcactccaaaatccatgacagaggttgaaccttctacagccctgatgactacagctcctcctccaggacaccctgaggtgacacttccaccttcagacaagggtcaggctcagcattcacacctgactcaagccaccgttcaacctctggacctggagcttaccataactacaaaacctactacagaggttaaaccgtctccaaccacggaggagacctcaactcagcctccagacctgggacttgccatcattccagaacccactacagagactggacattctacagccctggagaagactacagctcctcgtccagaccgggttcagactctgcatcgaagcctgactgaagtcacaggtccacctactgaactagaacctgctcaggattcactggtgcagtctgaaagttacacccaaaataaggctttaactgcaccagaggaacacaaggcctccacaagcaccaacatatgtgagctctgtacctgcggagatgagatgttgtcatgtattgatctcaacccagagcagaggctccgccaagtgcctgtgccagagcccaacacccacaatggcaccttcaccatcttgtaagaatcacttttcctcaattgtcctctgtgtcctgcctgacatggcagccttttcctggaggccttcctgggccttctttatctccccaagccatatggacaactgactttctgctttcacctttgcttgtcaactctcccttctcctcattctcttttaatgttaggccccttctccagtcttttccttttactctggtcttttactcgtttttgtatccatttttatttagccccatcacatcattgcttaaccgctgctctcctcccattttcgcttcaccctctttacagcagcctgtccctctcccgatctcagtgatgatgctctaagtggttaagagttgattccggagccaggctgcctgggtttgaacccagatctatttattagcttggtgacccagagcaagttattctgcctgtgactcaatttcctcacctttaaactggggatcatgctagttagcatttcataggattgttgtgaaatttaggtgagtgaatatatgaaacacttcatcagtgcttagcatatgtaggagagttggctgttcacatgattattcagtcctttagttttgtccagaactcatttttgtccctagctttctatatgtagaactagttttatgtcaaacccagggccaagtatgctactgtctccagaacacgaaaatgataggagggaagaggctgggcgcggtggctcaaacgcctgtaatcccagcactttgggaggccgaggcaggcggatcatgaggtcaggagatcaagaccatcctggctaacatggtgaacccccccgtctctactaaaaataaaaaaaaaaaattagccgggtttggtggcgtatgcctgtaatcccagcttactcgggaggcttgaggcaggagaattgctttaaacctgggaggcagagcttgcagtgagctgagattcgtgccactgcactccagcctgagtgacagagcaagactccgtcaaaaaaaaaaaaaaaaaaaagaaatgatatctggcccccccttaacactggagccccactcccttctcccatccggcccgagattaa

SEQ ID NO: 138094 - DNA, 1484 bp, Homo sapiens
  misc_feature (1)...(1484): n = a,t,c or g
tgcaggaattcggcacgaggctgagcggatcctcacacgactgtgatccgattctttccagcggcttctgcaaccaagcgggtcttacccccggtcctccgcgtctccagtcctcgcacctggaaccccaacgtccccgagagtccccgaatccccgctcccaggctacctaagaggatgagcggtgctccgacggccggggcagccctgatgctctgcgccgccaccgccgtgctactgagcgctcagggcggacccgtgcagtccaagtcgccgcgctttgcgtcctgggacgagatgaatgtcctggcgcacggactcctgcagctcggccaggggctgcgcgaacacgcggagcgcacccgcagtcagctgagcgcgctggagcggcgcctgagcgcgtgcgggtccgcctgtcagggaaccgaggggtccaccgacctcccgttagcccctgagagccggcgtggaccctgaggtccttcacagccttctagacacaactcatggctcaccaacagacagatccatcaactcttccacaaggtggcccagcagcagcggcacctggagaagcagcacctgcgaattcagcatctgcaaagccagtttgggcgtcctggaccacaagcacctagaccatgaggtggccaagcctgcccgaagaaagaggctgcccgagatggcccagccagttgacccggctcacaatgtcagccgcctgcaccggctgcccaggggatttgccagggagctgttccaggttggggagaggcagagtggactatttgaaatccagcctcaggggtctccgccatttttggtgaactgcaagatgacctcagatggaggctggacagtaattcagaggcgccacgatggctcagtggacttcaaccggccctgggaagcctacaaggcggggtttggggatccccacggtaggtgtttctagtggggacagaggcaggggaggaagagggaccctcagaagtggccctgcctcatggagtggcctctcccactccaggcgagttctggctgggtctggagaaggtgcatagcatcacgggggaccgcaacagccgcctggccgtgcagctgcgggactgggatggcaacgccgagttgctgcagttctccgtgcacctgggtggcgaggacacggcctatagcctgcagctcactgcacccgtggccggccagctgggcgccaccaccgtcccacccagcgggctctccgtacccttctccacttgggaccaggatcacgacctccgcanggacaagaactgcgcgcagagcctctctgaggctggtggttgggcactgcggcatcncactcaacggccagtcttttcgctcatccacagcagcgcagaagctaagaagggatcttctgagactggcgggcccgtctacccgttgaggcaccacatgttgtccaccatgcagcaagcagctctacgtctgcttggctgtcc

SEQ ID NO: 138095 - DNA, 408 bp, Homo sapiens
gtcaacacacggatgctgttaggggtgaactcaactgtgatttgtatttccatttcatgcttcctctccctaaccggtgagatatgacctcttatgcctcttcctgccgactctgatgctcagggagcagtcgtacaaaatcgtcgacccgggaatggtgacggtgcacgagggcctgtgtgtccatgtgccctgctccttctcctacccccaggatggctggactgactctgacccagctcatggctactggttccgggcaggagacagaccataccaagacgctccagtggccacaaacaacccatacagagatatgcaggcacagacccagggccgattccaactccttggggacatttggagcaacgactgctccctgagcatcacagacgcccggaagaggga

SEQ ID NO: 138096 - DNA, 2179 bp, Homo sapiens
ctatgtcccctctgcttggatctgagtaggctgtgtgactgctggaccaagacgtggaagtggccctgtgccaggatctgcatctaggccggcatatgccactttctgtatcataggacactccctcatggaatccagccgccacactgtgtactcgttttgcagggagaggctcagggaaatgtgctgggagcctagagggttctgagctcggcaggtgaattccccttcatccttcacatgcactcgaggcagctccagcaccccaaggttcgaggactgtgaggggctcagggtcaggctcccccaggtccagctcagcctggcagggggattgctgtcgacagcacagacaaggcgcagagactggccctcaaggacttgaaagagatgaagccattttcccagggctgtggatgctgtggcatctccttggaagaacagtcatggtcaagttccaaggagggtctgtcccaaacacagacaagcttgcttagttttgtaattcaccttgtgatttgtatactccatttcatggtttcctcttctctaagccgaaagaaatatgacccccttatccctctttcctggcgtctctgatgctcagggagcagtcgttgctccaaatgtcccccaaaggaagttggaatcggccctgggtctctgcctgccacttcttctgttctgggttgtttgtggccactggaagcgtcttggtatggtctgtctcctgcccggaaccagtagccatgaactgggtcagagtcagtccagccatcctgggggtaggacgaaatcgtcgacccgggaagcatgaaatggagttacaaatcacagttgaattacaaaactaagcggccgtctgtgtttgtgacagccctgacccataggcctgacatcctcatcctagggaccctagagtctggccactccaggaacctgacctgctctgtgccctgggcctgtaagcaggggacaccccccatgatctcctggattggggcctccgtgtcctccccgggccccactactgcccgctcctcagtgctcaccccttttaccccaaagcccccaggaccacggcaccagccctcacctgtcagtgcacctctgcctgggacaggtgtgaccacgaccagtaccgtccgcctcgatgaggcctaccctgcgttggaacttgaccatgactgtcttccaaggagagggcacagcatccacaaccttgaggaatggctcggccctttcagtcctggagggccagtccctgcaccttgtctgtgctgtcgacagcaatccccctgccaggctgagctggacctgggggagcctgaccctgagcccctcacagtcctcgaaccttggggtgctggagctgcctcgagtgcatgtgaaggatgaaggggaattcacctgccgagctcagaaccctctaggctcccagcacatttccctgagcctctccctgcaaaacgagtacacaggcaaaatgaggcctatatcaggagtgatgctaggggcattcgggggagctggagccacagccctgggcttcctgtccttctgcatcatcttcgttggagtgaggtcctgcaggaagaaaacggcaaggccaacaatggggcgtgggggatacaggcatggaggacaccaaacgctgtaaggggctcagccctctcaagggacccctgagttgaatccccggcagaaggaacaggccccccaaaaccatggctccgccaatgccttggccaacccccctcgcccagaggaaggagagatccagtatgcatccctcagcttccacaaagcgaggcctcagtacccacaggaacaggaggccatcggctatgagtactccgagatcaacatccccaagtgagaaactgcagagactcaggcctgtttgagggctcacgacccctgcagcaaagaagcccgagactgattcctttagaattaacagccctccatgctgtgcaacaggacatcagaacttattcctcttgtcaaactgaaaatgcgtgcctgatgaccaaactctccctttctccatccaatcggtccacactccccgcccccggcctctggtacccaccattctcttctctacttctctgaagtcgactattttaggttccaaatatagtgagatcgtagagtgaaaaaaaaaaaaaaaaaa

SEQ ID NO: 138097 - DNA, 1179 bp, Homo sapiens
atggtcatagctgtttcctacaggcacacaccagctatggatcatagctgtttcctaggaaaccagctcatgcgtccatcagctgtttcctcaggaaaccagctcatggtccatcagctgtttcctcaggcaacacagctcatggatcatagcttgtttccctcaggcaacaccagctatgagtccatcagcttgttttccctaggcaacaccagcgtcatagcgtgtttcctaaggcaaacagctcatggatccatcagctgtttcctcaggcaacacagctatggtccatcagctgtttccgcagggcaacaccagctcatggtccatagcttgtttcctcaggcaacaccagctcatgcgtccattagcctcgttttccgtcagggcacacaccagcttcatcgcgtccatcagcgtcgtattccctcagcgcaacaccagcgtcatcgactccatcagcgtcgtcttccttcagcgcaacaccagcgtcatcgcgactccatcagcgtatgttttcccttcagggcacacaccaggcctcattgcgactccatccagcggcaacaccagctcatgcggtccattggcctgttttcctcaggcaaaacagacccaacggttactcttcttaaggaagcagcggctgaacatgagatttgcctatgtagtagacatcccgtgaatttgagggagaccaaggcacatctaggaaacgcggcacacgctgtcttccctagaggtaaccagaaaaagccagagatgtgcccttatttacctactcataagctggtggttcccacgccacccctaatcccgcttgaagcagccctgagaaacatcgcccattctcgctccataccaccccccaaaaaattttcgccgaccccagacacttcagacgactacttgttggtgtttaattctttcccttactctaaacttactacaccgaaaacggggcaaggggaaaacttgggttccacgcggcccattccttgcaacggccccccaacaaggggcccccacaatggcgccaagtacccgggcgatgtttcccaccccgttggggtgggaaccttgtgggcaaaccggttattaacaggccaatatgaagagaatggaaaatccttctttctgcttatatgtacaatagccacattccaagtgaatgcctag

SEQ ID NO: 138098 - DNA, 396 bp, Homo sapiens
atgattcaagaacatcatttaaatacacaatttttcattctctttttttgctaaatttcttcatactcaactttcagattctttaatctccagctcagcttcaacaattcaacgctgttctttctgaaaaagtacacatcgtgccttctctacttcgctcttggaacataatttctcatggcagcttttactaaactgagtattgagccagcatttactccaggacccaacatagaactccagaaagtgaacagaaaacttggaacgaaagtcggcatctctgtgcttctcagaaatccagcctgcttcagcttcaaaacacagatgaactggattttatgagctccagtcaacaattttactggattggactctcttacagtgaggagcacaccg

SEQ ID NO: 138099 - DNA, 445 bp, Homo sapiens
gcactctcccagtatctatttccatcatttgaaacttttaatacaaagaactgcatagcgtataatccaaatggaaatgctttagatgaatcctgtgaagataaaaatcgttatatctacagggtcttgctatgttgcccaggctggtcttgaactcctggcctcaagggattctcccaccttggattcccaaagtgctgggattataggtgtgaaccaccatccctggccctcttcacattcttgtatgaagattgatttgggaaaaatgcatttcaggtaactgacaaaagatataggatgaaaaataatatctttcaaatgtttaatttgaactaagagagcttatgcattgcactttctggagatttgtaatgttttggttttgttgtccatgtgactacaaaataatatattttttaattaaaaaatttaaaataataaa

SEQ ID NO: 138100 - DNA, 192 bp, Homo sapiens
agatataacgatttttatcttcacaggattcatctaaagcatttccatttggattatacgctatgcagttctttgtattaaaagtttcaaatgatggaaatctgccatgagaaattatgttccaagagcgaagtagagaaggcacgatgtgtactttttcagaaagaacagcgttgaattgttgaagctgag

SEQ ID NO: 138101 - DNA, 447 bp, Homo sapiens
  misc_feature (1)...(447): n = a,t,c or g
tcgtaaattcatgcgntccgannnacntnnaaaatngggcgaccccgcgtccgattacactatattacttgtctcttcaatttacgattcaagaacaccatttaaatacacaatgggtcatggtctttttttgctaggtttctgtatactcaactttcagattctttaatctccagctcaacttcaacaattcaacgctgctctttctgaaaaagtacacatcgtgccttctctacttcgctcttggaacataatttctcatggcagtgattaacaccactctgtggaggttaatttctgggaccttaaggataatatagcctttcgtggatggctacgatgggaattttgttgaaaaattcttttactaaactgagtattgagccagcatttactccacgacccaacatataactccacatagactctgactgctgctcttgccaa

SEQ ID NO: 138102 - DNA, 1317 bp, Homo sapiens
attcacactataatacatgtctcaccaatagatgattcaagaacatcatttaaatacacaatttttcatgctctttttttgctaaatttcttcatactcaactttcagattctttaatctccagctcagcttcaacaattcaacgctgttctttctgaaaaagtacacatcgtgccttctctacttcgctcttggaacataatttctcatggcagtgtttaagaccactctgtggaggttaatttctgggaccttagggataatatgcctttcgttgatggctacgttgggaattttgttgaaaaattcttttactaaactgagtattgagccagcatttactccaggacccaacatagaactccagaaagactctgactgctgttcttgccaagaaaaatgggttgggtaccggtgcaactgttacttcatttccagtgaacagaaaacttggaacgaaagtcggcatctctgtgcttctcagaaatccagcctgcttcagcttcaaaacacagatgaactgcaggattttatgagctccagtccaacaattttactgggattggactctcttacagtgaggagcacaccgcctggttgtgggagaatggctctgcactctcccagtatctatttccatcatttgaaacttttaatacaaagaactgcatagcgtataatccaaatggaaatgctttagatgaatcctgtgaagataaaaatcgttatatctgtaagcaacagctcatttaaatgtttcttggggcagagaaggtggagagtaaagacccaacattactaacaatgatacagttgcatgttatattattactaattgtctacttctggagtctataaaatgtttttaaacagtgtcatatacaattgtcatgtatgtgaaacaatgtgttttaaaattgatgaaattcgttcacctacatttgagaattataaaattaacataaagaattttgtattttcatttaatgtatataatgttaaattcaatgtagttttattacacatttatgtaattttatttacattcttgctaattctcagcagaaatttaaataagatttaattcacatcaaataaaatttagaaaataaaatttaactcacactgcccaggctggagcatagtggcaagatcatagctcattgcaagctcaagtgatcctcctgactcagcctcccaagtagctaggactgcaggcaccatgtcactatgcccgactaatttttaatttttaattttttgtcaagacaaggtcttgctatgttgcccaggctggtcttgaactcctggcctcaa

SEQ ID NO: 138103 - DNA, 404 bp, Homo sapiens; identical to SEQ ID NO: 114867
  misc_feature (1)...(404): n = a,t,c or g

SEQ ID NO: 138104 - DNA, 439 bp, Homo sapiens; identical to SEQ ID NO: 132756
  misc_feature (1)...(439): n = a,t,c or g

SEQ ID NO: 138105 - DNA, 481 bp, Homo sapiens
ctgactgactccttcccagatcttctcagtttagcagctgaagactgacactgcccaatcgcctcgaagccccctagaccatcacggacaccgagcttcgggtaactctcacagtggaagtatacacccagatggcctgaagtaactgaagaatcacaaaagaagtgaaaagccctgccccaccttaactgatgacattccaccacaaaagaagtgtaaatggccggtccttgccttaagtgctgacattaccttgtgaaagtccttttcctggctcatcctggctcaaaaagcacccccactgagcactttgtgacctccactcctgcccgccagagaacaaatgtcctttgactgtaattttcctttacctacccaaatcctataaagtggccccacccttatcttccttcactgaatctctttttggactcagcccgcctgcacccaggtgaaataaacagccatgttgttcacacaa

SEQ ID NO: 138106 - DNA, 553 bp, Homo sapiens
  misc_feature (1)...(553): n = a,t,c or g
ggagggaaaagctctttaatttatttctcaagatatagatccaacaggactgcaaagtggaacagttctcagaagcctgattcaggaagatgtacccgggttttggcaccaaatttcacacgcgtccgtgtgaagagaccaccaaacaggctttgtgtgagcaacatggccgtttatttcacctgggtgcaggcgggctgagtcttccactgtgagagttaccggaagctcggcgtccgtgatggtctagggggcttccgaggcgatccggcagcgtcagtcttcagctgctaagctgagaaaatctgggaaggagtcagtcagagagccttgggccagagttccaggggctctgggagtggctgccaggtgagttgaacagtccgattttcagtggtgtcctgatttaaaattggtgagatgttccttgngctggtcggtctgaggacctgaggtcataggtggatctttctcacggagcanagaacaggagtacaggggattgatctcccaagggaggtcccccgatccgagtcacggcaccaaatttcat

SEQ ID NO: 138107 - DNA, 1059 bp, Homo sapiens; identical to SEQ ID NO: 114869

SEQ ID NO: 138108 - DNA, 248 bp, Homo sapiens; identical to SEQ ID NO: 134754

SEQ ID NO: 138109 - DNA, 347 bp, Homo sapiens
ttctacatttcaatcaaaatgattaaaacaaataaaaccaaacttgtttacaaatatacgaagagtcactgtggagggaaaagctctttaatttatttctcaagatatagatccaacaggactgcaaagtggaacagttctcagaagcctgattcaggaagatgtacccgggttttggcaccaaatttcacacgcgtccgtgtgaagagaccaccaaacaggctttgtggggcttccgaggcgatccggcagcgtcagtcttcagctgctaagctgagaaaatctgggaaggagtcagtcagagagccttgggccagagttccaggggctctgggagtggctgccag

SEQ ID NO: 138110 - DNA, 419 bp, Homo sapiens; identical to SEQ ID NO: 132710
  misc_feature (1)...(419): n = a,t,c or g

SEQ ID NO: 138111 - DNA, 602 bp, Homo sapiens; identical to SEQ ID NO: 123812

SEQ ID NO: 138112 - DNA, 375 bp, Homo sapiens; identical to SEQ ID NO: 116083

SEQ ID NO: 138113 - DNA, 400 bp, Homo sapiens
gggctggcttccttcactaggggcacctttccaccttccattcctccttcttctcccttagcctgtgttctcaagaacttaaaacctcttcaactcacacttgacctaaaacctaaacaacttattttcttctacaatgccgcttgaccccaatacaaactcaacagtggttccaaatagacagaaaacggcactttcgatttttccatcctacaagatctagataattcttgttgtaaaataggcaaatggtctgaggtgcctgacgtccaggcattcttctacacgttgttccctccctagtctctgttcccaatgtgattcctcctaagccgtgtcccatctgtgtaggaccccactgaaaatcagactgttcaactcacctgggagtggctgccag

SEQ ID NO: 138114 - DNA, 1755 bp, Homo sapiens; identical to SEQ ID NO: 119697

SEQ ID NO: 138115 - DNA, 411 bp, Homo sapiens; identical to SEQ ID NO: 114508

SEQ ID NO: 138116 - DNA, 864 bp, Homo sapiens; identical to SEQ ID NO: 115468

SEQ ID NO: 138117 - DNA, 894 bp, Homo sapiens
tcagcaggatgtgggtggggccagataagggaataaagcaggctgccggaaccagcggcaccaagctggtcggggagtcttccaattgtggaaacgttgtttgtaaaccttgttcttctgctctttgcaatagtcttgctgctgctcactctttgggtctgtgccgccttcatgagctgtgaactcaccgtgaagttttgcagcttcgctcctaaagccagcgagaccacgacccactgggagggacagcaactctggacgcgccacttttacgaactgtgcactcaccgcaaaggtctgcagcttcactcctgaggccagcgagaccagaacccaccgtgaaggaacgaacaactccagacgcgccgcctttaagagtgtaacactgcaaaggtctgcagcttcactcctgaagtcagcgtagacccgaacctggcagccactcccagagcccctggaactctggccaaagctttctgactgactccttcctagatcttctcggcttagcagctgagactgacgctgcctgattgcctcggaagccccctgtcctagaaggggatcctcagatcgaccattttcagacacaagatagttaatgaacataaagtagaagaaacatgaagagcctgcactgaggtttatctcacagtcaaacttcttttcagatctctcccaagcataattatcctccttgacaaatgaacagacagattcagcagctgccacactgcacttgtttttaggggacatgtcagacaggtggatgtgaactacagttcctcgccgcctggaacatcccccaaccgccgtcaaggacacaaccagtgcgaccacccctgaaatcgagtccccaacatacgccggaccccacaaaatgaggaccgacat

SEQ ID NO: 138118 - DNA, 2493 bp, Homo sapiens
tcagcagtggctgccggttttttttttccctctgttctggttggcgatggtgcgaataggaaccacccttccagccccactagatatcagcaatagaggcggcggcggcggcagcagcagcagcagcagcatcccagttgggcctcctccctctcggaggatggggtgagctcggaagcagcaggaacttgcagcagacacctcctctggctcctcctctctctctccccccccccagtgccccacccctgctgcggtagaggctgctggcccggcagctctggttgccatggcaatgaccaatgataagcgaccaagctcagggggagggagatgggcgaagcaagctgcaaggtctggaggggagtgaatttgtgcgctgccctctaggatgctcttgatgtctcctaccctgaactccaggtcttttaaaaatggggcaaggggggtcctgggttgttggaagtctttggtcccattgagtcgtttttgaagtttttgttgcaaaatgttaaggagtaccttacatttctggccaatgttgtccttgatggccctatatatgtgcttttcattctctacacataaattgatctcttcaagttcagggggagcaactgatcctaggatccttacgtatccaaaggcaattgctgatgattgtccctgaagggtaattttaacttgcctaagatcacatgactgcttttcattgtgaatcactgtttctctgggtgagatggtcagcccaatttccaaacaatattccagtctagcgtggaaaattgtgactcttgcatcatcaatttctccatctttgcccaatatgagttcaaaaacagctttggaaagttccaaagtcctccattgactccacatttccctggagagcagatccatttctccactcccaaagtcccctgaccctggtatatcaaacataccttggtgattggagagctgcatgccaacatggtcaaactggcacgtctcttcaaagcctgggactggaagggtcatatggcagatggcagcaaggccccaccactgggctatatcacagatctccctggttattgattgactctgtgtcatgcctggcctccaggttctgggaatgtcaccactaacacccaaaaacttctcgtggctccttagtgcctttagggaacacgttgttcttctgattaagacattaaaatccaaaatcttgtccttagtaatgaactgcaatgtatccctacacagctgcctttctcttaacttcaaggctacaaggatgtagtagccagtatgatagccagagggagaaagaagccaaagaaaaagtgggctgttgtgacagcgtttggtgccatggaatgataatctctttccaaagttggtgacttcttgagtttcattctgcagatcatactggttgtacaaagagggtgacacttccaccacgagtttccgtgttgactgtgcaggacatgtggaatcaactacccaaatgacaaggccattgccagccaagccttcaccagcttgagctctgcttccctgctggggttttatagcagccaaatccattttggagcttttgaatctatggggccaagggactctgaaggcatctgtgtcagttacagactggtgaagtctctgtgctaggacctcagtaaaaggcctcctccaccctgtactaccaaaagaatcatagcgcatgttgtaaatcaaactaaatatggcctgagaaagcctccatacttccatatttgatccttgtggatgaactataaccaccttagtaggtagacaagactgaagttgctttccaactgtgtcagcaacaacataacattcagctggtacaaagctgcgacttgtgaatttcctactgacattaagaagacttgtgaattccgtaatgagactgaagaagtctttcatgatggtacagagaatggtgtcaattcctaaagtttggtcaatctctctgggattcctcctaagcttcgtcccatctgtgtgggaccccactgaaatcggactgttcaactcacctgacacccactcccagagcccctggaacttggcccaaggctctctgactgattccttcccagatcttctcggcttagtgctgaagactgacactgcccgatcacctcggaagccccctgtcatgaggccagggactgtctgtgttgttgactgctgagcacccagccagtgtataggtggcaatagcattgctctcccacacagagaatccatatcacccttaaatgctagaaccttgtgggaaggaaattcaggggtacagtggtttggccaaagtaaaagtgagcgtagaggacgcgaatctgagcccccattaccaagcagaatgagggcctgctcatcatacacccgccctccggtttcaggacatgtgttcaggctcccagctgccttggtgatttcgcagagaagcgagtagggttctccacgttctttttcttccat

SEQ ID NO: 138119 - DNA, 807 bp, Homo sapiens
atggatgaggagaaaagggaacacttaaatgctcttggtcgaagggcactgggtgaaggtccaatgtatcagtgcacacgggggagtggggcggggaattatctcaccacctacgtacgggagcccgaacaaaaggctctggccattttatggacccaggggtggggatggggccctgtaaataacagtgaaaggttgctcgtagatactcaacgttttctcatacaccatgaaaatcgaacctcctcctctgtgcagttacctcatcagtccccattacaacctctgatggctgtggccctagctggatccctaggagtctgggtacaagacacccctttcagcactccttctcatctttttactttgcatctccagttttgcctcgcacaaggtgtcttcttcctctgtgtatcctctacctacatgtgtctacctgctaattggacaggcacatgcacactagttttccttactcccaaaattcaatttgcaaataggaccgaagagctccctgttcccctcatgacaccgacacgacaaaaaagagttattccactaattcccttgcttgtcagtttaagactttctgccttcactattgctctcggtactggaatagcaggcatttcaacctctgtcacgaccttccgtagcctctctaatgacttctctgctagcatcacagacgtatcacaaactttatcagtcctccaggcccaagttgactctttagctgcagttgtcctccaaaaccgccgaggccttgacttactgctgaaaaaggaggactctgtatattcttaa

SEQ ID NO: 138120 - DNA, 1317 bp, Homo sapiens
atggtctatggggcttccaaggcgatcgggcagcatcagtcttcagccgctaagctgagaagatctgggaaggagtcagtcagagagccttgggccagagttccaggggctctgggagtggctgccagactagtcattggagaacagatgattgatgtcttagggccggagaaacgcagacggcgtaccacacaggaaaagatcgcaattgttcagcagagctttgaaccggggatgacggtctccctcgttgcccggcaacatggtgtagcagccagccagttatttctctggcgtaagcaataccaggaaggaagtcttactgctgtcgccgccggagaacaggttgttcctgcctctgaacttgctgccgccatgaagcagattaaagaactccagcgcctgctcggcaagaaaacgatggaaaatgaactcctcaaagaagccgttgaatatggacgggcaaaaaagtggatagcgcacgcgcccttattgcccggggatggggaacgaaccgatgactggatggatggccgccgcagtcgtcacactgatgatacggatgtgcttctccgtatacaccatgttatcggagagctgccaacgtatggttatcgtcgggtatgggcgctgcttcgcagacaggcagaacttgatggtatgcctgcgatcaatgccaaacgtgtttaccggatcatgcgccagaatgcgctgttgcttgagcgaaaacctgctgtaccgccatcgaaacgggcacatacaggcagagtggccgtgaaagaaagcaatcagcgatggtgctctgacgggttcgagttctgctgtgataacggagagagactgcgtgtcacgttcgcgctggactgctgtgatcgtgaggcactgcactgggcggtcactaccggcggcttcaacagtgaaacagtacaggacgtcatgctgggagcggtggaacgccgcttcggcaacgatcttccgtcgtctccagtggagtggctgacggataatggttcatgctaccgggctaatgaaacacgccagttcgcccggatgttgggacttgaaccgaagaacacggcggtgcggagtccggagagtaacggaatagcagagagcttcgtgaaaacgataaagcgtgactacatcagtatcatgcccaaaccagacgggttaacggcagcaaagaaccttgcagaggcgttcgagcattataacgaatggcatccgcatagtgcgctgggttatcgctcgccacgggaatatctgcggcagcgggcttgtaatgggttaagtgataacagatgtctggaaatatag

SEQ ID NO: 138121 - DNA, 882 bp, Homo sapiens; identical to SEQ ID NO: 116081

SEQ ID NO: 138122 - DNA, 513 bp, Homo sapiens; identical to SEQ ID NO: 116082

SEQ ID NO: 138123 - DNA, 774 bp, Homo sapiens; identical to SEQ ID NO: 116096

SEQ ID NO: 138124 - DNA, 641 bp, Homo sapiens
tttggtgtcgtgactcagattgggggacctcccttgggagatcaatcccctgtcctcctgctctttgctctgtgagaaagatccacctacgacctcaggaccgaccaagaaacatctcaccaatttcaaatccagtaagcggcctctttttactctcttctccaacttgcctcactatccctcaacctctttctcctttcaatcttggcgctacacttcaatctctcccttctcttaatttcaattcctttcattttctggtagagacaaaagagacacgttttatccgtggacccaaaactccggtgccagttacggactgggaaggcagccttcccttggtgtttaatcattgcagggatgcctctctgataattcacccacatttcaaaggtgtcagaccacgcagggacgcctgccttggtccttcacccttagcggcaagtcccacttttctgggggagtggcaagagcttgctacacatgccagaaatctggccattgggccaaggaatgccagcagcccaggattcctcctaagccgcgtcccatctgtgtcggaccccactgaaaatcggactgttcaactcacctggcagccactcccagagcccctggaactctggcccaaggctctctga

SEQ ID NO: 138125 - DNA, 885 bp, Homo sapiens
cctggtgatcaccaaccatatgcggggaacccacaacaggcatatttcagcccacctatatcagccgtcgtctgctccatctatatggggaaacgaacaggcatcattcagccacttcatgcgctgtatctccacaacaatgccaacaccacagaaggggacgggcttaccttccactgtgagagttacccgaagctcggcgtctatgatggtctgggggcttccaaggcaatcgggcagtgtcagtcttcagccgctaagccgagaagacctgggaaggagtcagagagccttgggccagagttccaggggctctgggagtggctgccaggtgagttgaacagtccgattttcagtggggtcccacacagatgggatgcggcttaggaggaatcctggcctgcgggcattccttggcccagtggccagatttccggcacgtgtagcaagctcctgtgggaggaggttctggaggaatgcctggccactgcggttcaggtgtttggaagttcttgtgtgccggagatgtggttgccccttccccagaaaagcgggacttgccgctaagggtgaaggaccaaggcaggcgtccctgcgtggtctgacacccttgaaacgtgggtgaatgatcagagaggcgtccctgcagtgagtaagcgtccctgtgtggtctgacacgtatgaatctggcaacataacaggaagcagcatagatgcccagagccaaaaataaagccccagttccatgtctggaagtcccaagacaatctgagacttgggatctgagctcagcagaatccggggagcctgagggccttcgatgtgcttcaagccagagaaaccttggagaccactgggaccaatttctgggcctgctgtggccat

SEQ ID NO: 138126 - DNA, 1844 bp, Homo sapiens
atgggggctgtctgtgaagctttgcggcagtacagcccagaaggggacggacttaccctccactgtgagagttacccgaagctcggcatccgtgatggtctgggggcttccgaggcgatccggcagcgtcagtcttcagccgctaagctgagaagatctgggaaggagtcagagagccttgggccagagttccaggggctctgggagtggctgccagccttgggctcctgtctacagcagcccaaggcaattccacttggtcaccccgataagtctccatcatccaaatggctgggaccacattcaactcctctttctcctcagccagcatctgtccacacttgcctgtttctagcctttcttcttccggacactcaagaaaattttcttaatcttatattccatactacaaaaactaacaatggattgcattcctccttgtgtttgctttactgggtgtctacttcacctaaagattcttatgagatccagccccaggggccattaaactgccagagccttttgttctggggctccctcaaaagtgagatgacccaaggtctgtgcagatccaccagcacaccattccacggtggagaggaacagaacgtgccatcacagtgggtggcccaatcccacaggagggagaacagaacggtgggaggtgaagccttcccaggtcaccctcctgcaagtgccatcacagtgggtgacccaatcccacaggatggacaacagaatgttgggaggaggaaattcaaaccaaaaggtgaagaagttgaaaactttgaaaaaaatttagacgaatgtataactagaataaccaatacagagaagtgcttaaaggagctgatggagctgaaagccaaggctcaagaactatgtgaagaatgcagaagcctcaggagctgctgtgatcaactggaagaaagagtatcaatgatggaagatgaaatgaatgaaatgaaaccaaatctgcgtctgattggtgtacctgaacgtgactgggagaatggaaccaagttggaaaacactctgcaggatattatccaggagaacttccccaaccttgtagcattctgaggacaggcctgaattctgagaagcaaaagtggtaaaagtattgtccagtcctttttaagttggtggctgagcttggtgaggtgtgtttttaaaagacctttagtccgttctacttttcttccactgtgagagttacccaaagctcggcgtccgtgatggtctacggggcttcggaggcaatcgggcagcatcagtcttcagccgctaagccgagaagatctgtgaaggagtcagtcagagagccttgggccagagttccaggggctctgggagtggctgccagcatgaagtcacatggacacaacaggtatcccatgtctcctcaggtcgggctcccgctcccggagcaagagccggagccggagccagagtcggagccggagcaagaaagagaaaagcaggagccccagcaaggacaagagcctgcagccgcagccatagcgctggcaagagccgcagcaagagcaaagaccaagctgaagagaagatccaaaacaatgacaatgtcgggaaacccaagagccggagtcctagcaggcataaaagagtcaggagaggagagtggaggaggagaagcgagggagtgtgagcaggggcaggagccaggagaagagcctccgccagagtcggagccggagcaggagcaaagcgggcagcaggagccggagcaggagccgcagcaagagcaaggacaagaggaagagcaggaagagaagcagagaggagagccgcagtcgcagtcgcagccgcagcaagagtga

SEQ ID NO: 138127 - DNA, 3726 bp, Homo sapiens
atggaattttgtatttcattaggccggaaaataactttttcaaacatttttccctacaacggggccaattggaaggttttcttaaaaaagtcccaaccattattgaatgcactggttgagcaggatgatgccgaacgcttgttccgccgcttccgagcggcaggggatttaccgtatggcgcttttggtgaaattttctgggaaacacagtgccaggagatgcagcagcttgccgacagagtcattgcctgtcgccagccggggcagagtatggaaattgatctcgcctgcaacggtgtgcagataactggctggttgccgcagctttgggatgctgaagggatcagcttcagtgtcttcagctttgggatgctgaagggatcagcttcagtgtcttcagctttgggatgctggagcttgctacacatgctggaaatctgccactgggccaaggaatgcccacagcacggtattcctcctaagccacgtcccatctgtgtgggaccccaccgaaaatcggactgttcatctcacctggcagccactcccagagcccctggaactctggcccaaggctctctgactgactccttcccagatcttctcggcttagcggctgaagactgacgctgcccgatcgcctcggaagcctgacacttatactttctgctcccccggctccttcagttgtacccactctttgttgagtctcccacaattaccattgttcctggcccggacttcaatccggcctcccacattattccggataccacacctgaccctcatgactgcatctctctgatccacctgacattcaccccatttccccacatttccttcttccctgtttctcaccctgatcacacttggtttattgatggcagttccaccaggcctaatcgccactcaccagcgaaggcaggctatgctatagtatcttccacatctatcattgaggctactgctctgcctccctccactacctctcagcaagctgaactagttgccttaactcaagccctcactcttgcaaaaggactatgcgtcaatatctatactgattctaaatatgccttccatatcctgcaccaccatgcagtcatatgggctgaaagaggtttcctcactacacaagggtcctccatcattaatgcctctttaataaaaactctgctcaaagccgctttacttccaaaagaagctggggtcattcactgcaaggggcatcaaaaggcatcagatcccattgctctaggcaatgcttatgttgataaagtggctagacaagcagctagctctccaacttctgtccctcacggccagtttttctccttcacttcagtcactcccacctactcccccactgaaacttccacctatcaatctcttcccacacaaggcaaatggttcttagaccaaggaaaatatcttcttccagcctcacaggcccattctattctgtcatcatttcataacctcttctatgtagacataattcctcggtttggccttcccacctctatacagtctgataacggaccagcctttactagccaaatcacccaagtagtttctcaggctcttggtattcagtggaaccttcataccccttaccgtcctcaatcttcaggaaaggtggaacggactaatggtcttttaaaggcacacctcaccaagtttagcctccaacttacaaaggattggacagcacttttacctcttgctcttctcaaaatcagagcctgtcctcgagatgctacaggatacagtccatttgaacttttatatggacgcactttcttgcttggccccaacctcatcccagacaccagccctctaggcgactatcttccagtactccagcaggctagacaggaaattcgccaggctgctaatcttctcttgcctactccagatccccagccatatgaagacaacctagctggacgatcagttcttgttaagaatctgacccctcaaactctacaacctcgatggaccggaccctacttagtcatctatagtaccccgactgccgtctgcctgcagaatcctccccactgggttcaccattccagaataaagctgtgtccatcggacagccagcctaatccctcctcttcctcctggaagtcgcaagtactctcccccacttcccttaaactcactcatatttctgaagaacatgcctacacagctgtccccgccttacagacagactgggcaacatctcccatctccctacacctccgaacttcctttaacagccctcacctttaccctcctgaagaactcatttactttctagacaggtccagcaagacttccccagacatttcacatcagcaagctgccgccctccttcgcacttatttaaaaaacctttctccttatatcaactctactccccccatatttggacctctcacaacacaaactactattcctgtggccgctcctttgtgtatctcttggcaaagacccactggaattcccctaggtaatctttcaccttctcgatgttcctttactcttcatctccgaagtccaactacaaacatcaatgaaacaattggagccttccagctccatattacagacaagccctctatcaatactgacaaacttaaaaacattagcagtaattattgcttaggaagacacttgccctgtatttcactccatccttggctatcttccccttgctcatcagactctcctcccaggccctcttcttgtttacttatacccagccccgaaaataacagtgaaagattgctcgtagatactcgacgttttctcatacaccatgaaaatcgaaccttcccctctacgcagttaccccatcagtccccattacaacctctgacagctgccgccctagctggatccctaggagtctgggtacaagacacccctttcagcactccttctcacctttttactttacatctccagttttgcctcgcacaaggtctcttcttcctctgtggatcctctacctacatgtgcctacctgccaattggacaggcacatgtacactagtcttccttacccccaaaattcaatttgcaaatgggaccgaagagctccctgttcccctcatgacaccgacacaacaaaaaagagttattccactaattcccttgatggtcggtttaggactttctgcctccactgttgctctcggtactggaatagcaggcatttcaacgtctgtcatgaccttccgtagcctgtctaatgacttctctgctagcatcacagacatatcacaaactttatcagtcctccaggcccaagttgactctttagctgcagttgtcctccaaaaccgccgaggccttgacttactcactgctgaaaaaggaggactctgcatattcttaaatgaggagtgttgtttttacctaaatcaatctggcctggtgtatgacaacattaaaaaactcaaggatagagcccaaaaacttgccaaccaagcaagtaattacgctgaacccccttgggcactctctaattggatgtcctgggtcctcccaattgttagtcctttaatacccatttttctccttcttttatttggaccttgtatcttccgtttagtttctcaattcatccaaaaccgtatccaggccatcaccaatcattctatacgacaaatgtttcttctaacatccccacaatatcaccccttaccacaagacctcccttcagcttaa

SEQ ID NO: 138128 - DNA, 1103 bp, Homo sapiens
atgacagacaccggagcctacttgaaggtggaggattattcagtgacgttgcactggtataaaatcttactgggaatatctggaaccgtgaatggtattctcactttgactttgatctccttgatcctgttggtttctcagggagtattgctaaaatgccaaaaaggaagttgttcaaatgccactcagtatgaggacactggagatctaaaagtgaataatggcacaagaagaaatataagtaataaggacctttgtgcttcgagatctgcagaccagacagcagtgagtaagtcaaggtctcggcggttttggaggacaactgcagctaaagagtcaacttgggcctggaggactgataaagtttgtgatatgtctgtgatgctagcagagaagtcattagaaaggctacggaaggtcgtgacagaagtcgaaatgcctgctattccagtactgagagcaatagtggaggcagaaagtcctaaaccgacaagcaagggaattagtggaataactcttttttgtcgtgtcggtgtcatgaggggaacagggagctcttcggtcctatttgcaatttgaattttgggagtaaggaaaactagtgtgcatgtgcctgtccaattagcaggtagacacatgtaggtagaggatctttcagggtctagggctgtaaatcgtgtcagggttgctgccaaacaaaccatgaactgggctgggtttttatattcgatgaaaaagagcctaaatgctaactgattttgggagaggtcagataaagaaagaggagcattaaccttgactatgactttagcttcagccactgcccagggctggtggagctggccggctgctctgagggtggggtccaccaagcccacgcccacccagaactcatgctggcccacaagcgccatatgcagccccgttcctgtctgcgcctctccctccacacctccccgcaagctgagggagccagcttcggccttggccagcccagaaaggggctcccacagtgcagtggcaggctgaagggctcggccagagtgggcgccaaggccgaagaggcgctgagagcaagcaagggctgcaagggctgccagcat

SEQ ID NO: 138129 - DNA, 939 bp, Homo sapiens
tttggcgccgtgactgggatcgggggacctcccttaggagatcaatcccccgtcctcctgctctttgctccgtgagaaagatccacctacgacctcaggccctcagaccgaccagcccaagaaacatctcaccaatttcaaatccgagacaaaggagacacgttttatccgtggacccaaaactccggcgccagtcacggactgggaaggcagccttcccttggtgtttaatcattccagggacacctctctgattattcacccaggcttcagaggtgtcagaccacgcagggacgcctgccttggtccttcacccttagcggcaagtcccacttttctggggaaggggccagctgctcctcgccagaccgagctaggtcccaattcttcctcagcctccgctcctccaccctataatccttttatcgcctcccctcctcacacctggtccggcttacagtttccttccatgactagccctccccctcctgcccagcaatttactcttaaaaaggtggctggagctaaaggcatagtcaaggatttaattaacctcaccttcaaggtgtacaataatagaaaaaagttgcagttccttgcctccactgtgagacaaaccccagccacatctccagcacacaagaacttccaaacgcctgaactgcagcagccaggtgttcctccagaacctcctccccgaggagcttgctacaagttccagaaatctggccaccgggccaaggaatgcctgcagcccaggattcctcctaagccacatcccatctgtgtgggaccccactggaaatcggactgtccaactcacctggcagccactcccagagcccctggaactctggcccaaggctctctgactccttcccagatcttcttggcttagcggctgaagactgacactgcccgatcacctcggaatcccca

SEQ ID NO: 138130 - DNA, 908 bp, Homo sapiens; identical to SEQ ID NO: 135088

SEQ ID NO: 138131 - DNA, 1883 bp, Homo sapiens
tcaggcctctgagcccaagccaagccatcgcatcccctgtgacttgcacgtatacgcccagatggcctgaagtaactgcacccaggtgaaataaacagccatgttgctcacacaaagcctgtttggtggtctcttcacacggacgcgcatgaaatttggtgccaagacccgggacttggatcaggggacttcccttgggagatcactcccctgtcctcctactctttgctccatgagaaagatccacctacgacctcaggtcctcagaccgaccagcccaagaaacatctcaccaatttcaaatccaagacaaaggagacaggttttatccatggacccaaaactccggcaccggtcacggactgggaaggcagccttcccttggtgtttaatcattgcagggacacctctctgattattcacccatgtttcaagggtgtcagaccacgcagggatgcctgccttggtccttcacccttagcggcaagtcccgcttttctggagaaggggcaagatttaattaacctcgccttcaaggtgtacaataatagaaaaaagttgcaattccttgcctccactgtgagacaaaccgcagccacatctccagcacacaagaacttccaaatgcctgaaccgcagcggccaggcgttcctccagaacctcctcccacaggagcttgctacatgtgccggaaatctggccactgggccaaggaatgcccgcagcccgggattcctcctaagccgcgtcccatctgtgtaggaccccaccgaaaatcggactgttcaacttcacctgggcagccactcccagagcccctggaaatctggcccaaggctctctgactgactccttcccagatcttctcggcttagcagcttgaagactgacactgcccgatcgcctcggaagccccctgggtatattgcatgatgttgaggtttggggtatgattgattctgtcacccagatactgagtatagtacacaatagttaatttttcaattgtctcttctccctctctccctccatagtagtccccagtgtcttttgttgccatcagcagctgtatgacactgtccccaggtctcatgtctgtataaacatacacatcataggatatttcagggaaggttggcgtgttatcatttgcatccatcacttgaatattgacgatgactggctcactttcttgtacaccatcaaatgctgttatcgaaaaggtgtaagtttgctgttcttccctgtccactggttgaagtaaggtgaggtagcgagtaataccagtctgtgtgacggtgaagactgaggtgtagtcattcagaaaaaggtgaagctctgggtcttttgtatcttctatgtccttgtccagagctactattcttaaaggtgaagtcaaattgagactgtccgaaatggttgctcccactggggcagattccaggatatagccttgataactgggcattgtaaaatatggactttgattgttttcatccagtatttcaatgtgtagaccggcaaaggcaggaagaggatgaccattgtcttgttcagccttaataaccaaatcaaatttctggtgaaagtctctgtttactggctccaggagactaagttctgctgtcctaggatgcatatggaaaaatcgtgggtaatcctcaggagtccctttgctccagttaccaacaagttcctcatctctatctgagaccacctcagcctggttttcatcattaatatcattatcagcattttggtcaaagccattcggtaagtctctagagagttccaaactttctcgcatcttcctatcttctacagagccctgcaaactgttccaatctctgcctgttacccagttccaaagtcgtttctgcat

SEQ ID NO: 138132 - DNA, 1023 bp, Homo sapiens
actgaagatccaacacaagaagtaaaaatagccttaactgatgacattccaccattgtgatttgttttgccccaccctaactcttcaatgtacttttgtaatctcccccacccttaagaaggtactttgtaatctccccaacccttaagaaggttctttgtaattctccccacccttgagaatgtactttgtgagatccacccctgcctgcaaaacatggctcttcaccccctatcccaaaacctgtaagaactaatgataatccaccaccctttgctgactctcttttcggactcagcccgcctgcacccaggtgaaataaacagccatgttgctcacacaaagcctgtttggtggtctcttcacacggacgcgcatgaaatttggtgccgtgactcggatcgggggagacctcccttgggagatcaatcccctgtcctcctgctctttgctccgtgagaaacatccacctacgacctcaggtcctcagaccgaccagcccaagaaacatctcaccaatttcaaatccggtaagcggcctgctttttactctcttctccaacctccctcactatccctcaacctctttctcctttcaatcttggcgccacacttcaatctctcccttctcttaatttcaattcctttcattttctggtattttctggcagccactcccagagcccctggaactctggcccaaggctctctgactgactccttcccagatcttctcggcttagcggctgaagactgacactgcccgatcgcctcagaagcccctgcccgctttccagtcgggaaacctgtcgtgccagctgcattaatgaatcggccaacgcgcggggagaggcggtttgcgtattgggcgccagggtggtttttcttttcaccagtgagacgggcaacagctgattgcccttcaccgcctggccctgagagagttgcagcaagcggtccacgctggtttgccccagcaggcgaaaatcctgtttgatggtggttccgaaatcggcaaaatcc

SEQ ID NO: 138133 - DNA, 439 bp, Homo sapiens
  misc_feature (1)...(439): n = a,t,c or g
gtccgggtaccgacagccctttcagagcttcacgcactcacgcggacttctcggtgttatcatgcagagtccaaccaatatatnntaaatagctgtcggtgaggaaagacgtgctgtagctttgcatccaacacccaatttcctcaatgcagatagcacggatctcaggaaggacatcccggcgttgttttcagtggttattttgctgctttcttcttcacaccgcgattgaagctgtcctcaaatcattctcttgtcttcttgtctggtacatcggcatggcgcaaccaaagcaagagagggtggcgcgtgccagacaccaacggtcggaaaccgccagacaccaacggtcagaaaccgccagacaccaacgctcggaaaccgccagacaccaacgctcggaatacacgccagaccacgacggagggcgaacgaaatt

SEQ ID NO: 138134 - DNA, 4205 bp, Homo sapiens; identical to SEQ ID NO: 130036
  misc_feature (1)...(4205): n = a,t,c or g

SEQ ID NO: 138135 - DNA, 394 bp, Homo sapiens
tggctctgtcaaaggtcgagtccgtgacgtcaaagagcctggaccaatcacagcacaccggatgcgtttttttttccgaacgcccgcagcagagtcagaagagaggtggtcgccgtgcagtagtggtgtggcgtgtattccgagcgttggtgtctggcggtttccgagcgttggtgtctggcggtttctggacggttggtgtctggcggtttccgacggttggtgtgtggcacgcgccaccctgtcttgttttggttgcgccatgctgatgtaccaggtggcaaaatatccaaagaaagggtcccaagcggtacatcgtcatagccggaaacagtcagagccaccagccaatgatattttcaatgctgcgaaagctgccaaaagtgacatgcag

SEQ ID NO: 138136 - DNA, 197 bp, Homo sapiens; identical to SEQ ID NO: 118893

SEQ ID NO: 138137 - DNA, 448 bp, Homo sapiens
tgcttgagggctgggccgcatgccctctacctgctctgtaaatcccggaattcactttcctccagccgggcggacttttgcccgcagccagctagtagatttgctgactgacccccttccaagcaggagcttgaagagctgttacaggtaggagctgtcacactcattctcagaattcttccatgcctgccctgccttccactgtgaatctacattccaatgttattttgcatagacatagtaccatatgtttgacaggtctccccatcttttcatttctgtcccccaagtatcttggatagtgttcattaaataagctgaataaatgctgtttgattgaacgaaggaaggtggctccagtagcccacttgtaccaaagtatgtgcaggagaattagttcatagaaatttccatcggagctctctgaaaatggagatgggtactgtag

SEQ ID NO: 138138 - DNA, 404 bp, Homo sapiens
agaaaagctcaccgcatcagctggttgcccaggccaggacctgaagggttgtgtggagtctggaaatattgtggacccaagaaccttgacctctcggtgcctgcgacgggctgactgctgggaatgaagcaggatcaatgatgggataaaaatcaagggtaagaagaggatgtaaggcagctggtgttaatggggagaaaagctcagagagatgcattttaaagctaaacaatggagaagggtttgagaagaacccaacaatgtgggagtgctacagcagggaaccatgaaacagaaacagcaagatggaggcagccagacaccaaactgggaactcagacacccagattccctccatggcctcacccctgggcaaaatccaactctgagccatcttcttcctc

SEQ ID NO: 138139 - DNA, 481 bp, Homo sapiens
aactgactgggcaaccccatcaaaagtaacttatcaggacattggaacgccaacaaggaagtgatagggagttcctaattatttttcagtctgttctctctcagcctccttcagttactatagacggtttttatttaatgttatggagtagaggtgattggctttgtttgctgcaggggtatcgggagttccctagaaggaaggaaagagtaaaagtagtagatggtgtcccaaggcctttggaatttctgagtagagaagagaatgctggacttctctgtttccgccgtgttcctccctttcccacatgcaccatgtctcctggacacagctgtacacagaactgctgcaggagcatgggccccagggcctgaatgagcttcctgccttcatcgagatgagggacctggcccggaggtttgccttgagttttggaccccagcagctgcagaaccgtgacctgcgggtcatgctacacaag

SEQ ID NO: 138140 - DNA, 1056 bp, Homo sapiens
tcacagttctgcaggcttcttaatattcctttgaaattccttatggtgcacaggtagtgtagaaaataactgcttcacgctgactgtggtccctctggggtgggggtagggggttttctggatgattttcccatcgtgatcaaacaccagtcgagtcccaaccttcgccgatgcgtggcaggtagaaatggtgacatcgatgtgtgatgtttcagagctgaaagagattaagccttcaaagttttcttcttctaccccacatccattgtctgaaacttcaatgagatccactccatagtccttaagctttagatcaatattggtggcaccagcatccagactgttttctactaactccttcaccgcagtgcttagactcagtaccaccggcccagagcaaatctgatggactgacttccgatcgataggtttgatggccttagcaggttctgtatcaaagctatgaaactgatgacctccctggtaagagttgccctccaactgagtctgcacgaagatatcaatcagcgtcagtatgaggctgaaagaaacaaggggccagggcagagggcacctgagcggctggagagccagagctcgtgggtgaccaggtgccttatcactgagcagtaatattttgaaaggaatcttgttttctgagcagtaggtctcacccatgtgcttaaaatattcaggaaaccatgatggtttccttggatactggatgatgccattcaggtctatgtttttatctgaaaatggtgcccctgctgtccggctgtcctctccatagggggctcgatggtctttgccgacttgaggaaataggtcactgtattgcagcagatccttggtcgtggggctgggttggtcattgccactttgctgggaggttgaagcctcagggctcagtgccagctggctggggtgagattgggagcagtccattagccatgagttgccgatctgcatctgcacctgctccagctgggctttggcagccgtgattcctgaactgatgcatggctctgcttgcatggaccaagcttgcaacat

SEQ ID NO: 138141 - DNA, 497 bp, Homo sapiens; identical to SEQ ID NO: 130037

SEQ ID NO: 138142 - DNA, 515 bp, Homo sapiens
  misc_feature (1)...(515): n = a,t,c or g
ctcgccnacagctatttagaatatattggttggactctgcatgataagcaccgagaagtccgcgtgaagtgcgtgaaggctctgaaagggctgtacggtaaccgggacctgaccgcacgcctggagctcttcactggccgcttcaaggactggatggtttccatgatcatggacagagagtacagtgtggcagtggaggccgtcagattactgatacttatccttaaacttttctaccctgagtgcgagataagaacgatgggtggatagagagcaacgccagagcccaggcgcccagaggactttcttccagcttctgctgtccttctttgtggagagcaaggtgacatacacagagagaactctggctgttgtgcataggacctacaagtgggctggggttggtggctcacgcctgtaagcccagcactttgggaggctgaggtgggaggatcctttgagcccaggagtttgagaccagcttgggcaacatagtgagaccctgtcgcccccaa

SEQ ID NO: 138143 - DNA, 900 bp, Homo sapiens
cgcagcagggtcagaagggaggtggtcgccctccgtcgtggtctggcgtgtattccgagccttggtgtctggcggtttccgagcgttggtgtcttggcggtttccgaccgttggtgtctggcggtttccgaccgttggtgtctggcacgcgccaccctctcttgctttggttgcgccatgccgatgtaccagacaagaagacaagaaaatgatttgaggacagcttcaatcgcggtgtgaagaagaaagcagcaaaacgaccactgaaaacaacgccggtggcaaaatatccaaagaaagggtcccaagcggtacatcgtcatagccggaaacagtcagagccaccagccaatgatcttttcaatgctgcgaaagctgccaaaagtgacatgcagggatgtccttcctgagatccgtgctatctgcattgaggaaattgggtgttggatgcaaagctacagcacgtctttcctcaccgacagctatttaaaatatattggttggactctgcatgataagcaccgagaagtccgcgtgaagtgcgtgaaggctctgaaagggctgtacggtaaccgggacctgaccgcacgcctggagctcttcactggccgcttcaaggactggatggtttccatgatcgtggacagagagtacagtgtggcagtggaggccgtcagattactgatacttatccttaagaacatggaaggggtgctgatggacgtggactgtgagagcgtctaccccattgtgtaggcctctaattgaggcctggcctctgctgtgggtgaatttctgtactggaaacttttctaccctgagtgcgagataagaacgatgggtggaagagagcaacgccagagcccaggcgcccagaggactttcttccagcttctgctg

SEQ ID NO: 138144 - DNA, 814 bp, Homo sapiens
atggcacgaaccccgggggcagagctggcagtggcaaaatatccaaagaaagggtcccaagcggtacatcgtcatagccggaaacagtcagagccaccagccaatgatattttcaatgctgcgaaagctgccaaaagtgacatgcagcaccgagaagtccgcgtgaagtgcgtgaaggctctgaaagggctgtacggtaaccgggacctgaccgcacgcctggagctcttcactggccgcttcaaggactggatgggtttccatgatcatggacagagagtacagtgtggcagtggaggccgtcagattactgatacttatccttaagaacatggaaggggtgctgatggacgtggactgtgagagcgtctaccccattgtacttttctaccctgagtgcgagataagaacgatgggtggaagagagcaacgccagagcccaggtgcccagaggactttcttccagcttctgctgtccttctttgtggagagcaagctccacgaccacgctgcttacttagtagacaacctgtgggactgtgcagggactcagctgaaggactgggagggtctgacaagcctgctgctggagaaggaccagagcacgtgccacatggagccagggccagggaccttccacctcctaggagaatctccaggaatttctgccattgtgcagggagcaattgaaaaatcaggcgagaggagctcgcccccacccaaacgtattggttcgatgaaggaagggcccatggttctgccactggccctggacacccagtgctggtttcccgtggaagtccccctggactga

SEQ ID NO: 138145 - DNA, 1394 bp, Homo sapiens
gtgggtgggggtcacctcttacattcctctcttagaaggtggactctacttccagggtcttcttggatttcctggaagccaaggataatattgagggattctagaagacgtagagtaaattagggagcggtgacatttctacttcgtgtagatgcctctgaagaatgtccagaatatcactcattttccactggaaaaggaattagctctccctttactcattttctctcctcttcactggtgtgtttctggctatctgtctctccctctccctaacccaaaacctcatttttcaaaccctttgttgttacaggttatcctgccagccttgactcttgtctatttttccattctctggacactaaccccacatttctaaatcagatgcttccccaggtgagtgtgggtcttagatgggataatgggaacagaggaatctgtgtccttcaatccttccccttcaaagcccactgtgccccacagaagcagctgtcgagtttgaagggacaagaatggtggccttctgtgaactctgcccagagttgcctctcagatgtggatactgagatcccaggagcaggtgagtdttgkctcaaagtgggygaaaaaaggsggagtatccctgccccccattccbaaggagaaattgacagtgtcattmcttaccttgggaaacattctgtccttttaaacatcctttcttttcccccctacaggcttttgtcttattaagtgatctacttctcatctttagccctcagatgatagttgggggccgtgatttccttaggccacttgtcttttttcctgaaagctactctccaagtctgagctagccagcttcctcatggaccacgtcttcatccagccgggaagacctgggcagtggtgcagtgactctatacctggggctcagtaagggctggggcttgggtgtagctcaaaaatatagggcaggaagcttaagtctgtgattcccttttgccttccatgtgagccaggtgattcccaggaggatcatttacagatagagcggctacaccagcggcgccgcctcctagccgggttctgcaagctgttgctttatggggtgctggagatggatgcagcctcagatgttttcaaacactacaacaaggtacaccaaggccccagcttgggcttcacgaagccactggtgatgccgaggttctcggctgctacagtctagccactgaccacaggatggtgaactctgatgacaacgtgtgggtgacaaagggcaggtcccgcttgagcaccaggatgaagtctgtctgatacgtggacagcatgaacacggatatgttctggtcagccagtggggcgatgactgacttggcgatcttggtcatgccaataggctgggagctgga

SEQ ID NO: 138146 - DNA, 625 bp, Homo sapiens
tttttttttttttttttttaggcatcttatccttgaagtttaatgcttttaaccccgttccacttcccgccagaagagtgtcctcctcccatccccacagcacaccatcttctgccttttcttctcagcacctgggagctgttcctgcagcaactccaggaggtggtggtgaagcatgcagagccagcggtgcttgaggctggggcgcatgccctcttacctgctctgtaatcccgaattcactttcttcagccgggcggactttgcccgcagccagctaggtaggatttgctgactgacccgcttccagcagggagcttgaagagctgttacagggtagggagctgggggctgggacaatgggggacaccccaaacaaggggtggggagggggctgcaagacgggggggatgtgggacttgatgagttctgggggaaaatgctattgtgggatcttcttttccttttcaattcttccttcccagattgaggatgaggtatataatctgggcagccactctgaaacgcctctctgccttctacaagtgagtggctttcctcctcttccccatcccgtttttactggtgtctgtggagttggttccctctgttcttttccagtata

SEQ ID NO: 138147 - DNA, 1035 bp, Homo sapiens
tccgaacgaccgcagcagggtcacaagggagatgtccgcccccagtcgtagcctcggacggtttctgagcgttggtgtttggcacgcgccaccctctcttgctttggttccgccatgccgatgtaccaggctaaaaacttatcacgggcgcggtgcgcctctacgtgtggagcttcccacctgcatgtaccggctctctaacgtgcaaggcaggagcggaggcccagcgcccggcgttggccacctacagtctttggtagatgagtggctggatagctacaagcaagaccagggatgcaggatttctgggagcttgttaactttttcatctgatcttggtgggatgtaaaggaattcgggggactatcctctgacagctccaggtctatcctggaagaagttccagggcagcttctgtgagtttgtggggacattggtctgtcggtgccagtacatcctcctccatgatgacttccctatggacaacctcatctccctgctcactggcttctcagactcacaagtctgcgcctttctgtcacactagcaccctggctgctatgaaactgatgacctccctggtaagagttgccctccaactgagtctgcaccaagatatcaatcagcgtcagtatgaggctgaaagaaacaaggggccagggcagagggcacctgagcggctggagagcctgttggagaaacacaaagagctgcattaatactacattgtcaaagacaaagacgaacatgagacatgcgatatgagttttaaaaggagagaagagcaaaaaaacaatacagctatccaaggagcaagtgctgagcttgtgaaaaaacagcttctattttattaaataatagtgttcctgcagggatgtttgaagtactctgcaaggctaattaggacagatcaatgtacacttacctctccagaaggctgaaagggtgtgtagtgactatgtgtcattaaaaatttacttgaccatgggcaacagatgtccatgaaagaatgaaaaaaaaaaaaaaaaaaaaaaa

SEQ ID NO: 138148 - DNA, 4290 bp, Homo sapiens
  misc_feature (1)...(4290): n = a,t,c or g
aggacgcctgagagcttgaggccacacgaggctgtggagcggcgtgactcaaacgtggcgcgcatcagctcgcacacttccaaacctcgcgatagctactggccctgggcgagccgttgggattgcgcttgcgcacagcgtgtcttctggatcgccatacctaccctgtggtcctcatcttcctggcctcatagctcctcctcgccaagcatgtccaccccgttgcaaagagctgtgggagataccaagagggccttgtctgcatcttctagttcctctgccagtctaccctttgatgacagggactcaaaccatacctcagaggggaatggcgactctttgttagctgatgaagacactgactttgaagacagcttgaatcgcaatgtgaagaagagagcagcaaaacgaccaccgaaaacaacaccggtggcaaaacatccaaagaaagggtcccgagtggtacatcgtcatagccggaaacagtcagagccaccagccaatgatcttttcaatgctgtgaaagccgccaaaagtgacatgcagtctttggtagatgagtggctggatagctacaagcaagaccaggatgcaggatttctggagcttgttaactttttcatccaatcttgcggatgtaaaggcattgtgacccctgagatgttcaagaagatgtccaactcagagatcatccagcacctaacagagcagtttaatgaggactcgggggactaccctctcatagctccaggtccatcctggaagaagttccagggcagcttctgtgaatttgtgaggacattggtctgtcagtgccagtacagcctcctctatgatggcttccctatggacgacctcatctccctgctcactggcctctcagactcacaagtccgcgccttccgtcacactagcaccctggctgctatgaaactgatgacctccctggtaaaagttgccctccaactgagtgtgcaccaagataacaatcagcgtcagtatgaggctgaaagaaacaaggggccagggcagagggcacctgagcggctggagagcctgttggagaaacgcaaagagctccaagagcatcaagaggagattgaggggatgatgaatgccctcttcaggggtgtctttgttcatcggtacagggatgtccttcctgagatccgtgctatctgcattgaggaaattgggtgttggatgcaaagctacagcacgtctttcctcaccgacagctatttaaaatatattggttggactctgcatgataagcaccgagaagtccgcctgaagtgtgtgaaggccctgaaagggctgtacggtaaccgggacctgaccacacgcctggagctcttcaccagccgcttcaaggaccggatggtttccatggtcatggacagagagtacagtgtggcagtggaggccgtcagattactgatacttatacttaagaacatggaagggttgctgacggacgcggattgtgagagcgtctaccccgttgtgtatccttntaatngaggcntggcttctgccgcaggcgaatttctgtactggaaacttttctaccctgagtgcgagataagaacgatgggtggaagagagcaacgccagagcccaggcgcccagaggactttcttccagcttctgctgtccttctttgtggagagcgagctccatgaccacgctgcttacttagtagacagtctgtgggactgtgcaggggctcggctgaaggactgggagggtctgacaagcctgctgctggagaaggaccagaacctgggtgatgtgcaggagagcacactgatagaaatccttgtgtccagtgcccggcaagcttcagaggggcacccgcctgtgggccgggtcactgggaggaagggcttaacctctaaggagcgcaagacccaagccgatgacagggtgaagttgactgagcacctcatccccctgctgccccagctcctggccaagttctcagctgatgcagagaaggtcactcccctgctccagcttctcagctgctttgacctccacatctactgcactgggcgcttggagaagcacctggagctgttcctgcagcaactccaggaggtggtggtgaagcatgcagagccagcggtgcttgaggctggggcgcatgccctctacctgctctgtaatcccgaattcactttcttcagccgggcgggacttttgcccgcaagccaagctagtagcatttgctgactgaccgcttccagcaggagcttgaagagctgttacagtcgtccttcctagatgaggatgaggtatataatctggcagccactctgaaacgcctctctgccttctacaacactcatgacctgactcgctgggagctctatgagccatgttgccaactcctgcagaaggctgtggacacaggagaggttcctcaccaggttatcctgccagccttgactcttgtctatttttccattctctggacactaacccacatttctaaatcagatgcttcccagaagcagctgtcgagtttgagggacagaatggtggccttctgtgaactctgccagagttgcctctcagatgtggatactgagatccaggagcaggcttttgtcttattaagtgatctacttctcatctttagccctcagatgatagttgggggccgtgatttccttaggccacttgtcttttttcctgaagctactctccagtctgagctagccagcttcctcatggaccacgtcttcatccagccgggagacctgggcagtggtgattcccaggaggatcatttacagatagagcggctacaccagcggcgccgcctcctagccgggttctgcaagctgttgctttatggggtgctggagatggatgcagcctcagatgtttctaaacactacaacaagttctacaatgactatggtgacattatcaaggaaacattaactagagcaaggcagattgaccgaagtcattgttcccgaatcctgctgctgagcctcaagcagctgtacacagaactgctgcaggagcatgggccccagggcctgaatgagcttcctgccttcatcgagatgagggacctggcccggaggtttgccttgagttttggaccccagcagctgcagaaccgtgacctcgtggtcatgctacacaaggaaggcatccagttctccttgtctgagcttcctccagctggctcctccaatcagcctccaaatctggcattcctggagctcctttcagagttttccccccgactcttccatcaggacaagcagcttttactgtcctatctagaaaagtgcctgcagcatgtctcccaggcacctggccatccctggggcccagtcaccacctactgccactccctcagccctgtggagaacacagcagagaccagccctcaggtcctccccagctccaagaggaggcgcgttgaagggcctgccaagcctaacagagaggacgtctcctcgtcccaggaagaaagtctgcagctgaacagcatcccgcccacgcccaccctcacctccacagctgtgaagagcaggcagcccctgtgggggttgaaagagatggaggaagaagatggctcagagttggattttgcccagggcagtcagcccgtcgcaggcaccgagagggtcaaggttcttgggtccacaatatttccagactccacacaacccttcaggtcctggcctgggcaaccagctgatgcgactcagccttatggaagaggacgaggaagaagagttagaaatccaggatgagtcaaatgaagaacggcaggatacagacatgcaagcaagtagctactcttccaccagtgagcgcgggctggacctcttagattctacaggagcctggatattgaggatttcctgacaggactctgggggccccttccccagcttccacttccctaccctcaagaaatgtgaccatttggaaaaggcaaagagaaaaggagcaaaatgaagcattcccccaggcttcagccctgggctctgaggggaaagagttgggcattgtttttctaaacctaacctttccctctggtgatgttggggtagagaagccgagagaccctgtcctccctaatgcactgtggcccagtccccttgcctttttcctgttctgtttggagtggagaagggcagcacctctgtgtttaatggaagtagcccatagtctcctggatttttggaacatctttttcagcctattttgtgtcctaatgattcactcaataaacatgtttgaatccacacaaaa

SEQ ID NO: 138149 - DNA, 2019 bp, Homo sapiens
atgtccttgttggcatttaaaattattttagtgggctttgaagggagtaaggctagagttcaaactgacctcttctacagatccctggtcctgttcctgctgctccagatttgcttcccactcagctgctttggcaactggaaaggggaagagggaggcatgcagagatgggtacttgggaaaaatgagaagatcgcttccccccaccggcttcctgctcccaccgcaaggtttgctgtttcgttacaactaaacttgcgaattctcggagcatttcagtttggcccagtcctctttgtcctctggagacctctcgaccgagacaacgcatcgccccaaagtgaattcctgaattcctgtggcatcactgcctatttggtgggaaaaagggagggaggggtagagcggggtgggggagggaggagtagtgaacgctgccgcactcgcctctctttttctcccagacactcgcatgtcttttcaacctccaggttctgcaaaatactgaagaaaagtccaggagctaacggcgggcgctgtcgagcacggggagggggtctccatggcgcccgcgccgccaatccgcccaccccaatagcggagccagctcgcctgccggcgtgcctgagccgagccgagcccgaaccccaagccgcggagccagcacctcctccagtcggggtcgtccgctcccggccgttgagccaccgccgccacccggtagtgtgtcccgctgccccaatccgcctcatcaacaagcgcctggcacactcagccaggcccgcgggcatctgctgcgtgtcccgctccgggctcagtgccctcgccgccgccggcactgcctcgatgttccagctgcccatcttgaatttcagcccccagcaagtggccggggtatgtgagaccctggaagagagcggcgatgtggagcgcctgggtcgcttcctctggtcgctgcccgtggcccctgcggcctgcgaggccctcaacaagaatgagtcggtgctacgcgcacgagccatcgtggcctttcacggtggcaactaccgcgagctctatcatatcctggaaaaccacaagttcaccaaggagtcgcacgccaagctgcaggcgctgtggcttgaagcacactaccaggaggctgagaagctgcgtggaagacccctgggacctgtggacaagtaccgagtaaggaagaagttcccgctgccgcgcaccatttgggacggcgaacagaagacacactgcttcaaggagcgcacgcggcacctgctacgcgagtggtacctgcaggatccataccctaaccccagcaaaaaacgtgagctcgcccaggcaaccggactgacccctacgcaggtgggcaactggttcaaaaaccgccgacaaagggaccgagcggctgcagccaagaacaggtcgcaaactagtccgtgggccgaggcttttcgtttcccggagtgtggatctcgattagccaaacattttgcggaagagcccggcctcatcccccaggcccaaatgctccttacaatcctttttgcctttaggtcgggccgacccgatccaacgcgatcgcgggagcacttgctcaggcgtaagccccaggcagacgcaccgttagaaatgactccagcagcaggtcctgtcacagggttccgggcgggcactacgggcggagggcgacggcacgccagaggtgctgggcgtcgccaccagcccggccgccagtctatccagcaaggcggccacttcagccatctccatcacgtccagcgacagcgagtgcgacatctgagttgcccatccaggatgctcagaagcagattccagtgtaaaaacgagaaaaacaaaatgaaagaggggaagaagatgagagacctgcaaatccagcgccacagaagccaggtgaccagggacccgcgggctcgggttgccgtttcccgccccaccccgcggccggcctggcttcactggcgccctttggccgcgaccacgggaaccagcggtgaggcctga

SEQ ID NO: 138150 - DNA, 1586 bp, Homo sapiens
ggggtctccatggcgcccgcgccgccaatccgcccaccccaatagcggagccagctcgcctgccggcgtgcctgagccgagccgagcccgaaccccaagccgcggagccagcacctcctccagtcggggtcgtccgctcccggccgttgagccaccgccgccacccggtagtgtgtcccgctgccccaatccgcctcatcaacaagcgcctggcacactcagccaggcccgcgggcatctgctgcgtgtcccgctccgggctcagtgccctcgccgccgccggcactgcctcgatgttccagctgcccatcttgaatttcagcccccagcaagtggccggggtatgtgagaccctggaagagagcggcgatgtggagcgcctgggtcgcttcctctggtcgctgcccgtggcccctgcggcctgcgaggccctcaacaagaatgagtcggtgctacgcgcacgagccatcgtggcctttcacggtggcaactaccgcgagctctatcatatcctggaaaaccacaagttcaccaaggagtcgcacgccaagctgcaggcgctgtggcttgaagcacactaccaggaggctgagaagctgcgtggaagacccctgggacctgtggacaagtaccgagtaaggaagaagttcccgctgccgcgcaccatttgggacggcgaacagaagacacactgcttcaaggagcgcacgcggcacctgctacgcgagtggtacctgcaggatccataccctaaccccagcaaaaaacgtgagctcgcccaggcaaccggactgacccctacgcaggtgggcaactggttcaaaaaccgccgacaaagggaccgagcggctgcagccaagtaacagactccagcagcaggtcctgtcacagggttccgggcgggcactacgggcggagggcgacggcacgccagaggtgctgggcgtcgccaccagcccggccgccagtctatccagcaaggcggccacttcagccatctccatcacgtccagcgacagcgagtgcgacatctgagttgcccatccaggatgctcagaagcagattccagtgtaaaaacgagaaaaacaaaatgaaagaggggaagaagatgagagacctgcaaatccagcgccacagaagccaggtgaccagggacccgcgggctcgggttgccgtttcccgccccaccccgcggccggcctggcttcactggcgccctttggccgcgaccacgggaaccagcggtgaggcctgacccagcaccacgttcttcttgctttgctttttcctaaggattttgctgcaaagtctccttcggaacccgaactgcaagctgagcgcctgcccagattctcccatgggtatttcacgtcgaaaggacgctgttacatatgtataactttcgctttaaagtttttttttaacaaaacatatatatgctgtttatttacttatttaagagaccgccatggtaggtttctctgtagcttggggaacttgctgtttctaaacatgcaggctggtggtgatgggttctgtgtggagaagccaaacaataaaacaacctagtgggcaaccttcttaa

SEQ ID NO: 138151 - DNA, 2292 bp, Homo sapiens
tcggcacgagggtaggtgtagcgtggcgctcagtccgcctgctactcggtcccggcgctgggctgaggggaggggttgtcttaaaagtctctccttccccctgtaggggcggccggcgagtcccagtgagagcggagggtgccagaggtagggggccgataaacaaagttcccggggcttcctccggggccgcggtcggggctgcgcgtttgaccgcccccctcctcgcgaaggcaatggcttccaaactcctgcgcgcggtcatcctttggcccgcccgggttgggcaaaggggcccctgtgtgccagaggatcgcccagaactttggtctccaagcatctctccaagcggccacttcttgcgggagaacatcaaggccaagcaccgaagttggtgagatggcaaaacaagtatatagagaaaaagtctttttggttccagaccatgtgatcacacgcctaatgatgtccgagttggagaacaggcgtggccagcactggctccttgaatggttttcctaggacatttggacaagccgaagccctggacaaaaatctgtgaagtggatctagtgatacgattgaatatttcatttgaaacacttaaagatggtctcaatgcgccgttggattcacccctcctagcgggaagggtatataacctgggacttcaatccacctcatgtacatggtattgatgacgtcactggtgaaccgttagtccagcaggaggatgataaaccccgaagcagttgctgcccaggctaagacagtacaaagacgtggcaaagccagtcattgaattatacaagagcccgaggagtgctccaccaattttccggaaccgagaccgaacaaaatctggccctacgtttacacacttttctcaaacaagatcacacctattcagtccaaagaaagcatattgaccctggcccaatgggaagaaccaggaagatgtgggtcattcattccaatagtgtggtgtagtaattggtgctgttgtccaaatttagaagcctagctgaggtagccttgcagcatcttttctagttgaaatggtgaactgataggaaaacaaatgagtagaaagagttcatgaagaggccctcctctgcctttcaaaaggctggtcacctacacatgtttaaggtgtctctgcacatgtctcaagcccatcacaagaaagcaagtacagtgtggatttcaaatggtgtgtaactttcagctccagctgggtttttgacagctgttgctgtgggtaatatttttgacatgtgatgggtgatagtcttctggttctccccattccccacaaagggctgtttgaaccacaggcaccagaaaagcctgaggattgaatcctgcaggctctagccccaggctttgtccccaggcttttctgggtttgtgcccctcctggtaaccagtgaaattgaagctactttactcatagtgggttgtttctctggtcttgagctgactgcgtccacagttcatttttttccggtaggaataactccttttcctacatcccacgcttcaatagagtctctccttttcagacatcctgggatgaaagaatttggctttttttttttctttttttttttggacatctgttttcactctttaggcttttaaacaatagttattgcttttatccctctcagattctaataactgagagcgatggggctatattgaatctctgtatgcactgagaactgagctatgaagaggatcttattaaactgctggtctgactttatggattgacactgttcctttcttttattgtgaaaaaaaaaaaaaaaaccctgaaagtcttggggaaccccctaaagtcttttggggaatcctcaaaaagcatggggaagttaagtatttagctacataaatgttgtaagatcatatcttatgtatagaagtaataagaccatttggaattactggactaattgaatagttaaggtttcctattcgggacaataaaatggtattttgaaagtgctgctaactattgatgctgacagtggtttcactcctatgagtgacccaaacatattataaatatgtggtaaagggaatggagcctgtgggggttgagcagaatgttgtactagctgtgcctggactgagtataacagctttatgattatgagaaaacaaattctttattttttttttctgttccaaagattcatcctatggggtggccataaagtctagaattagatactaatattttgtcattcattataacatatcaataaaccatttattaaaaga

SEQ ID NO: 138152 - DNA, 435 bp, Homo sapiens
  misc_feature (1)...(435): n = a,t,c or g
cctgcaggaattcggcacgaggaaagatccacctacgacctctggtcctcagaccgaccaggccagggaacatctcaccaattttaaatcatccgcttccagatcccctggaactctggcccaaggctctctgagtgactccttcccagatcttctcggcttagcagctgaagactgacactgcccaatcgccttggaagcctacaggacaatcacagatgctctgggtaactctcacagtggaggggacgtgagtaaaaatgnnnnnnnnnnnnnnnnnnnnnnnnnnnnnnnnnnnnnnnnnnnnnnnnnnnnnnnnnnnnnnnnnnnnnnnnnnnnnnnnnnnnnnnnnnnnnnnnnnnnnnnnnnnnnnnnnnnnnnnnnnnnnnnnnnnnnnnnnnnnnnnnnnnnnnnnnnnnnnnnnnnnnnnnnagg

SEQ ID NO: 138153 - DNA, 448 bp, Homo sapiens; identical to SEQ ID NO: 130393
  misc_feature (1)...(448): n = a,t,c or g

SEQ ID NO: 138154 - DNA, 423 bp, Homo sapiens
gatcaggggacctccctcgggagatcaatcccctgtcctcctgctctttactccatgagagagatccacctacgacctcgggtcctcagaccaaccagcccaaggaacatctcaccaattttaaatcgggtatacatccagatggcctgaagtaactgaagaatcacaaaagaagtgagaatggcctgttcctgccttaactgatgacactgccttgtgaaattccttctggctcaaaatctcccccattgagcaccttatgacccccacccctgccagccagagaacaaccccctttgactgtaattttccattacctacccaaatcctataaaatggccccacccctatctcccttcactgactctcttttcggactcatcccacctgcacccaggtgaaataaacagccttgttgctcac

SEQ ID NO: 138155 - DNA, 423 bp, Homo sapiens
ctgtcctcctgctctttgctctgtgagaaagatccacctacaacctcgggtcctcagaccaaccagctccaggaacatctcaccaattttaaattggaagacaagaatgtcaggactctgagcccaagcctgcacatatacatccagatggcacgaagctactgaagaatcacaaaagaagtgaaaatggtcggttcctgccttaactgatgacattaccttgtgaaattccttctggctcagaagctcccccactgagcaccttgtgaccccagcccctgccctcaagagaacaaccccctttgactgtaattttccactacctacccaaatcctataaaactgccccagccctaacttcctttgctgactctctttttggacttagcccacctgcaattaaaaagctttattgctcacaaa

SEQ ID NO: 138156 - DNA, 1035 bp, Homo sapiens
atggagctgaaaaccaaggctcgagaactacgtgaagaatgcagaagcctcaggagccgatgcgatcaactggaagaaagggtatcagcaatggaagatgaaatgaatgaaatgaaactaaaccaggaagaagttgaatctctgaatagaccaataacaggagctgaaattgtggcaataatcaatagcttaccaaccaaaaagagtccacgaccagatggattcacagccgaattctaccagaggaatccaacttacaagggatgtgaaggacctcttcaaggagaactacaaaccactgctcaaggaaataaaagaggatacaaacaaatggaagaacattccatgctcatgggtaggaagaatcaatatcgtgaaaatgaccatactgcccaagggcttaaaaaagcagcttacaaggctgttaattatgacaagcttaaagaaactacccaaggtgaagacgaaaacccagcccaggtcatggcccgcttagcagcaacccttagacgctttaccaccctagacacagaggggccagaaggccgccttattcttaatatgcattttaccacccaatccactcctgacattaggaaaaaacttcaaaaattagaatctggccctcaaaccccacaacagaacttaattaacctcaccttcaagcggctaaagtctgacaccacccaatcgcctcggaagcctacaggaccatcacagatgctctgggtaactctcacagtggaggcccgcctgcacccaggtgaaataaacagccatgttgctcacacaaagcctgtttggtggtctcttcacacggacacgcatgaaacatatagtcttgaaaaattaattaaacattcatctaaagaagttagaaaatgcaaagaagtgggtcaacatcgagcaggctacccattgcttgggagctcaatcggcccctggccccattgcgtggggcagctgccctctgctggcaagggcaaaagggcaatgggacagccttttggggtacccacactcagtgggtcctga

SEQ ID NO: 138157 - DNA, 561 bp, Homo sapiens; identical to SEQ ID NO: 132769

SEQ ID NO: 138158 - DNA, 954 bp, Homo sapiens
atgccctcaactcccatccgaggaaaaactgtcttccacaaattgtcttccatgaaaccagtccctggcaccacaaaggctgctcctcaccaggccaagctaggtcccaattcttcctcagcctctgctcctccaccctataatccttttatcacctcccctcctcacaccgggtccggcttacagtttcgttccatgactagccctcccccacctgcccagcaatttactcttaaaaaggtggctggagctaaaggcatagtcaagcatgctttgaaaggattaaagcctgttatcactcgcctgctacagcatggccttttaaagcctacaaactctccttacaattcccccattttacctgtcctaaaaccagacaagccttacaggaaggcaggcccctccccactcaaatccctgtccagggtccagggtccagagaagggagtggcccaggcagagaaccccattgtccactttgcctctgctgctctgccagtctgcaggggcagaaggatgcccgtgcccaggaagaatgctgaagccagatccgaaatcgctaatttacaggcagcgcagtgggatgcttttggattcgggacacctgggcccagacccagccgccccaccccggcgccccgggcttgtgcacagcaggagcctccgccccgcgggtgtgggttggacgaggccaagggcagcggccggccaggggccaggccagagtccagcactgccctcggaggaagccgggtgggggcggcgctcctgaaggctccagccccggggagggaagccggccccgcacctcccgcactgggcgctcagacccctggtgcttccacggcgtctgagggtttctcagccaccgaagggtgtctccgccgcacccaacgggtcccccggtggagagatttgccttcacatcagattaaagggggttccgtttggtga

SEQ ID NO: 138159 - DNA, 684 bp, Homo sapiens
tcatgcagcaagttggtctatgttctctttacttctgtttgccagatgatcctcaataatttctgcaaacagattcctcttcaacagattatatgcaagaggtaaaagctggacagcaactttatgaaaataatgtgagccatagcaaaagaggtccattcccaactcaagccccatcccataatcacattcattattagcaaactgcacaaaagtcatcatttcctgaatgggagcaaaagctttcagcctcaactgttgtcttgcaaattctcttgaggtcagcatctgtttcagggagctctctgtacctaacatcatttttatctggttcaatcttgggatgctgaatatttccatgaatttgtccatttcttcaaggttttctagcttgtttgcacagaggtgtttgtagttttcatgcgcgtccctgtgaagagaccaccaaacaggctttgtgtgagcaacatggctgtttatttcacctgggtgcaggtgggcttccactgtgagagttacccgaagctcggcgtccgtgatggtccagggggagatgggacgcggcttaggaggaatcccgggctgcgggcattccttggcccagtggccagatttccggcacgcgtagcaagctcctgggggaggaggttctggaggaacgcctggccgctgcggttcgggcat

SEQ ID NO: 138160 - DNA, 825 bp, Homo sapiens
tcaggcctctgagcccaagccaagccatcgcatcccctgtgacttgcacgtatacgcccagatggcctgaagtaactgcacccaggtgaaataaacagccatgttgctcacacaaagcctgtttggtggtctcttcacacggacgcacatgaaaaccactgtcctccagatcccagaacggtagatccactgacagcttgcaccgtgctcctggaaaagcctgagacactcaacatgagcccacgaaggcagccgggagggaggctgtacccttccactgtgagagttacccgaagctcggcgtctatgatggtctgggggcttccaaggcaatcgggcagtgtcagtcttcagccgcttgactatgcctttagctccagccacctttttaagaggaaattgctgggcaggagggggagggctagtcatggaatgaaactgtaagcctgaccaggtgtgaggaggggaggtgataaaaggattgtagggtggaggagcagaggctgaggaagaattgggacctagctcggcctggcgaggagcagcttgccccttccccagaaaagcaggacttgctgctaagggtgaaggaccaaggcaggcgtccctgcgtggtctgaaacccttgaaacgtgggtgtataatcagagaggcgtccctgcattgattaaacaccaagggaaggctgccttcccagtccgtgaccggagccagagttttgggtccacggataaaatgtgtctcctttgtctctagtgttcctatctctgattcctcttcaatgcatgattcacgctgctgccagagggtcacagcattccacat

SEQ ID NO: 138161 - DNA, 1287 bp, Homo sapiens; identical to SEQ ID NO: 114506

SEQ ID NO: 138162 - DNA, 581 bp, Homo sapiens
tcagtcttcagctgctaagccgagaagatctgggaaggagtcagtcagagagccttgggccagatttccaggggctctgggagtggctgccaggtaagttgaacagtccgattttcggtggggtcctacacagatgggacgcggcttaggaggaatcccgggctgcgggcattccttggcccagtggccagatttccggcacatgtagcaagctcctgtgggaggaggttctggaggaacgcctggccgctgcggttcaggcatttggaagttcttgtgtgctggagatgtggctgcggtttgtctcacagtggaggcaaggaattgcaacttttttctattattgtacaccttgaaggcgaggttaattaaatcttgccccttctccagaaaagcgggacttgccgctaagggtgaaggaccaaggcaggcatccctgcgtggtctgacacccttgaaacatgggtgaataatcagagaggtgtccctgcaatgattaaacaccaagggaaggctgccttcccagtccgtgaccggtgccggagttttgggtccatggataaaacctgtctcctttgtct

SEQ ID NO: 138163 - DNA, 531 bp, Homo sapiens
ctaagccaagaagatctgggaagcagtcagagagccttgggccagagttccaggggctctgggagtggatgccaggtgagttggacagtccaatttccagtggggtcccgcacagatgggacgtggcttaggaggaatcctgggctgcaggcattccttggcctggtggccggatttctggcacttgtagcaagctcctgggggaggaggttctggaggaatgcctggccgctgaggttcaggcgtttggaagttcttgtgtgctggagacatggctgaggtttgtctcacagtgaaggcaaggaattgcaacttttttctattattgtacaccttgaaggtgaggttaattaaattcgctaagggtgaaggactaaggcaggcgtccctgcgtggtctgacacctctaaaacctgggtgaataatcagagaggcgtccctgcaatgattaaacaccaagggaaggctgccttcccagtccgtgaccggcgccggagttttgggtccacggataaaacgtgtctcctttgt

SEQ ID NO: 138164 - DNA, 486 bp, Homo sapiens
ggacacctctctgattatacacccacgtttcaagggtgtcagaccatgcagggacgcctgccttggtccttcacccttagcggcaagtctcgcttttctggggaaggggcaactcaacgccaatatcccatcccacagcaagctttgaaaggattaatgcctgctatcactcgcctgctacagcatggccttttaaagcctataaactctccttaccattcccccattttacctgtcctaaaaccagacaagccttacaagttagttcaggatctgcgccttatcaaccaaattgttttgcctatccaccccatggtgccaaacccatatactcttctatcctcaatacctgcctctacaacccattattctgttctagatctcaaacaagctttctttactattcctttgcacccttcatcccagcctctcttcgcattcacttggactgaccctgacacccatcaagctcagcaaattacctag

SEQ ID NO: 138165 - DNA, 441 bp, Homo sapiens; identical to SEQ ID NO: 133951
  misc_feature (1)...(441): n = a,t,c or g

SEQ ID NO: 138166 - DNA, 428 bp, Homo sapiens; identical to SEQ ID NO: 117150
  misc_feature (1)...(428): n = a,t,c or g

SEQ ID NO: 138167 - DNA, 809 bp, Homo sapiens; identical to SEQ ID NO: 134541

SEQ ID NO: 138168 - DNA, 1185 bp, Homo sapiens
atggaaatgcaagaaaatggtgaaggagagagcagaaggcaggcagcatctgcgtgctcaaggacaggaggaaggaggaaggcgggagtgggcggaaacagcagtcagattctcagcagcactaaaattgtccctgccacttggcaggaggcagttcagacatcgcagatccaagagccttgtcctttcctcattcatgtaactgcacagggagccaattgtctggcagaattctgtgctaaatcagctaaaggagacaggaatggtggctgtggaatgcctccacagaggggccgtcagtcctgccagatcctcaccaaggattctgcagggccagtcttctcatcccctcccacccctacccttgatcagtaccagggcgtactgggtcacacagaaggaggtgagcggcagatgggacagtctagttccaggaaaacaagctcagggctcccactgattctacattatgcccgcctgcacccaggtgaaataaacagctttattgctcacacaaatcctgtttggtggtctcttcatatggacacgagtgaaatttggtgccctgacttggatcgggggacctcccttgggagatcaatcccctgtcctcctgctctttgctccatgagaaagatccacctacgacctcaggtcctcagaccgaccagcccaagaaacacctcaccaatttcaaatctgcatgctttgaaaggattaaagcctgctatcactcgcctgctacagcatggccttttaaagcctataaactctccttacaattcccccattttacctgtcctaaaaccagataagccttacaagttagttcaggatctatgccttatcaaccaaattgtttttcctatccaccccgtggtgccaaacccatatactctcctatcctcaatacctccctccacaatccattattctgttctggatctcaaacttgctttctttactattcctttgcatgcttcatcccagcctctctccgctttcacttgggctgaccctgacacccatcaggttcagcaaattacctgggctgtactgccacaaagcttcacagacagcccccattacttcagtcaagcccaaatttcttccttatctgttacctatctcagcataattctcataaaaacacacgtgctctccctgccgattgtgtctgactaa

SEQ ID NO: 138169 - DNA, 756 bp, Homo sapiens; identical to SEQ ID NO: 117157

SEQ ID NO: 138170 - DNA, 516 bp, Homo sapiens; identical to SEQ ID NO: 114704

SEQ ID NO: 138171 - DNA, 1423 bp, Homo sapiens; identical to SEQ ID NO: 119351

SEQ ID NO: 138172 - DNA, 832 bp, Homo sapiens
ctttaaaagaccattagtccattctacctttcctgaagattgaggatggtaagggatatgaaggttccactgaataccaagagcctgagaaactgcttgggtgatttgactagtaaaggctggtctgtcatcagactgatatcctttggagaataaatgctgaagaagcagaagtgtgtcttgttgagaagattcaaaggaggggctacaaagaagaaggtcatcaatatattgaataaggtgagaagcagaggggtggaaagaaagtagatcatgagaaagagcttggctgaagtaatgagggctgtccctgaaaccttgcggcagcacagcccaggtaagctgctgggactgttgggtgtcagggtcagtccaggtgacagcaaagagaggctgggatgaggggtgcaggggaatagtgaaaaaagcatctttaagatgaagcacagaatagtgagttgtggaggaaggtattgaggacaaaagagtgtacaggttgggcaccacagggtggataggcaaaacaatttggttggtaaggcgcagatcctgaactaatctgtaagacttgtcgggtttttggacaggtaaaatgggggaattgtaaggagagtttataggttttagaagcctatgctgtagcaggtcagtgataacaggctttaatccttttaaagcgtgcggtgggatgggatattggcgttgagtggggtaagggtgattaggtttagtgggatggtaatgggcatgtgatcggttgccagggaaggagtagagatgtcctatacttgtggttaaggtggggggatatgagaggaagacgcaaaggagg

SEQ ID NO: 138173 - DNA, 1080 bp, Homo sapiens
tcatgcagcaagttggtctatgttctctttacttctgtttgccagatgatcctcaataatttctgcaaacagattcctcttcaacagattatatgcaagaggtaaaagctggacagcaactttatgaaaataatgtgagccatagcaaaagaggtccattcccaactcaagccccatcccataatcacattcattattagcaaactgcacaaaagtcatcatttcctgaatgggagcaaaagctttcagcctcaactgttgtcttgcaaattctcttgaggtcagcatctgtttcagggagctctctgtacctaacatcatttttatctggttcaatcttgggatgctgaatatttccatgaatttgtccatttcttcaaggttttctagcttgtttgcacagaggtgtttgtagttttcatgcgcgtccctgtgaagagaccaccaaacaggctttgtgtgagccataaagctgtttatttcacctgggtgcaggtgggctgagtccgaaaagagagtcagcgaagggagataggggtggggccgttttataggatttgggtagataaaggaaaaaggggggttgttctctttctcagcaagtaacttgtggaaacaagttacttcctccttcctttgttctcctctgcctttgtctcttttgaaaagttctaagttgctagccaatcgggacaaatacagaatgtgtggtcctgttccagccaatggaaaccggacacagcagtagagtaaacatgtcaggttataaatgaccctgtctcctttgttcggtgtactctcgtggcaaaactgctggcgagtgtaccctttctgcctgttgtttggtggccccctttcagtgatggatccagaaggcagcccaagtggctgcctaattctcttggactgggggctgactctgttactctgtctactggtggggtattccaacccaatgtgcgtggacttaattgcaatggaaaaatagtcatggggagatgtcccttggagttcgttcccattcccgctacttcccccatcagcaggaagaagccagagcgatcgacggccttttcccat

SEQ ID NO: 138174 - DNA, 1764 bp, Homo sapiens; identical to SEQ ID NO: 115471

SEQ ID NO: 138175 - DNA, 2206 bp, Homo sapiens; identical to SEQ ID NO: 129196

SEQ ID NO: 138176 - DNA, 3650 bp, Homo sapiens
tcagacaggaaagccaacggccatatctaaggtagtccaggagagaaggattaagaatcttgacagcaggagcccaagcctctctagattctctttttcagggctcatcagaagaggtggcaataatactgtgtagcggtcgccagtagcagcatccagtgggggagatatctggagctgcctaaggacagccacgatggctggtgagtgaagccatcctgtagtattgtatgtagtatgcaatgtgggaagtgccagagtcatggctgcactgctggatcgagctaggattgtgacacggtagccctttggatgaatgtagtgggatgttggtggggtcccaggatgtggagatacaggacctattggaccctgaaatcctttggagagtaaatgctgaaggagcagaagtgtgtcttgttgagaagattcaaaggaggggctacaaagaagaaggtcatcagtatattgaataaggtgagaagcagaggggtggaaagaaactaaatcatgagaaagagcttggctgaagtaatgagggctgtccctgaaaccttgcagcagcacagcccaggtaagctgctgggactgatgggtgtcagggttagtccaagtggaagcaaagagaggttgggacgaggggtgcagggcaatagtgaaaaaagcatctttaagatcaagaacggaacagttagttgtggaggaaggtattgaggacaaaagagtgtacgggttgggcactacagggtggataggcaaaacaatttggttgataaggcgcagatcctgaattaacctgtaagccttgtctggttttaggacaggtaaaatgggggaatggtaaggggagtttataggctttaaaacgccatgctgtaacaggcgagtgataacaggctttaatcctttcaaagcgtgcttttccctcacagtgtgagtctctcttggctctgagtcaatctgagctggtgctttgctttcctctctatgctgccatcctgagtctctgtgcctcaaagggtcttcatcacttttttgctgaattccagtgttctcccccagacactcttgggcagtatggccattttcacgatattgattgttcctacccatgagcatggaatgttcttccatttgtttgtatcctcttttatttccttgagcagtggtttgtagttctccttgaagaggtccttcacatcccagttcctccttgtacctctggtagaattcggctgtgaatccatctggtcctggactttttttggttggtaagctattaattattgcctcaatttcagctcctgttattggtctattcagagattcaacttcttcctggtttagtcttgggagggtgtatgtgttgaggaatttatccatttcttctagattttctagtttatttgtgtagagatgtttatagtattctctgatggtagtttgtatttctgtgggatcggtggtgatatcccctttatcattttttattgtgtctatttgattcaactcccacacaataataatgggagactttaacaccccacaaaggacgagagtgtccaagtatgagaactggctcaagtcttgggctaatgcttggccaaatagatggcctgaaaccttggggtaaaacagtccaggtgagttgagacgttgggttcgaaggatcttcaaaggcaaagaagaattgagagtcaggatgtaagggatgcagaaaaagtcatccttaaggtccaggactgtaaaccattctgcttcttctggtatttgggaaagcagagcataagggttaggtgcagcttgtcctccattaggaaagaaaccttggaggagttgccctgatacgctgaaaaggcagttctgtctggacatataaaaatagagcttttctcccttggttctataaggagggggtaaggcccctgttttaactactaagttgtcactgatctgctggttcaccctgttggcatgggctccttcaagtcctgctagatacccctgcttctgcttctctgaatccctggctaggtatgtgtatgtttccttggtgaaaagcgtcagtttatgctgcaagtcatttacatggaggccatgagaaacaactatgagtttcattttttctttgctgtatccatttcgtatgcatctttccttcttgatcgtcagcccggcgctgcgctcgatttctcgccgggccttagctgccttcccgcggggcaggtctctggacctgcagcccgccatgcctgagcctcccaccccctccgtgggctcctgtgcgtcccgagcctccccgatgagcgccgccccctgctccaaggtgccccagtcccatctttttgcttttatgagctgtaacaccgcgaaggtctgcagcttcactgctgaagccagcgagaccacgagcccaccgggaggaacgaacaactccagacgcgccaccttaagagctgtaacactcactcgaaggtctgcaacactcactcgaaggtctgcagcttcacatagatcctcaacagtttgaaatccattgaccaggacatagctttgactgataaaaggatatcccaattggccagtagccagtcttgtagcattccgaggacaggcctgaattctgagaagggaaagtggtaaaagtattgtccagtcctttttaagttggtggctgagcttggtgaggtgtatttttaaaagacctttagtccgttctgcttttctgaagctcggcgtccgtgatggtctagggggcttctgaggcgatcgggcagtgtcagtcttaagctgctaagctgagaagattgcccgctttccagtcgggaaacctgtcgtgccagctgcattaatgaatcggccaacgcgcggggagaggcggtttgcgtattgggcgccagggtggtttttcttttcaccagtgagacaggcaacagctgattgcccttcaccgcctggccctgagagagttgcagcaagcggtccacgctggtttgccccagcaggcgaaaatcctgtgtgatggtggttccgaaatcggcaaaatccattaattgcgttgcgctcactgcccgctttccagtcgggaaacctgtcgtgccagctgcattaatgaatcggccaacgcgcggggagaggcggtttgcgtattgggcgccagggtggtttttcttttcaccagtgagacaggcaacagctgattgcccttcaccgcctggccctgagagagttgcagcaagcggtccacgctggtttgccccagcaggcgaaaatcctgtttgatggtggttccgaaatcggcaaaatcccttataaatcacaagaataacccgagatagggttgagtgttgttccagtttggaacaagagtccactattaaagaacgtggactccaaccgtaaaaggcgagaaaccgtttgtaaggcttgtctggttttaggacaggtaaaatgggggaattgtaaggagagtttataggctttaaaaggccatgctgtagcaggcgagtgataacaggctttaatctttttaaagcgtgactattggctcccctggttctcaggttctcagatttggactgaattacaccactggctttcctggttctccggctcacagatggcatctgatggaacttctcagcctccat

SEQ ID NO: 138177 - DNA, 1585 bp, Homo sapiens
atggcatcatctgctcagcttctggggagctctcaggaaacttacaatcatagcaaaaggcaaagagggggtgagatgtctcacatggctggagctaggaggaagagagagagaggagagatgctacacacttttaaacaaccagatctcatgaggtggtcttcagtatgtcggaagaacaaagagaaggttggaaattccaggaaaagaagaaatgttagatattgtttctccagaaagttcaatggcactagtaaagttttcgagagctggcaagtggtggtggtgggtgaaataaacagccatgttgctcacacaaagcctgttcggtggtctcttcacacagacgcgcatgaaatttggtgccgtgactcagatcggcggacctcccttgggagatcaatcccctgtcctcctgttctttgctccatgagaaagatccacctacaagctcaggtcctcagaccgaccagcccaaggaacatctcaccaattttaaatcaggagagacaaaggagatgcattttattcgtggacccaaaactccggcaccggtcatggactagggaaggcagccttcccttggtgtttaacctttgcagggacggcctctctgatcattcagccacatttcaagggtgtcagaccatgcagggatgcctgccttggtccttcacccttagcggcaagtcccgcttttctggggaaggagcaagctgctccttgccaggctgagctaggtcccaattcttcctcagcctctgctcctccaccctataatccttttatcacctcccctcctcacacccggtccggcttacagtttcgttccgtgactagccctccccctcctgcccagcaatttactctgaaaaaggtggctggagctaaagacatagtcagggtacatgtacctttttctctatcagacctttctcagatcagtcaatgtttaggctctttctcatcagaccccactaaatatacacaggaattccaatgtctaactctgtcctacaacttaacctggagtgacttaaatgtcatcctgacttctaccctctccccagatgaatgggaaagagtttcttctctagcccaatctcatgctgataaccgccggcttcacgagccagacctccaggaaggcattagagcagttccccgagaggatccccaatggaaccatcaggcaaattccccaggtatagctaggcgagattacatggtttcctgcctagttgaagggcttaaaaaagcagcttacaaagctgttaattatgacaaacttaaagaaactacccaaggtgaagatgaaaacccagcccaggtcgtggcccgcttagcagcaacccttagacgctttaccgccctagacccagaggggccagaaggccgccttattctcaatatgcattttatcacccagtcagctcctgacattacaaaaaaacttcaaaaattagaatctggccctcaaaccccacaacaggaattaatcaacctcaccttcaaggtgcacaataatagggaggaagcagccagacggcaatgcatttctgagttacagttacttgcccctact

SEQ ID NO: 138178 - DNA, 847 bp, Homo sapiens
taaaacctcttcaactcacacctgacctaaaacctaaatgccttattttcttctgctatgccgcttgaccccaatacaaactcgacagtagttccaaataaccagaaaatggcactttgaatttttccatcttgcaagatctaaataattcttgttgtaaaataggcaaatggtctgaggtgcctgacgtccaggcattcttttacacatcagtcccttcctagtctctgtgcccagtgcaactcgtcccaaatcttccttctttccctcccgcctgtcccctcagtaccaaccccaagcatcgctgagtctttctaatcttccttttctacagacccatctgacctctcccttcctccccaggctgctcctctccaggccgagctaggtcacaattcttcctcagcctctgctcctccaccctataatctttttgtcacctcccctcctcacacctggtcgggcttacagtttcgttccgtgactagccctcccccaacttgctcagcaatttactcttaaaaaggtggctggagccaaaggcatagtcaaggttaatgctcctttttctttatcccaaatcagatagcatttaggctctttttcatcaaatataaaaatccagcccagttcatgacttgtttggcagcaaccctgagacactttacagccctagaccctaaaaggtcaaaaggcagtcttattctcaaaatacattttattacccaatctgctcccgacattaaataaaactccaaaaattaaattccggccctcaaactccacaacaggatttaattaacctcgccatcaaggtgtgaaataacagaaaaaagttgcaactcct

SEQ ID NO: 138179 - DNA, 1826 bp, Homo sapiens
cagaggggctacacttcagcattacctggaatccacagtcaccagtgtttcttcagggttaggggagcattagcacatgccacagccaggcaacacagagcaagggctataaggcatggccatcagcgttggcagcagaaaggtagtaggaacaatcacacagtagcagcagttgagggagagaaggacattctgggaggtttcagcagctggcatcaccgcagtatgcctgataatttttcattgaaaggaggacacgatgtactgggtgaaagaggctgtggtaaatatactttaagtgacatagtggtaatgtgtgaggagaaagaagtgttctataattttcacgctttaaaaggattaaagcctgttatcactcgcctgctacagcatggccttttaaagcctataaactctccttacaattcccccattttacctgtcctagaaccagacaagccttacaggttagttcaggatctgcgccttatcaaccaaattgttttgcctatccaccccatgatgttactaggggagatatcagtcaccaaggccttggctggctccctgataaaagcccttgcagtattccacactgcagaatccccaggctatgctctcctggattcttactacctgctccagaaagggagtgtttgcatctccatcctccaagaagaggaagcattttcttggccggggaaaggagagtgtcgagataagtcctgggcctctctgggcctaatacccgcatttccccagggaggacagtggaaacaggccctggggcttctggaccacagctgcctctgctttggggaattaggcaccaggttggcagccccagcatccttcagcaccttcccaataacaaaccgagagcgggagagaaaaactgacaagctgattccaaaattcatgtggaaatgcaagggacccagaataaccaaaacaatcttggaaaagaatgaagttggagaatttacacttcttgatttcaaaacttaccacaaatttgcagtaatcaaaactatgtggtactggcataaggacagatacattgatcaacagaatgacattgaaagtccagaaataaattcatatgtttatggtcaactgatttttgacaaagactcagcccgcctgcacccaggtgaaataaacagtcttgttgctcacacaaagcctgtttggtggtctcttcatatggacgcgcatgaaatttggtgccgtgactcggatcggggggacctcccttgggagatcaatcccctgtcctcctgctctttgctccatgagaaagatccacctacgacctctggtcctcagaccaaccagcccaaggaacttctcaccaattttaaatcagtcccaactccaagcgttgctgagtctttccaatcttccttttctacggacccatctgacccctcctctcctccccaggctgctcctcgccaggccaagccaggtcccaattcttcctcagcctctgctccccgaccctataatccttttatcacctcccctcctcacacctggtcgggcttacagtttcattctgcgactagccctcctccacctgcccaacaatttcctcttaaaaaggtggctcaagttaaaggcacagtcaagtggctaaagactgatgctgcccgatcgcctcagaagcctacaggaaccatcacagatgctttagataactctcacagtggaggtccgataatggaccggcctttattagtcaaatcacccaagcagtttctcaggctcctggtattcagtaaaacctttatatcccttaccatcctcaatcttcaggaaag

SEQ ID NO: 138180 - DNA, 2119 bp, Homo sapiens
  misc_feature (1)...(2119): n = a,t,c or g
caaaaagcactcccactgagcaccttgcgacccccactcctacccgccagagaacaaccccctttgactacgcgcatgaaatttggtgccgtgacttggatcgggggacctcccttgggagctcaatcccctgtcctcctgttctttgctcggtgagaaagatccacctacgacctcaggtcctcagactgacccagccaaggaacatctcaccaattttaaatcagaaggcaggaatgtcaggcctctgagccccaagccaagccatcgcatcccctgtgacttgcacgtatatgcccagatggcctgaagtaactgaagaatcacaaaaagaagtgaaaatgactggttcctgccttaattgatgacattccaccacaaaagaagtgaaaatggctggtccctgccttaactgatgatattaccttgtgaaattccttctgctggctcatcctggctcaaaaatcacccccactgagcaccttgcgaccccccactcctgcccgccagagaaaaaccccccctttgactgtaattttccattaccttcccaaatcctataaaacggccccacccctatctccctttgctgactctcttttcggactcagcccgcctgcacccaggtgaaataaacagccacgttgctcacacaaagcctgtttggtggtctcttcacacggacgcgtatgaaatttggtgccgtgactcggatcgggggacctcccttgggagatcaatcccctgtcctcctgttctttgctccgtgagaaagatccacctacgacctcaggtcctcagacccaccagcccaaggaacatctcaccaattttaaatcagacaaaggagacatgttttatccgtggacccaaaactccagtgccggtcacggactgggaaggcagccttcccttggtgtttaataactgcagggacacctctctgattatacacccacgtttcaagggtgtcagaccacgcagggatgcctgccttggtccttcacccttagcggcaagtcccgcttttctggggaaggggcaagctgctcctcgccaggccgagctaggtcccaattcttcctcagcctctgctcctccaccctataatctttttatcacctcccctcctcacacctggtccggcttacagtttcgttctgtgactagccctcccccacctgcccagcaatttactcttaaaaaggtggctggagccaaaggcatagtcaagaccatcacagacgccgagcttcgggtaactctcacagtggaaggccgagacagtttaactaaattatctgcttccctgacgattcctggactacagccacatctcattgccgtccttctccccaacccaaagcctccttcgcgtcttcctctcatatccccctaccttaacccacaagtatgggacatctctactccttccctggcaactgatcacatgcccattaccatcccattaaaacctaatcacccttaccccactcaacgccaatatccaatccctcagcacgctttaaaaggattaaagcctgttatcactcgcctgctacagcatgggcttctaaaacctataaactctccttaccattcccccattttacctgtcctaaaaccagacaaggcttacaagttagttcagaatctgcgccttatcaaccaaattgttttgcctatccaccccgtggtgccaaacccatatactctcctatcctcaatacctccctctactacccattattctgttctggatctcagacatgctttctttactattgctttgcacccttcatcccagcctctctttgccttcacttagactgaccctgacacccattaaggctcaacaaattacctgggctgcactgccacaaggcttcacagacagcccccattacttcagtgaagcccaaatttcatcctcatctgttagtcatactcccgttcaccgttctcaactactcatacatgccctggctcttctttacactggccgggtttacactggtttctccaaggacatcacagctggatatctcctgggtgctatccccaaactggcactctaaactcttgaagtaaantaaataatctttgctgggaggactcg

SEQ ID NO: 138181 - DNA, 1578 bp, Homo sapiens
  misc_feature (1)...(1578): n = a,t,c or g
atggtgtgtctggagtttgttccttcagatgttcagatgtgtccagagtttcttccttccagtgggtttgtggtctcactgacttcaggagtgaagccacagaccttcgcagtgagtgttacagctcataaaggtggcacacccagagttgtttgttcctcccagtgggttcgtggtctcgctgacttcaggaatgaagctgcagaccctcacgaccagggaatggatgagaatcctactgattttctggaacggctaagaggggccttggtaaagcacatgtctctatctcctgatttagtcgagggacaattaatcctaaaggataaatttattactcaggcagcccctgatattgagaggaagctgcagaaacagaatgggccatctctcagggacatatttttcagtccccagaatggctacaattggaggatggcaagcttttatctaccagttgcgaacaaatggaaaattcttaaaagcctttaccagatcttacacctaggcccagattgggagggaccttacactgtatttctttctactcctatggcagtggaggtcactggaatagactcttggattcattacacccaagtgaaggcctggaaagctgatggagccacctctgtcaacccagaagagcacccaaagtaccaaggtgaaataaacagccatgttgctcacagaaagcctgtttggtggtctcttcacacggacgtgaatgaaatttggtgccgtgactcggattggggggacctcccttgggagatcaatcccctgtcctcctgtgttctttgctccgtgagaaagatccacctacgacctcaggtcctcagaccgaccagcccaaggaacatctcaccaattttaaatcaggtaagcggcctgctttttactctcttctccaacctccctcactatccctcaacctctttctcctttcaatcttggcgccacacttcaatctctcccttctcttaatttcaattcctttcattttctggtagagacaaaggagacatgttttatccgtgtacccaaaactccggcgccagtcacggactgggaaggcagccttcccttggtgtttaatcattgcagggacgcctctctgattatacattcacgtttcaagggtgtcagaccacgcagggacacctgccttggtccttcacccttagcggcaagtcccgctttcctggggcaggggcaagtacccctcaaccccttctccttcacccttagcggcaagtcccgctttcctggggcaggggcaagtacccctcaaccccttctccttcaccctcagcggcaagtcccgcttttctggggaaggggcaagtacccctcaaccccttctccttcacccttagcggtaagtcccgcttttntagggggcaggggcaagtaccccccaaccccttctccttcacccttagtggcaagtcctgctttcctggggcagcggcaagtcccgctttcctggggcaggtacccctcgaccccttctccttcaccctcagcggcaagtcccactttcctggggcaggacttgccgctttcctggggtag

SEQ ID NO: 138182 - DNA, 3993 bp, Homo sapiens
atggctgcagatgaagggctcggaatcaaggaggacttcctggaggcaaggagttttgagctgcctttgaaagtagggcaaatactttcctgtgcctcagtttccccatctctccgggaagtctatgtaatgtggtggttaggtggaaaggctatggcattagagaaccccaaggcatatcctgatgctgatattaagtgtgcggccacgagaactgctccctctggtcagccctctgggcctggtgcttctggcccaggtccctgcgtgccaccccttggcttcccttataccctacccctgtgctttggaattaatccatcatcagtaagctctcctcgaattatccttatccgggagggccatctgctccctcctgggatcccgattgctgcagagaggtcacagcagggtgtggagggttctgcaggctgtggcaaggagttgtggttttatttaagagtgtatctagcatctcgcactatacgaggccaagttaaggcttacacatttgcagaaggaaagaggccaccgagccagcggaccctcggagcgcaccctgctccgcggagcaggctccaaccaggcggcgaggcggccacacgcaccgagccagcgacccccgggcgacgcgcggggccagggagcgctacgatggaggcgctaatggcccggggcgcgctcacgggtcccctgagggcgctctgtctcctgggctgcctgctgagccactccgccgccgcgccgtcgcccatcatcaagttccccggcgatgtcgcccccaaaacggacaaagagttggcagtgcaatacctgaacaccttctatggctgccccaaggagagctgcaacctgtttgtgctgaaggacacactaaagaagatgcagaagttctttggactgccccagacaggtgatcttgaccagaataccatcgagaccatgcggaagccacgctgcggcaacccagatgtggccaactacaacttcttccctcgcaagcccaagtgggacaagaaccagatcacatacaggatcattggctacacacctgatctggacccagagacagtggatgatgcctttgctcgtgccttccaagtctggagcgatgtgaccccactgcggttttctcgaatccatgatggagaggcagacatcatgatcaactttggccgctggggtaggcagaagatggggcagaagaggggccagcagggatcagtgttgagacgaggggagcatggcgatggatacccctttgacggtaaggacggactcctggctcatgccttcgccccaggcactggtgttgggggagactcccattttgatgacgatgagctatggaccttgggagaaggccaagtggtccgtgtgaagtatgggaacgccgatggggagtactgcaagttccccttcttgttcaatggcaaggagtacaacagctgcactgataccggccgcagcgatggcttcctctggtgctccaccacctacaactttgagaaggatggcaagtacggcttctgtccccatgaagccctgttcaccatgggcggcaacgctgaaggacagccctgcaagtttccattccgcttccagggcacatcctatgacagctgcaccactgagggccgcacggatggctaccgctggtgcggcaccactgaggactacgaccgcgacaagaagtatggcttctgccctgagaccgccatgtccactgttggtgggaactcagaaggtgccccctgtgtcttccccttcactttcctgggcaacaaatatgagagctgcaccagcgccggccgcagtgacggaaagatgtggtgtgcgaccacagccaactacgatgatgaccgcaagtggggcttctgccctgaccaagggtacagcctgttcctcgtggcagcccacgagtttggccacgccatggggctggagcactcccaagaccctggggccctgatggcacccatttacacctacaccaagaacttccgtctgtcccaggatgacatcaagggcattcaggagctctatggggcctctcctgacattgaccttggcaccggccccacccccacgctgggccctgtcactcctgagatctgcaaacaggacattgtatttgatggcatcgctcagatccgtggtgagatcttcttcttcaaggaccggttcatttggcggactgtgacgccacgtgacaagcccatggggcccctgctggtggccacattctggcctgagctcccggaaaagattgatgcggtatacgaggccccacaggaggagaaggctgtgttctttgcagggaatgaatactggatctactcagccagcaccctggagcgagggtaccccaagccactgaccagcctgggactgccccctgatgtccagcgagtggatgccgcctttaactggagcaaaaacaagaagacatacatctttgctggagacaaattctggagatacaatgaggtgaagaagaaaatggatcctggcttccccaagctcatcgcagatgcctggaatgccatccccgataacctggatgccgtcgtggacctgcagggcggcgggtgcctattacctgaagctggagaaccaaagtctgaagagcgtgaagtttggaagcatcaaatccgactggctaggctgctgagctggccctggctcccacaggcccttcctctccactgccttcgatacaccgggcctggagaactagagaaggacccggaggggcctggcagccgtgccttcagctctacagctaatcagcattctcactcctacctgatcgcttcggccgggttctacgcccggctcaactatgagccggtgcgcccatgcggcggaagttgcggccacagtgccaggtgccggcgtcgggaacgtggggctgcggccgcccatggtgccccgtcaggcgtccttcttcccgccgccggtgccgaaccccttcgtgcagcagacgcagatcggctccgcgaggcgggtccagctttgaaatttctgggtcgtgctatgttcttttcaatgggatttatagttgctgtaaaaggaaagattgcaagtcctttggaagcaccagtttttgttgctgcccctcattcaacattctttgatggaattgcctgtgttgtagctgggttaccttctatggtatctcgaaatgagaatgcacaagtccctctgattggcagactgttacgggctgtgcaaccagttttggtgtcccgtgtagatccggattcccgaaaaaacacaataaatgaaataataaagccaacaacatcaggaggagaatggccccaggagccttcattccaggagttccagtgcagccagtcctcctcagatacccaaacaagctggcttaagacattgttatggaaaggtatatttgtctttcagtttatgccagttcaagtaccaaatgatgaagaaaaaaatgatcctgtcctttttgccaataaagtccggaatttaatggcagaagctctgggaataccagtaacagatcatacctatgaagactgcagattgatgatttcagcaggacagctaacattgcctatggaagctgggctggtggaatttactaaaattagccgaaaattgaaattagattgggatggtgttcgtaagcatttggatgaatatgcatctattgcgagttcctcaaaaggaggaagaattggaattgaagaattcgccaagtatttaaagttgcctgtttcagatgtcttgagacaactttttgcactctttgacaggatatggatggtagagttcccacagacagcaattaaggttgctattaatgttctaataaatagccataggggattaaatcatccagaggagaaaaagcttgttaatctaataatagtcttttattctatgatggcttatgagaaactgttagccaaatgccctccatcttcacggaaaataaatgagaagaattggatttaa

SEQ ID NO: 138183 - DNA, 426 bp, Homo sapiens
ggtgcctattacctgaagctggagaaccaaagtctgaagagcgtgaagtttggaagcatcaaatccgactggctaggctgctgagctggccctggctcccacaggcccttcctctccactgccttcgatacaccgggcctggagaactagagaaggacccggaggggcctggcagccgtgccttcagctctacagctaatcagcattctcactcctacctgatcgcttcggccgggttctacgcccggctcaactatgagccggtgcgcccatgcggcggaagttgcggccacagtgccaggtgccggcgtcgggaacgtggggctgcggccgcccatggtgccccgtcaggcgtccttcttcccgccgccggtgccgaaccccttcgtgcagcagacgcagatcggctccgcgaggcgggtccag

SEQ ID NO: 138184 - DNA, 3591 bp, Homo sapiens
tttctcttcatcaataagattcaactaataatggccttttttatttatgtggttggaaaggttaaaataggtgacacgtgaaaagtgccttgccactagaaagcactctattaattgagggggatattattgttactgttcattgttagtagtagcattaaaactgatatgattgctaatgaagaaacagacttaaagaggaagcaaacctcgaacagatgccacaataaagcaacaaaattgctgattcttcagggctctttctacaggacagagggactagagcttactctccctgaggttctcttgctgtttactttggaagctctgacctttccagcagacaccatcacctgtgccctgcagggagcagagattcggactttttaagtttccgcttctggctgggtctgtggcccttgtctaggctctgctaaaacagatggcaaacacggccactcagtaggtgtctttattcatacttgttgacaatttcccattggggaatcggttgaagggaggggcagggagggctgagcgggaacccacggcttggttttccctccatccaagtggagaagagacttcggtaggggacatgctaagtagagtgaacaggggaacccatcactaatgtgggcttgaaaatgcactgttgcaattgacttcagaacaacctgaatcccttctgtcaggaaaatgcaatttcctaaagtggaaaaaaaaaaaacaagaccccaaagaaaaaaaacaaattgccatacaaagcaaactgcctaatgttaagaaaggttctaaggcaagccagcagtgaaaagcccaggggtctggggagtggccaccttggccatggcccctgttcccactgccctgtgcccaggcttttcgggccacccagtgccctctttgagacagtctccattgctctccaaggggttcttttgagccacaagaaggttgtgaaaggaagagaagcctgaaagtgtgggcagcaccaggggcagcccaaagcagggctgcggttgaaaaatatcaaagtatctcttttaggggtggcttctgaggggtggtgggattggagggggaaggtccgcctgggaggagtacagtcagcaatctaattcttgggcaccgggagggagccacttctctggaatcttaaattacccaggtagggagtgagaatgctgattagctgtagaggtgaaaggaccgggtggccaggcccctcccgggtccttctctagttctccaggcccggtgtatcgaaggcagtggagaggaagggcctgtgggagccagggccagctcagcagcctagccagtcggatttgatgcttccaaacttcacggctcttcagactttggttctccagcttcaggtaataggcacccttgaagaagtagctgtgaccgccgccctgcaggtccacgacggcatccaggttatcggggatggcattcccaggcatctccgatgagcttgggaaagcccaggatccattttcttcttcacctcattgtatctccagaatttgtctccagcaaagatgtatgtcttcttgtttttgctccagttaaaggcggcatccactcgctggacatcagggggcagtcccaggctggtcagtggcttggggtaccctcgctccaaggtgctggctgagtagatccagtattcattccctgcaaagaacacagccttctcctcctgtggggcctcgtataccgcatcaatcttttccgggagctcaggccagaatgtggccaccagcaggggccccatgggcttgtcacgtggcgtcacagtccgccaaatgaaccggtccttgaagaagaagatctcaccacggatctgagcgatgccatcaaatacaatgtcctgtttgcagatctcaggagtgacagggcccagtgtgggggtggggccggtgccaaggtcaatgtcaggagaggccccatagagctcctgaatgcccttgatgtcatcctgggacagaacggaaagttttggtggaggtgtaaatgggtgccatcagggccccagggtcttgggagtgctccagcccacaatgcgtggccaaactcgtgggctgccacgaggaacaggctgtacccttggtcagggcagaagccccacttgctggtcgtcatcgtagttggctgtggtcgcacaccacatctttccgtcactgcggccggcgctggtgcagctctcatatttgttgcccaggaaagtgaaggggaagacacagggggcaccttctgagttcccaccaacagtggacatggcggtctcagggcagaagccatacttcttgtcgcggtcgtagtcctcagtggtgccgcaccagcggtagccatccgtgcggccctccagtggtgcagctgtcataggatgtgccctggaagcggaatggaaacttgcagggctgtccttaagcgttgccgcccatggtgaacagggcttcatggggacagaagccgtacttgccatccttctcaaagttgtaggtggtggagcaccagaggaagccatcgctgcagccggtatcaagtgcagctgttgtactccttgccattgaacaagaaggggaacttgcagtactccccatcggcgttcccatacttcacacggaccacttggccttctcccaaggtccatagctcatcgtcatcaaaatgggagtctcccccaacaccagtgcctggggcgaaggcatgagccaggagtccgtccttaccgtcaaaggggtatccatcgcaatgctccaagcggcccaaagttgatcataatgtctgcctctccatcatggattcgagaaaaccgcagtggggtcacatcgctccagacttggaaggcacgagcaaaggcatcatccactgtctctgggtccagatcaggtgtgtagccaatgatcctgtatgtgatctggttcttgtcccacttgggcttgcgagggaagaagttgtagttggccacatctgggttgccgcagcgtggcttccgcatggtctcgatggtattctggtcaagatcacctgtctggggcagtccaaagaacttctgcatcttctttagtgtgtccttcagcacaaacaggttgcagctctccttggggcagccatagaaggtgttcaggtattgcactgccaactctttgtccgttttgggggcgacatcgccggggaacttgatgatgggcgacggcgcggcggcggcgtggctcagcaggcagcccaggagacagagcgccctcaggggacccgtgagcgcggccccgggccattagcgcctccatcgtagcgctccctggccccgcgcgtcgcccgggggtcgctggctcggtgcgtgtggccgcctcgccgcctggttggagcctggtccgcggcgcagggctgcgctccgagggtccgctggctcggtggcctggggtttgcccggctcagcggctcatggtccggcccccgcgccccagcccccgccgccgccgccgccgccgcaggtcctggcaatccctttgtatgtttaaagccccagatgcgcagcctccagccaccgcctgaggaagtctggatgcagcggaaaca

SEQ ID NO: 138185 - DNA, 1680 bp, Homo sapiens
atggagccaaagcaaatcgcacgcgtggtccgtcagcaagaggcgctgtttagttcggtttatgaagggctgattgcggtggatccgcatggttacattaccgccatcaatcgtaacgcaagaaagatgctggggctgagttcccccggacggcaatggttgggtaaacccattgttgaagtggtcaggcccgccgatttctttaccgaacagattgatgaaaaacgtcaggatgtggtggcgaactttaacggtctgagcgttattgccaaccgggaagctattcgttcaggtgatgatttgctgggggccattatcagctttcgtagtaaagacgaaatttccaccctcaatgcgcaactgacgcaaataaaacaatacgttgagagccttcgtacattgcgacacgagcatctcaattggatgtcgacgctcaatggtctgttgcagatgaaagagtatgatcgcgtgctggcgatggtgcagggggagtctcaggcccagcaacagcttattgacagcctgcgcgaggcgtttgccgatcgccaggtggcggggctgctttttggtaaagtgcagcgcgcccgggaactggggctaaaaatgatcattgtccccggtagccagctttcgcaactgccgccaggactggatatcacgttcccctatgaagacggcctggattggagcgtcattaaccattgttacaccgaaattgatctgaagattttccgtcagtacctcgctcccgcgctgggtgtaactcaccgctttgtcggtactgaacccttttgtcgcgttaccgcccagtacaaccaggatatgcgctactggctggaaacgccgactatctccgcaccgcccatcgaactggttgaaattgagcggctgcgttaccaggagatgccgatatccgcttcccgggtacgtcaactgctggcgaaaaacgatctcacggctatcgcgccgctggtccctgcagtcacgctgcattatttgcagaacctgcttgagcactcccgccaggacgcggcagctcctgaatgtcgatacaagcgcactgggtccgcacaaaatgatttctgtgctggtggcgcgctcgccgtgccggaaggtgacagtacggtggatgtcgctaaccgcctgattgactggtgccagtcgcgcggtgaagcggttatcgccagtcaggactggcacccggcgaatcacggcagttttgccagtcagcacggtgtagagccttatacgccaggccaactcgacggtttgccacaaaccttctggccagatcactgtgtgcagaacagtgaaggcgcacaattacatccgttactgcaccaaaaagcgatcgcagcggtgttccataaaggcgaaaatcctttagttgacagttacagtgccttttttgataacggccgtcggcagaaaacctctctcgatgactggttacgcgatcatgaaatcgatgaattgatcgttatgggcctggctactgactattgcgtgaagtttaccgtgctggacgcgttacagttaggttataaggtaaacgtgattaccgatggttgtcgtggcgtgaatatccagccccaggacagtgcgcacgcgtttatggagatgtcagcagctggggcaacgctatatacgctggcagactgggaagagacacaggggtaa

SEQ ID NO: 138186 - DNA, 2976 bp, Homo sapiens
atgcacatcaccctccggcagttggaagtttttgcagaagtattgaaaagtggatcaaccacccaggcgtcggtgatgctggcgttgtcgcaatcagcagtgagcgcagccttgaccgacctggaagggccagcttggcttttgcggcggcggtcggatgatgctgcggacgcgtgccttccgatcgccgtgctggaagatgccggcgtaccgtatcagctgctggaatccagccgcctggcggaagtggagcccgcgctggcagaagtggcgcacaaactgacgggcggcctgcagttacccaatgatgaaaccggagactgtcagctatttacccagaatctggcgcggatggcggagcaggcgggggttaaattccgctttaatacgcccgttgaccaactgctttgcgacggcgagcaaatctacggcgtgaagaagattttgggactggatgtgctggtacatggcgaggccgagcgtaatgacatggtggaatactttggcgagcacctcgacggatttgtctttacgcaaaacggttgggtacagagctacggttcccgctgcgtgaagccaccgattgtcattggtgacattagccgcccggcaccgattaccgtggagtgggcgaagtatgcgcaatcgctgaccgacaaaccggtgaaagggatgctgacggggccggtgaccatactctgctggtcgttcccgcgtgaagatgtcagccgtgaaaccatcgccaaacagattgcgctggcgctgcgtgatgaagtggccgatctggaagccgctggaattggcatcatccagattgacgaaccggcgctgcgcgaaggtttaccgctgcgtcgtagcgactgggatgcgtatctccagtggggcgtagaggccttccgtatcaacgccgccgtggcgaaagatgacacacaaatccacactcacatgtgttattgcgagttcaacgacatcatggattcgacctacgtgccgatattctttctcctgtcaaagaaaccggcacattgctgggcgtgttcacaagcggcggaactctgcggtctgaaggcgggcactccggtggtcgttggaggaggcgacgtgcagcttggttgtagagcggcggccaaaacgggctgtttgaaaaccccggtaaccaaacggggccatacggaaaataacgcaaaggcagatgcgaaaagctcgctggcgctgattggcaccggcaccctatttaatgacagttggcagcctgaaacattagcggcagcgatgaagagcaggcgcggcgcgtgctggaagagtacatcccaggtgcgctattatccgacagcgcacagcgttcagcctacgcaggcagaactgacggcgcatccgctgccgcgttcattaagccgccttaacccggatttactgtacggcaatgtgctggcaagcggcgtcggcgatgatgaatttgcaggcaatatccgtcgcctgatgacagaacagcatcaggggctgggggcggcgatcatcagcaatatggagcaggtttgcgccaaactttctgcctctgccagcgattatctgcgcgaacgtgttagcgacattcgcgatatcagcgaacagttgctgcatatcacctggccggaactgaagccgcgcaacaagctggtgcttgaaaaaccgaccattctggtggctgaagatttaaccccaagccagtttttgagccttgatttgaaaaatcttgcgggcatgattctggagaaaaccgggcgcacctcgcatacactgattctggcccgtgcctcggcgatcccggtactgagtggcttgccgctggatgcgattgcccgttatgccgggcaacctgcagtgcttgacgcccagtgcggcgtgctggcgattaacccgaatgacgcggtgagcggttattatcaggtcgcgcagacgctggcggataaacgccaaaaacaacaggcgcaggctgccgcgcagctggcctattcccgtgataaccagcgtattgatattgcggcgaatatcggcaccgctctggaagcgccaggcgcgtttgccaacggcgcggaaggcggcggacgagcagaacaattgaagactacaaccagtgcaactggagcggtgacagcgatatttcgacgaggaatgaggaataaatctactgaatccgaaagacctctgatagcgagttacgaaatggcgtcgcacgggcatgggccattggccctaccgtccccaattgagaaacattacggtcaactgcctgatgcgacgcttgatgcgtcttatcagcgcgtgtttcatacgcaagtgcgtatcggcgcgccgctgaacattaccggtttaacggattatgctcaggagccgtattattcgacggcggtgggattgcttcactatgggaaagagtcacatcttaacggtgaagctgaagtagaaaaacgtgttacagcatcagttggctcgtggatcaagcgactcaatagttggttggtgatgcgtttgtccgcctgcaatgccgcctgttctgcgcgggccgccagttcaatggcttcatccggggaaacttccgcagggtggaacaagtcgagatctggtgcgtcaaaggccagcagctctttgtctgccacgccggcacagggatctggcgaggtacaatcctggatttaccctccgaccatacagaatgagctaccgggaagtcaagtacttctcctttcctggggaacttctgatgaggatgttacagatgctggtcttaccacttatcatctccagtcttgtcacagtgaacgaggtgccctgctaaacaccacaccatcagccttctctgaccacagtgatgtagttgacaacagcgtacaacaggtctgttttctcaccctcttatcccacccagataacatctggttggacagcctattagctattgatgcaagaatgcttgttctcagaaccaccaggacttga

SEQ ID NO: 138187 - DNA, 2133 bp, Homo sapiens
atggagctggggcgcgggattaaaggactgatcggccatacccagccgcgtcgtctggcggcaagaacagtggcgaaccgtattgcggaagagctgaaaacggagccgggcggttgcatcggttacaaagtgcgtttcagcgatcacgtaagtgataacacgatggtcaagctgatgaccgacggtatcctgctggcggagatccagcaagaccgcctgctgatgcagtacgacactatcattattgacgaagcgcacgaacgcagcctgaatatcgattttttgctcggctatttgaaagagttgctgccgcggcgtcctgacctaaaaatcattatcacttccgcgactatcgacccggaacgcttttcgcgccactttaataatgcgccgattattgaagtctccggtcggacctatccggtggaagtgcgctatcgcccgattgttgaagaagccgatgacaccgagcgcgatcagttgcaggcgatttttgacgccgtagacgaactgagtcaggaaagccatggcgacattctgatctttatgagcggcgagcgggaaatccgcgataccgccgatgcgctgaacaagctgaacttacgccataccgaaatcttgccgctttatgcgcggctttcgaacagcgaacaaaatagggtattccagtcgcacagcggacggcgcagtcagatattactggcgggaaatctggcgcaggcccgaatgatgatcgagcgttttaagccggggctaatcttgctcgataactatcttcctgacggtagagggattaatttactgcatgaactggtgcaggcgcattatcccggcgacgtggtgtttaccactgcagccagcgatatggaaacggtgtctgaagccgtacgttgtggtgtatttgattatctcattaagcccattgcctatgaacggctggggcaaacgctaacccgtttccgccagcgtaaacatatgctggaaagtattgatagcgccagccagaagcaaattgactgcagatgtttaatcggaaaaactttccaaagggccggccccataaagctgctgacggcgtactgcgtggtgcttccggtggtcactgcgataccgcgattgcctctgcgctttccatcatcgtcggcgccgctggtacgcggtcgtattccgactctggtggataacgtactgacctgcatcaccccaggctccagtgtcgatattctggtcacagaccacggtatcgcagtaacccggcacgtccggtaccgagatcgattgtatcatgtcatatccactggttgcgccgctgttggccataatcatcgccaggatagcggcaatgataagaataatgcctcccgaggcatcactgctaaagaatcgatgcagatgtttcactttttatttctctttcagagatcccctttcgcggctatgcataaagagctgattgttgccagttcctactctaaaaactttggcctgtacaacgagcgtgttggcgcttgtactctggttgctgccgacagtgaaaccgttgatcgcgcattcagccaaatgaaagcggcgattcgcgctaactactctaacccaccatcacacggcgcttctgttgttgccaccatcctgagcaacgatgcgttacgtgcgatttgggaacaagagctgactgatatgcgccagcgtattcagcgtatgcgtcagttgttcgtcaatacgctgcatgaaaaaggcgcaaaccgcgacttcagctttatcatcaaacagaacggcatgttctccttcagtggcctgacaaaagaacaagtgctgcgtctgcgcgaagagtttggcgtatatgcggttgcttctggtcgcgtaaatgtggccgggatgacaccagataacatggctccgctgtgcgaagcgattgtggcagtgctcccgcaatggcaggctacgttgaaagcgatcgttccgtcttatggacgcaagctgaacggtgatgtagcggcaacagaacgcgagttgcagtacaccagcgaagtgctggggttgaactacgacaagccgcaggcagcagatagtacgccgaaaccgcagttgaaaccgcaacccgttcaaaaagaagtggcggatattgcgttgtaa

SEQ ID NO: 138188 - DNA, 1619 bp, Homo sapiens
atgctgacattcattgagctccttattggggttgtggttattgtgggtgtagctcgctacatcattaaagggtattccggcactgcccagcttcaacaagctacagcagcacggatatcgagaatacggaaaaatatactaatgaccgggggcgaatccgtatcatcgccctgtgctctaaacgagcgttttaagccggggctaatcttgctcgataactatcttcctgacggtagagggattaatttactgcatgaactggtgcaggcgcattatcccggcgacgtggtgtttaccactgcagccagcgatatggaaacggtgtctgaagccgtacgttgtggtgtatttgattatctcattaagcccattgcctatgaacggctggggcaaacgctaacccgtttccgccagcgtaaacatatgctggaaagtattgatagcgccagccagaagcaaattgatgagatgtttaatgcttatgctcgcggtgaacctaaggacgagctaccgaccggcattgaccccttgacgctaaacgcggtgcgaaaactgtttaaagagcctggtgtgcaacatacggcagaaacggtggcgcaggcactgaccatcagccgcaccactgccaggcgttatcttgaatattgcgccagccgccatctgattattgctgaaattgttcacggcaaagttggcagaccacaacgcatataccacagtgggtgacatgataaagccggaggaaacttgcctccggcattactatttacttgcctgtgaccgctgctgccgttcctggcaccatcagctctgtagcaacgattacaatcaccaaaccaacaagcaccggtaccggagtgcgttttacgacttcaaacggcgagatcttcgccatccggccaccgcaacgactacgccagaacggcgaaagggtcccgtcaaggtttgacgcctgcaccatcgggatagtcaaaagagtgaccgcgatggagacgccgcccacgattcatgactttggtggcttcccgcaggcgctgtacgatacgcattatcctgctccgggttcgcctgcgctggcacagcgtctggttgagctgttagcgccgatcccggtgacgctggataaagaagcctggggctttgaccacggctcgtggggcgtgctgattaagatgtatcctgacgctgatatcccgatggtgcagttgagtatcgacagtagcaaacctgccgcctggcatttcgaaatggggcgcaaactggcagcgctgcgagatgaaggaataatgttggtcgccagcggtaacgtggtgcataacctgcgcacagcgaagtggcacggtgatagttcaccgtatccgggggcgacgtcgtttaatgagtatgtgaaagcgaatctgacgtggcgagggccagtggaacaacatcctctggtgaattacctcgaccatgagaggggcacgttatcgaacccaacggccagacattatttgccggtgttgtatgtgttacgggctatcttatgggcaaggaccccattacccattccgggacgtaccacagtatctaaagtcaagatgaagaaaagaatcttaagagccatgagacaaaagcagcag

SEQ ID NO: 138189 - DNA, 4474 bp, Homo sapiens
atgagtcaggaaacgcccgcttcgacgactgaagcgcagattaaaaataaacgccgtatctcacctttctggctgctgccgttcatcgcgctaatgattgccagttggctgatttgggacagttatcaggaccggggtaataccgtcaccatcgactttatgtcggcggatggtattgttccaggccgtacgcctgttcgttatcagggcgttgaagtcggaacagtgcaggatatcagcctcagcgacgatcttcgtaagattgaagtcaaggtcagcatcaagtccgatatgaaagatgcgctgcgcgaagagactcagttctggctggtgacgccaaaagcatcgttggcaggtgtctccgggctggacgcctcgtcgacggcgcagcacatcattgaccgaggtcgactgccagcggtcgatatcctgacgggtcacaacggtggttggtgcaagcacacgtctgcgcggctgttcaaaacggttagcagtaacgacgagagtatccgggctggtatcctgtgcccaagcggaaaatgccgtgacggaacacgccgtcagcagcgaagcttttttaatcattgtaaagcatccacaatagaagaaggatgccgcaggtttcatcaatattacgcgatgatgagaaccagatgcgacgttggccggcaggtcttcgggcttggaggggtatctaagatactaagagatgatgacttcccaccgaatggcagtgtccgcataacgcaatcatcgcacctttccttaccgctgcgcgtcacgtccagattcgcactggattccctattaactcacaggaccggcaagtggatgctacaggttgtaacaagatacatcatgacccccgaacaccttccaacagaacagtatgaagcgcagttagccgaaaaagtggtacgtttgcaaagtatgatggcaccgttttctgacctggttccggaagtgtttcgctcgccggtcagtcattaccggatgcgcgcggagttccgcatctggcacgatggcgatgacctgtatcacatcattttcgatcaacaaaccaaaagccgcatccgcgtggatagcttcccccgctgcagtgtacttatgcaccagttgatgacggcgatgattgcggaaaccggtattaaagtcgtctacgatgttttcgactctaacgaagtactggaaggcaaattaatggccgggagtaccggctttgatctggtggttccatctgccagctttctggagcgccagttgactgcgggagttttccagccgctggacaaaagcaaattgccggagtggaagaatctcgacccggaactgctgaagctggtcgccaaacacgatcccgacaataaatttgctatgccctatatgtgggcgacgaccgggattggctataacgttgataaagttaaagcggtgctgggcgaaaacgcgcccgtcgatagctgggacttgatcctcaaacctgaaaatctggaaaaactgaaaagctgcggtgtctctttcctggatgcgccagaagaagtttttgctaccatcccaacagcactaaagcggatggtgattggggaccggcactcgatccgcctttaccatcctaatccggagaaaattggttatcctatgcagttcaccaaacagggcgcgctggagaaaggggagagctacttcattaccgggaaagggtcaatggggatggcgatgcgcgccaaaacgccaatctttgatgacgatggaaaagtcatcggcgtggtgtcgattggctacctggtgagtaaaatcgatagctggcgggctgagtttttattaccgatggcaggtgtgtttgtcgtgctgttagggattctgatgttgctgtcgtggttcctggccgcgcatatccgtcggcagatgatgggcatggagccaaagcaaatcgcacgcgtggtccgtcagcaagaggcgctgtttagttcggtttatgaagggctgattgcggtggatccgcatggttacattaccgccatcaatcgtaacgcaagaaagatgctggggctgagttcccccggacggcaatggttgggtaaacccattgttgaagtggtcaggcccgccgatttctttaccgaacagattgatgaaaaacgtcaggatgtggtggcgaactttaacggtctgagcgttattgccaaccgggaagctattcgttcaggtgatgatttgctgggggccattatcagctttcgtagtaaagacgaaatttccaccctcaatgcgcaactgacgcaaataaaacaatacgttgagagccttcgtacattgcgacacgagcatctcaattggatgtcgacgctcaatggtctgttgcagatgaaagagtatgatcgcgtgctggcgatggtgcagggggagtctcaggcccagcaacagcttattgacagcctgcgcgaggcgtttgccgatcgccaggtggcggggctgctttttggtaaagtgcagcgcgcccgggaactggggctaaaaatgatcattgtccccggtagccagctttcgcaactgccgccaggactggatagcaccgagtttgcagccattgtgggcaatttacttgataacgccttcgaagccagcctgcgtacgcatgaaggggacaagatcgttgaattattcctcagcgatgaaggcgatgatgtggtgattgaagtcgccgatcagggctgcggcgttccagagtctctacgagacaaaatatttgagcagggggtcagtacgcgtgctgacgagcccggtgaacatggcattgggttgtacttgattgccagctacgtaacgcgctgcggatggtgttatcactctcgaagataatgatccctgcgtcaaaaaagattcttcacgcttcccctatgaagaccggctggatttggtgttaaaaggcaccgccgatattccacgcctgactgtgcatcgtggctccgaatacatcatctcccgcgctacgttcccttgctacttcattaaagaacagagcgtcattaaccattgttacaccgaaattgatctgaagattttccgtcagtacctcgctcccgcgctgggtgtaactcaccgctttgtcggtactgaacccttttgtcgcgttaccgcccagtacaaccaggatatgcgctactggctggaaacgccgactatctccgcaccgcccatcgaactggttgaaattgagcggctgcgttaccaggagatgccgatatacgcttcccgggttatgttcattttccgcccagataatacggccctgccccggaacgatacgccccagatggtgaagctgtttatggatcgctttcaggtcgtcaaagatatcggtgtgatcgaactcaaggttgttgaggatcagcgtacgcgggcagtaatgatcaaatttagagcgtttgtcaaagaaggcgcagtaatagtcatccgcttcgataacaaagaagtcgctttcgcccagatgagcggaaacctcacagttccccggagcacgtccgattacaaagcacgggatatttttttccagtaccgcttcctcactcggatttccacgggtcatggcgttgccaataatcaccagatccggctacggctcgagctggctggcatcgtacccctgaatcagctcaatgccttgcttctcaaggtctatccgctctccaagctgtgtaattccccaaaaaaatgccaattagaaagcgtgttccgccttacacaatgggtcgtcaaaaaaccgatctccaaccgccagagtgggttgggaggtattgtgctccccggtctttttcgcgtcttgtccccgggtaacctttcccccataaagggcacagtcattttgccaaatgaagtgcaacccggctttttgggcaatctggtggggccgatagcggttggatcggtttatcgtaaatctaccttcctcatggattcactgggtaacaaaattctgccggactggctgaccattgaagagcatctgcatctcctgaaagggctggagtctaccccattcacaatgaaaggtgtgcgcaccgagcgtcgcgatattattaaaaatggcatcctgactcagtggctgctgaccatctactcggctaggaaactgggtctgaaaagcaccgcacatgcgggcggtattcacacctggcggattgccgaacaaggtgtaagcttcgagcagatgctcaaagagatgggcaccgggctggtggtcacggaattgattgaccagggcgtaagtgccatcaccggtgattattcccgtgattcaacgggcttttgggtaaagaatggccaaattcagtatccggtgatcgaaatccccatcgcaggtaatttaaaagatatgtggcgcaatattgtcaccgtcggtaacgatattgaaacacgcagtaatatacagtgtggttctgtgctgataacgaaaatgaaaatcgccggtcagtaa

SEQ ID NO: 138190 - DNA, 1890 bp, Homo sapiens
gggatccgcgacccgcacactaacctcttaaggaactacattcaagaccagatagagcttgaaccagatcgaaggatcaccagtttccctcgaagtccgagtccacctgtcggatcatgtccggagcttgatgtaaatatcttctggagggccccgggaactggggctaaaaatgatcattgtccccggtagccagctttcgcaactgccgccaggactggatagcaccgagtttgcagccattgtgggcaatttacttgataacgccttcgaagccagcctgcgtagcgatgaaggaaacaagatcgttgaattattcctcagcgatgaaggcgatgatgtggtgattgaagtcgccgatcagggctgcggcgttccagagtctctacgagacaaaatatttgagcagggggtcagtacgcgtgctgacgagcccggtgaacatggcattgggttgtacttgattgccagctacgtaacgcgctgcggtggtggtatcactctcgaagataatgatccctgcgctccattaaccctattgatcgttgaggacgaaacgccgctggcagagatgcatgcggaatatattcgtcacattcccggattcagtcagatattactggcgggaaatctggcgcaggcccgaatgatgatcgagcgttttaagccggggctaatcttgctcgataactatcttcctgacggtagagggattaatttactgcatgaactggtgcaggcgcattatcccggcgacgtggtgtttaccactgcagccagcgatatggaaacggtgtctgaagccgtacgttgtggtgtatttgattatctcattaagcccattgcctatgaacggctggggcaaacgctaaccgggttccccccagcgtaaacatatgttgaaaagtattgaaagcgccacccagaagcaaattgatgagatgtttaatgcttatgctcgcggtgaacctaaggacgagctaccgaccggcattgaccccttgacgctaaacgcggtgcgaaaactgtttaaagagcctggtgtgcaacatacggcagaaacggtggcgcaggcactgaccatcagccgcaccactgccaggcgttatcttgaatattgcgccagccgccatctgattattgctgaaattgttcacggcaaagttggcagaccacaacgcatataccacagtgggtgacatgataaagccggaggaaacttgcctccggcattactatttacttgcctgtgaccgctgctgccgttcctggcaccatcagctctgtagcaacgataacaatcaccaaaccaacaagcaccggtaccgaggtgcgttttacgacttcaaacggcgagatcttcgccatcccggcaaccgcaacgactacgccagaaacgggcgaaagggctctttgatgatagcctatgatcacaatgcttatgtaaaaccactctggctttatctggtgattgatcagttccaacagccccatagagctgtgggtttcctgtttcatattttgcaaggggcatttttaaaaaaggtcttttctatcaaccagtatgaaaatgcgacccgcgatatcgccgtgctggaagatgccggcgtaccgtatcagctgctggaatccagccgcctggcggaagtggagcccgcgctggcagaagtggcgcacaaactgacgggcggcctgcagttacccaatgatgaaaccggagactgtcagctatttacccagaatctggcgcggatggcggagcagccgggggttaaattccgcaataatacgcccgtgaccaatcatacgactttgagctcggtaccccatgctacgccaggcatcggcattgccaacggcaatagcgatgcgatcggctatgtgttgtag

SEQ ID NO: 138191 - DNA, 460 bp, Homo sapiens
aagacctggtcggggacttggccagcgtggtatttgggagccagcggcccctccttgattctgtggcccagcagcagggggcctggctgccgcatgttgctgactttcggtggcgggtggatgtagcaatctccaccagtgccctggctcgctccctgcagccgagcgtcctgatgcagctgaagctttcagatgggtcagcagatctggagaagaggtgtgagcgcagactgcaggactgacccctcacttgaccagtcccattcagatccggcttggacaggcacctgagatggtgccaaagtgcagctgactcttcccacgacagccctgcccttcccatgaggcaggctcttcagtgagtgtttgaacgtaattatgtagttttctgtttaattgaaaaagagagctatgcctttttttctttttggaagtaaagcagctaaaaacatgtttctat

SEQ ID NO: 138192 - DNA, 2958 bp, Homo sapiens
atgaaactcatggaaacacttaaccagtgcataaacgctggtcatgaaatgacgaaggctatcgccattgcacagtttaatgatgacagcccggaagcgaggaaaataacccggcgctggagaataggtgaagcagcggatttagttggggtttcttctcaggctatcagagatgccgagaaagcagggcgactaccgcacccggatatggaaattcgaggacgggttgagcaacgtgttggttatacaattgaacaaattaatcatatgcgtgatgtgtttggtacgcgattgcgacgtgctgaagacgtatttccaccggtgatcggggttgctgcccataaaggtggcgtttacaaaacctcagtttctgttcatcttgctcaggatctggctctgaaggggctacgtgttttgctcgtggaaggtaacgacccccagggaacagcctcaatgtatcacggatgggtaccagatcttcatattcatgcagaagacactctcctgcctttctatcttggggaaaaggacgatgtcacttatgcaataaagcccacttgctggccggggcttgacattattccttcctgtctggctctgcaccgtattgaaactgagttaatgggcaaatttgatgaaggtaaactgcccaccgatccacacctgatgctccgactggccattgaaactgttgctcatgactatgatgtcatagttattgacagcgcgcctaacctgggtatcggcacgattaatgtcgtatgtgctgctgatgtgctgattgttcccacgcctgctgagttgtttgactacacctccgcactgcagtttttcgatatgcttcgtgatctgctcaagaacgttgatcttaaagggttcgagcctgatagtgacctaaggtacctgcagtcctgcgagtggggagacactggaatttttctgaagtggtcctgcattcctgccgagaaggggctgcagacctctggggcctgggtagaggcagcagatatacccctgctccctggctccccacgccggctgagccctcaggcagggtccagagggggccagggccccaaacatggacagcagtgtctcaagatgccaggtccccgggccccaggtctgcagggcggttccaacagagatcctggccagccctgcggtggagagagcacccgcagcagctctgtcatcaacaactatctggatgccaatgagcctgtgtccttggaggcccgtcttagccgcatgcacttccatgacagtcagaggaaggtcgactatgtacttgcctaccactaccggaaacgcggggtgcacctggcccaaggcttccctggccactcgctggctatcgtctccaatggggagacaggcaaggagcctcatgctgggggcccaggtgacattgagctgggaccgctcgatgccctggaggaggagaggaaggagcagcgggaggaatttgagcacaatctgatggaggctggactggagcttgagaaggacttggaggtctggcagagcctggatgtctggcatctcaacctgaattgcagcactgagtcaaagggggatatcttggatgctggggtccagcaggagtggacacgggaacccccaaaggcttcagagtggaagccccagggtcctcggagctggtgtgggtttgctgctggctccctgcacacgctgcccgtgcgtggttacgagtttgtgtataaggatggggaaaagggaaaggaagcagaagcagggtcagagctaaggagccacgtgaagctgattccacataaacaattttttcttcaaatcatcaataatcagcagatgaagccgcaggcaggagtgaagctgcagaccttcgcggtgagtgttacagctcttaaggcggcgcgtctggagttgttctttcctcccggtgggttcgtggtctcactggcttcaggagtgaagctgcagaccttcgcggtgagcgttacagctcataaaaacagtgtggacccaaagagaggtattaacttcctactgatcatagagcttcgctcaatgaagcaccccgtccaagaccctttaccacctcctggtggcctggaggactcattgccagaatgcataattagcatagacatacttagcagctggcagaacccccacatcggctccctgactggtaggggttatatcaactctccagctttgtgtcataatcttatttggagagaccttgatcgtttttcgcttccacaagatatcacactggtccattacattgatgacattatgctgactggatccagtgagcaagaagtagcaaacacaccagacttatggagacagctcttggcctgttacaggactttgatggaaactgaacgtttgactatgggtcataaagtcaccatggcacctgaactgcctataatgaactgggtgccttctgacccatctaaccataaagtgggtcatgaacagcagcattccatcatcaaacccaggattcacgggtccaagaatcaaggcactgaagtggaagtggcaccactcaccatcgcccctagtgatccactagcaaaatttttgcttcctgttcccacagcattacgttctgctggcctagagatcttagtttcagagggaggaatgctgccaccaggagacacaacaacaattccattaaactggaagttaagattgccacctggacactttgggctcctcctacctttaagtcaacaggctaaggagggaattacagtgttggctggggtgattgacccagaccatcaagatgaaatcagtctactactccacaacagaggaagaaaaccacgacctgctgaggtgcttcctgaaggcaaagggaatacagaatgtttagtgaagaaggtagtcatcaacaccagctacgaccacatgaccagctgcagaaacgaggactgccaattgtcatga

SEQ ID NO: 138193 - DNA, 2021 bp, Homo sapiens
  misc_feature (1)...(2021): n = a,t,c or g
ggcaatttgaatacctttaattattccctggctcttcttagcccccttcctgttcaggacccagggcctgtggagtgactactcagatcctgtgccccagaaaccgtgagatgtctcaattcccatgcaggcaaaggaggggagcttcacactcagcagacctcatagctgttacaccaatggcttctgctgtggctatcccatgtccggtgtgaggagacagtggtatgactcatcccttnnnnnnnnnnnnnnnnnnnnnnnnnnnnnnnnnnnnnnnnnnnnnnnnnnnnnnnnnnnnnnnnnnacagccagctctaatggcttccatttggcgtttccaaccataatagcctttaccagtcaaggagccaatgtgggggttctgccagctgctaagtatgtctatgccaattatgcatcctggcactgggaaaatgaccacaggataagtctggggacccactggacccgctgtgggttacaaacatacaccctggtgtttcaatctccaaacgttgacattttgcctaacaaccaaaccattgaggctctccctatttcctcctcctccgagcacgctaagccagctctacatctccttcttctgttttctcaagctgcttctggcccatttgtgttggtctgggtcctccaagaagaagacaccaagattaaggatacaaacgtcgtgttcagagaaatgtctggggtagaaaatagtgaggcatctgcatctgggaccgacctcctgggctggctgatcaaagaagaagccacagccatggctggtggggggaactggccactcccttaccttggcatcatccttgggngatagtcacagtgggccgagtgagtttcttgggggcccagcttcctccagaggtggcagcaatggcccggctactaggggacctagacaggagcacgttcagaaagttgcttgaagtttgtggtcagcagcctgcagggggaggattgccgagaggctgctgcagccgtcttggggtcagcgccaacctgccggaggagcagctgggtgccctgctggcaggcatgcacacactgctccagcaggccctccgtctgccccccaccagcctgaagcctgacaccttcagggacccagctccaggagctctgcatcccccaagacctggtcggggactttggccagcgtggtatttgggaagccaagcggcccctcctttgattctgtggcccagcaagccagggtggcctggctgccgcatgttgcttgactttcggttggcgggtggatgtaacaatctccacccagtgcccttggctcgctccctgcaagccgagcgtcctgatgccagctgaaagcttttcagaatgggtcaagcatacccgcctttgaggtccccccacagcccaagttcccaggagctggcggtacagcgtggcccctggtccctaaaggagatggcagatctggaaaaaaagttgtgagccgcaacttgcaggactgaccccctcacttgacccagtcccattcagatccggcttggacaggcacctgagatggtgcccaaagtgcgagctgactcttcccgacgacagccctgcccttcccatgaggcaggttcttcaagtgagtgtttgaacgtaattatgtagttttctgtttaattgaaaaagagagctatgccttttttttctttttggaagtaaagcaagctaaaaacatgtttctataggtgagtgttggacctcacaccctccccttccctgtacatttgtctttggtgctggacgtggccatgtgaggccaggttgaggccctttgtagacaacatacagttgctcagcctggccccatgtagccaggtgcttttgtagatcttgtgttttaggttgggcattttcactcttctgccttaaatccctgaccccatggagctgacattctagtgcggctgaggggaggggaaacattgtaaaataaatcataaaaattaactggaatagctcatcaaaaaaaaaaaaaaaaa

SEQ ID NO: 138194 - DNA, 315 bp, Homo sapiens
atgatccgctttatcctcatccagaaccgggcaggcaagacgcgcctggccaagtggtacatgcagtttgatgatgatgagaaacagaagctgatcgaggaggtgcatgccgtggtcaccgtccgagacgccaaacacaccaactttgtggaggtcttaaacgaatatttccacaatgtctgtgaactggacctggtgttcaacttctacaaggtttacacggtcgtggacgagatgttcctggctggcgaaatccgagagaccagccagacgaaggtgctgaaacagctgctgatgctacagtccctggagtga

SEQ ID NO: 138195 - DNA, 524 bp, Homo sapiens
agccctacaactgcaccctgagccggagctgcccattcgccgcggtaccggggccgctggggtctggacgggggtcgccatgatccgctttatcctcatccagaaccgggcaggcaagacgcgcctggccaagtggtacatgcagtttgatgatgatgagaaacagaagctgatcgaggaggtgcatgccgtggtcaccgtccgagacgccaaacacaccaactttgtggaggtcctggcaagctccgttgctgacagcctctctgttctgcagttccggaactttaagatcatttaccgccgctatgctggcctctacttctgcatctgtgtggatgtcaatgacaacaacctggcttacctggaggccattcacaacttcgtggaggtcttaaacgaatatttccacaatgtctgtgaactggacctggtgttcaacttctacaaggtttacacggtcgtggacgagatgttcctggctggcgaaatccgagagaccagccagacgaaggtgctgaaacagc

SEQ ID NO: 138196 - DNA, 996 bp, Homo sapiens
gctggctctgactcttcacccatcttcacccaggctggcccctttggtgaaactacaactcccaggggtctgtgcgcgagaaggcaggcgggtttttctaccggaagtccgctctagctctgggccctacaactgcaccctgagccggtagctgcccattcgccgcgggaccggggccgctggggtctggacggtgttttgttttgatccgctttatcctcatttcagaaccgggcaggcaagacgcgcctggccaagtggttacatgcagtttgatgatgatgagaaacagaagctgattcgaggaggtgcatgccgtggtcaccgtccgagacgccaaacacaccaactttgtgggagtttccggaacttttaagatcattttaccgccgttatgctggcctctacttctggcatctgtgtggatgttcaatgacaacaaacctgggctttacctgggagggccatttcacaactttcgtgggaggtcttaaacgaatattttccacaatgtctgtggaactgggacctgggtgtttcaactttctacaaaggttttacacggttcgtgggaacgaggatgtttcctgggctgggcgaaaatccgaagagacccagcccagacgaaaggtgcttgaaacagctgcttgatgcttacaagtccctgggagtttaggggcaggcgagcaccccaccgccggccccgggcccctccgtgggacttcgcctgctcgccttccccttccccagcccgtggccaacccagcagtcctttccctcagctgccctaggaggaagggaccccagctgggtcttggggccacaagggaggagactgcaccccacttgcctcttgggccctgggctgttggggcagaggccccccgtgtgtgtcccgagtaaactgttgccgttgttcgtgttgatgccataagcgtctgtgcgtggagtccccaataaacctgtggtaactgcctggcaaaaaaaaaaaaaaaa

SEQ ID NO: 138197 - DNA, 428 bp, Homo sapiens
  misc_feature (1)...(428): n = a,t,c or g
gccaagcccgacgaccaccgctcacggccaggccggcccgcagactttgtgttgctgaaagagcggactctggacgaggcccctcggcctcccaagaaggccatggactactcgtcgtccagcgaggaggtggaaagcagtgaggacgacgaggaggaaggcgaaggcgggccagcagaggggagcagagatacccctgggggccgcgatggggatacagacagcgtcagcaccatggtggtccacgacgtcgaggagatcaccgggacccagcccccatacggnggcggcaccatggtggtccagcgcacccctgaagaggagcggaacctgctgcatgctgacagcaatgggtacacaaacctgcctgacgtggtccagcccagccactcacccaccgagaacagcaaaggccaaagcccaccctc

SEQ ID NO: 138198 - DNA, 422 bp, Homo sapiens
  misc_feature (1)...(422): n = a,t,c or g
gcctgctttgaggaagaggccacctccccagggtgggtactggagcggaaccgcnnnnnnnnnncctccaaaccggacagctcccctgtgctgtcccctgggaataaagccaagcccgacgaccaccgctcacggccagcagaggggatacagacagcgtcagcaccatggtggtccacgacgtcgaggagatcaccgggacccagcccccatacgggggcggcaccatggtggtccagcgcacccctgaagaggagcggaacctgctgcatgctgacagcaatgggtacacaaacctgcctgacgtggtccagcccagccactcacccaccgagaacagcaaaggccaaagcccaccctcgaaggatgggagtggtgactaccagtctcgtgggctggtaaaggcccctggcaagagctcg

SEQ ID NO: 138199 - DNA, 387 bp, Homo sapiens
  misc_feature (1)...(387): n = a,t,c or g
ggatgaacaagcagcagaactctcccttggccaagagcaagccaggcagcacggggcctgagccccccatcccccaggcctccccagggcccccaggcctcccctgggcccccaaaccctaccacaaattcatggccttcaagtcctttgccgacctcccccaccgctctctgctggtcgacctgacagtagaggaggggcagcggctcaaggtcatctatggctccagtgctggcttccatgctgtggatgtcgactcggggaacagctatgacatctacatgcctgtgcacatccagagccagatcacgncccatgccatcatcttcctccccaacaacgacggcatggagatgctgctgtgctacgaggacgagggtgtctacg

SEQ ID NO: 138200 - DNA, 337 bp, Homo sapiens
gcacgaggctgatgttgctggaccgaagtgggcagggcaaggtgtatggactggttgggcggtgacgctttcagcagatggatgtgctggaggggctcaatctgctcatcaccatctaacggaataggaacaaactgcgggtgtattacctgacctggctccggatcaagattatggacaatgacccaaaactggagaagaaacacgactggaccaccgcggggtacatggagggctgcggacactaccgtgttgggaaatacgagcggattaagttcctggtcatcgccctcaagagctccgcggaggtgtatgcctgggcccccaaaccctatcg

SEQ ID NO: 138201 - DNA, 570 bp, Homo sapiens
gagagaacaaggatgaacaagcagcataactctaccttggccaagagcaggccaggcaacacggggcctgagcccctcatgccccaggcctccccagggcccccaggacccctttcccagactcctcctatgcataggccggtggagccccaggagggaccgcacaagagcctggtggcacaccgggtcccactgaagccatatgcagcacctgtaccccgatccacagtccctgcaggaccagcccacccgaaacctggctgccttcccagcctcccatgaccccgaccctgccatccccgcacccactgccacgcccagtgcccgaggagctgtataagaaagctcatgctgctatacgagagaatccagtctatgaaaagaagcccaagaaagaagttaaaaagaagaggtggaaccgtcccaaaatgtcccttgctcagaagaaggatcgggtagctcaaaagaaggcaagcttcctcagagctcaggagcgggctgctgagagctaaacccagcaattttctatgattttttcagatatagataataaacttatgaacagcaact

SEQ ID NO: 138202 - DNA, 921 bp, Homo sapiens
tttttttttttttttttgagacttagacacagtatttcgttcccaggcacagcataattggtttaggagatctgatactgatagtacactgcctcagaggcctgtgaggacccaggggaggcagaggggagagaggtgctccagcctcttcattgccaatgacccttccttcttgaccccatcgcaggcaggggtgtggggaagaacgaggaactgcgtctttatcaccatctcttcaacaactatgacccaggaagccggccagtgcgggacgctgaggatactgtcaccatcagcctcaaggtcaccctgacgaatctcatctcactggtaagctacccccaccctcatcttaagccaaaaatcccacttctggccccaaccgctgagctctgtcctaaagctcacttctggccctgaaatctcacttcaatcatccccatctcccatctgcagaatgaaaaagaggagactctcaccactagcgtctggattggaatcgtgagtcaaatctggggaatggtgtgaggtcttgtccagggcaccccttttcccccaaacccctcccaggcagcgccaggtgggagatgcagggcacgcggccttccatcccccaccccttaggattggcaggattaccgactcaactacagcaaggacgactttgggggtatagaaaccctgcgagtcccttcagaactcgtgtggctgccagagattgtgctggaaaacaagtgagaaccgggccagacgccaggctggagggaagccggcctggggtgcgggctggacttggttggggaagggggtactctgagagggtgcagacctgtgcaaaaagctcggtttccccgagcccacagtattgatggccagttcggagtggcttacgacgccaacgtgctcgtctacgagacgaaa

SEQ ID NO: 138203 - DNA, 7132 bp, Homo sapiens
  misc_feature (1)...(7132): n = a,t,c or g
atacgatcttcgactccctccccctccccggtctccgggggaggcgcggtttagtttgcccccggcgttctccgatgggggagaagcggtgacggcggcagtggagtaaccgagccagagcgtgagcggccccggtgccccgttccccacggaggccatgggcgacccagcccccgcccgcagcctggacgacatcgacctgtccgccctgcgggaccctgctgggatctttgagcttgtggaggtggtcggcaatggaacctacggacaggtgtacaagggtcggcatgtcaagacggggcagctggctgccatcaaggtcatggatgtcacggaggacgaggaggaagagatcaaacaggagatcaacatgctgaaaaagtactctcaccaccgcaacatcgccacctactacggagccttcatcaagaagagccccccgggaaacgatgaccagctctggctggtgatggagttctgtggtgctggttcagtgactgacctggtaaagaacacaaaaggcaacgccctgaaggaggactgtatcgcctatatctgcagggagatcctcaggggtctggcccatctccatgcccacaaggtgatccatcgagacatcaaggggcagaatgtgctgctgacagagaatgctgaggtcaagctagtggattttggggtgagtgctcagctggaccgcaccgtgggcagacggaacactttcattgggactccctactggatggctccagaggtcatcgcctgtgatgagaaccctgatgccacctatgattacaggagtgatatttggtctctaggaatcacagccatcgagatggcagagggagccccccctctgtgtgacatgcaccccatgcgagccctcttcctcattcctcggaaccctccgcccaggctcaagtccaagaagtggtctaagaagttcattgacttcattgacacatgtctcatcaagacttacctgagccgcccacccacggagcagctactgaagtttcccttcatccgggaccagcccacggagcggcaggtccgcatccagcttaaggaccacattgaccgatcccggaagaagcggggtgagaaagaggagacagaatatgagtacagcggcagcgaggaggaagatgacagccatggagaggaaggagagccaagctccatcatgaacgtgcctggagagtcgactctacgccgggagtttctccggctccagcaggaaaataagagcaactcagaggctttaaaacagcagcagcagctgcagcagcagcagcagcgagaccccgaggcacacatcaaacacctgctgcaccagcggcagcggcgcatagaggagcagaaggaggagcggcgccgcgtggaggagcaacagcggcgggagcgggagcagcggaagctgcaggagaaggagcagcagcggcggctggaggacatgcaggctctgcggcgggaggaggagcggcggcaggcggagcgcgagcaggaatatattcgtcacaggctagaggaggagcagcgacagctcgagatccttcagcaacagctgctccaggaacaggccctgctgctggaatacaagcggaagcagctggaggagcagcggcagtcagaacgtctccagaggcagctgcagcaggagcatgcctacctcaagtccctgcagcagcagcaacagcagcagcagcttcagaaacagcagcagcagcagctcctgcctggggacaggaagcccctgtaccattatggtcggggcatgaatcccgctgacaaaccagcctgggcccgagaggtagaagagagaacaaggatgaacaagcagcagaactctcccttggccaagagcaagccaggcagcacggggcctgagccccccatcccccaggcctccccagggcccccaggacccctttcccagactcctcctatgcagaggccggtggagccccaggagggaccgcacaagagcctggtggcacaccgggtcccactgaagccatatgcagcacctgtaccccgatcccagtccctgcaggaccagcccacccgaaacctggctgccttcccagcctcccatgaccccgaccctgccatccccgcacccactgccacgcccagtgcccgaggagctgtcatccgccagaattcagaccccacctctgaaggacctggccccagcccgaatcccccagcctgggtccgcccagataacgaggccccacccaaggtgcctcagaggacctcatctatcgccactgcccttaacaccagtggggccggagggtcccggccagcccaggcagtccgtgccagtaaccccgacctcaggaggagcgaccctggctgggaacgctcggacagcgtccttccagcctctcacgggcacctcccccaggctggctcactggagcggaaccgcgtgggagtctcctccaaaccggacagctcccctgtgctctcccctgggaataaagccaagcccgacgaccaccgctcacggccaggccggcccgcaagctataagcgagcaattggtgaggactttgtgttgctgaaagagcggactctggacgaggcccctcggcctcccaagaaggccatggactactcgtcgtccagcgaggaggtggaaagcagtgaggacgacgaggaggaaggcgaaggcgggccagcagaggggagcagagatacccctgggggccgcagcgatggggatacagacagcgtcagcaccatggtggtccacgacgtcgaggagatcaccgggacccagcccccatacgggggcggcaccatggtggtccagcgcacccctgaagaggagcggaacctgctgcatgctgacagcaatgggtacacaaacctgcctgacgtggtccagcccagccactcacccaccgagaacagcaaaggccaaagcccaccctcgaaggatgggagtggtgactaccagtctcgtgggctggtaaaggcccctggcaagagctcgttcacgatgtttgtggatctagggatctaccagcctggaggcagtggggacagcatccccatcacagccctagtgggtggagagggcactcggctcgaccagctgcagtacgacgtgaggaagggttctgtggtcaacgtgaatcccaccaacacccgggcccacagtgagacccctgagatccggaagtacaagaagcgattcaactccgagatcctctgtgcagccctttggggggtcaacctgctggtgggcacggaggaacgggctgatgttgctggaccgaagtgggcagggcaaggtgtatggactcattgggcggcgacgcttccagcagatggatgtgctggaggggctcaacctgctcatcaccatctcagggaaaaggaacaaactgcgggtgtattacctgtcctggctccggaacaagattctgcacaatgacccagaagtggagaagaagcagggctggaccaccgtgggggacatggagggctgcgggcactaccgtgttgtgaaatacgagcggattaagttcctggtcatcgccctcaagagctccgtggaggtgtatgcctgggcccccaaaccctaccacaaattcatgggccttcaagtcctttgccgacctcccccaccgccctctgctgggtcgacctgacagtagaggaggggcagcggctcaaggtcatctatggctccagtgctggcttccatgctgtggatgtcgactcggggaacagctatgacatctacatccctgtgcacatccagagccagattacgcccccatgccatcatcttcctccccaacaccgacgggcatggagatgctgctgtgctacggaggacgaaggttgtctacgtcaacacgtacgggcgcatcattaagggatgtggtgctgcagtggggggagatgcctacttctgtggcctacatctgctccaaccagattaatgggctggggtgagaaagccattgagatccgctctgtggagacgggccacctcgacggggtcttcatgcacaaacgagctcagaggctcaagttcctgtgtgagcggaatgacaaggtgttttttgcctcagtccgctctgggggcagcagcctaagtttacttcatgactctgaaccgtaactgcatcatgaactggtgacggggccctgggctggggctgtcccacactgggacccagctctccccctgcagccagggnttcccgggccgccccttctttcccctccctgggcttttgcttttactggtatgatttcactggagcctgctgggaacgtgacctctgacccctgatgctttcgtgatcacgtgaccatcctctttccccaacatgttcctcttcccaaaactgtgcctgtccccagcttctggggaggggacacagcttccccttcccaggaattgagtgggcctagcccctccccccttttctccatttgagaggagagtgcttggggcttgaaccccttaccccactgctgctgactgggcagggccttgagacccctttatttgcacgtcaggggagccggctcccaccgttgaatgtattttaccctggtgtgggggtcactgggcccctaaaatttttggggggtcacccagccactcccaggggcagggaccatttccttcattttctgaaagcactttaatgattcccccttcccccaaactcccagggaatggaggggggaccccgccagccaaaaacattccccccattcccgacccccatctcctcttctagcccatggcccttccccggtggagggagggaggcagggagccctcactctccacgccccttgcttggcatctgtatatagtgtgagcggcaagtaacccttttcctccctcccccctcccccctcctcaatgttagtggccttggatatcctgtttgttaataaagacaattcaaccagctcccaccatgcaggccgcatgtccttgctttctgtcagtactgtagactaggcagagagagcctccagggtggggaagaaaggggcagggtgggcctggatctgcaatgagtgagcctcatggggtgggatgggcagtgctgggccaagaaaacctagaagaaatgactgtggaagggtcagggcagcctcagccttaaacctgtgggcctgagggccaccagcactgaaggtgtttggttcccacccgctccagcagagccagaccagggaagaagagggtttcctggctacagcctccctgtgtgcaagtcctgcaaaggggtctcctgtttggctatgaaatgaatatagatagatagctcacaagctggcagccaccagagtcccgtggggctgagccttagaaaggctgggaggtcagcaaggctgaatgaagggcagtccttgctttctggaagactggcacctgagagcctatgtgaaccctttcctcctgctgacccctggactgcggccaggcctacacacgccagggaacgggcacacaccattcttgtgaagttcacaaactgcagattgatcagcagggggaagggatcataatgccgtggtggcggcagcctactttttcaaaatcaatttcctactggagatgggtgggaaattgaagtcggtgcgagctaaggctggatacacggcgcgtaggggagatcaggcactcggttgaagtaggccccgaggaagatgaggctggagcccacgctgaagagcaccagagcggcccagaagcagatgttgtcaagggcattccccatgcgcacccagtcggacacttcctcgccggtggcctcctgatctctcgtgctctcggccacgaagttcacggcatccacacagcagcggacctcgggggcggcggcgcccaggctctggcagaaggcagccgtccaggtcccctgccggtgcctctgcccctcaaacacgagctcgctccgtggctttttcagtatcagctcctccgcgcggagcaataagcccaccgacgacgcccgccttgggggcgaggcggcccggggggcctcgggcggcggcggggagcccaggaggcgcggcagcagctccaggagaacgtggcgcagccgcggggacatggcgtgggtggtgggcgtccgctgggacacgttgagcacgatgacgcaattcatgacaatgagcgtggcgaccaccatgacgaaaataaggaacctgcccaggagcggcacgctcagagaagtctctgggattttctgggcaatgaggaacaagaagacggtctgggcgagcaggacgttgatggagaccgtgcatttctggccgccggcctgcgccggcaggaagtaggcgagcagcaccaggcccgagatgagcacacagggcacgatgatgttaatgacgtagaagagcggcttccggcggatgatgagcgagtagatgacgtcagtctcccctgggccgtcggtggcgccaccgtggtggcggcggatcacccccgggcagaagtcgatggcccactcgccgttctcagtataggcctctgtgtcgatgtcgatcttgttgatggtcttgccgtcgttgtctacggcaaaagtgaactccacctcttcggcattgtacgtctgagagcggaaaataagcgaacagttctgccaatcgaaggggaagtaggtgacctccactgcgcagacgctgcggtagatggccggaggcagccacgtcacggagccgccctcgtagacgagcacgttggcgtcgtaggccactccgaactggccatcaatattgttttccagcacaatctctggcagccacacgagttctgaagggactcgcagggtttctatacccccaaagtcgtccttgctgtagttgagtcggtaatcctgccaatcgattccaatccagacgctagtggtgagagtctcctctttttcattcagtgagatgagattcgtcagggtgaccttgaggctgatggtgacagtatcctcaggctcccgcactggccggcttcctgggtcatagttgttgaagagatggtgataaagacgcagttcctcgttcttccccacacccctgccgagaagccccaagaggagcaggaccccaagcggagcccttgccatcctgctgcgtg

SEQ ID NO: 138204 - DNA, 1857 bp, Homo sapiens
atgccatgtggcaaacaaggaaatttgcaagttcccggttccaaggtgttacctgcctcactcgtgaacctgtgccagagttggaaaattaacaatttgatgtcaactgtccacagtgatgaggctggtatgctgtcctactttctgtttgaagagctgatgcgatgtgacaaagattccatgccagatggaaatctgtcagaggaggaaaaattgtttctctcatattttcctttgcacaagtttgagctagaacagaacatcaaagaacttaacacccttgcggaccaagttgacaccactcacgagttgcttaccaagaccagcctggtggccagctcttccggggctgtttctggggtcatgaacatcctgggtttggccctagcacctgtgacagcaggaggcagtctcatgctctcagcaactgggacagggttgggggcagcagctgccatcaccaacatagtaacaaatgtcttagaaaatagaagcaattcagcagcaagagacaaagccagccgactggggcctctgacaacatcacatgaggctttcggaggaataaattggtctgaaatcgaggctgctggcttttgtgttaataagtgtgtaaaagctatccagggcatcaaggatcttcatgcctaccagatggccaaatccaactctggcttcatggctatggtcaagaattttgtggccaagagacacatccctttctggacggctagaggggtgcagagagcctttgagggcacaactctggccatgaccaatggtgcctgggtgatgggtgctgctggggctggcttcttacttatgaaagacatgagcagcttcctgcagagctggaagcacctggaggatggggcaaggacggagacagcagaggaactgagagcacttgctaagaagctggagcaggagctggaccggctcacccagcaccaccggcacctgccgcagaaggcgagccagacctgttccagctcccggggcagggctgttcgaggatcccgtgtggttaaaccagaagaccagttctctctgcactactcatcggcttacccgtggatccaggctcagaaaacattccacctgtgtgaaactgtgcaagacccacggatccaggctcagaaaacttgccacctgtgtgaaactgtgcaagacccgtggatccaggctcagaaaacattccacctgtgtgaaactgtgcaagacccacggatccaggctcagaaaacttgccacctgtgtgaaactgtgcaagacccgtggatccaggctcagaaaacattccacctgtgtgaaactgtgcaagacccacggatccaggctcagaaagcattccacctgtgtgaaactgtgcgagacccacggatccaggctcagaaagcattccacctgtctgaaactgtgcgagacccacggatccaggctcagaaagcattccacctgtctgaaactgtgcgagacccgcggatccaggctcagaaagcattccacctgtgtgaaactgtgcgagacccgcggatccaggctcagaaagcattccaccttacagaaagacagacaccaaataaactaccaggggagcacattgtacagggccttgtagaccaaaataaggacttggaactggctacgggatgggaagccaaagaagtttgcacaaaagcacgtcacaatccgattgaacaggctgtcgagagaacaaacttcggcgatggagagctgtcggagaaaagtgttaatgtgtacaaagtggtccgggtgctcagcggggtgtttttggaggacagtgagaagctcagcgggatagccacaggctcaagactgtggatagagaagtga

SEQ ID NO: 138205 - DNA, 1511 bp, Homo sapiens
atgccatgtggcaaacaaggaaatttgcaagttcccggttccaaggtgttacctggcttgggagaaggttgtaaagaaatgtggcttcgaaaggtaatctacggaggtgaggtctgggggaagtccccagaacctgagttcccctcactcgtgaacctgtgccagagttggaaaattaacaatttgatgtcaactgtccacagtgatgaggctggtatgctgtcctactttctgtttgaagagctgatgcgatgtgacaaagattccatgccagatggaaatctgtcagaggaggaaaaattgtttctctcatattttcctttgcacaagtttgagctagaacagaacatcaaagaacttaacacccttgcggaccaagttgacaccactcacgagttgcttaccaagaccagcctggtggccagctcttccggggctgtttctggggtcatgaacatcctgggtttggccctagcacctgtgacagcaggaggcagtctcatgctctcagcaactgggacagggttgggggcagcagctgccatcaccaacatagtaacaaatgtcttagaaaatagaagcaattcagcagcaagagacaaagccagccgactggggcctctgacaacatcacatgaggctttcggaggaataaattggtctgaaatcgaggctgctggcttttgtgttaataagtgtgtaaaagctatccagggcatcaaggatcttcatgcctaccagatggccaaatccaactctggcttcatggctatggtcaagaattttgtggccaagagacacatccctttctggacggctagaggggtgcagagagcctttgagggcacaactctggccatgaccaatggtgcctgggtgatgggtgctgctggggctggcttcttacttatgaaagacatgagcagcttcctgcagagctggaagcacctggagggatggggcaaggacggagacagcagaggaactgagagcacttgctaaagaagctggagcaggagctggaccggctcacccagcaccaccggcacctgccgcagaaggcgagccagacctgttccagctcccggggcagggctgttcgaggatcccgtgtggttaaaccagaaggatgcttggccaccagccagccccaccagcaccagcaagaaaggggagacaggccccgggaagacaccgacaatgagaagagaggtggtgagaagtggtcagattttggatctgttctgaagggagagcccacaggatttgttcatggactggacctgtggtgtgagggaaagaagagccaggataacggggggttgtggcctgagcaactggcgggatggagctgttggcacctgaaatggacaggtgggagccggagtgggctcccagtgcccgtgttggatgcagcctgcactggaaccctgtctccagacctgacatcctggcggtaccatcccagctccatcccacttcccaagcagcctctgcagcatggtttttag

SEQ ID NO: 138206 - DNA, 515 bp, Homo sapiens
gggtcggcacccaggctggggccgctccaggccccgtgcagttcctcagctctgcctgggttgccttacagtgagacggagctgcctcctctgactgcgcgggaggcgaagcaaattcggcgggagtatcagccgaaagtagcaagtgggtggatatgctgggagactgggagaaatacaaaagcagcagaaagctcatagatcgagcgtacaagggaatgcccatgaacatccggggcccgatgtggtcagtcctcctgaacactgaggaaatgaagttgaaaaaccccggaaggataccaggtacgctcagccagagcacaaccaacaggacaggccgtgtcaggggcccaggtctccagctggagggaacgtcaagaccaccctggggagctgggggtgaagatcatgaaggagaagggcaagaggtcatctgaacacatccagcagatggacctggacgtaagcgggacattaaggaggcatatattcttcagggatcgatacggaaccaa

SEQ ID NO: 138207 - DNA, 1320 bp, Homo sapiens; identical to SEQ ID NO: 135519

SEQ ID NO: 138208 - DNA, 8180 bp, Homo sapiens
ctaaaaataccattaagtaatagtattagcttttgtattctgagattcaacagcagcagtcacttccctccactcctatgtgtatcccaggaccaccctgggcggggagggctgaggtcagggaggtctgaagctggtcctgggctccgggggtgacagtgatgaggaactgggtgcacacatgagtggggcagccgggcctggccagagaagcaacacacacgtgcacagacatgtttatccacatacacatgtgcacgcatgtgcacaaacacattgcaggcaggcatgttgacgcctcaggcagcggaggaccctgactctgggccctgctgacccgggcaaggcccattgtgatgcgtgccatgacctcagaatgtcactggtgcttagcacctatccgctctccagactgcgtctgtgttctacggcagttacacacacgcagtggtattcacaagcggttttgtggactcaaaggttttctccctgagaggcataacccaggccagctgattcatcagaatcaggtgagtgtgacctgctctcttccctccaggctgacttggggacagtggctatggtatgggcggtgttggcctctgggcagctacagaggagggtcatccctgagcactcaccgggcgcccgttctacactgcccatgtagacgattttctctttcgtcttcatggtggcttcgtagagtgggtgctgttcccaaatgtacccattcgacaggtgagccgtctggggtcagagaggcagtaactggcctgggaatccagacaagaccctgggttttgctctcagccctgctgtgtgccatgctagacttcaggcctcaaccctgagacctccctgctctagatcccaaatctgcccagatttccgatccaatgggcagagcctggccctggcagagacactgggatggatccactgtgggtggggaggagggaagggtcctcagaacacacctggggcctaagctgggtcttgatggtcactgtgggacccactggacacacacagtcccttgtctgggagtggcatggggagccttctgcccttgggcagttgtggaaagtgaaggagccctggagagctggctgaggggagactatcttcccttgtgttcaaaggggtccaggcactggggctctccccaagtatttcttattctgtctggcctcgctttccttttgccctgagtattctcaggagggacggtccatctagatgtcctccaggagcaaggacccactgttcttcatcagtgacccaggaaaatgaagccccctcctgtggggacagctcagaatggtggagtccacagtccctccctgagagacatggtttccatgagcacagtggctgctttggagacagtaatcattttcatccccaaaaccaaacacactcctgctcaaatggtgttattgctaaagcagcttcactggttagactgaagggccatggtagcccaagtgatgagcggggtagaatggagcagtcaggagagatcttgttccccgtaggaaactgggcatctctgtggccctgaacatcccaggaggccgatcgtacagagacctctggtgcctgaccgcagttcacatccacatccctggaatagaccatcacaggctcttcacccttggcaggtggacaccattcaacctgccggggcaggatggacatggtagagaatgcagatagtttgcaggcacaggagcggaaggacatacttatgaagtatgacaagggacaccgagctgggctgccagaggacaaggggcctgagcccgttggaatcaacagcagcattgatcgttttggcattttgcatgagacggagctgcctcctgtgactgcacgggaggcgaagaaaattcggcgggagatgacacgaacgagcaagtggatggaaatgctgggagaatgggagacatataagcacagtagcaaactcatagatcgagtgtacaagggaattcccatgaacatccggggcccggtgtggtcagtcctcctgaacattcaggaaatcaagttgaaaaaccccggaagataccagatcatgaaggagaggggcaagaggtcatctgaacacatccaccacatcgacctggacgtgaggacgactctccggaaccatgtcttctttagggatcgatatggagccaagcagagggaactattctacatcctcctggcctattcggagtataacccggaggtgggctactgcagggacctgagccacatcaccgccttgttcctcctttatctgcctgaggaggacgcattctgggcactggtgcagctgctggccagtgagaggcactccctgccaggattccacagcccaaatggtgggacagtccaggggctccaagaccaacaggagcatgtggtacccaagtcacaacccaagaccatgtggcatcaggacaaggaaggtctatgcgggcagtgtgcctcgttaggctgccttctccggaacctgattgacgggatctctctcgggctcaccctgcgcctgtgggacgtgtatttggtggaaggagaacaggtgttgatgccaataaccagcattgctcttaaggttcagcagaagcgcctcatgaagacatccaggtgtggcctgtgggcacgtctgcggaaccaattcttcgatacctgggccatgaacgatgacaccgtgctcaagcatcttagggcctctacgaagaaactaacaaggaagcaaggggacctgccacccccaggcccaacagccctgggacgaaggtgtgtggcaggaagcccccagccagtctgaaccctgggggcagtcccaggagccacccaccatgccccaacggcttccccatgccaggcagcacacacccctccctctgggatcagcagactacaggcgtgtcgtcagtgtcagaccacaggggccacacagagaccccaaggactccagagatgcagccaaacgcgagcaagggtccttggcacccaggcctgtgccggcttcacgtggtgggaagaccctctgcaaggggtataggcaggcccctccaggcccaccagcccagttccagcggcccatttgctcagcttccccgccatgggcatctcgtttttccacgccctgtcctggtggggctgtccgggaagacacgtaccctgtgggcactcagggtgtgcccagcctggccctggctcagggaggacctcagggttcctggagattcctggagtggaagtcaatgccccggctcccaacggacctggatatagggggcccttggttcccccattatgattttgaacggagctgctgggtccgtgccatatcccaggaggaccagctggccacctgctggcaggctgaacactgcggagaggttcacaacaaagatatgagttggcctgaggagatgtcttttacagcaaatagtagtaaaatagatagacaaaaggttcccacagaaaagggagccacaggtctaagcaacctgggaaacacatgcttcatgaactcaagcatccagtgcgttagtaacacacagccactgacacagtattttatctcagggagacatctttatgaactcaacaggacaaatcccattggtatgaaggggcatatggctaaatgctatggtgatttagtgcaggaactctggagtggaactcagaagagtgttgccccattaaagcttcggcggaccatagcaaaatatgctcccaagtttgatgggtttcagcaacaagactcccaagaacttctggcttttctcttggatggtcttcatgaagatctcaaccgagtccatgaaaagccatatgtggaactgaaggacagtgatggccgaccagactgggaagtagctgcagaggcctgggacaaccatctaagaagaaatagatcaattattgtggatttgttccatgggcagctaagatctcaagtcaaatgcaagacatgtgggcatataagtgtccgatttgaccctttcaattttttgtctttgccactaccaatggacagttacatggacttagaaataacagtgattaagttagatggtactacccctgtacgggtatggactaagactgaatatggatgaaaagtacacaggcttaaaaaaacagctgagtgatctctgtggacttaattcagaacaaatccttctagcagaagtacatggttccaacataaagaactttccttaggacaaccaaaaagttcgactctcagtgagtggattcttgtgggcatttgaaattcctgtccctgtgtctccaatttcagcttctagtccaacacagacagatttctcctcttcgccatctacaaatgaaatgttcaccctaactaccaatggggacctaccccgaccaatattcatccccaatggaatgccaaacactgttgtgccatgtggaactgagaagaacttcacaaatggaatggttaatggtcacatgccatctcttcctgacagcccctttacaggttacatcattgcagtccaccgaaaaatgatgaggacagaactgtatttcctgtcatctcagaagaatcgccccagcctctttggaatgccattgattgttccatgtactgtgcatacccggaagaaagacctatatgatgcggtttggattcaagtatcccggttagcgagcccactcccacctcaggaagctagtaatcatgcccaggattgtgacgacagtatgggctatcaatatccattcactctacgagttgtgcagaaagatgggaactcctgtgcttggtgcccatggtatagattttgcagaggcttgtaaattgattgtggagaagacagagctttcattggaaatgcctatattgctgtggattggcaccccacagcccttcaccttcgctatcaaacatcccaggaaagggttgtagataagcatgagagtgtggagcagagtcggcgagcgcaagccgagcccatcaacctggacagctgtctccgtgctttcaccagtgaggaagagctaggggaaagtgagatgtactactgttccaagtgtaagacccactgcttagcaacaaagaagctggatctctggaggcttccacccttcctgattattcaccttaagcgatttcaatttgtaaatgatcagtggataaaatcacagaaaattgtcagatttcttcgggaaagttttgatccgagtgcttttttggtaccacgagacccggccctctgccagcataaaccactcacaccccagggggatgagctctccaagcccaggattctggcaagagaggtgaagaaagtggatgcgcagagttcggctggaaaagaggacatgctcctaagcaaaagcccatcttcactcagcgctaacatcagcagcagcccaaaaggttctccttcttcatcaagaaaaagtggaaccagctgtccctccagcaaaaacagcagccctaatagcagcccacggactttggggaggagcaaagggaggctccggctgccccagattggcagcaaaaataagccgtcaagtagtaagaagaacttggatgccagcaaagagaatggggctgggcagatctgtgagctggctgacgccttgagccgagggcatatgcgggggggcagccaaccagagctggtcactcctcaggaccatgaggtagctttggccaatggattcctttatgagcatgaagcatgtggcaatggctgtggcgatggctacagcaatggtcagcttggaaaccacagtgaagaagacagcactgatgaccaaagagaagacactcatattaagcctatttataatctatatgcaatttcatgccattcaggaattctgagtgggggccattacatcacttatgccaaaaacccaaactgcaagtggtactgttataatgacagcagctgtgaggaacttcaccctgatgaaattgacaccgactctgcctacattcttttctatgagcagcaggggatagactacgcacaatttctgccaaagattgatggcaaaaagatggcagacacaagcagtacggatgaagactctgagtctgattacgaaaagtactctatgttacagtaaagctaccactctggctgctagacagcttggtggcgagggagatgactccttgtagctgatacttggcaaaagtgtcactgaaagacaagctaaatgtagttattttatcctgttagaacaaaaattctaattaaaatagttaacttgaagagtagaaacaattgtattttgaagtctcatacaagctgtctgatagagaactttcaggcagatcccaccattagcctgtaaacaaaaggtgtggcaccagccacctgggaccaaataagaattgaattgtgcttgtccagatatgaacaaatatgtagtgagtatagagtttaccaataatcataacaaatattaaagatttccttggagtcagaggaaaaaacaaacaattataatgttgtctagggacgacatgatacgctacctcctttttcctgaagttttattccattatattgacaagatggagaaagcaagatcatgaaggtgtgcaaatgattcttacggcatggacaaggatttttcaatttattttttaaactgtttccataccctttctttttcttgctttttgtttttgccattgtgtttacgtttgagacacaaccagtcattggtggcaggggcatagagtggtcagtctgaaagggaggctctcttaagagctatgtgccttccaaccagagggagacccagtagaaagaaaaacatcctgggaaatccagctaccagggccctcccagtggaggcatcttacatttaggctacttcaagtatcctcagaaatgtattctgcacccccggccccgcccatgctgagggaaggggagcagttgccaatatttgcaccatcttcacatgcacatgttgcaacaagagcttctgggaaggtaagcggcatcggagctagatcacgtttcacaattagtggttattcttttctgtgtttgttttgcactttaaaaaagagagaacacatgcaaatgaacttgcttgtgtgtatttgatggctctaagggctataaattacaaacaaaacacatcccagacattaggagttcataagtatatttaatgaaattggtggttttaggaagtcaactttagttttgctttgtttgcatgtccactggtttttttattttgatatttgtctttttttaaattttacagtagtcattgaaagttatgtttctttgcttacttcattttttccctctaattatttaagattggaacaaaagtataaatattatttatttgaggtagaatttttttcatgtagtttcttaatatatacttgaaggaaatgtttcaccttatttttggtctttgtttattcatttagaccctgcaagttgattctcattgccagattccattaccctttcttcctcataggtagtaattaccaatgtaactaagcatttgtgttctgatatctgaggccagtaactattaatatctagttctcagagcatttggaaaggttatcttaaatggctacctaaattgaaatccttttcagaaaaaatataattgcaagtaggtaggagtggcctaaattgtctaatgtaataaagtcagacaaaatgcacactttatagtttcaagattttcagtaaataaaatctgtccattcctacctggacatgtcccattaaaaagtggaagattttaaataatttctttacagatgttttatttaaacaggtagcacaatctactaatgttgtgtgatttgtgttatactggttgtaattaatttttttaattcatgaactagcggaaaatttattaaattaactattaactacattcaccttgtaaattactgtataaaacttgttgacaatgcactgactttagaaagatgttaatgtacataaatagagtgtaaataaaatagtgttgatgtactgaaatatgaactgtatcaaaagtattggtaattgtatatggggtgtacctgtttatctgttaactattatccaaacaaattaaatactgtggttgcctctatgtgctgtttttcctcatacaagtaaacacagaaagtc

SEQ ID NO: 138209 - DNA, 7856 bp, Homo sapiens; identical to SEQ ID NO: 135517

SEQ ID NO: 138210 - DNA, 3904 bp, Homo sapiens
tccagctggtggaattccagcagattaacatttgctaacggggcctggtgcggtgacaccttcgtaaggttgctttttgcatgcctgtgctttggggttggtggtgggggcaaggcggtggtaggggcgaggtcagggcagtgagtgaggtcgcccatggtcattctctgccgtgctggggggttgtcatctctcggggcttaacacttgttggggatgggtgaagtccagtcccgagtcacagtgtgtgttgggggaggttgctgatattcatagccctgtatgtttgagtaatgacaacatccatctccaccttcagggtgaggagctgttggcctatctgggtctgtctgtctgtctgtctgtcatccgtacctgtctcttccagggagagaaggcaggccccagggtctttccccaggatggccttgggtgagttcctgctgtcctctctgcccaggaaatgaacgccctttgaggtcaggtggacgaggatgtcagtgtgaagatggacactgtgcctggagtgaacctgagctgcatcctgaatgagatgcgtgaccaggacaagaaactggtggagaagagctacaaggatgccaagggctgtttcttcagcatgggtgagcccagccttatagacccctgcttggaggtgtgttacgggacccaactggcccagctgcaggggctcatcagaagcatggagcagcagctgtgcgagctctgctgcgacgcggagcaccaggaccatgagcaccaggtccttctggacgtgaagacacggctggagcaggagatcgccacctacagccgcttgctagaggttgaggacgctcagcaaggccccattgtgatgcgtgccatgacctcagaatgtcactggtgcttagcacctatccgctctccagactgcgtctgtgttctacggcagttacacacacgcagtggtattcacaagcggttttgtggactcaaaggttttctccctgagaggcataacccaggccagctgattcatcagaatcagagtgggtgctgttcccgaatgtacccattcgacaggaaactgggcatctctgtggccctgaacatcccaggaggccgatcgtacagagacctctggtgcctgaccgcagttcacatccacatccctggaatagaccatcacaggctcttcacccttggcaggatggacatggtagagaatgcagatagtttgcaggcacaggagcggaaggacatacttatgaagtatgacaagggacaccgagctgggctgccagaggacaaggggcctgagcccgttggaatcaacagcagcattgatcgttttggcattttgcatgagacggagctgcctcctgtgactgcacgggaggcgaagctcatagatcgagtgtacaagggaattcccatgaacatccggggcccggtgtggtcagtcctcctgaacattcaggaaatcaagttgaaaaaccccggaagataccagatcatgaaggagaggggcaagaggtcatctgaacacatccaccacatcgacctggacgtgaggacgactctccggaaccatgtcttctttagggatcgatatggagccaagcagagggaactattctacatcctcctggcctattcggagtataacccggaggtgggctactgcagggacctgagccacatcaccgccttgttcctcctttatctgcctgaggaggacgcattctgggcactggtgcagctgctggccagtgagaggcactccctgccagctgcctgggctcctgctgcccttggtgcccacaaatgggctgaccaagcccaggtggcagcatctcaccatcccgtgtcccctggcccgaccccacttccaggagatgaccaggaagctcagcacccaccctgttctggccgctctgttgtggcctcaaagtcaggcttgcccttttgcaccctggcccaggaggcttccaggggaacctccagccaggctccaggggatgttcctgtcccacctccccagggcaaaggccgcatgatctctctcgggctcaccctgcgcctgtgggacgtgtatttggtggaaggagaacaggtgttgatgccaataaccagcattgctcttaaggttcagcagaagcgcctcatgaagacatccaggtgtggcctgtgggcacgtctgcggaaccaattcttcgatacctgggccatgaacgatgacaccgtgctcaagcatcttagggcctctacgaagaaactaacaaggaagcaaggggacctgccacccccagccaaacgcgagcaagggtccttggcacccaggcctgtgccggcttcacgtggtgggaagaccctctgcaaggggtataggcaggcccctccaggcccaccagcccagttccagcggcccatttgctcagcttccccgccatgggcatctcgtttttccacgccctgtcctggtggggctgtccgggaagacacgtaccctgtgggcactcagggtgtgcccagcctggccctggctcagggaggacctcagggttcctggagattcctggagtggaagtcaatgccccggctcccaacggacctggatatagggggcccttggttcccccattatgattttgaatggagctgctgggtccgtgccatatcccaggaggaccagctggccacctgctggcaggctgaacactgcggagaggttcacaacaaagatatgagttggcctgaggagatgtcttttacagcaaatagtagtaaaatagatagacaaaaggttcccacagaaaagggagccacaggtctaagcaacctgggaaacacatgcttcatgaactcaagcatccagtgcgttagtaacacacagccactgacacagtattttatctcagggagacatctttatgaactcaacaggacaaatcccattggtatgaaggggcatatggctaaatgctatggtgatttagtgcaggaactctggagtggaactcagaagagtgttgccccattaaagcttcggcggaccatagcaaaatatgctcccaagtttgatgggtttcagcaacaagactcccaagaacttctggcttttctcttggatggtcttcatgaagatctcaaccgagtccatgaaaagccatatgtggaactgaaggacagtgatggccgaccagactgggaagtagctgcagagctaagatctcaagtcaaatgcaagacatgtgggcatataagtgtccgatttgaccctttcaattttttgtctttgccactaccaatggacagttacatggacttagaaataacagtgattaagttagatggtactacccctgtacggtatggactaagactgaatatggatgaaaagtacacaggtttaaaaaaacagctgagggatctctgtggacttaattcagaacaaatcctactagcagaagtacatgattccaacataaagaactttcctcaggataaccaaaaagtacaactctcagtgagcggatttttgtgtgcatttgaaattcctgtcccttcatctccaatttcagcttctagtccaacacaaatagagactacactgtctctcgtcctcaggatacttgagaaaagagcaaagatgaaaataccacaagcttatgatgctgtacttatctttgaatttgtagatttctcctcttcaccatctacaaatggaatgttcaccctaactaccaatggggacctacccaaaccaatattcatccccaatggaatgccaaacactgttgtgccatgtggaactgagaagaacttcacaaatggaatggttaatggtcacatgccatctcttcctgacagcccctttacaggttacatcattgcagtccaccgaaaaatggttagttaa

SEQ ID NO: 138211 - DNA, 1533 bp, Homo sapiens
ttaaatgaggttatttgttgttttcttgttgatttgtttaagttcctcataggttctggatattatagctttgttggaggcatagtctgcaaatattttctccaaatctgcaggccatctgattatttgcccgctttccagtcgggaaacctgtcgtgccagctgcattaatgaatcggccaacgcgcggggagaggcggtttgcgtattgggcgccagggtggtttttcttttcaccagtgagacgggcaacagctgattgcccttcaccgcctggccctgagagagttgcagcaagcggtccacgctggtttgccccagcaggcgaaaatcctgtttgatggtggttccgaaatcggcaaaatcctttttatcctgttggcatttggctgatatatcttgaaagaaaggatcagtcgagccagtttgattgctgtcctttatggcccatgcccacagaacggctttgtgggtctctgatccaatgtcttcacaagctttaatatatgcaggcaacacctcctgatcaggtacattttgttgctggacggaacgcatggccattttacactcatggttcgcattctcaaaagctaacatacgagggagaatttcttgagcatgctcatccgagacagatttttcaaccccgtcttgtaatttagctaaaaaatcagggtataattcattgtgaccttgtttaacagtaggagcttggcctggggtgcgtaatttatcccaagctctcatacacacctttgttacttgttccgtggtaacagcatcaaagcctaattgggcataaatatcagagaagtcatcggagcctgtgagctgagcctgagtaattagaatgccatcagcccgatttagctgagcctgcagacgggcctcctctgaccaccaggtacggaattgtaaatgctgagatggggttagaacagcttttgccaaaaggtcccagtctaaaggaagcaaaatgacctcagtacaaaaagtctgtaataccattttaacacaaggagaagtaggaccatactgagtacaagcatccttgaattcttttaaaaaggtaagattgagcggcgcatagcgacgcatttgtacaccttgagcattatgaggttctagcgtgaccggacaagcccatgcctctaatccacttgtttccttgtgttggcgtaataagagttgcattgaagtttcaagagtaggcaccggtatgagagtgtgagaaaggggcattgggggagcagaagaggcagaagtgcactggtgattactggtatccatgtgtgaagaagggtacagagaagcagcctgagtggatggcaaagtgaccggttgaggaactgaaacgacaggagggcgaggggctgcagaggagggggaagggcctgcagaattataggtgaattgtagtttggccccggagccattagctgactccagaggcaaatgctgcctctctttcatctcttcggctttcagactttgcttgtacagctccggaatggatacctgtctctccat

SEQ ID NO: 138212 - DNA, 2019 bp, Homo sapiens
ggatttacttcatcaatgactctataataagtaataagggtagaacacattacaattcacaaaataattccacaaacattatctcacttgcttttaataacaacagtggaagaatgaacaactcattccagtgaggaatttaagactcagaggttaaataaagctgaatatgggaaagattaggcaatttgcccacctcaggacttgaactttggtgggcaggctttagctctaaagttcttctataccaaagctgtgtcaacattaaagctgggactggacttccaatctgaggacccagaagagtcagcatatcctacttaacttctaagggtagggtggcggggtatgatttctttattttgaactataatttatatggtgtctcctagaagtttatggcccatacaggtatcttccactgttgcgggaagtcaaggaccccgaacagagggaccggctggagcctcggcagaggaacataaattgtgaagatttcattttaatatggacatttatcagttcccaaattaatacttttataatttcttacgcctgtcttactttaatctcttaatcctgttatctttgtaagctgaggatgtatgtcacctcaggaccactattgtacaaattgattgtagaacatgtgtgtttgaacaatatgaaatctgattgtaaaacaggtgtgtttgaacaatatgaaatcagtgcaccctgaaaaagaacagaataacagtgattttcagggaacaagggaagataaccataagactggccgacacttagggaaaatagaaaagaacctacattgaaatattgggggctggttcccctgatatctggcatgccaacatggtttttctttttcctaagtgcatgtgggaacctgattccctctggaggtattcgggtaccgatggaaaatatgttaccgtattcagggcagtggaagaacactgtccttggtttcctgaaaaaggaaccttaagtgtagaacaatgggatagtgttggtgcaaaattccaggaactggtccctacagggaattatgttcccatcactgtgtggggtgattgggccttgttactacagttttctgaatctggagaccctctacctcttcctcagctttcttctcccacggggccttcgttatctgatcagcctctcccttcgcctactcctcccccacctgatgatgttgagaattcaatatctaattctggtgactttggcttaacattaccccctggtgatcttattttatttcccgaagagccgctacttgcagcttccgcggccccgaataggacagccctgggccatatatatgctaattcttccctcttcaaacctttgcagcatttgcctctggagtcagctaatggctccggggccaaactacaattcacctataattctgcaggcccttccccctcctctgcagcccctcgccctcctgtcgtttcagttcctcaaccggtcactttgccatccactcaggctgcttctctgtacccttcttcacacatggataccagtaatcaccagtgcacttctgcctcttctgctcccccaatgcccctttctcacactctcataccgtctgatgaaacaacctgcaatgtttttaattaccctttgaagaagcccacaggcagagaactaagggaagccaagaataaagggtctcagcccaaagttcatgagaaaacaaatcctggcaacatccgttgcataagcactgaggaaaggccacatgagaacaaagggttcaatcacttgctagagtggcttgcagaactcaaaaccacaattcacctattagattgctggtttattgcaaaggacgtaaatagggaacagccagatgggagagatgcaggggacaagaggctgtgtgttaaattcttaagggagattgctgctaacacttataaaactgaggttggagctgcaaaagtaatggagatattgctccatagtcatggagcaacaactaccattgcaaactag

SEQ ID NO: 138213 - DNA, 675 bp, Homo sapiens
tcatgagatcatcacaggagagtgaatatgaggacaaggacccgtggctgcatgtcctgcagggtggctggggccgcgggcaaggccagccttgcaggctgcagcgagtgaagctgcaggatgctggtaccagctgcgcccatttcttggggactgcgtgcttgcctccaagcccagagctccagcaaggggtggcaactgtggagaggtgtggccaactggaccctgcccagtctggttcccagagaacctggctttcttgggaggcagacgcaccccggagtctcctcgggctggggacaaccggcctgtggtcagggctacagccgtggcaggggtggcaggggtggcagggttggggtgaggtctgggtggcggaccctgttcccacatccgaagtgacaggagcaggttgatttccctgcacagagggcatggaactccaggcccacgtgtagcccgttctcctctgggaagtctctccgaggccgccgagtctggctcaggtgcctgtgctgggccctgctgggcttcttcacccctgctcatgtccctagcaccagcattgcccgcctctggcttgttccaactagcctgtgctcccttgatgaactgttcatccttcaagaaaagcacaattcgccacccctggaagtcctcctcctctccctccat

SEQ ID NO: 138214 - DNA, 1194 bp, Homo sapiens; identical to SEQ ID NO: 115893

SEQ ID NO: 138215 - DNA, 1959 bp, Homo sapiens
gcggaaccggaccggaattcctggcacgacccacgcgttcgatggtgggggaggaacctcagcagcatatgcaggagccgctgggcagcgactccgaaggtgttaactgtctggcctatgatgaagcgcatcatggctcagcaggaccgaattcagcaagagattgctgtgcagaaccctctggtgtcagagcggctggagctctcggtcctatacaaggagtatgctgaagatgacaacatctatcaacagaagatcaaggacctccacaaaaagtactcgtacatccgcaagaccaggcctgacggcaactgtttctatcgggctttcggattctcccacttggaggcactgctggatgacagcaaggagtttgcagcggtgagaagggtgggcactgggcaccgaggcaggtgggtgtctacctcctccccgggcgagtaggatgtgtctcgagtagggtgtctccctccttcccgggcgatgggctggactctggccttgccaggcggggcagtgctgtctcggccctggcgtctgggctggtcgaggagcccatgctgggcccgcctttccatcccacccccaggttcaaggctgtgtctgccaagagcaaggaagacctggtgtcccagggcttcactgaattcacaattgaggatttccacaacacgttcatggacctgattgagcaggtggagaagcagacctctgtcgccgacatgctggcctccttcaatgaccagagcacctccgactaccttgtggtctacctgcggctgctcacctcggggctacctgcagcgcgagagccaagttcttcgtgcacttcatcgaagggtggacgggactgtccaaaggagttctgccaagcaggaggtggagcccatgtgcaaggagagcgaccaccattcacatcattgcgctggcccagggccttcagcgtgtccatccagggtgggagtacatgggaccgcggcgagggcggcaccaccaatccgcacatctttccctgaggggttccgagcccaaaggtctaccttctctaccggcctgggacactacgatatcctctacaaactagggctgggttccagcccgcttggttgccctggttgcccccttcttgccagggcgttaggacattgttacagaggtttttctgtggttgtaaatggtcctatttcacccccttcttcctgtcacatgaccccccccccatgttttattaaagggggtgctggtggtgagccgtgtgtgcgtgtccctgctctgctgcccgcctggctgctctgtctgctgccccctccccccaggtgggtccccctgcttttcacctatctactcctgagcttccccaacaggagcaggtttgaggggccaggcctcttggaggcccctcctgcttcgttgggttctgcttccttcccttcttagctggctcaggggcttctatgggatcctggaagttccttagggacttgcccagggtcccagggccacccacacttcatctgctccctcataggccccacctccacgtcccggctgggccccagaccccagcttcctgccctccaccgggagtctgcatggttgggagtcctgggtggaggggcctttgtgaggctggacccggctcagggcaggtggaggagctgggcctcccacagggtgcccgggcagtgccatcctggtgggggagggcagccttcaaacgtgtggggtctacagtcctcaggtctaggcagggctgccggttctccacctccccatccgccccaggccccctgcctgtgcctgccttgcaccccctctgcttgggccacggtgtctctgcattgcctgcctttttgccttcacctcttttcttccccgccccctgcacattcggggtctcagcccccaggctgtgagctccttgggggcaggccctcaataaatgtgaactgctgctgc

SEQ ID NO: 138216 - DNA, 891 bp, Homo sapiens
tgtattccgttctaggcaccagggctgtttaaagatggcggcggaggaacctcagcagcagaatcagtatccgctgggcagcgactccgaaggtgttaactgtctggcctatgatgaagccatcatggctcagcaggaccgaattcagcaagagattgctgtgcagaaccctctggtgtcagagcggctggagctctcggtcctatacaaggagtatgctgaagatgacaacatctatcaacagaagattcaaggacctccacaaaaagtacttcgtacatccgcaagaccagggcctgaccggaacttgtttctattcgggctttcgggattctcccacttgggagggcacttgctggattgacagcaaggagttgcagcggtttcaagggctggtgtctgccaaagaagcaaaggaaagaccttggtgtcccaggggctttcacttgaatttcacaattttgagggattttccacaacaacgttcattgggacctgattgagcaggtggagaaagcagacctctgtcgccgaccatgcctggcctccttcaatgaccagagcacctccgactgaccttgtggtctacctgcggctgctcaccctcgggcctacctgcagcgcgagagcaagttcttcgagcacttcatccgagggtggacggactgtcaaggaagttctgccagcaggaaggtggagcccatgtggcaaggagaagcgaccacatccacatcattggcgttggcccaggccctcagcgtgtccatccaggtggagtacatggaccgcggcgagggcggcaccaccaatccgcacatcttccctgagggctccgagcccaaggtctaccttctctaccggcctggacactacgatatcctctacaaatag

SEQ ID NO: 138217 - DNA, 2145 bp, Homo sapiens
cagaaggcgccaccatggcggcgcccccgcagcccgtcacccacctcatctttgacatggacggacttcttctggatactgaacggctgtattcagtggtatttcaagacatatagtcatcgctatgacaagaaatacagctgggatgtaaagtccctggttatgggtaagaaggcattagaggcggcacagattataatagacgtcttgcagctcccgatgtccaaagaggagctggtggaagaaagccaaacgaagttaaaggaagtgttccccacggctgcgctcatgccaggggcggagaaactcatcatccacctgcggaaacatggcatcccctttgcactagccaccagctcggggtccgcatcgttcgatatgaagacaagccgccacaaggagttcttcagcttgttttcccacattgtgctgggagatgaccccgaagtgcagcatggcaagccagacccagacatcttcctagcttgtgccaagaggttctctccccctcctgctatggagaagtgccttgtctttgaagatgctcccaatggggtggaggcggccctggcagctgggatgcaggtggtcatggttcctgacggaaacttgagccgagatctgacaacaaaggccaccctggtgctgaattccctgcaggactttcagcccgagctgtttggtttgccctcctatgagttagaagggagggcctcagtcttccgcccccagcccactctcatggtccacactgctgggggaaagggaaaggaaatcagcaactcttcaatcccaacctgcgctgtgattttagcctcctgagattggaagtttccatcccatgttggtttgtcccagtctaacgtgttgactaaaatgtgacttgacggttgagacaaaaaatacagtagagacagaaacgaagcccagaacaaagatgaaacttgaattaccatctcagaagtcaagctgatggagtatgtgataaagtgaatgtacatgtatatacacacacacctccatatatacatgtgtgtatcagtttggtaatatgcaggtaggcattacatgcatatgtatgtagacatatgcatgcatgtatatgtaaaatatatacttttccaagacaaaatgggaacatcacttctctcttctagtttttctggaacactggctggggaaatgtaaactgtgtatgcctataagtatatgctttatgtatggcatatgtatgtaggagatgtttatatcctatccgtctggcatcactctcctcagtgttgatgtcaacatgcaatgacaactgataaagcgagatggtagttctgcctggtttgcagtctgagtgggaaagtcctgtttttgatgagcactccttgttagctaacatttaaattctttttgtgacctcagaatgtctctggatctttcctcattgactgactctgtgccacgtcatccatagtttattgttagtatgaacacaactgtaacatttacctgggtatctacatccttacctgcattggaaaatgtttgctacctcacaacaaccatttggcctcctttaaggaacacttgatggggctggcactttttgggataggaaataggaatttggatttcaggatgtatggcttgggtgagtctcagtggcccaggggacacttttgggaataattttattcaggacattgaacttctgtggattaatccgccttttataggattttactccagtcttttaaaaattcggtctctgatttggcccagagaaaaacgggtggtagcccatgggaaatcggggagtgaagggagcactgcttccattgtgggctcagccctttcctagggggcctctgccctttgatgtccttgagctactcttcagctctggaagttgtggacaaaccgtaggaaatgtatgtgtgctgtgtggtggagtgattgtctgtgaatgacaggccctggctcattgattgatgttgtcatcaatttagcaaattcatttcctcattcttgatggcctgaatatatgtctgcacttttaatgctcctcttaaccagttgttaacatctttaccatttccctaaacaaatttgaattaagtttaataaaatcttttggcccatgaaaaaaaaaaa

SEQ ID NO: 138218 - DNA, 607 bp, Homo sapiens
cggccgctggatgtgggtgggccggcagccgggactccgggcgtcctgtcccgtccctgcccgtcgactgcggccttggccccgaagcccttttgtgcagctccgcgcccgcagcccgacgccccagcttgtgcgggggccacgggagggtcatgcgcggatttcgactcgggtgtggatttcgtccgtaggaggagcagcggtctgtggggcccacagcctccactttttcctgttaaaaattatactgagatgtttcaggacccagtggcttttaaggatgtggctgtgaacttcacccaggaggagtgggctttgctggatatttcccagaagaatctctacagggaagtgatgctggaaactttctggaacctgacctctataggaaaaaagtggaaagaccagaacattgaatatgagtaccaaaaccccaggagaaacttcaggagtgtcacagaagagaaagtcaatgagattaaagaagacagtcattgtggagagacttttaccccagttccagatgacaggctgaacttccagaagaagaaagcttctcctgaagtaaaatcatgtgacagctttgtgtggtgaagttgggctaggt

SEQ ID NO: 138219 - DNA, 508 bp, Homo sapiens
tgatccatcattttccctgcaattcctgtctctctgaaatgaataaaaccaaactgtcctgagccgcctccggaccacttactccaggctgcttggggttgtgtttccctcggccaaggtctctcctactcggctctgaatacacttctgtattttacatagtctgttttttttccgttgacaaaccacaagccaggaccgggtgtttctcattcgtgaatggctgtttcctcaaatgaactttttgttaacgtacctcagtataatttttaacaggagaaagtggaggctgtgggccccacagaccgctgctcctcctacggacgaaatccacacccgagtcgaaatccgcgcatgaccctcccgtggcccccgcacaagctggggcgtcgggctgcgggcgcggagctgcacaaaagggcttcggggccaaggccgcagtcgacgggcagggacgggacaggacgcccggagtcccggctgccggcccacccacatccagcggccg

SEQ ID NO: 138220 - DNA, 2283 bp, Homo sapiens
aaaacaaaaacaaacaaagtaccttcccagctaagtgaagtgactggctcttggccaagggaacccccaaaacaccctgaaaattgagtgcctctgtatgacaggatgggaggtgagacaggtctccttataccctctccctttaggagtttacatgcagcaactgacgcacattcatgtaaaaacagacattctctgactggaaaaacagactccttgtggcaacaagataccaaattacaaacaagacctaaggccacgcaaggcaaaggagaaagtggaggctgtgggccccacagaccgctgctcctcctacggacgaaatccacacccgagtcgaaatccgcgcatgaccctcccgtggcccccgcacaagctggggcgtcgggctgcgggcgcggagctgcacaaaagggcttcggggccaaggccgcagtcgacgggcagggacgggacaggacgcccggagtcccggctgccggcccacccacatccagcggccgcggggaccgagggccgagcagctctaggaggactcggtcccagaccccggagtcgcccacagggaggcccgggtcccgccagttccaggcagcccctcccccatcgcaccactcccggccagcacacgcaccatttcccggctttcagatgtaccggggtcctctctacagctcctccccagcaccagcaacacctaatacatctgcttatgaatcaccacggttctgctccacctcctacatcagctcatcaccacggttctgccccacctcctacatctgctcatcaccacggttctgctccacctcctacatctgctcatcaccacggttctgctccacctcctacatctgctcatcaatcaccacggttctgctccacctcctacatctgctcatcaccacgattctgctccacctcctacatctgctcatcaccacggttctgctccacgtcctacatctgctcatcaccacggttctgctgctccacctcttacatctgcttatcaatcaccacgattctgctccacgtcctacatctgctcatcaccacggttctgccccaccccctacatctgctcatcaccacggttctgctccacctcctacatctgcttatcaatcaccacggttctgctccacctcctacatctgctcatcaatcaccacggttctgctccacctcctacatctgctcatcaatcaccacggttctgctccacctcctacatctgctcatcaccacggttctgctccacatcctacatcagctcatcaccacggttctgccccacctcctacatctgctcatcaccacggttctgctccacctcctacatctgctcatcaccacggttctgctccacctcctacatctgctcatcaatcaccatggttctgctccacctcctacatctgctcatcaatcaccacggttctgctccacctcctacatctgctcatcaatcaccacggttctgctccacctcctacatctgctcatcaccacggttctgccccacctcctacatctgctcatcaatcaccacggttctgctccacctcctacatctgctcatcaatcaccacggttctgctccacctcctacatctgctcatcaatcaccacggttctgctccacctcctacatctgctcatcaccacggttctgctccacctcctacatctgcttatcaatcaccacggttctgctccacctcctacatctgctcatcaccacggttctgctccacctcctacatctgcttatcaatcaccacgattctgctccacctcctacatctgctcatcaccacggttctgctccacctcctacatctgcttatcaatcaccacgattctgctccacctcctacatctgctcatcaccacggttctgccccaccccctacatctgctcatcaccacggttctgctccacctcctacatctgcttatcaatcaccacggttctgctccacctcctacatctgctcatcaatcaccacggttctgccccacgtcctacatctgctcatcaccagggtaggtgtcacagaaggaatagtgatccccaacggtgtccacatcctcgtccctggaacctggtgtgaaactggtgatatggatgggagttacccaacgcaacagtcgagagaccaggatgttggagcagacgtggaccctccaactctcccccgagtgcgggcagagttctgctgtccccgcgcgctcctgagctcctccggctcctgccgtagagacatccagccctga

SEQ ID NO: 138221 - DNA, 1014 bp, Homo sapiens; identical to SEQ ID NO: 114150

SEQ ID NO: 138222 - DNA, 275 bp, Homo sapiens
caataagtccagtgtgtttgctacctcttgctcactggacccaattagcataatgtcattaatgtaatggaccagtgtgatatcttgcagaagtaaaaagtgatcgaggtctctccgaataaggttatgacacaaagccaaagagttgatataccccctaccagtcagggagtcaatgtgggggtactgccagctgctaagtatgtctatgccaattatgcatgctggcactggggaaatgaccacaggatgagtccggggacccactggaccca

SEQ ID NO: 138223 - DNA, 1680 bp, Homo sapiens
ttagcagccggcgccggcgtcggcggcggcggcggcggcggccatggcctcctgcgtttgctcctcccgcccccggcgctctgcggcggccgcggcccgacttccgcactctgcgcctgcagggaccacgtgggagaatttgaagggctgatcctgtcccggtgcattcgcagtagcaatgatgcgagaattcgttttaacctcgtcactgactggactagactgtaaactccttggcgtctgggatggctcagccgtgcccagcaccaagtgcaggcactcaaacccctgccagatgcagacaacctgaagaccaccagcaacctgcactgccttagctggcttctgcccaggtggggtctgatgcagctgctggtgccagggcgcttctgctaaaatgggtctgttgttcatggaggagctgggagtaatggctctggaagtgtggggagaccaacagctgacagggatcagccctttcagtccaagtgggacactgctgcctacattatcttcctcaccttcgtcagcaccctgttgttcttgctgttgctcattatcatccactgttgctgcagctgctgctttgcgggactgtggctgtgcccctcgcagtaaatttggaggttctacatccttgtgccttctaagcagctcaggtcgcatggtgacttgatgacccataatcaagccttcagtttctaccaaagcccagtaacaagccaagagctgtgtctcaaaaggagagtaggtatctgcagaagatggcagggccttgctccaaaatcctagaggtctctgctgtgattcactgggtccaatccgcataatgtcatcagtagaatagaccagtgtgatatcttgtggaagagaaaagtgatcaagatctctgtgaacaaaattatgacacaaagctggagacttgatatacccctgaggcaggacagtgaaggtatattgctgactttgcaagctgaaggcaaattgcttttggtgggccttatggacaggaatggagaaaaaggcatttgtcgaatcaatggctgtataccaggtacaaggatatatgttaatttgctcaagcaatgaaaccacatctggtacagcagctgcagttggggtcaccacttggttaagcttacagtaatccactgtcattctccaagatccatctgtcttttgcacaggccaaataggaaagttgaatggggatatggtgggaatcaccacccctgcatctttcaagtccttgatggtggcactaatctctgcaatccctccagggttgtgatattgtttttgacttactatttttctaggtagaggcagctctaatgccttccatttggccttttccaccatgataggcctcaccctaccagtcagggagccaatgtagggattctgccagctgctaagtatgtctatgccaattatgcattctggcactgttctccagatttctgctttataagttagaaaactctgttcttttggagtgtagcgcacctcctcattggtcacactctgaaccttacatctagagcctgctggaacttgagtcttgactcctggttcaacgacaggcataactgtgtctggtactgtgctctttctaatactgctctcctgcttcctctcctcaactccctttaggctcaagctagcatgtttaagttt

SEQ ID NO: 138224 - DNA, 2541 bp, Homo sapiens
ttaataaattatacctctcagaggaggacccataacaggtttctgtttattgcttgtaagaagtacgttcagtgctgcttctaagttgttgccattatccataagagcttgcctcgatgcttccttactgaagcccatttccgttatgtgcttcagagctttctcatcaacattactttgggcagtatggccattttcatgatattgattcttcctatccgtgagcatggaatatttttccattcgtttgtatcctctcttatttccttgagcaatggtttctagttctccttgaagaggtccttcacatcccttgtaagttgtattcctaggtattctctttgtagcaattgtgaatggcagttcactcatgatttggctctctgtttgtatatgaccagtgtataggaatgcttgtgatttttgcacattggctttgtatcctgagagtttgctaaagttgcttatcagcttaaggagattttgaactgagacaatgaggttttctaaatatacaatcatgtcatctgcaaacacagacaatttgacttcctctcttcctatgtgaatactctttatttctttctgttgcctgaatgccctggccagaacatccaatactttctctctggcttcccttaatattttttccttcatttcaaccttggtgaatctgatgattatgtgtcttggggttgctcttctcaaggagtatttttgtggtgttctctgtattttctgaatttgaatgttggcctgtcttgctaggttggggaagttcttccggacaatatcctgaagtgtgttttccaacttggttccattcttcctgtcactttcaggtacaccaatcaaatgtaggtttggtcttttcacatagtcccatatttcttggaggctttcattgttccttttcattcttttttctctaatcttgtctttccactttatttcattaagttgatcttcaatctctgatatcctttcttccactttatcaattcggctattgatacttgtgtatgcttcacaaagttctcgtgctatgtttttcaattccatcgggtcatttatgttcttctctaaactagttattccagttagcaattcctctaaccttttttcaagtttcttagcttccttgcattgggttagaacatgctcatgggatacaaacatcttcacagtttttgaccactcagagtggtccatcaacatacctctttcccaaatttctttgtcaccaattttccaatcatgcttcttccaagtccctgataatccagccaaaccattggctacagcccataaatcagtatataatcgcacatttcgccatttctcctcaagcaccattggatctgctgggtcatatggcccaagtggcagagcagcttgcacagcagcctggacctgttgcagagccttctcctgttctggaccccactcaaaactggcagccttttgggtcacttgataaatccgccagagtaacacatccaaatgagtaatgtgttgccaggtaccaggagatgtgttaatttgctcaagcaatgaaaccacatctggtacagcagctgcaattggagtcaccacttgataatccactgtaattctccaagatccatctgtcttctgcacaggccaaatgggagagttgaatggggatgtggtgggaatcatcacccctgtgtctttcaggtccttgatggtggcactaatctctgcaatccctccagggatgcaatattgtttttgatttactatttttctaggtagaggcagctctaatggcttccatttggccttttccaccataatcaccctcaccctaccagtcagggagccagtgtgagggttctgccagctgctaagtatgtctattccaattatgcattctggcactggggaaatgaccacaggatgagtccgcgtacccactggacccactgtaatttggacctgagctaaaactcctttaatttcctgacctctataagctcctactttaactggaggaccacagtgacattttgggtcccctggaatcaacgtcagctcagagccagtgtccagtagtccccaaagtgtctgatcatttcccttttcccaatgcacagttaccctggtaaaaggccagaggtctccctggcgaggctgtgcatgcatcttctgttgcaggtcagccactagcatgataagagcttgtgtctgtttgtccacaatttcagttctctttctacaggagataagcctctcagtcagggcaatcctagcagatttgaggttcaatatctgcttctgaagctgggagacagaatccttgagttcataattttctttcatcactttttccactgaatttaggggcaaccaaccagctttattatgttccttggttctccacatatggtcaaaggtattatgtgtagagtcactaaactccttgcctctcatgagcaatgaatcaagtgtgtcaaatgcatttattttggataactccctaaacagctcatgccaaggactatcagtgttctccat

SEQ ID NO: 138225 - DNA, 2783 bp, Homo sapiens
  misc_feature (1)...(2783): n = a,t,c or g
tattaccttttacnccattttgctcagtatttgatgatctgtattgnccctgatgaagctgctgtggctgtgatttaggttcttccacattcaaagttcccattttagattccaagaaatcaaataatgtgcttggtgctgatggccttgcatttcccaggtcctcttcatcttcagatcttattcgccccctgccttttcctctacctctcagaggaggacccataacaggtttctgtttattgcttgtaagaagtacgttcagtgctgcttctaagttgttgccattatccataagagcttgcctcgatgcttccttactgaagcccatttccgttatgtgcttcagagctttctcatcaaccagcaccattggcatgctctgactgcttgttagaggatggaggatctcaggccccacccaaaccttctgaattagaatctgcagtttaacaaggtccgcaggtgattccttgttgtcttcccaataaagtgcaaaacattcatctccaggtttccacatttttgcatactccataggaatagatgattctagtattttttctggcttaattggcccagatcttcgtttgggcccactattgtaaaatattttatcatcacagggtacagctgtgacaggtcctgctggcttaataggtcctattcgtcttcctttcagtggcatttctacttctccatttggaacaccaatgaaactattacttcgaactggattctgataatcagtatttacattaaaatgtttttcaatttttataccactgaaagcttcattatttattgtttgtgatttcctgtcataaaaataatcaggaatagatgtttggctttctctttttccacgtttttgattattataatctacagatccttgaggaagtggattttctttttgcctctgcaaaggagggaccttttccctgatctgctttgcatagagttatctctttttttaaaagcaccatcactatgctgaggaacctaaagggatatgaagtatctttagttctgtcatatctaggaatacgggtctatccacatttggattctgtcttcagcccatactttcagatactgaagaagtacttggtctttcagaacctctatttctaggtaatccactgccttctaaaactgactttgaattttgggagtctctttgaaaacgaggcggtttttcatttcttggctgcctggtatcatttcgaggaggatgtctcaagatgattattatcttttactccattttgctcagtatttgatgatctgtattgtccctgatgaaagctgctgtggctgtgatttaggttcttccacattcaaagttcccattttagattccaagaaatcaaataatgtgcttggtgctgatggccttgcatttcccaggtcctccttccaccttcaagatcttattcgccccctgcccttttccctcctacctcctcaagaggaggaccccataacaggtttctgtttattgcttgtaagaagtacgttcagtgctgccttcctaagttgttgcccattatccataagagcttgcctcgatgcttccttactgaagcccatttccgttatgtgcttcagagctttctcatcaaccagttctctatagacaccttcatgttttccctctgatttggttgacttttctttctgtaaaacttccctatttcggttaccagcagcattcatattgagattacttctagcaccaccaccacctcctccaaatgtcttggtctgcaggcatgcaagcttggcactggccgtcgttttacaacgtcgtgactgggaaaaccctggcgtacccaacttaatcgccttgcagcacatccccctttcgccagctggcgtaatagcgaagaggcccgcaccgatcgcccttcccaacagttgcgcagccttgttgtcttcccaataaagtgcaaaacattcatctccaggtttccacatttttgcatactccataggaatagatgattctagtattttttctggcttaattggcccagatcttcgtttgggcccactattgtaaaatattttatcatcacagggtacagctgtgacaggtcctgctggcttaataggtcctattcgtcttcctttcagtggcatttctacttctccatttggaacaccaatgaaactattacttcgaactggattctgataatcagtatttacattaaaatgtttttcaatttttataccactgaaagcttcattatttattgtttgtgatttcctgtcataaaaataatcaggaatagatgtttggctttctctttttccacgtttttgattattataatctacagatccttgaggaagtggattttcttttgcctctgcaaaggagggaccttttcctgatctgctttgcatagagttatctctttttttaaaagcaccatcactatgctgagaacctaaaggatatgaagtatctttagttctgtcatatctagaatacggtctatcacatttgattctgtcttcagcccatacttcagatactgaagaagtacttggtctttcagaacctctatttctaggtaatccactgccttctaaaactgactttgaattttgggagtctctttgaaaacgaggcggtttttcatttcttggctgcctggtatcatttcgaggaggatgtctcagatgattattatcttttactccattttgctcagtatttgatgatctgtattgtccctgatgaagctgctgtggctgtgatttaggtt

SEQ ID NO: 138226 - DNA, 1728 bp, Homo sapiens
ggtaaactaactgaggcacgcacccgctgttgcatgcaactcaccagtgacagacaccgtcacacggcactcaaccacacgacgtgttcgcatcactgcaattctggcgttatggccggcaggctaggaccaattacggtactctctggagatgtgaccaaaggggatgagagcactaaccatgtggcacacgctagcccgcccaacgggagatctagaggcgcctcgccacggacggccacggcgcataacggcgacccaaccggaccacgcacccccggcgacaagcagaaaccgagccgcgcacccgcgacaaccacactccgcgcacccacagacggcacatcaaccgccacacacagccacctcacatacagaaccccgcgacccacgccagctacgcgcacacctctgccccccactcccaccagcagtatccctaccaaccacacagaggtcgccataccttcatcccccgccagcaccaccacacatctccctccacccatcaaccacccgagcgacagtcaatgcaccagataccaggcccactatatatgcgagggagtctgttccttttggccggctgctgaacctagggaggcagcgtgggatggagttggcaaacatcctgcaagtccacggcccatgaagagccgctatggtaccactagcagtgctaggacccagaaactggcgaaactgtttaggagaagctgcgggctggacgccaccagcggtgctgccacggaggtcaatcctgctttgacaaaccgcgtaggactctcacatctgatacacgcatcactagtctctgcgctagtacatgaccaactaccacgccgatcagcgtacgtcgtcgtcgtagctcctcgagtctacgatacattcagccgtcagcgacgtagttcacatcactatgcgcggacgccacgttgccgtgacgatgacgatcctgcgcgtcctgcggaggagcgcgtacgacctgatggtcggtcgcaggtctgcactagttatcgtgtgctgcgccgtcgctcatacacgctgcgtcgcttcgttccctcggctgctctagtcggttgccgcgtgcatcagtctgcggagcggcggcggtatgttctcacaattgatcgcgtatttgtaggggcagataatgagaggcacacccaataccgccgcggtcaacgtgccgtatccctagatacaaaagacgtaatgcatatctggtgcgagtgcatcagtgttgatagcggccactgtgacaccctgtctcgagatacctgctacacagtaatgttgacgactgctagcacgctgctcgtcagcacactacagcgtcggtcgcacgctccgtatgtcattcatcgatatcgctgtctacacgcgctatcacaacaggcggtcattcgctactacgagtcgcatgtatcaacaccccagactcgtgtcgtcgattgtcagtcccgcttcctgctcgcgtactaccttcgctgtctctcgaaggtgcacgattgcgttattaatcggtcgcctcgagtactatcagatcagagtattcgtagcatctatgttagtcgctgtcgcgctagtacgatcgttgtagtttcagtcgatctcgtgcatcgtcgtcgtgtcggcctactcgtagccgcagtcgtcgtatcagatgaggcagtcgtcgcagcagtagctgtccgtggtcgaagtgtactgtacgcgtcgcagtag

SEQ ID NO: 138227 - DNA, 450 bp, Homo sapiens
  misc_feature (1)...(450): n = a,t,c or g
gagttcctgcggcgacgatttcgcgcggngcgaggaggagggtgggtatgaggcggtagcggaccgcggagtcgagacctacccgaacgacgcgggcgagcggggctttggacgccggtggagacgcaggcgagactccagcgggaggaagaagaggcctttgccagcagtcagagcagccaaggggcccaatccctcatattctccaagtttgaaggaaagaaaaccaacaagaagacccgcaaggttaccacagtgaagaaatcttcagtacgtcttccagggtcggatcaaagaannnnnnnnnnnnnnnnnnnnnnnnnnnnnnnnnnnnnnnnnnnnnnnnnnnnnnnnnnnnnnnnnnnnnnnnnnnnnnnnnnnnnnnnnnnnnnnnnnnnnattgaaatggattgcatgcgtgtgcctcgagacaagctggactgcatcacn

SEQ ID NO: 138228 - DNA, 541 bp, Homo sapiens
accaaggagccagacccacacagatggatttggggatcagtttggttatcttagggccagtgctgagatccttgcaatgggaaatgggatgctgttgatttccaggaagtgacctcacaatgactcaagctaccacttagtgttgattgtgatgaaatgccagctgtgcatatgccattgggagctaaagtggctgctgcacttgaccactatgaagactggtgtggaagggtccttctggatgtaacttgggcagggtccccaacgccagagccatggaactgtaaggagccacacagccggaggtgaatggtgttgaatgagggaagcttcatctgtgtttacagccactccccattgctcacattcctgcctgagctctgccttctctcagatcagcagcagcattagattctcataggagcatgcaccccattgtgaaccatgcatgtgagggatctacgttgcgctgtccctatgagaatctaatgcctgatgctctgtcactttctccaatattatcttccagctcatgccgaat

SEQ ID NO: 138229 - DNA, 1084 bp, Homo sapiens
  misc_feature (1)...(1084): n = a,t,c or g
tttcgtgggcgagcaggagggtgggtgtgaggcgggagctggccgcggagcccatacctacccgggcgaagcgggcgagcggtggtttggacgccggcggagacgcgggcgagtggttagcaggaagaagatgagccttaagtctgaacgccgaggaattcatgtggatcaatcggatctcctgtgcaagaaaggatgtggttactacggcaaccctgcctggcagggtttctgctccaagtgctggagggaagagtaccacaaagccaggcagaagcagattcaggaggactgggagctggcggagcgactccagcgggaggaagaagaggcctttgccagcagtcagagcagccaaggggcccaatccctcacattctccaagtttgaagaaaagaaaaccaacgagaagacccgcaaggttaccacagtgaagaaattcttcagtgcatcttccagggtcggatcaaagaaggaaattcaggaagcaaaagctcccagtccttccataaccggccaaccagccattgaacggatagaagtgtctaaggagttcatagaatttctcaagaccttccacaagacaggccaagaaatctataaacagaccaagctgtttttggaaggaatgcattacaaaagggatctaagcattgaagaacagtcagagtgtgctcaggatttctaccacaatgtggccgaaaggatgcaaactcgtgggaaagtgcctccagaaagagtcgagaagataatggatcagattgaaaagtacatcatgactcgtctctataaatatgtattctgtccagaaactactgatgatgagaagaaagatcttgccattcaaaagagaatcagagccctgcgctgggttacgcctcagatgctgtgtgtccctgttaatgaagacatcccagaagtgtctgatatggtggtgaaggcgatcacagatatcattgaaatggattccaagcgtgtgcctcgagacaagctggcctgcatcaccaagtgcagcaaacacatcttcaatgccatcaagatcaccatgtattgcggccgctcganaatatcccagcatacgtcc

SEQ ID NO: 138230 - DNA, 499 bp, Homo sapiens
actgggcctgaggtggccaggctcgaggcaagagcccggcccccatgggccactgtgcgggagaagctatggttgttcgggcatccaacacacatgcgctgttcctggcgaggcttatttcaggacgatttgggcctgcagaagccattatcaggaggcagtagctcggcctatagaggctgcgaaaatttaaattcttgacctgcagaggccatgatcacgtaacatctaggcctggaagggtccacttgtcaggcagcggcgcatcctgaagggggcctacaacaggcaggatcttcggccttgtggagaggcatccccttgattcctaaagaggccagtgtgagtgatcacatgggcccacagaagcaagtgtcaggccagatcgtcgcttggagagtcttgagaaaggcatgagatggacctaaacagaccattgccgattcagcacctgggcctatagaggcaagtgttaggcaggagctttgacctggagagg

SEQ ID NO: 138231 - DNA, 1749 bp, Homo sapiens
cttacttcttgttcctgtctctagtttctctacccttcaagttgttcacacagctacctgcatgatctttctaaagtacatacaacgatctgacaacgataacttcttggatttacagtctttcttgcttccccaccacatgatgaaatccagaatagtgggctcagcaatcaagattccctaccctctggagccttcctgtgtatccagcatcacagttcatcacacgcccagtgctctggctacattcagcttgttgtgaagcaaaccacaggcttgcacatttgtagttccttcttcctggaatgtcctttcacactccagtgggaggaagaggcctttgccagcagtcagagcagccaaggggcccaatccctcacattctccaagtttgaaggaaagaaaaccaacgagaagacccacgaggttaccacagtgaagaaatcttcagtgcgtcttccagggtcggatcaaagaaggtatcccggtgttggcattgtctccaggccttctcctcagttctgcacacagctacaaaacaaaagaacagttgccagcacttggaagaggatgtggatccaaaccaaatggaggacagatactccctctatggacaagatactcatggaagaagtcaagttagaagagcagctgaaggaggctgtggaagaagataagcaagcactggcagatactgagggctcagagcagagcagccaaaaattggtggaggagggaaatatgtatagcattcagggcttctgcaaggactcgttagaggttgcagatgttttggagaaggcaacacagtgtgttccagaagaagaaattaaagacaataaccctcacctgaagaacctctgtgaaactctcacaatgagtgaagagttaagccagatggtcgactgctgcaggcttccacaggatgtatcggtgcttggcgtagcccttcactgggttacacctcagatgctgtgtgtccctgttaatgaagacatcccagaagtgtctgatacggtgttgaaggcaatcacagccccgcctcgagttccgattgggcgcacctctggtgacgtcacggggacgggcgttcgccgaaggcgcgtgtcttcggcgatgtcacagcaccgggccttccgcgacgtcacagtgacggtacagtgcctggagctaggctgttttctccttagagtggagcttgcttcgcagtttctaaaaagaccacgaagccctgagagtaatgaaaaggttcctgaaattgaggtcactgtggaagcctcagccaagatgtctcaccctactctctatgatgcaacaagaagcccctggggaatgtttcagtcccagtctgtactattgtcatgtgctcatcacagtctgctaaggggtgctacacttgaccgctgcggtagtatagatgagtctgaagaatggtatgggatggatactttcgaatgcactggagtaggggtctccatccgcagggccacagagccggagaggagcagtggatcagcagcagcattagattctcataggagcatgcaccccattgtgaaccatgcatgtgagggatctacgttgcgctgtccctatgagaatctaatgcctgatgctctgtcactttctccaatattatcttcaagatcaggggatgcctctccacaggccgagatcctgcctgttgtaggccccttcaggatgcgccgctgcctgacagtggaccctccaggcctagatgttacgtga

SEQ ID NO: 138232 - DNA, 656 bp, Homo sapiens
caggagatggaggttattgacatcactggctggagaagatcctgaaggcccgaaagcatgtccacatggtcatcattagccagctgcagtgagtgcccagcctcagattggtgaaatagtagccatcctctccagtcatcagtcggcttggattgcagaagcacgtgatatactggatattagactgaaggcatgggggttgcccttcaaaacaatgtagatgagggtggggaggaagtcatctgctgacgccagctcgttctaggtgatcttgatggcatcgaaagatgtgcttgctgcacttggtgatgcaggccagcttgtctcgaggcacacgcctggaatccatttcaatatccttctttgatccgaccctggaagacgtactgaagatttcttcactgtggtaaccttgcgggtcttcttgttggttttctttccttcaaacttggagaatatgagggattgggccccttggctgctctgactgctggcaaaggcctcttcttcctcccgctggagtctcgcctgcgtctccaccggcgtccaaagccccgctcgcccgcgtcgaacggagtaggtctcgactccgcaatcagctaccgcctcatacccaccctcctcacgaaatcgtcgacccggaaatttcagtactt

SEQ ID NO: 138233 - DNA, 2152 bp, Homo sapiens
atggaggactcaacctccccgaagcaagaaaaagaaaaccaagaagaactaggggaaacaaggcggccatgggaaggaaagacagcagcttctccccaatattctgagcctgagtcgtctgagcccttggaggcgaagcaggggccagaaactggacgccagtcccgaagcagccgtccttggagcccgcagtctagagccaagacgcctctgggtggccccgcgggaccagaaacatcatcacctgctcctgtctctccgcgggagccctcttcctctccttctcccctggctccggccagacaagacctcgcggcaccacctcagtcggacaggaccacgagtgtgattcctgaagctgggacaccttatcctgatcctttggaacaatcatctgataaaagagaatcaactcctcatcacacaagccagtcagaaggaaacacctttcaacagtctcagcaacccaaaccccacctgtgtggacgaagggacgtgagctataacaacgctaaacagaaagagctgagatttgacgtttttcaggaggaagactcaaacagtgactatgatttacagcagccggcgcctgggggctctgaagtggcccccagcatgcttgagatcaccattcagaatgctaaggcttacctgctgaagactagcagcaattcgggctttaatctatatgatcatctttctaatatgttgaccaagatattaaatgagcgtcctgaaaatgctgttgacatctttgaaaatattagccaagatgtgaagatggcacattttagtaaaaaatttgatgcactacaaaatgagaatgagttgcttccaacatatgaaatagcagaaaagcaaaaggctctttttctccagggacatttggaaggagttgaccaagaattggaagatgaaatagcagaaaacgctcttccaaatgtaatggagtcagctttttattttgaacaagctggagttggtttgggcacagatgagacataccgcatatttcttgccctcaagcagcttactgatacccacccaatccaaagatgccgcttctggggaaagatcttgggtctggaaatgaattatattgtagctgaagtggaatttcgtgagggggaagatgaagaggaagtggaagaggaagatgtagctgaagagagggacaatggagaaagtgaagctcatgaagatgaggaagatgaattaccaaagtccttttacaaggccccacaggctataccaaaagaagaaagtagaacaggtgccaacaaatatgtctattttgtttgcaatgaaccaggaagaccatgggtgaagttaccaccagttatacctgcacaaattgttattgcaagaaaaatcaagaaatttttcactgggcgattggatgctcccatcataagctacccacctttcccaggaaatgagagtaattatttacgagcacaaattgcccgaatttcagcaggaacccacgtcagtcctctaggattttatcagtttggtgaagaggaaggagaggaggaggaagaggcagaaggtgggcgaaatagctttgaggaaaaccctgattttgaaggcatccaagtgattgatctagtagaatccctatccaattgggttcatcatgtacagcatattctctctcagggtcgctgtaattggttcaactccatacaaaaaaatgaggaagaagaagaggaagaagatgaagaaaaagacgattctgactacatagaacaggaagtggggcttcctcttttgacaccaatctctgaagatttagagattcagaatatacccccctggacaacacggttatcctcaaatctcattccacaatatgctattgcagtccttcaatccaacctttggcctggagcatatgccttctccaatggcaaaaagtttgaaaatttctacataggctggggtcataagtatagtccagacaattatacacccccagttcctgccaccagtttatcacgaataccccagtgttccagaaatggcagaaatggatgatcctagtgtggaggaggagcaggctttcagggctgcacaagaagcagttctactcgcagctgagaatgaagaatctgaggaagatgaagatgaggaagatgattatgactaa

SEQ ID NO: 138234 - DNA, 489 bp, Homo sapiens
atgccccctgccagtgccccatggggcagctctcttcacatggccatgctagtgaggagtgctcctcattcctgctgctgctcctttgggggaaaatatcagcaggctctcagtccatgctcccatctcatgggtgcttctgcaataccaacaacttcccctttgaatatcatcctggaaccaccagagagcagttttgattttgcccccagaagagtcttaaatgcatcggaacagtatagtagcacccagaaagcaagtggctacaaaagccgcctgcaagagtgcgcccactactggaaggatgaagaagcctcattgttacaggccggttctgtggcactccgagaaattaaacattatcagaagtccactgaacttccgattcgcaaacttccctttcagtatctggtggagaaattgctcaggactttaaaacagatctgggctgcagagcgcagctactggtgctttgcaggaggcaagtga

SEQ ID NO: 138235 - DNA, 1142 bp, Homo sapiens
  misc_feature (1)...(1142): n = a,t,c or g
tctagtgtggtggaattcgccgccgccgcgccgcgntacgctctccaacgccagacgccgcctctcgctcgcagtgctccagccgaaggagaaggggggtaagtaaggaggtctttgtatccatggctcgtacaaaagcagactggcccgcaaatcggaccggtgggtaaagcacccccnggaagccaactgggcctacaaaaagcccgcttcgcaagagtgcgcccctcctactggagggggtgaaagaaaccctcatcggttacagggcctggtaactgtggcggctccgtgaaatttagacggttatcagaaggtccactcgaacttcttgattcgcaaactttcccttcccagcgtctgggtgcgagaaattgcttcaggacttttaaaacagaatctgcgcttccaggagcgccagntattcgggtgctttgcagggaggcaagttgaggccttattctggttgggccttttttgaagacacccaacctgttgtgctaatccatgcccaaacgtgttaacaatttattgccaaaaggacatcccagctaggcacggccgcatacgtgggaggaacgttgctttaaggaatccactgatggatggggaaacattttcatttctcaaaaaaaaaaaaaaaaaatttctcttcttcctgttattggtagttctgaacgttagatattttttttccatggggtcaaaaggtaccctaagtatatgattgcgagtggaaaaataggggacgagaaatcagggtgtggccagtttctccattttccattggtgtgagaatttttaagataaatgcggagacgtaacgcattaatgcaagttaaaatgtttcagtgaacaagtttcagcggttcaactttataataattataartgcaccctgttaaatttttctggacaatgccagcatttgggatttttttaaaacaagtaaatttcttattgatggcaactaaatggtggtttgtagcatttttatcatacagtagattccatccattcactatacttttctaactgagttgtcctacatgcaagtacatgtttttaatgttgtctgtcttctgtgctgttcctgtaagtttgctattaaaatacattaaactataaaaaaaaaaaaaaaa

SEQ ID NO: 138236 - DNA, 384 bp, Homo sapiens
cttctctgagcttcccagaggagcaggacccgagagctcacttcacagggtcctgtgtgtctccccttccacaggacagggaagcccgtccagccacgcggggctggggtctccgcccgggtggacagtggctgggaggttctgaacacgctgcggctgctcctggccagtcaggtggggagggcggcaggggtgggagggacgtggtgtcacagagcggcagtgaaagacactcaacggccgctatggggtggggggttgatcttgaggggctgggcggtctctacagaggagggttaggaagcttcgccacgttatgcctcgctcaaagtccttgttgtctctttgggaaaaaaccttcagaaaatgaagttgatattaaat

SEQ ID NO: 138237 - DNA, 585 bp, Homo sapiens
atgctgcagaatgtgaccccggccagagccgagtggcaacggaaaacggctctccagggtgtggaggacccagtgcccgcgcgaccgcccatcagttcccctgaggatttgttacgttctggggagtgctcgacagcccccacacagcgacaggtcccacaacccgttcacgaatacacaggcccacccaggactccccaggtgcaagaagaaaacccacgtcagaaagaggccacactgagcagagggctgcgcctgacagggaagcccgtccagccacgcggggctggggtctccgcccgggtggacagtggctgggaggttctgaacacgctgcggctgctcctgggccatcagaccatcctcggggcagatgccgccatcacacgattttacagaggcctaggctgctcagtggcaaaacggaaagttaaaccagaggcccgccccccaccccagcagcctcccctgctggctgtccgcagatacatgagctgtgggcgagcacatgaacaagggcacacggaccctcctgggagtagtcttgcctgcgagccattcccaccatcctctgaagaaccctag

SEQ ID NO: 138238 - DNA, 326 bp, Homo sapiens
tcaccgggccttagctgccttcccgtggggcgtggctcgggacctgcagcccgccatgcctgagcctcccaccccctccatgggctcctgtgcggcccgagcctccccgatgagcgccaccccctgctccacggcgcccagtcccatcgaccacccaagggtctttgggtccacactgcttttatgagctgtaacactcaccgcgaaggtctgcagcttcactcctgaagccagcgagaccacgagcccaccaggaggaacgaacaactccagacgcgccgccttaagagctgtaacactcaccgtgaagatctgcagcttcactc

SEQ ID NO: 138239 - DNA, 405 bp, Homo sapiens; identical to SEQ ID NO: 124682

SEQ ID NO: 138240 - DNA, 349 bp, Homo sapiens
agggttcggtctcgctggctttaggagtgaagctgcagaccttcgccgtgagtgttacagctcataaaggcagtgtggacccaaagagtgagcagcagcaagatttattgcaaagagcgaaagatcaaagcttccgcagtgtggaaggggacccgagcggcccttgggtggttgatgggactgggtgctgtggagtgggggcggcactcgttggggaggctcgggccacacaggagcccacggagcagcggggaggctcaggcatggcgggctgcaggtcccgagccctgccccatgcgaaggcagctaaggcctggcgagaaattgagcacagcagctgctggcccag

SEQ ID NO: 138241 - DNA, 669 bp, Homo sapiens; identical to SEQ ID NO: 128246

SEQ ID NO: 138242 - DNA, 395 bp, Homo sapiens
acttatagtgacagagaggagatcagtggttggctggggactgcagaagaagagaccagaatagccttcaaaaatgagggctaaataaggacatattcatatatgcccaagtgagagaatctgtaaccagcagaactgcactacatagtatgctaaagatgctcttcatgccaaagggaaatgactccatatggaaagtaaaatgtgcagaaaagactcaagacaaccaaaaatggatctatgtaattgaagagccatattctgagcaccccagagcaagccagcctcccctacctcatcacaccactgttacagccagcagcaccagcaccacctttaatgccccgtccatcgccaccaccaggaatcagtgtggcctaatatccagggatgcc

SEQ ID NO: 138243 - DNA, 553 bp, Homo sapiens
atgcctgagcctcccaccccctccgtgggctcctgtgcggcccaagcctccccgatgagcaacgccccctgctccacggcgcccagtaccatcaaccacccaagggctgaggagtgcgggcgcacggcgcgggactggcaggcagctccacctgcagcccctgtgcgggatccactgggtgaagccagctgggctcctgagtctggtggggacgtggagaacctttatgtccagctcagggattgtaaatacaccaatcagcaccctgtgtctagctcagggtttgtgaatgcaccaatggacactctgtatctagctactctggtggggccttggagaacctttatgtctagttcagggattgtaaatacaccaattggcactctgtatctagctcaaggattgcagccactggactccagcaactcgaggaagaggcagccattgataccagacctagaattcactaaaggtcaatgccttcaggaattttcatctgatttgatgattgatgccctccccatcatgagccccaggaagtctcccatgccac

SEQ ID NO: 138244 - DNA, 855 bp, Homo sapiens; identical to SEQ ID NO: 133504

SEQ ID NO: 138245 - DNA, 2154 bp, Homo sapiens
atgcctgagcctcccacccactccatgggctcctgtgcggcccgagcctccccgatgagcaccaccccctgctccacggcacccagtcccatcgaccacccaagggctgaggaatgtgagcgcacggcgcaggactggcaggcagctccacctgcagccccggtgtgggatccactaggtgaagccagctgggctcctgagtctggaactaacatttccattacacctggaaatgccacatttgtgacccgggtgcagggacaggcttggtttgcctcatgtatcactggtcatgatatgtctagtttaaaaacttccagtgtcgtggtattaaggagacaatctgaggcacttctaccagccaatttgacatgcaattggcaagattcttctgcccttgccaccttagaaagtgccctgtcccaggtcagacacaaaagattcacatttacacttatggtctttacaggctcagccatagtcattatggcaactgttagcattgctgttgtatctattactgaatcagtacaaacaactgcttttgtagataatctggccaaaaatatatgtgatgaacttctcctacaggacatggatgaagctggaaaccaacattctcagcaaaataacacaagaacagaaaaccaaacaccacatgttctcactcataagtgggagttgaacaatgagaacatacggatacagggaggggaacattacatactggggcctgttggtggcaggttgccaacatccaaactcgctgttgattgccagctcctgctccttgcagcagcccagcatgctctctgctggtgccaaaatacccttccaccaaaccccgctaacttctggaactgtcctagagggtttcctaccctagcaagtgagcttgcctatgtcagccctaaccttgctcttgtcattcagctgagccagaggaaaaaatttgagctattctggggtggtctacagagaaccatcttctttcccttcagtgttctcagaatattgactgttgatgaacaagccaatgatgtgagtgtggctgcagcaaggacccttcaaattttcagagatgacatgattgtatatctagaaaaccccattgtctcagcccaaaatctccttaagctgataagcaacttcagcaaaatctcaggatacaaaatcaatgtacaaaaatcacaagcattcttatacaccaacaacagacaaacagagagccaaatcatgagtgaactcccattcacaactgcttcaaagagaataaaatacctaggaatccaacttacaagggatgtgaaggacctcttcaaggagaactacaaatcactgctcaaggaaataaaagaggatacaaacaaatggaagaacattccatgctcatgggtaggaaaaatcaatatcgtgaaaatggccatactgcccaaggtaatttacagattcagtgccatccccatcaagctaccaatgactttcttcacagaattggaaaaaactactttaaagttcatatggaaccaaaaaagagcccacactgccaagtcaatcctaagtcaaaagaacaaagctggaggcatcacactacctgacttcaaactatactacaaggctacagtaaccaaaacagcatggtactggtaccaaaacagagatatagatcaatggaacagaacagagccctcagaaataacgctgcttatctacaactatctgatctttgacaaacctgagaaaaacaagcaatggggaaaggattccctatttaataaatggtgctgggaaaactggctagccatatgtaggaagctgaaactggatcccttccttataccttatacaaaaatcaattcaagatggattaaagacttaaatgttagacctaaaaccataaaaaccctagaagaaaacctaggcattaccattcaggacataggcatgggcaaggacttcttgtctaaaacaccaaaagcaatggcaacaaaagacaaaattgacaaatgggatctgattaaactaaagagcttctgcacagccaaagaaactaccatcagagtgaacaggcaacctacaaaatgggaaaaaattttcgcaacctactcatgtgaaaaagggctaatatccagaatctacaatgaactcaaataa

SEQ ID NO: 138246 - DNA, 1336 bp, Homo sapiens
cgcggtgttacagctcttaaggcagcgcatctggagttgtttgttcctcctggtgggttcgtggtctcgctggcttcaggagtgaagctgcagaccttcgcggtgagtgttagagctcataaaggcagtgtggacgcaaagagtgagcagtagcaagatttattgcaaagagcgaaagaacaaagcttccacggcgtggaagggggacccgaggggggttgtcactgctggctcaggcagcctgcttttcttctcttatctggccccacccacatcctgctgattggtccattttacagaaagtcagtctgttttacagagagcccccagtggtctgttttgacagggcgatgattggtgcgtttacaatccctgagctagacacaaatgtttctccacttccccaccagattagctagatacagagtgtggacacaaaggttctccaaggccccaccagactagctagatacagagtgtcaattggtgcattcacaaaccctgagctagacacacggtgctgattggtgtgtttacaaaacttgagctagatacacagtgccaattggtgtatttacaatcccttagctaaacataaaggttctccacgtccccacccgactcaggagcccagctggcttcacctagtggatcccgcacagcgctgcaggtggagctgcctgctagtcccgccttgcgcccgcacttctcagcccttgggtggtcgatgggactgggcgctgtggagcagtgggtggcgctcactggggaggcttgggccgcacaggagcccacggagggggtgggaggctcaggcatggcgggctgcgggttccgagccccgctccgcgggaaggcagctaaggcccgccgagatatcgagcgcagcgctggtgggctggcactgctggaggacccagtacactctccgcagctgctggcccgggacattaccatcaaagtgacgggaaatgactccatatggaaagtaaaatgtgcagaaaagactcaagacaaccaaaaatggatctatgtaattgaagagccatattctgagcaccccagagcaagccagcctcccctacctcatcacaccactgttacagccagcagcaccagcaccacctctaatgccccgtccatcgccaccaccaggaatcagtgtggcctaatatccagggatgccctggacctgtcccttctattggcaataaatacaccacttggaggtagtagggatccatctttttctcaaagaaggtttcaagagaaagctatttgtcaacctaaggaagcatgtgcatccgtggctcagtcacttgcacttgttttatag

SEQ ID NO: 138247 - DNA, 1345 bp, Homo sapiens
agcttacagtggcgtgaagcatagtggcgtgaaagcaaggatacagaggcagcacaaaggcaattaattcatcaaattgtgacaggtgcataattcaggattacatactgtgtcggaattgatgggttcttggtctcactgacttcaagaaagaagccacggaccctcatggtgagtgttatagttcttaaaggcggcatgtccggcgtttgttccttctgatgttcggatgtgttcagagtttcttccttctggtgggttcgtggtctcgctggcttaggagtgaaactgcagaccttcgcggtgagtgttacagctcttaaggcggcgcacctggagttgttcattgcgcgcctggagttgggatttgatcgttcctcccggtgggctggtggtctcactggcttcaggagtgaagctgcagaccttcgcggtgagtgttacagctcttaaggaagcgcgtctggatttgttcgttcctcccggtgggctcgtggtctcgctggcttcaggagtgaagctgcagacctttgcggtgagtgttacagctcataaaagcagtgtggacccaaagaactcaggagcccagctggcttcacctagtggatcccgcaccgagactgcaggtggagctgcctgccagtcccgcgccgtgcgctcgcattcctcagcccttgggtggtcgatgggactgggcgccatcgagcagggggcggcgctcgttcggggaggctcgggccgcacaggagcccatggagtgggtgggaggctcaggcatggcgggctgcaggtcccgagccctgccccgcgggaaggcagccaaggcccagcgagaaatcgagcacagtgccggtgggccggcactgctgggggactcagtacaccctccgcagccactggcccgggtgctaagtcccccattgcccggggccagcagggcttgctggctgctccgagtgcggggcccaccaagcccacgcccacccggaactccagctggcccgcaagcgccgcacgcagccccggttcccgctcgtgcctctccctccacacctcccttggtccacttgacaaacgatgttctaagagtgaaggtcaagtgggcctttttctttacactccacaagtagctcaaaacattccacactgcagtctttgtcagatttggtccgtggcttcctgatacaggattttgctcttctttgagtttccagttttcttttttaatttccctggatactcttccatatagaaagggagtcatctgtttattggaggcattggatgatctgctgtttttcttggttgagacttggtaccaccaagaagcagtcagtgccctcat

SEQ ID NO: 138248 - DNA, 1623 bp, Homo sapiens
gtgtgatcttgagaaagaggtgagcctctctgggccctggcttccccaacaaccaaaggctgtacagagagcggcttatgagagagctcctgtgtgcgccgccgagggctctgctggctcaggacatctgtaggaccagttccagctccagtgggcaccgccagcacgcccaggagagtcgcggttgctgatcgtggtgcttgagtagagccgtggttggtgacagcatgacgagcgaggtgatagaagacggagaagcaattcttattccaaggcccaagacctactggaaacaaatcccacccacggtggaccggcatgcttggggggaaggcccgaacaagacaggaacgtcctgtgccctggactgtggagctggcattgggaggatcaccaagcggctgctcctgccgctgttcagagaggtggatatggtcgacataacggaggacttcctggttcaagccaagacctacctgggggaggagggcaagagggtgaggaactacttctgttgtgggctccaggacttcacccccggagccggactcttacgacgtgatctggaatccagtgggtgataggccacctcaccgaatcagcacctggccgaagtttcctgcggccgtgcaaagggcaagcctccgcccccaacggcatcatcgtcatcaaaagacaacattgccccaggagggcgtgattctggacgacggtggacagcagcgtgtgccgggaccttgacgtggtccgcaggatcattttgcagtgcaggcctcagcctcctggccgaggagaggcaggagaaccttcccgattgagatcttaccattgtctattagcttttcccttgagatgagccggggttggcaggagaaactgaggaaccacagtcctggtggggggagctggcagctgggcaagatcccaggcgccacgctgccggttcgtgagtgtcgaggcaccactaaatatagcttgtctgccgtccactcattatgcgggctcttcttcaaaaaggcaaggtgggacccggcggggagggtgctgctgaaccagcggtgaggcaggagcccagaccctgctctcctgcgagatgggattgggtggaaggggctccagggctcctggtgctccccatgtgggaatagggtggccacatcagtaaccgattccctgggcctccagcccggccttccagccatgggcctggctgcctgaagaggaaggaaaccacccccaacttggttgctggggacttgaagacttcagtgtgatctttacctaggggagggacagagctgggctggtggagcccatgggtgctgccctgatggtgctgtggggtgggtgctcatgtgccaagtcctgcttggcagtggagacctggggcccttaaagtgttacaacagcctgcagcaagggaagttccccgtagcctcagtcttctctgggcttgaggctgctccttggcaggcatttaaagtaaaaaataaaatggggctgggcgcggtggctcacgcctgtaatcccagcactttgggaggccgaggcgggcagatcacgaggtcaggagattgagaccatcctggctaacaggtgaaaccccgtctctacttaaaatac

SEQ ID NO: 138249 - DNA, 516 bp, Homo sapiens
ttttttttttttgagacggagtctcgctgtgtcgccaggctggagtgcagtggcgcaatctcagctcactgcaacctctgcctcccaggtgcaagtaattctcctgcctcagcctcccaagtagctgggactacaggtgtgtaccatcacgcctggctaattttttgtattttagtacagacggcatttcaccatgttggcccaggatggtctcaaatctcctaacctcatgatcggcctgcactggcctcccaaagtgctgggattataggcgtgagccaccgcgcctggccaacatccttctcttacaaaaacaaaacaaaaaaccctccctaggtctctccttcctccaaaactccttcctctgaatgactttgacgagttgacagaagtaggcttcagaagatcggtaataaccaacttctccgagctaaaggaggatgttcgaacccatcgccaagaagctaaaaaccttgaaaaaagattagacaaatggctaactagaataaacagcac

SEQ ID NO: 138250 - DNA, 717 bp, Homo sapiens
tcaatttgatgggttaatgcatttgaaagcatctgctacgtggtagacacttgcaaattcagagaatttcaaggcaaaactggtcttctcagaaccgtctgagtgataagtcgtcagtacaccaaacctctgagacacgcaatatacccatgcaacaaatctgcacaggtaccccctctggtacaattcggctgtgaatctgtctggtcctcgacgttttttggttggtaggctattaattattgcctcaatatcggagggtgttattgatctattcagggattcaacttcttcctggtttaggcttgagaaggcgtatgtgtccaggaatttattcatttcttctagattttctagtttatttgcgtagaggtgtttatagtattctctgatggtagtttgtatttgtagttctcgtgccatggttttcagctccatcaggtcatttaaggtcttctctatgctgtttattctagttagccattcatctaatcctttttcaagatttttagcttctttgcgatgggtttgaacatcctcctttagcttggagaagtttgttattaccgatcgtctgaagccttcttttctcaactcgtcaaagtcattctccatccagctttgttctgttgctggcaaggagctgcatttctttggaagggaagaggcactctgatttttagaattttcagcttttctgctctgttttttccccat

SEQ ID NO: 138251 - DNA, 4551 bp, Homo sapiens
atgggccttgctcacctattcgtcacactgattctggtctgtgtgctgggaggagccttccagccccagttcttagtttcaggagcaaccaccctggtcatctcagcaaactgcacagttccccgggtgccctggaagagtctctcggtgctgctgctgttcttcaccatcctggcactaggcatcgccttcttgtctaccttcctgggcttccatgccaccttctgctacacccagctgtttctcatttcagggatcttggcgataacaatgaagaccttttctaaaacttacctgaagatgttgtgcctgatgacaaacctcatcagcctcttttgcgtgctgtctggcctcttcgtcatctccaaggatctctttctggagagcccatttgagtccccgatctggagaatgtaccccaactccacggtccacatccagaggctggagctggccttgctctgcttcactgtcctagagctcttcctgccagtgcccacagctgtcacagcctggagaggggactgcccatctgcaaagaatgatgatgcatgccttgttccgaatacaccattgcatctcaaaggcctgccggtggagcccccgccatcctaccagagtgtgattcaaggcgacgcacaacacaagcaacatcagagcctggtagtcacatctagaagaccctcgaatcttggttcaatgcaggtctctaacgaagtgccggagcacccatgtgtatcccctgtctctaatcatgtttatgagcggcggctcatcgagaagtacattgcggagaatggtaccgaccccatcaacaaccagcctctctccgaggagcagctcatcgacatcaaagttgctcacccaatccggcccaagcctccctcagccaccagcatcccggccattctgaaagctttgcaggatgagtgggatgcagtcatgctgcacagcttcactctgcgccagcagctgcagacaacccgccaagagctgtcacacgctctgtaccagcacgatgccgcctgccgtgtcattgcccgtctcaccaaggaaggtgcgggtgagccaatggatttgggtgagctggtgggaatgaccccagagattattcagaagcttcaagacaaagccactgtgctaaccacggagcgcaagaagagagggaagactgtgcctgaggagctggtgaagccagaagagctcagcaaataccggcaggtggcatcccacgtggggttgcacagtgccagcattcctgggatcctggccctggacctctgcccgtccgacaccaacaagatcctcactggtggggcggataaaaatgtcgttgtgtttgacaaaagttctgaacaaatcctggctaccctcaaaggccataccaagaaggtcaccagcgtggtgtttcacccttcccaggacctggtgttttctgcttcccccgatgccactatcaggatttggtcggtccccaatgcctcttgtgtacaggtggttcgggcccatgagagtgctgtgacaggcctcagccttcatgccactggcgactatctcctgagctcctccgatgatcagtactgggctttctctgacatccagacagggcgtgtgctcaccaaggtgacagatgagacctccggctgctctctcacctgtgcacagttccaccctgacggactcatctttggaacaggaaccatggactctcagatcaagatctgggacttgaaggaacgtactaatgtggccaacttccctggccactcgggccccatcactagcatcgccttctctgagaatggttactacctggctacagcggctgatgactcctctgtcaagctctgggatctgcgcaagcttaagaactttaagactttgcagctggataacaactttgaggtaaagtcactgatctttgaccagagtggtacctacctggctcttgggggcacggatgtccagatctacatctgcaaacaatggacggagattcttcactttacagccctcatggatgactttgagggattgaggacttccatggagggagtaactgcagatgtggaggaaatggtaagagaattagaatccaaaggggagtctaaagatgggactgaattgctgcaatctcatgttaaaactttaatggatgaggagctcttagggatgaccaaagaaagtggtttcttgatggaatcttctactggtgaagatgccgtgaacattgttgaaatgataatgaaggatttagaatattacataaacttaattgataaagcagaaattgtcacagccacttcagccttcagcaaacaccacccttgtcagttagcagccatcgacatcaaggcaagaccctgctgctgctgtcaggagctgactgcctccagggctggaatcctgtgctccctctgtgcccagagccccacgatgtcggccaacgccacactgaagccactctgccccatcctggagcagatgagccgtctccagagccacagcaacaccagcatccgctacatcgaccacgcggccgtgctgctgcacgggctggcctcgctgctgggcctggtggagaatgagtcatcctcttcgtggtggctccagcccgaccctggcctcccaggcctccggcacagctacgactgtgggatcaagggaatgcagctgctggtgttccccaggccaggccagactctccgcttcaaggtggtggatgaatttgggaaccgatttgatgtcaacaactgctccatctgctaccactgggtcacctccaggccgcaggagcctgcagtcttctcggccgattacagaggctgccacgtgctggagaaggatgggcgtttccacctgagggtgttcatggaggctgtgctgcccaatggtcgtgtggatgtggcacaagacgctactctgatctgtcccaaacctgacccctcccggactctggactcccagctggcaccacccgccatgttctctgtctcaaccccacaaaccctttccttcctccccacctctggccatacctcccaaggctctggccatgcctttcccagcccactggacccagggcacagctctgtccacccaacccctgctttaccatcccctggacctggacctaccctcgccaccctggctcaaccccactggggcaccttggaacactgggatgtgaacaaacgagattacataggtacccacctgagccaggagcagtgccaggtggcctcagggcacctcccctgcatcgtgagaagaacttcaaaagaagcctgtcagcaggctggctgctgctatgacaacaccagagaggttccctgttactatggcaacacagctactgtccagtgcttcagagatggctacttcgtcctcgtagtgtcccaagaaatggccttgacacacaggatcacactggccaacatccacctggcctatgcccccaccagctgctccccaacacagcacacggaagctttcgtggtcttctacttccctctcacccactgtggaaccacaatgcaggtggctggcgaccagctcatctatgagaactggctggtgtctggcatccacatccaaaaggggccacagggttccatcacgcgggacagcaccttccagcttcatgtgcgctgtgtcttcaacgccagtgacttcctgcccattcaggcatccattttcccacccccatcgcctgctcctatgacccagcccggccccctgcggcttgagctgcggattgccaaagacgagaccttcagctcgtactatggggaggatgactatcccatcgtgaggctgctccgagaaccagtccatgtggaggtccggcttctgcagaggacagaccccaacctggtcctgctgctgcaccagtgctggggcgctcccagtgccaaccccttccagcagccccagtggcccatcctgtcagacggatgccctttcaagggcgacagctacagaacccaaatggtagccttggacggggccacacctttccagtcgcactaccagcgattcactgttgctaccttcgccctcctggactcaggctcccagagagccctcagaggactggtttacttgttctgcagcacctctgcctgccacacctcagggctggagacttgctccactgcatgtagcactggcactacaagacagcgacgatcctcaggtcaccgtaatgacactgccaggccccaggacatcgtgagctctccggggccagtgggctttgaggattcttatgggcaggagcccacacttgggcccacagactatccatgtgggaagggctggcacaggaggaatggcagcctgctggccctgacactggctgcgatggtgggcatggccaccagacaggaacgcagctcctcgccagcaacggaacaaagctggatagagaatgactttgacgagttgagagaaggcggcttcagacgatcggtaataacaaacttctccgagctaaaggaggatgttcgagcccatcgcaaagaagctaaaaccttgagaaaagattag

SEQ ID NO: 138252 - DNA, 1159 bp, Homo sapiens
tcatgccatggttttcagctccatcaggtcatttaaggccttctctacactggttattccagttagcctttcatctaatcttttttcaaggtttttagcttctttgccatgggttcgaacatcctcctttagctcagagaagtttgttattaccgattgtctgaagccttcttctctcaactcgtcaaagtcattctccgtccagctttgttccgttgctggcaaggagctgtggttcctgggtatcaccagcagaggctgcagaaccacaaatattgcagaagggcaaatgtagctgtctgattgttcctctggaagctttgtgtcagaggggcaccaggctttctctctggctgcctttaacattttttccttcatttcaactttggccagtctgacaattatgtatcttagagttgctcttctcgccgagtatctttgtggcgttctctgtatttcctgaatttgaatgttggcctgccttgctaggttcaggacgtcttcctgaataacatcctgcaaagtgttttccaacttggttccattctccccatcattttcatgtacaccaatcagacacagatttggtcttttcacatagtcccatatttcttggaggctttgttcatttctttatactcttttttctctaaacttctcttctcgctccatttcattcatttgatcttcaatcactgataccctttcttccacttgatcgaattggctactgaagcttgtgcatgcatcatgtagttctcgtgccatggttttcagctccatcaggtcatttaaggtcttcttctctacgctgtttattctagttagccattcatctaatcttttttcaaggtttttagcttctttgcgatgggttcgaacatcctcctttagctcggagaagtttattattaccgatcgtctgaagccttcttctctcaactcgtgaaagtcattctctgtccagctttgttccattgctggcaaggagctgcgttcttttcaatgttgatgcatatttttcttgtgatgccacattcattaaactccttgaggatggtcttggctccctgctcctactagcagcagttttgcctcctacatcatcacaataatgaacttgaagttgtctgggtatccttgctcctttttcatgcat

SEQ ID NO: 138253 - DNA, 1784 bp, Homo sapiens
ctatcttttttcaaggtttttagcttctttgcgataggttcgaacattctctttagctcggagaagtttattattaccgatcatctgaagccttcttctccaacttgccaaagtcattctctgtccagctttgttccgttgctggcaagagttgcattcagatggggttttggtgtggatgtcctttcgtttgttagttttccttctaacagtcaggaccctcagctgcaggtctgtggagtttgctggaggtccactccagatcgtttgcctggttatcaccagcgaggcagcggtggctgcagaacagcggatattattgaaccgcaaatgctgcgcctgatcgttcgtctggaagttttgtctcagaggagtacccggccacagaggtgtcaagtctgcccctactggggggtgcctcccagttaggctgctgtgggtcagggacctacttgaggaggcagtctgcccgttctcagatttgagctgcatgctgggaaaaccactactctcttcaaagctgtcagacagagcatttaagtctgcagaggttattgctgtcttttgtttgtctgtgcccaacttagagcagttaggatgaagcaagaggctgtgcacatgatctaatgcaacgaagagccctaacaggttacacctggtgagtatgcagacgtagagatcttctttgcttaaaacaggttttagctgtggcacggacattttggacccaatcaatcttgtggtgggggctgtcctgtacatcacagcatatttaccagcatccctctttccactccccagagcctgcaccaccccctcctcaagctgtgatgacaaaactgtctcctgacattgctctaatgtctccatggggagcaaaatcatcctggagaaaggaccagggctatcccgcttcgtatccacgagctgcatctggacattggcaggcattccacctccatacctcccttggactgcatttggttctgaatggagctgctgtacagataatttcatcacccaggtaataggcatagtaaccattaggtcgttttttgatcctctccctcctcccaccctctactctcagatgggtcctggtatctgttgttgccttctttgtgaccatgtgtactcaatgtagctcccactgagctgagaatggctcttctctggcaagaagtttctagaatgtgtttgctgggccaaagcttggcacctgatctcttcagagatcttgtggatagaaggtctcatcataaccaaggggatgatacagtagaaaatggcaaagggcatgactactaggacaccagggtggcagactgtatttttcaaaaacagccacagcaatattctctgacatggtcttctagaaccttgttactttttatcaacaatttcctctgcttccctgtcactgaacctaagcctatccttttcacccctacttttgccatccttgacagcatcgtggaggagttacagtatcagccccggacagttttgtctgtagacttttctactgtaagaagaaaaagaaacagccaacaataacaaaaagacaagccccaattgagtttaagccactgttaacttggtatgccatcaaacacaattttttaaacctaaacaatagctatggtgtttcacagatttgacataaccaacaacaaatggaccactccaatttttctggatagttaaaaaataaggccttcacaccaacacaagtcccagactggcactctcgaatgactaagtttgtaattatttcatcagtt

SEQ ID NO: 138254 - DNA, 825 bp, Homo sapiens; identical to SEQ ID NO: 124475

SEQ ID NO: 138255 - DNA, 1983 bp, Homo sapiens
  misc_feature (1)...(1983): n = a,t,c or g
ttatatgcagacctttgccagctcctctggcataagtggctgggttccagtgactgctgttgctctctccacattggcttggtgtgtgcggatttctccatctggttcaacaggaagtatgtactgtttgcaggatgctattgagcactgtgaggtaaagtcaacaaactctgcagagaacttgtctgctgggagttgtggcgatggctcctctaccacctgtttgagctgctgaaatggagttccccatgaatcatagggaaatcgaaggatggccaactcaatggccatgtatggtttgcaacctgcatcaattgttttagcaacagagtccaccaagtagccactgattccaaaatcgcacatcttcacttgaccgagagcattgatgagtacattagaaggcttgacgtctctgtgaatgacagacagcttactatgtaaatgttctaatgcttttacaatagaaactgctattttccctaagatgtcctctggaattgtctggcctttatcaataacttgtttgtagaatttatctagtgatgtatccatgagctccatgcagatccacacatcaccctcccgaaacagtgcgccataaaaggtgacagtgaatggacagtccaccgtcctcatggaaatatccaaatccatcagtagccgtttctgttcctggctatttactgtggctcggatccgcctcctttttccacaaatggagacaattttctctcccaattctggtttcttgattttcagaggcaattctcgtcccagttccattataggctccaggtcatctgccttcacctcaaagttctgatttccaatagaaatgcaagccttggagtctaaatctcgaggtggtaatgtcaagctcgaccgatgcccctgagagccttcaacccagtcagctccttccggtgggcgcggggcatgactatcgtcgccgcacttatgactgtcttctttatcatgcaactcgtaggacaggtgccggcagcgctctgggtcattttcggcgaggaccgctttcgctggagcgcgacgatgatcggcctgtcgcttgcgntattcggaatcttgcacgccctcgctcaagccttcgtcactggtcccgccaccaaacgtttcggcgagaagcaggccattatcgccggcatggggccgaacgcgctgggctacgtcttgctggcgttcgcgacgcgagggctggatggccttccccattatgattcttctcgcttccggcggcatcgggatgcccgcgttgcaggccatgtggttagcagaatgaatcaccgatacgcgagcgaacgtgaagcgactgctgctgcaaaacgtctgcgacctgagcaacaacatgaatggtcttcggtttccgtgtttcgtaaagtcctgtggaacacctacatctgtattaacgaagcgctggcattgaccctgagtgatttttctctggtcccgccgcatccataccgccagttgtttaccctcacaacgttccagtaaccgggcatgttcatcatcagtaacccgtatcgtgagcatcctctctcgtttcatcggtatcattacccccatgaacagaaatccccgcttctggagaaactcaacgagctggacgcggatgaacaggcagacatctgtgaatcgcttcacgaccacgctgatgagctttaccgcagctgcctcgcgcgtttcggtgatgacggtgaaaacctctgacacatgcagctcccggagacggtcacagcttgtcaaataccatctttccatctcaacccaagttttatagtagtggctttcacagggatttgcctgtttgctccaatgtggaactggtctgaggttgttcaaatgcttcttttggaattttaaggccagggtttcgcttcttgccttattgagtttctttgctgtctggattctgaattctatatctgtcatttcggccatttcaatctggttaaagaccat

SEQ ID NO: 138256 - DNA, 2040 bp, Homo sapiens; identical to SEQ ID NO: 124484

SEQ ID NO: 138257 - DNA, 2016 bp, Homo sapiens
tcagaggttttcaccgtcatcaccgaaacgcgcgaggcagctgcggtaaagctcatcagcgtggtcgtgaagcgattcacagatgtctgcctgttcatccgcgtccagctcgttgagtttctccagaagcgttaatgtctggcttggtcgcttccggtccttgagcccgatataagcgtgggagccgaagtggtactccaccacggccacgcggacccacttctgggagatgcgcagccgctccatcatgtccaccacaaaggccttcagcacttcaaactcagcctcggacagcctggaggagccatccagcaggaagaccaggtccagtagcctgctgcagtagaaatcgtgcaacggcggttccgagatgtcctccacatacagagtggtggggctcaccggggcatctttgtcggcgtcggcgttaaattcgctgatcgactcccggagcaaccgctgagtgtcagcaggaatacgctggcgaacattacccgccgcaaccagttgaaaatgttgccagcccctgacccagatggatttagcagtggaagcccttttcagtgacccagcaggtactatttgtttcatgttgcgctcttcctcttcattgggcacgggcacatccaaggctacatccgtatctgagccagtagtgcaacaggacccggaaatagcctgcaactctgcggccagactggcggggataactgccctgactgtggtgcggtgatgggcgacgcaacataccaggaaacattcgatgaagagagtcaggttgaagctaaggaaaatgatccggaggaaatggaaggcgctgaacatccgcacaatgagaatgctggcagcgatccgcatcgcgattgcagtgatgaaactggcgaagtcgcagatcccgtaatcgtagaagacatagagccaggtatttattacggaatttcgaatgagaattaccacgcgggtcccggtatcagtaagtctcagctcgatgacattgctgatactccggcattttgcatagttgccgattagaaccccgttggcggtagcaacgcgttcagcgaatcgaactttaggtgcatccataagcatttttggctccagccgttgcttttgctctgccaggtcggcagccaaacggagagcttcagggagactctgcggaatagcaggttgtaatcttccggttcgatagtcgataaatgtctggtttaccttcagccgaaacgcgggagaaatccagcctgcgtactccacagcgagcaattcatgggcaaaagtgccgccgccacggccttcgaccggtaaacgagtcgtgaagaaatcctgctccaatgctgtatcgatcacggtccctttaagggtgaaaaccccacgagataagtatcctagtatggggacgttcctgcgttcaccggttgcgatcagaattccgttatcacgcaaccaggtgaagagatagttttggcccaggccgagcactttggcatagttgccgattagaaccccgctggcggtagcaacgcgttcagcgaattcgactttaggtgcatccataagcattttttgctccagccgttgcttttgctctgccaggtcggcagccaaacggagagcttcagggagactctgcggaatagcaggttgtaatcttccggttcgatagtcgataaatgtctggtttaccttcagccgaaacgcgggagaaatccagcctgcgtactccacagcgagcaattcatgggcaaaagtgccgccgccacggccttcgactttggcatagtcgccgattagaaccccgctgtcggtagcaacgcgttcagcgaattcgactttaggtgcatccataagcattgtttgctccagccgttgcttatgctctgccaggtcgtcagccttcagccgaaacgcgggagaaatccagcctgcgtactccacagcgagcatttcatgggcaatagtgccgccgcctcggccttcgacctggttgtccacatttgtttggtttttcgacat

SEQ ID NO: 138258 - DNA, 777 bp, Homo sapiens
atgagcgattttactttttctggctatgaattggcctgctttgtaacacactccggtctatcccgtagcgccgggcatatcctgtcgcaatgtgcaaatctcgcggcaacaaccagtgaatacttcattcacaagcctcaccgcctgatcgcggcagaaactggttatagccaatcaaccgtcgttcgtgcattccgtgaagctgtaaacaaaggaattctgtctgtagagattgttatcggcgatcaccgtgaacgtcgcgctaacctgtaccggtttacaccatcctttttggccttcgcacaacaagccaaaaatgcgctgatagaaagcaaattaaagatctcttcagcggcaaccaagaagatcgtcgttttgccaggtgaccacgttggtcaagaaatcacagccgaagccattaaggttcttaaagctatttctgatgttcgttccaatgtcaagttcgatttcgaaaatcatttaattggtgagaaaattggcagtcttgatcaggctgttaaggaacgtgataagtcaataatggatcttaaccagaccattgagacgatgaacaaagcagagcaacattttcacagccaggaagtgaaaaatgaatcagaacaagccaagtatgctgacaggcaaatggaacgaaaagctgaagttcagaaacaactggttgcggcgggtaatgttcgccagcgtattcctgctgacactcagcggttgctccgggagtcgatcagcgaatttaacgccgacgccgacaaaggttaa

SEQ ID NO: 138259 - DNA, 2124 bp, Homo sapiens; identical to SEQ ID NO: 124493

SEQ ID NO: 138260 - DNA, 851 bp, Homo sapiens
  misc_feature (1)...(851): n = a,t,c or g
gaaacagctatgacccatggatttacgccaagcttgcatgcctgcaggtcgaaggccgtggcggcggcacttttgcccatgaattgctcgctgtggagtacgcaggctggatttctcccgcgtttcggctgaaggtaaaccagacatttatcgactatcgaaccggaagattacaacctgctattccgcagagtctccctgaagctctccgtttggctgccgacctggcagagcaaaagcaacggctggagcaaaaaatgcttatggatgcacctaaagtcgaattnnntgaacgcgttgctaccgccagcggggttctaatcggcaactatgccaaagtgctcggcctgggccaaaactatctcttcacctggttgcgtgataacggaattctgatcgcaaccggtgaacgcaggaacgtccccaaacaagaatacatatctcgtgggtatttcacccttaaagaaaccgtgatcgatacaagcaatggaagcaggatttctttcacgactcgtataaccggcaaaggtcagcagtggctgatgaagcgattgcttgatgctggtgtgctggatgacgtggcaataaagaataagaagtcacaagttaaaaaaacaaaaagatcagtttccggcggtgccggaacaaccagcctcaaaaaattgacttcatggatcgctaaggcaaaagcaaaggctgacaatctgcggttatccaaaaaacgcactcaaaaacatgagttcaagcagaaagtagaggcggctgcgcggaaatatgcttacctgaagaacaagcgttcgcctgatattggcgggatatcaaacttcgataacctaccgcattgcatgacg

SEQ ID NO: 138261 - DNA, 694 bp, Homo sapiens; identical to SEQ ID NO: 124469

SEQ ID NO: 138262 - DNA, 630 bp, Homo sapiens; identical to SEQ ID NO: 124472
  misc_feature (1)...(630): n = a,t,c or g

SEQ ID NO: 138263 - DNA, 4458 bp, Homo sapiens
atgattgatgtcttagggccggagaaacgcagacggcgtaccacacaggaaaagatcgcaattgttcagcagagctttgaaccggggatgacggtctccctcgttgcccggcaacatggtgtagcagccagccagttatttctctggcgtaagcaataccaggaaggaagtcttactgctgtcgccgccggagaacaggttgttcctgcctctgaacttgctgccgccatgaagcagattaaagaactccagcgcctgctcggcaagaaaacgatggaaaatgaactcctcaaagaagccgttgaatatggacgggcaaaaaagtggatagcgcacgcgcccttattgcccggggatggggaacgaaccgatgactggatggatggccgccgcagtcgtcacactgatgatacggatgtgcttctccgtatacaccatgttatcggagagctgccaacgtatggttatcgtcgggtatgggcgctgcttcgcagacaggcagaacttgatggtatgcctgcgatcaatgccaaacgtgtttaccggatcatgcgccagaatgcgctgttgcttgagcgaaaacctgctgtaccgccatcgaaacgggcacatacaggcagagtggccgtgaaagaaagcaatcagcgatggtgctctgacgggttcgagttctgctgtgataacggagagagactgcgtgtcacgttcgcgctggactgctgtgatcgtgaggcactgcactgggcggtcactaccggcggcttcaacagtgaaacagtacaggacgtcatgctgggagcggtggaacgccgcttcggcaacgatcttccgtcgtctccagtggagtggctgacggataatggttcatgctaccgggctaatgaaacacgccagttcgcccggatgttgggacttgaaccgaagaacacggcggtgcggagtccggagagtaacggaatagcagagagcttcgtgaaaacgataaagcgtgactacatcagtatcatgcccaaaccagacgggttaacggcagcaaagaaccttgcagaggcgttcgagcattataacgaatggcatccgcatagtgcgctgggttatcgctcgccacgggaatatctgcggcagcgggcttgtaatggggccagaagaccccctgtctcccagccccgggcagcccctgctgggccccagcttggggctgacggcactcggactttctcgctgtcccccttccccagcctggcatcaggggagagactgatgatgcccccagccgccttcaagggagaggcgggcggcctgctggtgttccccccagccttctatggcgccaagccccccacagcccctgccaccccggcccctggccctgagccactgggcggtcctgagcccgcggatggtggtgggggcggagcggcggggcccggggcagaggaggagcagctggacacggcagagatcgccttccaggtgaaggagcagctgctgaaacacaacatcgggcagcgggtgtttgggcattacgtgctggggctgtcgcagggctcggtcagcgagatcctagcccggcccaagccctggcgcaagctcacggtgaagggcaaggagcccttcatcaagatgaagcagttcctgtcggatgagcagaatgtactggcgctcaggaccatccaagtgcggcagcgaggcagcatcaccccgagaatccgcacgcctgagacaggctcagacgacgccatcaagagcattctagagcaggccaagaaggagatcgagtcgcagaagggcggcgagcccaagacctcggtggccccgctgagcatcgccaacggcacgacccccgccagcacctcggaggacgccatcaagagcatcctggagcaggcacgccgtgagatgcaggcgcaacagcaggcgctgctggagatggaggtggcgcccaggggccgctcggtgcccccctcgcccccggagcggccatcactggccaccgcgagccagaacggggccccggccttggtgaagcaggaggagggcagcgggggccccgcgcaggcgccgctcccgcatcatccgcaagtcaagtccgagatcggcgacgccggctacttcgaccaccactgggcctccgaccgcggcctgctcagccgcccctacgcctccgtgtcgccctcgctgtcctcctcctcctcctctggctactctggccagcccaacggccgcgcctggccccgcggggacgaggcccctgtgccccccgaggacgaggcggcggcaggggcggaggacgaaccccccaggacgggcgagctcaaggctgagggcgcgacggccgaggcgggcgcgcggctgccctactacccggcctacgtgccgcgcaccctgaagcccaccgtgccgccgctgacccccgagcagtacgagctgtacatgtaccgtgaggtagacacgctggagctcacccgccaggtcaaggagaagctggccaagaacggcatctgccagaggatcttcggggagaaggtgctgggcctgtcacagggcagcgtgagcgacatgctgtcccggccgaagccatggagcaagctgacgcagaaggggcgggagcccttcatccgcatgcagctgtggctctctgaccagctcggccaggcagtgggccagcagcctggtgcctcccagggccgtggcggcggcacttttgcccatgaattgctcgctgtggagtacgcaggctggatttctcccgcgtttcggctgaaggtaaaccagacatttatcgactatcgaaccggaagattacaacctgctattccgcagagtctccctgaagctctccgtttggctgccgacctggcagagcaaaagcaacggctggagcaaaaaatgcttatggatgcacctaaagtcgaattcgctgaacgcgttgctaccgccagcggggttctaatcggcaactatgccaaagtgctcggcctgggccaaaactatctcttcacctggttgcgtgataacggaattctgatcgcaaccggtgaacgcaggaacgtccccaaacaagaatacatatctcgtgggtatttcacccttaaagaaaccgtgatcgatacaagcaatggaagcaggatttctttcacgactcgtataaccggcaaagacgtagtaagaaccaccagcattgtaatgctggctaaagtcactttcctgagctgtataacgatgagcgattttactttttctggctatgaattggcctgctttgtaacacactccggtctatcccgtagcgccgggcatatcctgtcgcaatgtgcaaatctcgcggcaacaaccagtgaatacttcattcacaagcctcaccgcctgatcgcggcagaaactggttatagccaatcaaccgtcgttcgtgcattccgtgaagctgtaaacaaaggaattctgtctgtagagattgttatcggcgatcaccgtgaacgtcgcgctaacctgtaccggtttacaccatcctttttggccttcgcacaacaagccaaaaatgcgctgatagaaagcaaattaaagatctcttcagcggcaaccaaggttaaagctgttctcgctaagacattggctttatttaattttttatccacacccccatgtcaaaatgataccccctccccctgtcaggatgacgtggcaataaagaataagaagtcacaagttaaaaaaacaaaaagatcagtttccggcggtgccggaacaaccagcctcaaaaaattgacttcatggatcgctaaggcaaaagcaaaggctgacaatctgcggttatccaaaaaacgcactcaaaaacatgagttcaagcagaaagtagaggcggctgcgcggaaatatgcttacctgaagaacaagcgttcgcctgatattggcgggatatcaaacttcgataacctaccgcattgcatgacggtaaacgaagctcttaatgcggttttagccaaaaataaagataacgaacaatggggtgcggttgctggcgcctatatcgccgacatcaccgatggggaagatcgggctcgccacttcgggctcatgagcgcttgtttcggcgtgggtatggtggcaggccccgtggccgggggactgttgggcgccatctccttgcatgcaccattccttgcggcggcggtgctcaacggcctcaacctactactgggctgcttcctaatgcaggagtcgcataagggagagcgtcgaggagaacttctaaagatcgtcgttttgccaggtgaccacgttggtcaagaaatcacagccgaagccattaaggttcttaaagctatttctgatgttcgttccaatgtcaagttcgatttcgaaaatcatttaattggtggtgctgctatcgacctgcaggggggggggggaaagccacgttgtgtctcaaaatctctgatgttacattgcacaagataa

SEQ ID NO: 138264 - DNA, 1650 bp, Homo sapiens; identical to SEQ ID NO: 127453

SEQ ID NO: 138265 - DNA, 1905 bp, Homo sapiens
atgccagagacggctgcagtcctgtgcctggcctggccggcctcggtgctacccgccacccctcacgtcttcccttctggctccttgtacgtcactggtcagtccgcgaaccctgactctccatcagtcgaaggccgtggcggcggcacttttgcccatgaattgctcgctgtggagtacgcaggctggatttctcccgcgtttcggctgaaggtaaaccagacatttatcgactatcgaaccggaagattacaacctgctattccgcagagtctccctgaagctctccgtttggctgccgacctggcagagcaaaagcaacggctggagcaaaaaatgcttatggatgcacctaaagtcgaattcgctgaacgcgttgctaccgccagcggggttctaatcggcaactatgccaaagtgctcggcctgggccaaaactatctcttcacctggttgcgtgataacggaattctgatcgcaaccggtgaacgcaggaacgtccccaaacaagaatacatatctcgtgggtatttcacccttaaagaaaccgtgatcgatacaagcaatggaagcaggatttctttcacgactcgtataaccggcaaagacgtagtaagaaccaccagcattgtaatgctggctaaagtcactttcctgagctgtataacgatgagcgattttactttttctggctatgaattggcctgctttgtaacacactccggtctatcccgtagcgccgggcatatcctgtcgcaatgtgcaaatctcgcggcaacaaccagtgaatacttcattcacaagcctcaccgcctgatcgcggcagaaactggttatagccaatcaaccgtcgttcgtgcattccgtgaagctgtaaacaaaggaattctgtctgtagagattgttatcggcgatcaccgtgaacgtcgcgctaacctgtaccggtttacaccatcctttttggccttcgcacaacaagccaaaaatgcgctgatagaaagcaaattaaagatctcttcagcggcaaccaaggttaaagctgttctcgctaagacattggctttatttaattttttatccacacccccatgtcaaaatgataccccctccccctgtcaggatgacgtggcaataaagaataagaagtcacaagttaaaaaaacaaaaagatcagtttccggcggtgccggaacaaccagcctcaaaaaattgacttcatggatcgctaaggcaaaagcaaaggctgacaatctgcggttatccaaaaaacgcactcaaaaacatgagttcaagcagaaagtagaggcggctgcgcggaaatatgcttacctgaagaacaagcgttcgcctgatattggcgggatatcaaacttcgataacctaccgcattgcatgacggtaaacgaagctcttaatgcggttttagccaaaaataaagataacgaacaatggggtgcggttgctggcgcctatatcgccgacatcaccgatggggaagatcgggctcgccacttcgggctcatgagcgcttgtttcggcgtgggtatggtggcaggccccgtggccgggggactgttgggcgccatctccttgcatgcaccattccttgcggcggcggtgctcaacggcctcaacctactactgggctgcttcctaatgcaggagtcgcataagggagagcgtcgaggagaacttctaaagatcgtcgttttgccaggtgaccacgttggtcaagaaatcacagccgaagccattaaggttcttaaagctatttctgatgttcgttccaatgtcaagttcgatttcgaaaatcatttaattggtggtgctgctatcgacctgcaggggggggggggaaagccacgttgtgtctcaaaatctctgatgttacattgcacaagataa

SEQ ID NO: 138266 - DNA, 2901 bp, Homo sapiens
atggccccggcgcccctgggactcggccccagccatctcaccacccgcgccagggggcggggctcccacggcccggccccgggttcgggctccgttggccgagggggccgtacggaggtggcagctgtgggaggaggcggcgtggaaggccgaggagctcaagcccggaccaatccccacgttccgggccgcgaccctgaccctgcagcgtaccgggaagcgaaaccggccggatgggccgctgagcccgaatcgggcactggtgaggctcgggcagagctggcagccccggacgggagcgggcccacggggctgcagggtctgggagcccgggatgcgggtgtggagccccctggagctgagatcaggatgttccgcttcatgagggacgtggagcctgaggatcccatgttcctgatggatccctttgctattcaccgtcagcatatgagccgtatgttgtcaggtggctttggatatagccccttcctcagcatcacagatggcaacatgccagggaccaggcctgccagccgccggatgcagcagtcgggtggtttcatggacatgtttgggatgatgaatgacatgattggaaacatggaacacatgacagctggaggcaattgccagaccttctcatcttccactgtcatctcctactccaatacgggtgatggtgcccccaaggtctaccaagagacatcagagatgcgctcggcaccaggcgggatccgggagacacggaggactgttcgggattcagacagtggactggagcagatgtccattgggcatcacatccgggacagggctcacatcctccagcgctcccgaaaccatcgcacgggggaccaggaggagcggcaggactatatcaacctggatgagaccttcgccgctttggcccgaaaagctgtggctcgctcgcacatcggcctccaggagccaggccgcacacaggcctcatgtccgctctgtcctttccaggtcactcacctccctggacctgagttatgtggggcccttctagccacaaaatatcaggcccagcctctcaacccggattttagttccagtgcccacacgcgcatgtgtagtcttgagtgtgactgcggcagagtcgaaggccgtggcggcggcacttttgcccatgaattgctcgctgtggagtacgcaggctggatttctcccgcgtttcggctgaaggtaaaccagacatttatcgactatcgaaccggaagattacaacctgctattccgcagagtctccctgaagctctccgtttggctgccgacctggcagagcaaaagcaacggctggagcaaaaaatgcttatggatgcacctaaagtcgaattcgctgaacgcgttgctaccgccagcggggttctaatcggcaactatgccaaagtgctcggcctgggccaaaactatctcttcacctggttgcgtgataacggaattctgatcgcaaccggtgaacgcaggaacgtccccaaacaagaatacatatctcgtgggtatttcacccttaaagaaaccgtgatcgatacaagcaatggaagcaggatttctttcacgactcgtataaccggcaaagacgtagtaagaaccaccagcattgtaatgctggctaaagtcactttcctgagctgtataacgatgagcgattttactttttctggctatgaattggcctgctttgtaacacactccggtctatcccgtagcgccgggcatatcctgtcgcaatgtgcaaatctcgcggcaacaaccagtgaatacttcattcacaagcctcaccgcctgatcgcggcagaaactggttatagccaatcaaccgtcgttcgtgcattccgtgaagctgtaaacaaaggaattctgtctgtagagattgttatcggcgatcaccgtgaacgtcgcgctaacctgtaccggtttacaccatcctttttggccttcgcacaacaagccaaaaatgcgctgatagaaagcaaattaaagatctcttcagcggcaaccaaggttaaagctgttctcgctaagacattggctttatttaattttttatccacacccccatgtcaaaatgataccccctccccctgtcaggatgacgtggcaataaagaataagaagtcacaagttaaaaaaacaaaaagatcagtttccggcggtgccggaacaaccagcctcaaaaaattgacttcatggatcgctaaggcaaaagcaaaggctgacaatctgcggttatccaaaaaacgcactcaaaaacatgagttcaagcagaaagtagaggcggctgcgcggaaatatgcttacctgaagaacaagcgttcgcctgatattggcgggatatcaaacttcgataacctaccgcattgcatgacggtaaacgaagctcttaatgcggttttagccaaaaataaagataacgaacaatggggtgcggttgctggcgcctatatcgccgacatcaccgatggggaagatcgggctcgccacttcgggctcatgagcgcttgtttcggcgtgggtatggtggcaggccccgtggccgggggactgttgggcgccatctccttgcatgcaccattccttgcggcggcggtgctcaacggcctcaacctactactgggctgcttcctaatgcaggagtcgcataagggagagcgtcgaggagaacttctaaagatcgtcgttttgccaggtgaccacgttggtcaagaaatcacagccgaagccattaaggttcttaaagctatttctgatgttcgttccaatgtcaagttcgatttcgaaaatcatttaattggtggtgctgctatcgacctgcaggggggggggggaaagccacgttgtgtctcaaaatctctgatgttacattgcacaagataa

SEQ ID NO: 138267 - DNA, 2607 bp, Homo sapiens; identical to SEQ ID NO: 124533

SEQ ID NO: 138268 - DNA, 1254 bp, Homo sapiens; identical to SEQ ID NO: 124515
  misc_feature (1)...(1254): n = a,t,c or g

SEQ ID NO: 138269 - DNA, 2949 bp, Homo sapiens
atgcccttgagagccttcaacccagtcagctccttccggtgggcgcggggcatgactatcgtcgccgcacttatgactgtcttctttatcatgcaactcgtaggacaggtgccggcagcgctctgggtcattttcggcgaggaccgctttcgctggagcgcgacgatgatcggcctgtcgcttgcggtattcggaatcttgcacgccctcgctcaagccttcgtcactggtcccgccaccaaacgtttcggcgagaagcaggccattatcgccggcatggcggccgacgcgctgggctacgtcttgctggcgttcgcgacgcgaggctggatggccttccccattatgattcttctcgcttccggcggcatcgggatgcccgcgttgcaggccatgctgtccaggcaggtagatgacgaccatcagggacagcttcaaggatcgctcgcggctcttaccagcctaacttcgatcattggaccgctgatcgtcacggcgatttatgccgcctcggcgagcacatggaacgggttggcatggattgtaggcgccgccctataccttgtctgcctccccgcgtttgcgtcgcggtgcatggagccgggccacctcgacctgaatggaagccggcggcacctcgctaacggattcaccactccaagaattggagccaatcaattcttgcggagaactgtgaatgcgcaaaccaacccttggcagaacatatccatcgcgtccgccatctccagcagccgcacgcggcgcatctcgggcagcgttgggtcctggccacgggtgcgcatgatcgtgctcctgtcgttgaggacccggctaggctggcggggttgccttactgtaacccgtatcgtgagcatcctctctcgtttcatcggtatcattacccccatgaacagaaatcccccttacacggaggcatcagtgaccaaacaggaaaaaaccgcccttaacatggcccgctttatcagaagccagacattaacgcttctggagaaactcaacgagctggacgcggatgaacaggcagacatctgtgaatcgcttcacgaccacgctgatgagctttaccgcagctgcctcgcgcgtttcggtgatgacggtgaaaactctgacacatgcagctcccggagacggtcacagcttgtctgtaagcggatgccgggagcagacaagcccgtcaggctgttcacgggatgttggcggctaaaccagacatttatcgactatcgaaccggaagattacaacctgctattccgcagagtctccctgaagctctccgtttggctgccgacctggcagagcaaaagcaacggctggagcaaaaaatgcttatggatgcacctaaagtcgaattcgctgaacgcgttgctaccgccagcggggttctaatcggcaactatgccaaagtgctcggcctgggccaaaactatctcttcacctggttgcgtgataacggaattctgatcgcaaccggtgaacgcaggaacgtccccaaacaagaatacatatctcgtgggtatttcacccttaaagaaaccgtgatcgatacaagcaatggaagcaggatttctttcacgactcgtataaccggcaaaggtcagcagtggctgatgaagcgattgcttgatgctgacgtagtaagaaccaccagcattgtaatgctggctaaagtcactttcctgagctgtataacgatgagcgattttactttttctggctatgaattggcctgctttgtaacacactccggtctatcccgtagcgccgggcatatcctgtcgcaatgtgcaaatctcgcggcaacaaccagtgaatacttcattcacaagcctcaccgcctgatcgcggcagaaactggttatagccaatcaaccgtcgttcgtgcattccgtgaagctgtaaacaaaggaattctgtctgtagagattgttatcggcgatcaccgtgaacgtcgcgctaacctgtaccggtttacaccatcctttttggccttcgcacaacaagccaaaaatgcgctgatagaaagcaaattaaagatctcttcagcggcaaccaaggttaaagctgttctcgctaagacattggctttatttaattttttatccacacccccatgtcaaaatgataccccctccccctgtcaggatgacgtggcaataaagaataagaagtcacaagttaaaaaaacaaaaagatcagtttccggcggtgccggaacaaccagcctcaaaaaattgacttcatggatcgctaaggcaaaagcaaaggctgacaatctgcggttatccaaaaaacgcactcaaaaacatgagttcaagcagaaagtagaggcggctgcgcggaaatatgcttacctgaagaacaagcgttcgcctgatattggcgggatatcaaacttcgataacctaccgcattgcatgacggtaaacgaagctcttaatgcggttttagccaaaaataaagataacgaacaatggggtgcggttgctggcgcctatatcgccgacatcaccgatggggaagatcgggctcgccacttcgggctcatgagcgcttgtttcggcgtgggtatggtggcaggccccgtggccgggggactgttgggcgccatctccttgcatgcaccattccttgcggcggcggtgctcaacggcctcaacctactactgggctgcttcctaatgcaggagtcgcataagggagagcgtcgaggagaacttctaaagatcgtcgttttgccaggtgaccacgttggtcaagaaatcacagccgaagccattaaggttcttaaagctatttctgatgttcgttccaatgtcaagttcgatttcgaaaatcatttaattggtggtgctgctatcgacctgcaggggggggggggaaagccacgttgtgtctcaaaatctctgatgttacattgcacaagataa

SEQ ID NO: 138270 - DNA, 1533 bp, Homo sapiens; identical to SEQ ID NO: 124501

SEQ ID NO: 138271 - DNA, 1989 bp, Homo sapiens; identical to SEQ ID NO: 124535

SEQ ID NO: 138272 - DNA, 2265 bp, Homo sapiens
atggatgaagctggaaacaatcattctcatcaaactaacacaggaacagaaaatcaagcaccgcatgttctcactcataagtgggagttgtacaatgagaacacatggacacagggaggggaaaatcacactgaggactgtcgggggatgcggggaggaatagcattagtagaaatacctaatgtagatgacgggttgatgcatgcagcaaactaccatggcacggcatgtgatgggggtgtggctcacttatgtggtgccctgctgctccagcccctaggacaagccacagttctgacttttacgactgcacttctggcaggaggagcgactcaagccttcgcgaaagaaaataaccaaaaagcatacaaagaaacgtacggcgtctctcatattacacgccatgatatgctgcagatccctaaacagcagcaaaacgaaaaataccaagtgcctcaattcgatcaatcaacgattaaaaatattgagtctgcaaaaggacttgatgtgtgggacagctggccgctgcaaaacgctgacggaacagtagctgaatacaacggctatcacgttgtgtttgctcttgcgggaagcccgaaagacgctgatgacacatcaatctacatgttttatcaaaaggtcgaaggccgtggcggcggcacttttgcccatgaattgctcgctgtggagtacgcaggctggatttctcccgcgtttcggctgaaggtaaaccagacatttatcgactatcgaaccggaagattacaacctgctattccgcagagtctccctgaagctctccgtttggctgccgacctggcagagcaaaagcaacggctggagcaaaaaatgcttatggatgcacctaaagtcgaattcgctgaacgcgttgctaccgccagcggggttctaatcggcaactatgccaaagtgctcggcctgggccaaaactatctcttcacctggttgcgtgataacggaattctgatcgcaaccggtgaacgcaggaacgtccccaaacaagaatacatatctcgtgggtatttcacccttaaagaaaccgtgatcgatacaagcaatggaagcaggatttctttcacgactcgtataaccggcaaaggtcagcagtggctgatgaagcgattgcttgatgctgacgtagtaagaaccaccagcattgtaatgctggctaaagtcactttcctgagctgtataacgatgagcgattttactttttctggctatgaattggcctgctttgtaacacactccggtctatcccgtagcgccgggcatatcctgtcgcaatgtgcaaatctcgcggcaacaaccagtgaatacttcattcacaagcctcaccgcctgatcgcggcagaaactggttatagccaatcaaccgtcgttcgtgcattccgtgaagctgtaaacaaaggaattctgtctgtagagattgttatcggcgatcaccgtgaacgtcgcgctaacctgtaccggtttacaccatcctttttggccttcgcacaacaagccaaaaatgcgctgatagaaagcaaattaaagatctcttcagcggcaaccaaggttaaagctgttctcgctaagacattggctttatttaattttttatccacacccccatgtcaaaatgataccccctccccctgtcaggatgacgtggcaataaagaataagaagtcacaagttaaaaaaacaaaaagatcagtttccggcggtgccggaacaaccagcctcaaaaaattgacttcatggatcgctaaggcaaaagcaaaggctgacaatctgcggttatccaaaaaacgcactcaaaaacatgagttcaagcagaaagtagaggcggctgcgcggaaatatgcttacctgaagaacaagcgttcgcctgatattggcgggatatcaaacttcgataacctaccgcattgcatgacggtaaacgaagctcttaatgcggttttagccaaaaataaagataacgaacaatggggtgcggttgctggcgcctatatcgccgacatcaccgatggggaagatcgggctcgccacttcgggctcatgagcgcttgtttcggcgtgggtatggtggcaggccccgtggccgggggactgttgggcgccatctccttgcatgcaccattccttgcggcggcggtgctcaacggcctcaacctactactgggctgcttcctaatgcaggagtcgcataagggagagcgtcgaggagaacttctagtatatctacatacctaa

SEQ ID NO: 138273 - DNA, 1014 bp, Homo sapiens
atgaacaccgaaaatctctcccagcactttagaaaggggaccctgactgtgttaaagaagaagtgggagaacccagggctgggagcagagtctcacacagactctctacggaacagcagcactgagattaggcacagagcagaccatcctcctgctgaagtgacaagccacgctgcttctggagccaaagctgaccaagaagaacaaatccaccccagatctagactcaggtcacctcctgaagccctcgttcagggtcgatatccccacatcaaggacggtgaggatcttaaagaccactcaacagaaagtaaaaaaatggaaaattgtctaggagaatccaggcatgaagtagaaaaatcagaaatcagtgaaaacacagatgcttcgggcaaaatagagaaatataatgttccgctgaacaggcttaagatgatgtttgagaaaggtgaaccaactcaaactaagacaagctgtgaccgtctccgggagctgcatgtgtcagaggttttcaccgtcatcaccgaaacgcgcgaggcagctgcggtaaagctcatcagcgtggtcgtgaagcgattcacagatgtctgcctgttcatccgcgtccagctcgttgagtttctccagaagcggggatttctgttcatgggggtaatgataccgatgaaacgagagaggatgctcacgatacgggttactgatgatgaacatgcccggttactggaacgttgtgagggtaaacaactggcggtatggatgcggcgggaccagagaaaaatcactcagggtcaatgccagcgcttcgttaatacagatgtaggtgttccacagggtagccagcagcatcctgcgatgcagatccggaacataatggtgcagggcgctgacttccgcgtttccagactttacgaaacacggaaaccgaagaccattcatgttgttgctcaggtcgcagacgttttgcagcagcagtcgcttcacgttcgctcgcgtatcggtgattcattctgctaa

SEQ ID NO: 138274 - DNA, 1158 bp, Homo sapiens
atgcttattgaggcacctaaagtcgaattcgctgaacgcgttgctaccgccagcggggttctaatcggcaactatgccaaagtgctcggcctgggccaaaactatctcttcacctggttgcgtgataacggaattctgatcgcaaccggtgaacgcaggaacgtccccaaacaagaatacatatctcgtgggtatttcacccttaaagaaaccgtgatcgatacaagcaatggaagcaggatttctttcacgactcgtataaccggcaaaggtcagcagtggctgatgaagcgattgcttgatgctgacgtagtaagaaccaccagcattgtaatgctggctaaagtcactttcctgagctgtataacgatgagcgattttactttttctggctatgaattggcctgctttgtaacacactccggtctatcccgtagcgccgggcatatcctgtcgcaatgtgcaaatctcgcggcaacaaccagtgaatacttcattcacaagcctcaccgcctgatcgcggcagaaactggttatagccaatcaaccgtcgttcgtgcattccgtgaagctgtaaacaaaggaattctgtctgtagagattgttatcggcgatcaccgtgaacgtcgcgctaacctgtaccggtttacaccatcctttttggccttcgcacaacaagccaaaaatgcgctgatagaaagcaaattaaagatctcttcagcggcaaccaaggttaaagctgttctcgctaagacattggctttatttaattttttatccacacccccatgtcaaaatgataccccctccccctgtcaggatgacgtggcaataaagaataagaagtcacaagttaaaaaaacaaaaagatcagtttccggcggtgccggaacaaccagcctcaaaaaattgacttcatggatcggtgacactatagaaggatccgcggaattcttaggcctgtttggagagttaagcaaaataaatgcatttgatactcctgattcaccgctcttgagaggcaaggagtttagtgactctatacataatacctttaaccatctgtggagaaccaaggaatataatgaagttggttgtttgctcctaaattcactggacaaagtgatgaaagaaaatgatgaacttaaagtaaaataa

SEQ ID NO: 138275 - DNA, 1252 bp, Homo sapiens
ctgagccagtagtgcaacaggacccggaaatagcctgcaactctgcggccagactggcggggataactgccctgactgtggtgcggtgatgggcgacgcaacataccaggaaacattcgatgaagagagtcaggttgaagctaaggaaaatgatccggaggaaatggaaggcgctgaacatccgcacaatgagaatgctggcagcgatccgcatcgcgattgcagtgatgaaactggcgaagtcgcagatcccgtaatcgtagaagacatagagccaggtatttattacggaatttcgaatgagaattaccacgcgggtcccggtatcagtaagtctcagctcgatgacattgctgatactccggcattttgcatagttgccgattagaaccccgttggcggtagcaacgcgttcagcgaatcgaactttaggtgcatccataagcatttttggctccagccgttgcttttgctctgccaggtcggcagccaaacggagagcttcagggagactctgcggaatagcaggttgtaatcttccggttcgatagtcgataaatgtctggtttaccttcagccgaaacgcgggagaaatccagcctgcgtactccacagcgagcaattcatgggcaaaagtgccgccgccacggccttcgaccggtaaacgagtcgtgaagaaatcctgctccaatgctgtatcgatcacggtccctttaagggtgaaaaccccacgagataagtatcctagtatggggacgttcctgcgttcaccggttgcgatcagaattccgttatcacgcaaccaggtgaagagatagttttggcccaggccgagcactttggcatagttgccgattagaaccccgctggcggtagcaacgcgttcagcgaattcgactttaggtgcatccataagcattttttgctccagccgttgcttttgctctgccaggtcggcagccaaacggagagcttcagggagactctgcggaatagcaggttgtaatcttccggttcgatagtcgataaatgtctggtttaccttcagccgaaacgcgggagaaatccagcctgcgtactccacagcgagcaattcatgggcaaaagtgccgccgccacggccttcgactttggcatagtcgccgattagaaccccgctgtcggtagcaacgcgttcagcgaattcgactttaggtgcatccataagcattgtttgctccagccgttgcttatgctctgccaggtcgtcagc

SEQ ID NO: 138276 - DNA, 2931 bp, Homo sapiens
atgacgatgtgggtactacattgcgcattcacctactttgtgagcgcatggtcgaagcatggatatgcgcatgctgtgactgccaagatcctctacgccggacgcatcgtggccggcatcaccggcgccacaggtgcggttgctggcgcctatatcgccgacatcaccgatggggaagatcgggctcgccacttcgggctcatgagcgcttgtttcggcgtgggtatggtggcaggccccgtggccgggggactgttgggcgccatctccttgcatgcaccattccttgcggcggcggtgctcaacggcctcaacctactactgggctgcttcctaatgcaggagtcgcataagggagagcgtcgaccgatgcccttgagagccttcaacccagtcagctccttccggtgggcgcggggcatgactatcgtcgccgcacttatgactgtcttctttatcatgcaactcgtaggacaggtgccggcagcgctctgggtcattttcggcgaggaccgctttcgctggagcgcgacgatgatcggcctgtcgcttgcggtattcggaatcttgcacgccctcgctcaagccttcgtcactggtcccgccaccaaacgtttcggcgagaagcaggccattatcgccggcatggcggccgacgcgctgggctacgtcttgctggcgttcgcgacgcgaggctggatggccttccccattatgattcttctcgcttccggcggcatcgggatgcccgcgttgcaggccatgctgtccaggcaggtagatgacgaccatcagggacagcttcaaggatcgctcgcggctcttaccagcctaacttcgatcattggaccgctgatcgtcacggcgatttatgccgcctcggcgagcacatggaacgggttggcatggattgcttttgcaaaaagcttcacgctgccgcaagcactcagggcgcaagggctgctaaaggaagcggaacacgtagaaagccagtccgcagaaacggtgctgaccccggatgaatgtcagctactgggctatctggacaagggaaaacgcaagcgcaaagagaaagcaggttctccggccgcttgggtggagaggctattcggctatgactgggcacaacagacaatcggctgctctgatgccgccgtgttccggctgtcagcgcaggggcgcccggttctttttgtcaagaccgacctgtccggtgccctgaatgaactgcaggacgaggcagcgcggctatcgtggctggccacgacgggcgttccttgcgcagctgtgctcgacgttgtcactgaagcgggaagggactggctgctattgggcgaagtgccggggcaggatctcctgtcatctcaccttgctcctgccgagaaagtatccatcatggctgatgcaatgcggcggctgcatacgcttgatccggctacctgcccattcgaccaccaagcgaaacatcgcatcgagcgagcacgtactcggatggaagccggtcttgtcgatcaggatgatctggacgaagagcatcaggggctcgcgccagccgaactgttcgccaggctcaaggcgcgcatgcccgacggcgaggatctcgtcgtgacccatggcgatgcctgcttgccgaatatcatggtggaaaatggccgcttttctggattcatcgactgtggccggctgggtgtggcggaccgctatcaggacatagcgttggctacccgtgatattgctgaagagcttggcggcgaatgggctgaccgcttcctcgtgctttacgttcttctgagcgggactctggggttcgaaatgaccgaccaagcgacgcccaacctgccatcacgagatttcgattccaccgccgccttctatgaaaggttgggcttcggaatcgttttccgggacgccggctggatgatcctccagcgcggggatctcatgctggagttcttcgcccaccccgggctcgatcccctcgcgagttggttcagctgctgcctgaggctggacgacctcgcggagttctaccggcagtgcaaatccgtcggcatccaggaaaccagcagcggctatccgcgcatccatgcccccgaactgcaggagtggggaggcacgatggccgctttggtccggatctttgtgaaggaaccttacttctgtgaaacgctggtgaaagtaaaagatgctgaagatcagttgggtgcacgagtgggttacatcgaactggatctcaacagcggtaagatccttgagagttttcgccccgaagaacgttttccaatgatgagcacttttaaagttctgctatgtggcgcggtattatcccgtgttgacgccgggcaagagcaactcggtcgccgcatacactattctcagaatgacttggttgagtactcaccagtcacagaaaagcatcttacggatggcatgacagtaagagaattatgcagtgctgccataaccatgagtgataacactgcggccaacttacttctgacaacgatcggaggaccgaaggagctaaccgcttttttgcacaacatgggggatcatgtaactcgccttgatcgttgggaaccggagctgaatgaagccataccaaacgacgagcgtgacaccacgatgcctgcagcaatggcaacaacgttgcgcaaactattaactggcgaactacttactctagcttcccggcaacaattaatagactggatggaggcggataaagttgcaggaccacttctgcgctcggcccttccggctggctggtttattgctgataaatctggagccggggggcggagcctatggaaaaacgccagcaacgcggcctttttacggttcctggccttttgctggccttttgctcacatgttctttcctgcgttatcccctgattctgtggataaccgtattaccgcctttgagtga

SEQ ID NO: 138277 - DNA, 2562 bp, Homo sapiens
atgcccttgagagccttcaacccagtcagctccttccggtgggcgcggggcatgactatcgtcgccgcacttatgactgtcttctttatcatgcaactcgtaggacaggtgccggcagcgctctgggtcattttcggcgaggaccgctttcgctggagcgcgacgatgatcggcctgtcgcttgcggtattcggaatcttgcacgccctcgctcaagccttcgtcactggtcccgccaccaaacgtttcggcgagaagcaggccattatcgccggcatggcggccgacgcgctgggctacgtcttgctggcgttcgcgacgcgaggctggatggccttccccattatgattcttctcgcttccggcggcatcgggatgcccgcgttgcaggccatgctgtccaggcagcctaacttcgatcattggaccgctgatcgtcacggcgatttatgccgcctcggcgagcacatggaacgggttggcatggattgtaggcgccgccctataccttgtctgcctccccgcgttgcgtcgcggtgcatggagccgggccacctcgacctgaatggaagccggcggcacctcgctaacggattcaccactccaagaattggagccaatcaattcttgcggagaactgtgaatgcgcaaaccaacccttggcagaacatatccatcgcgtccgccatctccagcagccgcacgcggcgcatctcgggcagcgttgggtcctggccacggtctggaaacgcggaagtcagcgccctgcaccattatgttccggatctgcatcgcaggatgctgctggctaccctgtggaacacctacatctgtattaacgaagcgctggcattgaccctgagtgatttttctctggtcccgccgcatccataccgccagttgtttaccctcacaacgttccataaccgggcatgttcatcatcagtaacccgtatcgtgagcatcctctctcgtttcatcggtatcattacccccatgaacagaaatcccccttacacggaggcatcagtgaccaaacaggaaaaaaccgcccttaacatggcccgctttatcagaagccagacattaacgcttctggagaaactcaacgagctggacgcggatgaacaggcagacatctgtgaatcgcttcacgaccacgctgatgagctttaccgcagctgcctcgcgcgtttcggtgatgacggaggagcgactcaagccttcgcgaaagaaaataaccaaaaagcatacaaagaaacgtacggcgtctctcatattacacgccatgatatgctgcagatccctaaacagcagcaaaacgaaaaataccaagtgcctcaattcgatcaatcaacgattaaaaatattgagtctgcaaaaggacttgatgtgtgggacagctggccgctgcaaaacgctgacggaacagtagctgaatacaacggctatcacgttgtgtttgctcttgcgggaagcccgaaagacgctgatgacacatcaatctacatgttttatcaaaaggtcggcgacaactcaatcgacagctggaaaaacgcgggccgtgtctttaaagacagcgataagttcgacgccaacgatccgatcctgaaagatcagacgcaagaatggtccggttctgcaacctttacatctgacggaaaaatccgtttattctacactgactattccggtaaacattacggcaaacaaagcctgacaacagcgcaggtaaatgtgtcaaaatctgatgacacactcaaaatcaacggagtggaagatcacaaaacgatttttgacggagacggaaaaacatatcagaacgttcagcagtttatcgatgaaggcaattatacatccggcgacaaccatacgctgagagaccctcactacgttgaagacaaaggccataaataccttgtattcgaagccaacacgggaacagaaaacggataccaaggcgaagaatctttatttaacaaagcgtactacggcggcggcacgaacttcttccgtaaagaaagccagaagcttcagcagagcgctaaaaaacgcgatgctgagttagcgaacggcgccctcggtatcatagagttaaataatgattacacattgaaaaaagtaatgaagccgctgatcacttcaaacacggtaactgatgaaatcgagcgcgcgaatgttttcaaaatgaacggcaaatggtacttgttcactgattcacgcggttcaaaaatgacgatcgatggtattaactcaaacgatatttacatgcttggttatgtatcaaactctttaaccggcccttacaagccgctgaacaaaacagggcttgtgctgcaaatgggtcttgatccaaacgatgtgacattcacttactctcacttcgcagtgccgcaagccaaaggcaacaatgtggttatcacaagctacatgacaaacagaggcttcttcgaggataaaaaggcaacatttgcgccaagcttcttaatgaacatcaaaggcaataaaacatccgttgtcaaaaacagcatcctggagcaaggacagctgacagtcaactaa

SEQ ID NO: 138278 - DNA, 2922 bp, Homo sapiens
aataaagccattattgcccgtgtcacaaccttgtcagatgtagtagttggtctggaatcatttattggttctgagagagaaactaacccattgtataaggattatcatggattgattcatatacggcagattcctcggcttaataacttgatctgtgatgaatcagatgtcaaagacttagcttttaaattaaaaaggaagctattcaccattgagagcaatatagtcctacaatgtcaagctcgaccgatgcccttgagagccttcaacccagtcagctccttccggtgggcgcggggcatgactatcgtcgccgcacttatgactgtcttctttatcatgcaactcgtaggacaggtgccggcagcgctctgggtcattttcggcgaggaccgctttcgctggagcgcgacgatgatcggcctgtcgcttgcggtattcggaatcttgcacgccctcgctcaagccttcgtcactggtcccgccaccaaacgtttcggcgagaagcaggccattatcgccggcatggcggccgacgcgctgggctacgtcttgctggcgttcgcgacgcgaggctggatggccttccccattatgattcttctcgcttccggcggcatcgggatgcccgcgttgcaggccatgctgtccaggcaggtagatgacgaccatcagggacagcttcaaggatcgctcgcggctcttaccagcctaacttcgatcattggaccgctgatcgtcacggcgatttatgccgcctcggcgagcacatggaacggtaaccgggcatgttcatcatcagtaacccgtatcgtgagcatcctctctcgtttcatcggtatcattacccccatgaacagaaatcccccttacacggaggcatcagtgaccaaacaggaaaaaaccgcccttaacatggcccgctttatcagaagccagacattaacgcttctggagaaactcaacgagctggacgcggatgaacaggcagacatctgtgaatcgcttcacgaccacgctgatgagctttaccgcagctgcctcgcgcgtttcggtgatgacggaaacagctatgaccatgattacgccaagcttgcatgcctgcaggtcgaaggccgtggcggcggcacttttgcccatgaattgctcgctgtggagtacgcaggctggatttctcccgcgtttcggctgaaggtaaaccagacatttatcgactatcgaaccggaagattacaacctgctattccgcagagtctccctgaagctctccgtttggctgccgacctggcagagcaaaagcaacggctggagcaaaaaatgcttatggatgcacctaaagtcgaattcgctgaacgcgttgctaccgccagcggggttctaatcggcaactatgccaaagtgctcggcctgggccaaaactatctcttcacctggttgcgtgataacggaattctgatcgcaaccggtgaacgcaggaacgtccccaaacaagaatacatatctcgtgggtatttcacccttaaagaaaccgtgatcgatacaagcaatggaagcaggatttctttcacgactcgtataaccggcaaaggtcagcagtggctgatgaagcgattgcttgatgctgacgtagtaagaaccaccagcattgtaatgctggctaaagtcactttcctgagctgtataacgatgagcgattttactttttctggctatgaattggcctgctttgtaacacactccggtctatcccgtagcgccgggcatatcctgtcgcaatgtgcaaatctcgcggcaacaaccagtgaatacttcattcacaagcctcaccgcctgatcgcggcagaaactggttatagccaatcaaccgtcgttcgtgcattccgtgaagctgtaaacaaaggaattctgtctgtagagattgttatcggcgatcaccgtgaacgtcgcgctaacctgtaccggtttacaccatcctttttggccttcgcacaacaagccaaaaatgcgctgatagaaagcaaattaaagatctcttcagcggcaaccaaggttaaagctgttctcgctaagacattggctttatttaattttttatccacacccccatgtcaaaatgataccccctccccctgtcaggatgacgtggcaataaagaataagaagtcacaagttaaaaaaacaaaaagatcagtttccggcggtgccggaacaaccagcctcaaaaaattgacttcatggatcgctaaggcaaaagcaaaggctgacaatctgcggttatccaaaaaacgcactcaaaaacatgagttcaagcagaaagtagaggcggctgcgcggaaatatgcttacctgaagaacaagcgttcgcctgatattggcgggatatcaaacttcgataacctaccgcattgcatgacggtaaacgaagctcttaatgcggttttagccaaaaataaagataacgaacaatggggtgcggttgctggcgcctatatcgccgacatcaccgatggggaagatcgggctcgccacttcgggctcatgagcgcttgtttcggcgtgggtatggtggcaggccccgtggccgggggactgttgggcgccatctccttgcatgcaccattccttgcggcggcggtgctcaacggcctcaacctactactgggctgcttcctaatgcaggagtcgcataagggagagcgtcgaggagaacttctaaagatcgtcgttttgccaggtgaccacgttggtcaagaaatcacagccgaagccattaaggttcttaaagctatttctgatgttcgttccaatgtcaagttcgatttcgaaaatcatttaattggtggtgctgctatcgacctgcaggggggggggggaaagccacgttgtgtctcaaaatctctgatgttacattgcacaagataa

SEQ ID NO: 138279 - DNA, 2126 bp, Homo sapiens
atgacgatgtgggtactacattgcgcattcacctactttgtgagcgcatggtcgaagcatggatatgcgcatgctgtgactgccaagatcctctacgccggacgcatcgtggccggcatcaccggcgccacaggtgcggttgctggcgcctatatcgccgacatcaccgatggggaagatcgggctcgccacttcgggctcatgagcgcttgtttcggcgtgggtatggtggcaggccccgtggccgggggactgttgggcgccatctccttgcatgcaccattccttgcggcggcggtgctcaacggcctcaacctactactgggctgcttcctaatgcaggagtcgcataagggagagcgtcgaccgatgcccttgagagccttcaacccagtcagctccttccggtgggcgcggggcatgactatcgtcgccgcacttatgactgtcttctttatcatgcaactcgtaggacaggtgccggcagcgctctgggtcattttcggcgaggaccgctttcgctggagcgcgacgatgatcggcctgtcgcttgcggtattcggaatcttgcacgccctcgctcaagccttcgtcactggtcccgccaccaaacgtttcggcgagaagcaggccattatcgccggcatggccggccgacgcgctgggctacgtctggctggcgttcgcgacgcgaagctggatgggccttccccattatgattcttctcgcttccggcggcatcgggatgcccgcgttgcaggccatgctgtccaggcagcctaacttcgatcattggaccgctgatcgtcacggcgatttatgccgcctcggcgagcacatggaacgggttggcatggattgtaggcgccgccctataccttgtctgcctccccgcgttgcgtcgcggtgcatggagccgggccacctcgacctgaatggaagccggcggcacctcgctaacggattcaccactccaagaattggagccaatcaattcttgcggagaactgtgaatgcgcaaaccaacccttggcagaacatatccatcgcgtccgccatctccagcagccgcacgcggcgcatctcgggcagcgttgggtcctgcagatccggctgtggaatgtgtgcttttgcaaaaagcttcacgctgccgcaagcactcagggcgcaagggctgctaaaggaagcggaacacgtagaaagccagtccgcagaaacggtgctgaccccggatgaatgtcagctactgggctatctggacaagggaaaacgcaagcgcaaagagaaagcaggtagcttgcagtgggcttacatggcgatagctagactgggcggttttatggacagcaagcgaaccggaattgccagctggggcgccctctggctattcggctatgactgggcacaacagacaatcggctgctctgatgccgccgtgttccggctgtcagcgcaggggcgcccggttctttttgtcaagaccgacctgtccggtgccctgaatgaactgcaggacgaggcagcgcggctatcgtggctggccacgacgggcgttccttgcgcagctgtgctcgacgttgtcactgaagcgggaagggactggctgctattgggcgaagtgccggggcaggatctcctgtcatctcaccttgctcctgccgagaaagtatccatcatggctgatgcaatgcggcggctgcatacgcttgatccggctacctgcccattcgaccaccaagcgaaacatcgcatcgagcgagcacgtactcggatggaagccggtcttgtcgatcaggatgatctggacgaagagcatcaggggctcgcgccagccgaactgttcgccaggctcaaggcgcgcatgcccgacggcgaggatctcgtcgtgacccatggcgatgcctgcttgccgaatatcatggtggaaaatggccgcttttctggattcatcgactgtggccggctgggtgtggcggaccgctatcaggacatagcgttggctacccgtgatattgctgaagagcttggcggcgaatgggctgaccgcttcctcgtgctttacggtatcgccgctcccgattcgcagcgcatcgccttctatcgccttcttgacgagttcttctga

SEQ ID NO: 138280 - DNA, 2904 bp, Homo sapiens
atgcccttgagagccttcaacccagtcagctccttccggtgggcgcggggcatgactatcgtcgccgcacttatgactgtcttctttatcatgcaactcgtaggacaggtgccggcagcgctctgggtcattttcggcgaggaccgctttcgctggagcgcgacgatgatcggcctgtcgcttgcggtattcggaatcttgcacgccctcgctcaagccttcgtcactggtcccgccaccaaacgtttcggcgagaagcaggccattatcgccggcatggcggccgacgcgctgggctacgtcttgctggcgttcgcgacgcgaggctggatggccttccccattatgattcttctcgcttccggcggcatcgggatgcccgcgttgcaggccatgctgtccaggcagcctaacttcgatcattggaccgctgatcgtcacggcgatttatgccgcctcggcgagcacatggaacgggttggcatggattgtaggcgccgccctataccttgtctgcctccccgcgttgcgtcgcggtgcatggagccgggccacctcgacctgaatggaagccggcggcacctcgctaacggattcaccactccaagaattggagccaatcaattcttgcggagaactgtgaatgcgcaaaccaacccttggcagaacatatccatcgcgtccgccatctccagcagccgcacgcggcgcatctcgggcagcgttgggtcctggccacggtctggaaacgcggaagtcagcgccctgcaccattatgttccggatctgcatcgcaggatgctgctggctaccctgtggaacacctacatctgtattaacgaagcgctggcattgaccctgagtgatttttctctggtcccgccgcatccataccgccagttgtttaccctcacaacgttccataaccgggcatgttcatcatcagtaacccgtatcgtgagcatcctctctcgtttcatcggtatcattacccccatgaacagaaatcccccttacacggaggcatcagtgaccaaacaggaaaaaaccgcccttaacatggcccgctttatcagaagccagacattaacgcttctggagaaactcaacgagctggacgcggatgaacaggcagacatctgtgaatcgcttcacgaccacgctgatgagctttaccgcagctgcctcgcgcgtttcggtgatgacggaaacagctatgaccatgattacgccaagcttgcatgcctgcaggtcgaaggccgtggcggcggcacttttgcccatgaattgctcgctgtggagtacgcaggctggatttctcccgcgtttcggctgaaggtaaaccagacatttatcgactatcgaaccggaagattacaacctgctattccgcagagtctccctgaagctctccgtttggctgccgacctggcagagcaaaagcaacggctggagcaaaaaatgcttatggatgcacctaaagtcgaattcgctgaacgcgttgctaccgccagcggggttctaatcggcaactatgccaaagtgctcggcctgggccaaaactatctcttcacctggttgcgtgataacggaattctgatcgcaaccggtgaacgcaggaacgtccccaaacaagaatacatatctcgtgggtatttcacccttaaagaaaccgtgatcgatacaagcaatggaagcaggatttctttcacgactcgtataaccggcaaaggtcagcagtggctgatgaagcgattgcttgatgcaagaaaccgtgatcgatacaagcaatggaagcaggatttctttcacgactcgtataaccggcaaagcgccgggcatatcctgtcgcaatgtgcaaatctcgcggcaacaaccagtgaatacttcattcacaagcctcaccgcctgatcgcggcagaaactggttatagccaatcaaccgtcgttcgtgcattccgtgaagctgtaaacaaaggaattctgtctgtagagattgttatcggcgatcaccgtgaacgtcgcgctaacctgtaccggtttacaccatcctttttggccttcgcacaacaagccaaaaatgcgctgatagaaagcaaattaaagatctcttcagcggcaaccaaggatgacgtggcaataaagaataagaagtcacaagttaaaaaaacaaaaagatcagtttccggcggtgccggaacaaccagcctcaaaaaattgacttcatggatcgctaaggcaaaagcaaaggctgacaatctgcggttatccaaaaaacgcactcaaaaacatgagttcaagcagaaagtagaggcggctgcgcggaaatatgcttacctgaagaacaagcgttcgcctgatattggcgggatatcaaacttcgataacctaccgcattgcatgacgatcctctacgccggacgcatcgtggccggcatcaccggcgccacaggtgcggttgctggcgcctatatcgccgacatcaccgatggggaagatcgggctcgccacttcgggctcatgagcgcttgtttcggcgtgggtatggtggcaggccccgtggccgggggactgttgggcgccatctccttgcatgcaccattccttgcggcggcggtgctcaacggcctcaacctactactgggctgcttcctaatgcaggagtcgcataagggagagcgtcgaggagaacttctaaagatcgtcgttttgccaggtgaccacgttggtcaagaaatcacagccgaagccattaaggttcttaaagctatttctgatgttcgttccaatgtcaagttcgatttcgaaaatcatttaattggtggtgctgctatcgacctgcaggggggggggggaaagccacgttgtgtctcaaaatctctgatgttacattgcacaagataa

SEQ ID NO: 138281 - DNA, 3663 bp, Homo sapiens
ttaacgcttctggagaaactcaacgagctggacgcggatgaacaggcagacatctgtgaatcgcttcacgaccacgctgatgagctttaccgcagctgcctcgcgcgtttcggtgatgacggtgaaaacctctgacacatgcagctcccggagacggtcacagcttgttggcgctccaatcgcctcgatgggcttctcctccagatacagctgcagatcctgggcgggcacaccgttgagcgtcacctcgtagtgcagattgcactcgttgtcaatggacatccaggccatgccgacggcatgtggattctgtgcatccgtgtgctcctgtcgcttcagcagaatgggttccgccgagtcccgagcatcggccactggacggggcactaggcggccacggatcaggctcgtctcatgctcggtggccacattaacgcccagttcgccggcatacagcgactcgaggaccttgggacccaacttctccacactaccaatggcctggttgaagttgaagctcggcgtcagatcctccagcttggccttccgcttgccctgctcctcaatcaaactgatgttgggcctatcccgggtgttcacgtgctccgtttcgatgttgtaggccagagatccatcggtgttcaagtagacccacgccaaaccgctgctcttggtcgaggattcggcactgtgcggcgccagcagggtctggaagatttcgcagctggctcgggtcacgatgtgtccctggatgcgcagatgtgggtacttcttggactccacggtcagcaggagtttgccacgcgacatcagtcgaagattctgtatggaaatgggcgacgacagctccaggacattgatctcggcagagggtttgcgcacacgtggaatctcatcgaagatcacctccttccgttctgccagctcaattttcacactcagtgctgcatcggcgtacttgttcctgcgttcaccggttgcgatcagaattccgttatcacgcaaccaggtgaagagatagttttggcccaggccgagcactttggcatagttgccgattagaaccccgctggcggtagcaacgcgttcagcgaattcgactttaggtgcatccataagcattttttgctccagccgttgcttttgctctgccaggtcggcagccaaacggagagcttcagggagactctgcggaatagcaggttgtaatcttccggttcgatagtcgataaatgtctggtttaccttcagccgaaacgcgggagaaatccagcctgcgtactccacagcgagcaattcatgggcaaaagtgccgccgccacggccttcgaccaggtgaagagatagttttggcccaggccgagcactttggcatagttgccgattagaaccccgctggcggtacaacgcgttcacgaattcgactttaggtgcatccataagcattttttgctccagccgttgcttttgctctgccagatcggcagccaaacggagagctacagggagactctgcggaatagcaggttgtaatctaccggttcgatagtcgataaatgtctggtataccttcagccgaaacgcgggagaaatccagcctgcgtactccacagcgagcaattcatgggcaaaagtgccgccgccacggccttcgactagtgggtagatccacaggacgggtgtggtcgccatgatcgcgtagtcgatagtggctccaagtagcgaagcgagcaggactgggcggcggccaaagcggtcggacagtgctccgagaacgggtgcgcatagaaattgcatcaacgcatatagcgctagcagcacgccatagtgactggcgatgctgtcggaatggacgatatcccgcaagaggcccggcagtaccggcataaccaagcctatgcctacagcatccagggtgacggtgccgaggatgacgatgagcgcattgttagatttcatacacggtgcctgagaagtgctcggcgttcgtattacgtgaaactttaacacttcagatccagagacgtcacagctgtcagaagatttaacgcgctcaataatgtcgcgatatacagtctggaatttgccacgaatgatggttgcccatacatcaaaggactggttaaccggcagagcgatgtcaaaggtgtcggtcgcaagagtgcgccagatcatgatgcgaagacgcagcatatcctgttcatgagacaggtattccttcagggtgcggaaaatgcgctcatcgtcatcctcggcaccgtcaccctggatgctgtaggcataggcttggttatgccggtactgccgggcctcttgcgggatatcgtccattccgacagcatcgccagtcactatggcgtgctgtagcgctatatgcgttgatgcaatttctatgcgcacccgttctcggagcactgtccgcacactctggccgccgcccagtcctgtctcgttcgcgtcatcaccgaaacgcgcgaggcagctgcggtaaagctcatcagcgtggtcgtgaagcgattcacagatgtctgcctgttcatccgcgtccagctcgttgagtttctccagaagcgttaatgtctggcttctgataaagcgggccatgttaagggcggttttttcctgtttggtcactgatgcctccgtgtaagggggatttctgttcatgggggtaatgataccgatgaaacgagagaggatgctcacgatacgggttactgatgatgaacatgcccggttatggaacgttgtgagggtaaacaactggcggtatggatgcggcgggaccagagaaaaatcactcagggtcaatgccagcgcttcgttaatacagatgtaggtgttccacagggtagccagcagcatcctgcgatgcagatccggaacataatggtgcagggcgctgacttccgcgtttccagaccgtggccaggacccaacgctgcccgagatgcgccgcgtgcggctgctggagatggcggacgcgatggatatgttctgccaagggttggtttgcgcattcacagttctccgcaagaattgattggctccaattcttggagtggtgaatccgttagcgaggtgccgccggcttccattcaggtcgaggtggcccggctccatgcaccgcgacgcaacgcggggaggcagacaaggtatagggcggcgcctacaatccatgccaacccgttccatgtgctcgccgaggcggcataaatcgccgtgacgatcagcggtccaatgatcgaagttaggctgcctggacagcatggcctgcaacgcgggcatcccgatgccgccggaagcgagaagaatcataatggggaaggccatccagcctcgcgtcgcgaacgccagcaagacgtagcccagcgcgtcggccgccatgccggcgataatggcctgcttctcgccgaaacgtttggtggcgggaccagtgacgaaggcttgagcgagggcgtgcaagattccgaataccgcaagcgacaggccgatcatcgtcgcgctccagcgaaagcggtcctcgccgaaaatgacccagagcgctgccggcacctgtcctacgagttgcatgataaagaagacagtcataagtgcggcgacgatagtcatgccccgcgcccaccggaaggagctgactgggttgaaggctctcaagggcat

SEQ ID NO: 138282 - DNA, 3032 bp, Homo sapiens
atgcccttgagagccttcaacccagtcagctccttccggtgggcgcggggcatgactatcgtcgccgcacttatgactgtcttctttatcatgcaactcgtaggacaggtgccggcagcgctctgggtcattttcggcgaggaccgctttcgctggagcgcgacgatgatcggcctgtcgcttgcggtattcggaatcttgcacgccctcgctcaagccttcgtcactggtcccgccaccaaacgtttcggcgagaagcaggccattatcgccggcatggcggccgacgcgctgggctacgtcttgctggcgttcgcgacgcgaggctggatggccttccccattatgattcttctcgcttccggcggcatcgggatgcccgcgttgcaggccatgctgtccaggcagcctaacttcgatcattggaccgctgatcgtcacggcgatttatgccgcctcggcgagcacatggaacgggttggcatggattgtaggcgccgccctataccttgtctgcctccccgcgttgcgtcgcggtgcatggagccgggccacctcgacctgaatggaagccggcggcacctcgctaacggattcaccactccaagaattggagccaatcaattcttgcggagaactgtgaatgcgcaaaccaacccttggcagaacatatccatcgcgtccgccatctccagcagccgcacgcggcgcatctcgggcagcgttgggtcctggccacggtctggaaacgcggaagtcagcgccctgcaccattatgttccggatctgcatcgcaggatgctgctggctaccctgtggaacacctacatctgtattaacgaagcgctggcattgaccctgagtgatttttctctggtcccgccgcatccataccgccagttgtttaccctcacaacgttccataaccgggcatgttcatcatcagtaacccgtatcgtgagcatcctctctcgtttcatcggtatcattacccccatgaacagaaatcccccttacacggaggcatcagtgaccaaacaggaaaaaaccgcccttaacatggcccgctttatcagaagccagacattaacgcttctggagaaactcaacgagctggacgcggatgaacaggcagacatctgtgaatcgcttcacgaccacgctgatgagctttaccgcagctgcctcgcgcgtttcggtgatgacggaaacagctatgaccatgattacgccaagcttgcatgcctgcaggtcagaaggccgtgagcggcggcacttttgcccatgaattgctcgctgtggagtacgcaggctggatttctcccgcgtttcggctgaaggtaaaccagacatttatcgactatcgaaccggaagattacaacctgctattccgcagagtctccctgaagctctccgtttggctgccgacctggcagagcaaaagcaacggctggagcaaaaaatgcttatggatgcacctaaagtcgaattcgctgaacgcgttgctaccgccagcggggttctaatcggcaactatgccaaagtgctcggcctgggccaaaactatctcttcacctggttgcgtgataacggaattctgatcgcaaccggtgaacgcaggaacgtccccaaacaagaatacatatctcgtgggtatttcacccttaaagaaaccgtgatcgatacaagcaatggaagcaggatttctttcacgactcgtataaccggcaaagacgtagtaagaaccaccagcattgtaatgctggctaaagtcactttcctgagctgtataacgatgagcgattttactttttctggctatgaattggcctgctttgtaacacactccggtctatcccgtagcgccgggcatatcctgtcgcaatgtgcaaatctcgcggcaacaaccagtgaatacttcattcacaagcctcaccgcctgatcgcggcagaaactggttatagccaatcaaccgtcgttcgtgcattccgtgaagctgtaaacaaaggaattctgtctgtagagattgttatcggcgatcaccgtgaacgtcgcgctaacctgtaccggtttacaccatcctttttggccttcgcacaacaagccaaaaatgcgctgatagaaagcaaattaaagatctcttcagcggcaaccaaggttaaagctgttctcgctaagacattggctttatttaattttttatccacacccccatgtcaaaatgataccccctccccctgtcaggatgacgtggcaataaagaataagaagtcacaagttaaaaaaacaaaaagatcagtttccggcggtgccggaacaaccagcctcaaaaaattgacttcatggatcgctaaggcaaaagcaaaggctgacaatctgcggttatccaaaaaacgcactcaaaaacatgagttcaagcagaaagtagaggcggctgcgcggaaatatgcttacctgaagaacaagcgttcgcctgatattggcgggatatcaaacttcgataacctaccgcattgcatgacggtaaacgaagctcttaatgcggttttagccaaaaataaagataacgaacaatggggtgcggttgctggcgcctatatcgccgacatcaccgatggggaagatcgggctcgccacttcgggctcatgagcgcttgtttcggcgtgggtatggtggcaggccccgtggccgggggactgttgggcgccatctccttgcatgcaccattccttgcggcggcggtgctcaacggcctcaacctactactgggctgcttcctaatgcaggagtcgcataagggagagcgtcgaggagaacttctaaagatcgtcgttttgccaggtgaccacgttggtcaagaaatcacagccgaagccattaaggttcttaaagctatttctgatgttcgttccaatgtcaagttcgatttcgaaaatcatttaattggtggtgctgctatcgacctgcaggggggggggggaaagccacgttgtgtctcaaaatctctgatgttacattgcacaagataa

SEQ ID NO: 138283 - DNA, 1942 bp, Homo sapiens
atgaacaggcagacatctgtgaatcgcttcacgaccacgctgatgagctttaccgcagctgcctcgcgcgtttcggtgatgacggtgaaaacctctgacacatgcagctcccggagacggtcacagcttgtctgtaagcggatgccgggagcagacaagcccgtcgaaggccgtggcggcggcacttttgcccatgaattgctcgctgtggagtacgcaggctggatttctcccgcgtttcggctgaaggtaaaccagacatttatcgactatcgaaccggaagattacaacctgctattccgcagagtctccctgaagctctccgtttggctgccgacctggcagagcaaaagcaacggctggagcaaaaaatgcttatggatgcacctaaagtcgaattcgctgaacgcgttgctaccgccagcggggttctaatcggcaactatgccaaagtgctcggcctgggccaaaactatctcttcacctggttgcgtgataacggaattctgatcgcaaccggtgaacgcaggaacgtccccaaacaagaatacatatctcgtgggtatttcacccttaaagaaaccgtgatcgatacaagcaatggaagcaggatttctttcacgactcgtataaccggcaaagacgtagtaagaaccaccagcattgtaatgctggctaaagtcactttcctgagctgtataacgatgagcgattttactttttctggctatgaattggcctgctttgtaacacactccggtctatcccgtagcgccgggcatatcctgtcgcaatgtgcaaatctcgcggcaacaaccagtgaatacttcattcacaagcctcaccgcctgatcgcggcagaaactggttatagccaatcaaccgtcgttcgtgcattccgtgaagctgtaaacaaaggaattctgtctgtagagattgttatcggcgatcaccgtgaacgtcgcgctaacctgtaccggtttacaccatccttttttggccttcgcacaacaagccaaaaatgcgctgatagaaagcaaattaaagatctcttcagcggcaaccaaggttaaagctgttctcgctaagacattggctttatttaattttttatccacacccccatgtcaaaatgataccccctccccctgtcaggatgacgtggcaataaagaataagaagtcacaagttaaaaaaacaaaaagatcagtttccggcggtgccggaacaaccagcctcaaaaaattgacttcatggatcgctaaggcaaaagcaaaggctgacaatctgcggttatccaaaaaacgcactcaaaaacatgagttcaagcagaaagtagaggcggctgcgcggaaatatgcttacctgaagaacaagcgttcgcctgatattggcgggatatcaaacttcgataacctaccgcattgcatgacggtaaacgaagctcttaatgcggttttagccaaaaataaagataacgaacaatggggtgcggttgctggcgcctatatcgccgacatcaccgatggggaagatcgggctcgccacttcgggctcatgagcgcttgtttcggcgtgggtatggtggcaggccccgtggccgggggactgttgggcgccatctccttgcatgcaccattccttgcggcggcggtgctcaacggcctcaacctactactgggctgcttcctaatgcaggagtcgcataagggagagcgtcgaggagaacttctaaagatcgtcgttttgccaggtgaccacgttggtcaagaaatcacagccgaagccattaaggttcttaaagctatttctgatgttcgttccaatgtcaagttcgatttcgaaaatcatttaattggtggtgctgctatcgacctgcaggggggggggggaaagccacgttgtgtctcaaaatctctgatgttacattgcacaagataa

SEQ ID NO: 138284 - DNA, 1233 bp, Homo sapiens
atggagaaaaaaatcactggatataccaccgttgatatatcgcaatgtcatcgtaaagaacattttgaggcatttcagtcagctgctcgatgtacctataaccagaccgttcagctggatattacggcctttttaaagaccgtaaagaaaaataagcacaagttttatccggcctttattcacattcttgcccgcctgatgaatgctcatccggaattccgtatggcaatgaaagacggtgagctggtgatatgggatagtgttcacccttgttacaccgttcccatgagcaaactgaaacgttttgagcgctctggagtgaataccacgacgatttccggcagtttctacacatatattcgcaagatgtggcgtgttacggtgaaaacctggcctatttccctaaagggtttattgagaatatgtttgtcgtctcagccaatccctggtgataataagcggatgaatggcagaggggatcctctagagtgctttgtgtgtgggcatgatggcaagacgacgaagtacattcaaagcagcatcataatcaacgagaaaccttgcagaggagcacgcaagcgcagcatacaactaaaagctaagcagatatggttcgatatgtacactgtaacgccctctggatgcactgtgcgcacgtttgataaaccaaggaaaagattcatagccttgttcatcgccggcatcctcatcgagggcgataaaaaaccacttccttccccgcgaaactcttcaatgcctgccgtatatccttactgcttccgcagaggtcaatccgaatatatcagcatatttagcaacatgaatctcgcagactaccgtcatgttcctatttgtcacactctgacagagaagcttgttgccatgacaatgggctctggggccaagatgaagacttcagccattgtcagcgacatgattgtggtggccaagtggaacagccccagggtagatgatgttgtgaagtcgatgtaccctccgttggaccccaagctcctggacacagggacgactaccctgctcctgtctgtcagtcgcctggtgctggtgacaaggaatgcctgccatctgacggggggcctggagtggattgaccagtcactatcagctgctgaggagcatttggaagtccttcgagaagtagccctagcttttgagccagataaaggcctcccaggccctgaaggcttcctgcaggagcagtctgcaatttag

SEQ ID NO: 138285 - DNA, 837 bp, Homo sapiens
atgaagccacggacctacacggtgagtgttacagctgttaaagatggtgtgtctggagtttgttccttcagatgttcagatgtgtccagagtttcttccttccagtgggttcgtggtcttgctgacttcaggagtgaagctgcggaccttcacaactcaggagcccagctggcttcacccattggatcccgcactggggccacaagtggagctccctgccagtcccgcacccatgcgcccgcactcctcagcctttgggctgtcgatgggaccgggcgccatggagcagggggcagcactcgtcggcaaggctcgggtggcacgcaggagcccatggtggcggggaaggctcaggcatggcgggctgcaggcttcagtggtagtggtgatggagtaggagtatctatccttgtgccctggggtgggacttgtattggcagtttcaggcaggccaattcttggatttctgggggggctttttcagatgctggttgtgatagtgatagactaggtaaagattggaacagtttggagggctcagaagaagaaaggaaaatgtgggaaagtttggaacttcctagagacttgaagagctcagaagacaggaagatgtgggaaagtttggaacttcctagagacttgctgaatggctttgaccaaaatgctgatagcaatatgcacaatgaagtccaggctaaggtggtctcagatggagatgaagaacttgttgggaactggagtaaatgtcactcttgttatgctttagcaaagagactggaggcatttgctcctagtctaaagatctgtggagatttgaaattgagagagataatttag

SEQ ID NO: 138286 - DNA, 1074 bp, Homo sapiens
tcagagttcttgaggactgtcttggcagttcagagggttcctgtcttcatccatcagactggaccagctccccatgaaggctggcttggtgttacctgctttctgtagagtagcaattgatccatactctctaatagccccagttctgactctgtacaaatgggatggaaagtaattcaagacccttgtctcttcttccccattggattctgctgggaagggctccagtgtcttcttcccatcaccattctgttcattcttgctcttcctctcagctatggcacccatggcttttcttttacttctccatccatctttgcttgtggagaactcagatgactccatgaagataaatggttttggcaataacaacaacacaactttcatcttctcactcacaacagctggcttctgaggaatagcctccggggatgacagggtggctggggtgtgctgggggtatcgtgcggagaaacagctgtttctcagatttgctggcccactgtgctccaaagccatgtggatttgccactccatcttagagagggccagccatgcccctcttctcctgccttttccttttcgtaaatgtggaaaccaattgcaaaggtctgcagcttcactcctgaagtcagcgagaccacgaacccactggaaggaagaaactccagacacatctgaacatctgaaggagcaaactccagaaacaccatctttaagagctgtaacactcaccgtgagggtccgcagcttcattcgattccctgtgacatagcttactcttagagaattcaaactaaggtgttcagactgtcctgtatcaatgtactcaccattcctgaaacaactgctttcatattggaggcccatgggccttctccactcaagccaatgaaatgaagcattaatggtggaaattccaggcctcatctttaacttccttatgaaacactcgtagatcttgttaacctgaagacactgctccagcaggtctgggggaaggggcctgagaatcagaatttctaacaagctccaggcactgctgctgcagctgatcttgggcagtatggccat

SEQ ID NO: 138287 - DNA, 882 bp, Homo sapiens
atgtttgtggcttcactcctgaagtcagcgagaccacgaacccaccaggaggagcgagcaactcccgttgcgccacctttaagagctgtaacactcactgcaaaggtctgctgcttcactcctgaagtcagcaagaccaagaaagaaactctggacacatctgaacatctgaaggaacaaactccggacacaccatctttaagaacggtaacactcactgctagggtccacggcttcattcttgaagtcagcgagaccaagaacccaccggaaggaaccaattccggacacaatagctctttggccataggtgttggggatggcatgatccgtgtatggaatacactctccataaagaacaactatgatgtgaaaaatttttggcaaggcgtgaagtccaaggttacagcgctgtgctggcacccaaccaaggaaggttgcttagcttttggaactgatgatggaaaagtgggattgtatgacacctactccaacaagcctccacagatttctagcacatatcataagaagactgtatatactttagcctgggggccaccagtaccccccatgtcacttggaggagaaggagacagaccttcccttgctttatacagctgtggaggagaagggattgtcttacagcataatccctggaagcttagtggagaagcctttgacatcaacaaactcatcagggacaccaattcaatcaaacatcacaagcttgtgaataccattagctggcatcatgagcatggcagccagccagaattgagctatctgatggcctctggctccaacaatgcagtcatttacgtgcacaacctgaagactgtcatagtcccatcgtcggagctggtggcacagaggttgtactga

SEQ ID NO: 138288 - DNA, 739 bp, Homo sapiens
cttttttatttgagcatggagccaactttaaattgggtgggtaccaacatcctagggaagggtgtgcagtttggggaatactagtcaaaaagactatctatttgggcttttgtgcaaagcccctcatttcctacgaaacctgaccctattttctttttttccctaggacgactgccctgctcctggctgtcagtcacctggagctggcgacaaggaatgcctgccatctgacgggaggcctggactggattgaccagtctctgtcggctgctgaggagcatttggaagtccttcgagaagcagccctagcttctgagccagataaaggcctcccaggccctgaaggcttcctgcaggagcagttctgcaatttagtgcctacaggccagcagctagccatgaaaggcccctgcccccatccctggatggctcagcttagccttctactttttcctatagagttagttgttctccatggctggagagttcagctgtgtgtgcatagtaaagcaggagatccccgttcagttttatggcctcttttgcagttgcaaactgtgggctggtgagtgggcagtctaatactacagtttaggggagatggccattcactctctggcaagagggagttattggaaaactggtggactgtcagctttatttagctcacctagtgttttcaagaaaattgagccaccgtctaagaaatcaagaggtttcacattaaaattagaatttg

SEQ ID NO: 138289 - DNA, 1269 bp, Homo sapiens
atgagggatattttgcagaagtatgtgtcagatgatgaaattttcttcaaacaagaagaaataaggatccattcacatggattctcacagaggctaaaaaacttgcctaaggttgcacacctagcaggtggtaacattcctggacaatgtcttcaccagtccttgaggaaaacaagagcaatggcactcaataatactgtcagctgccccagaaatgttgtgtacaatattggtgggttcttggtctcgctgactttcaagaatgaagctgcggaccctcgtggtgagtgttacagttcttaaagatgttgtgtctggagtttgttccttcagatattcagatgtgtccggagtttcttccttccagtgggttcgtggtcttgctgacttcaggagtgaagctgcagaccttcggggactgaagctgcagacctttgtggtgagtgttacacctcataaaggcagtgtggacccaaagagtgaccagcagcgagatttattgcaaagagtgaaagaacaaaacttccgcaatgtgaaaggggacccagcagccttagcccatgaggacgatgtgaacgggactgagtcaggagctccccggaagcatggagaccgtgaactggatgacgttgttatcaccaacccccacattgaggccattctggagaacaaagactggatcgaagatgcctcgggtctcatgtcccactgcattgccatcttgaagatttgtcacactctgacagagaagcttgttgccatgacaatgggctctggggccaagatgaagacttcagccattgtcagcgacatgattgtggtggccaagtggaacagccccagggtagatgatgttgtgaagtcgatgtaccctccgttggaccccaagctcctggacacagggacgactaccctgctcctgtctgtcaagtcacctggtgctggtgacaaggaatgcctgccatcttgacgggaaggcctggactggatttgaccagtctctgtccggctgctgaggagcatttggaagtccttcgagaagcagccctaagcttctgagccagataaaggcctcccaggccctgaaggcttcctgcaggagcagtctgcaatttagcgcctacagaccagcagctagtcctgaagacccctgccgccatcactgggtggctcagattagccttccactttttcctgtagaattagttgttctccacggctcaagagttcagctgtgtgtgcatagtaaagcaggagatctctgtcaaa

SEQ ID NO: 138290 - DNA, 855 bp, Homo sapiens
ttacaatctgacatgtttttgcagtggctggtactggttgttcctttccatgtttagtgcttccttcaggagctcttttagggcaggcctggtggtgccgaaatctctcagcatttgcttgtctgtaaaggattttatttctccttcacttatgaagcttagtttggctggatatgaaattctgggttgaaaattcttttctttgagaatgttgaatattggcccccactctcttctggcttgtagagtttttaccaagagatctgctgttagtctgatggggttccctttgtgggtaacctgacctttctctctggctgcccttaacattttttccttcatttcaactttggtgaatctgacaattatgcatcttggagttgctcttcttgaggagtatctttgtggcattctctgtatttcctgaatttgaatgttggcctgccttgctttggtctttgatgatggtgacgtacagatggggttttggtatggatgtcctttctgtttgttagttttccttctaacagtcaggatcctcagctgcaggtctgttggagtttgctggaggtccactccagaccctgtttgcctgggtatcagcagtggaggctgctttgtcctcatgagatcactggagaaagcatgagtaaacttcacattattcagaaatataccagcagctgctgcttgtttaaatccagtttctgaaagaggttcatctactccttgtccatcatggttgggttctggtgagggcctctccacattacacgctactgacttctccttcagtgctcccatggcacaaagaggaaagagctctctggtgtctcttgaataaattccattcat

SEQ ID NO: 138291 - DNA, 456 bp, Homo sapiens; identical to SEQ ID NO: 133289

SEQ ID NO: 138292 - DNA, 392 bp, Homo sapiens
cgaggtgctctgtccctgggagatgggagttttgtttataagcccctgactggggctgctgcctttctttcacagatgccctacacagagaggaggaatctagagaggcagtctggctacagcggctttgctgagctgtggagggctgtgcccagttggatctttcccggcatctttgtttacactgtgaggggaaaacggcccactcaagcctcagtaatgggagatgcccttccccccaccaagctcgagtgtcccaggtcagcttcaggttgctgtgccggcagcgataatttcaagccagtggatcttagcttgctgagctccatggggttgggatccactgagctagaccacttggctccctggcttcagccccctttccagggcag

SEQ ID NO: 138293 - DNA, 549 bp, Homo sapiens
tcattctccgtccagttttgttcccttgttggcgatcctttggggtgatccagttgtgatcctttggaggagaagaggtgttctggtttttggaatattcagcctttttgcgctggtttctccccatctttgtgggattatctgagtttggtctttgatgtcgatgaccttcagatgaggtctctgagtggatgtcctttttgttgatgttgatactattcctttctgtttgttggttttccttctaacagtcaggcctctctgctgcaggtctggtggaggttgctggagatccactccagaccctgtttgcctgggtatcaccagtggaggctgcaaaatagcaaagattgctgcctgttccttcctctggaaacttcgtcccagagctctagagcgctcctgtatgaggtgtctgttggcccttgtctcaagtcgatgaaggccaactgcagcgtgtcctcctggaacccaggcaccgggccggatctggcaaactctgaatgcttgggagctggctacacattcttgaatctccttattgggcat

SEQ ID NO: 138294 - DNA, 378 bp, Homo sapiens; identical to SEQ ID NO: 128941

SEQ ID NO: 138295 - DNA, 2964 bp, Homo sapiens
atggtggtgtatgcctgtagtcccagctatctggaggctgaggtgggaggatcattgagcctggaagttgaggccacaaaccctaaaaactcatccaaaaagttcctagatctgatcagcgaattctgtaaagtctcaggatacaaaatcagtgtacacaaatcagtagcactgctgtacaccaaaaatgaccaagctgcgacccaaatcaagaacttaatcccttttacaacagctgcaaaacaattcaaatactttggaatatacttaaccaaggaggaggagcgactcaagccttcgcgaaagaaaataaccaaaaagcatacaaagaaacgtacggcgtctctcatattacacgccatgatatgctcgcagatccctaaacagcagcaaaacgaaaaataccaagtgcctcaattcgatcaatcaacgattaaaaatattgagtctgcaaaaggacttgatgtgtgggacagctggccgctgcaaaacgctgacggaacacctccgctggtgatacccaggcaaacagggtctggagtggacctccagcaaactccaacagacctgcagctgagggacctgactgtcagaaggaaaactaacaaacagaaaggaacagcatcaacatcaagaaaaaggacatccacaccaaaaccccattgtgtatctgaaagtgacggggagaatggaaccaagttggaaaacactctgcaggatattatccaggagaactcccccaacctagtaaggcaggccaacattgaaattcaggaaataaagagaacaccacaaagatactcctcaagaagagcaaccccaagacacataattgtcagattcaccaaggttcaaatgaaggaaaaaatgttaagggcagccagagagaaagtattggaagttctggccagggcaatcaggcaagagaaagaaataaagggcattcaaacaggaagagaggaagtcaaattgtctctgtttgcagatgacatgattgtatatttagaaaatcacatcatctcagcccaaaatcgacttaagctgataagcaacttcagcaaagtctcaggatacaaaatcaatgtacaaaaatcacaagcattcttatacaccaataacagatcaacagagagccaaatcatgagtgaactccattcacattgcttcaagagaggttttccgggaacatacaggcctgcagtctctatagtagagcgctcggccacataccccaacgcgcatgccctacagccgcacacagtacggctatcaagggcgccaattcgccacatttcgaggcgccccaaacctccttggcaacggccaatcccctgcggcgccctcctcgcatccctcaacccaggctggccgcccgcggggattatgccgccaggcaacttaaagttggctaacgcccacgcgcctaacgcccccactgggtatgaaatactgagacaggtggagtgcgaaagacagataaagaatgcttctatgaagcttagagcctatgacatgacagaagataagttaggaagaagaatggctctacaacaaggtaaattgcttttcttattgattaagggcctctggatggcatgcttcaggcagctcagttctaggtcagtggaccctgagaggaagaaaagcaaagcccccagtcctcagagatggaagaagtcaccagaaggaacaagacaagaatatgtcacaatggttcagtacctgcacatctatagagacaaagcactagcaccgtccagcatggagtcactgctgctgagctcattagccctggtcagcctggcagcaggtggaggacaggaagtggtgctcattcctcgtggcctgagcccacggcacccaggccatggtggggtgcaggtgatatttagaaagtgtgcaccagacaggcccagaagccagaggctgtccgctaaccatactccagtagctgggcaagtcccccccgaagggcccctgggcagccgtctccacgtcaaccacagaaggcatttccaactccaactccagttggtgttaaggtcagatctcctctctggtgtggcctatctgccggagcaggccctaagcagctgcttaaatggagctgaagaagagccaaagcttccatcactctcaccctctcttagcttcagtcttgactccttctctgagcccctgtacccatcttgtgctgcctacgtcctaccttgggctgctcggtattggctggcacaggagacccagagctccgtgacatcagggacggggctggctctgtggaatgatagctgccaacccagcctggtgcctgtgttgtgcaggatgcaagagccgcaagcatatgtgctgccactcggggcacctatgggccaactgacacctcatacagccgggtgcccctctgagatgaagcttccagaggaaggatcaggcagcaacaccttccgttctgcaatatttgctgttctgcagcctccgctggtgatatccaggcaaacagggtctggagtggacctccagcaaactccaacagacctgcagctgagggtcctgactgttagaaggaaaattaacaaacagaaaggacacccacaccaaaaccccatccgtatgttaccatcatcaaagaccaaagcacaagaactacgtgatgcatgcacaagcttcaatagcagatttgataaagtggaagaaagggtatcagagattgaagatcaaatgaatgaaatgaagcgagaagagaagtttagagaaaaaagattaaaaagaaatgaacaaagcctccaagaaatatgggactatgtgaaaagaccaaatctacgtctgattggtgtacctgaaagtgacggggagaatggaaccaagttggaaaaccctcttcaggatattatccaggagaatttccccaacctagcaagtcaggccaacattgaaattcaggaaatacagagaacgccataa

SEQ ID NO: 138296 - DNA, 2007 bp, Homo sapiens
ttatttcttgtctcctgctagctttttaatttgtttgctcttgcttctctagttcttttaattgtgatgttcggatgtcaattttagatctttcttgctttctcttgtgggcatttagtgatataaattcccctgtacacactgctttaaatgtgtcccagggattcttgtacattgtgtctttgatctcattggtttcaaagaacatctttatttctgccttcatttcgttatttaaccagcagtcattcaggagcaggttgtccagtttccaggtagttgtgccattttgagtgagtttcttaatcctgagttctaatttgattgccccgtggtctgagaggctgtttgttgtgatttcttttcttttacatttgctgaggactgttttacttccaattatgtggtcaattttagaaaaagtgtgaagtggtgctgaaaagaatgtatattcttttgatttggggtggagagttctatagatgtctattaggtccgcttggtccagagctgagttcaagtcctggatatccttgttaattttgtcttgttgatctgtcttcaaatggagtctctgagtggatgtcctttttgttgatgttgacgctattcctttctgtttgttagttttccttataacagtcaggcccctctgctgcaggtctgctggagtctgctggagttccactccagaccctatttgcctgggtatcaccagtggaggctgcagaacagcaaagattgctgactgttccttcctctggaagctttgtcccagaggggcacctgtttgtctgaattttatgttccctaaggagacctacttcctctttggctcttttcaggagagcttgcttgttttcaaattccgatgatttcatgtagttttcaattctttggtattgagtatctgaaaaccgggctaatgagagaaatgccttcatttttccatttcttagctcatcactactttctccatcataatttccagcaacttctactgccttttctagataggtctgcatgatgaccgcaggattttctaagcacgtttctgctaaccagttgccacaaaccctcagacattctgtgtatgtaagttttaggctgggattgttcgctgcacagctggcatccaacttcttgatcatttgcttgagaatactcagggcaagactctgctccttttttgcccagaatacttgtgcttcttccagctgccactcagagactccacagctaactgaattgtactgtttaatttgaaatattgccctttcagggagctgagtgttcttgaaagttctggccagtatagagagttctacaaggtgtttggtgagaatgtccttaatacattctctttgtgagttgtccatttccttttccatcaggatctccaaaatgactgtgcgtagagccatgataggctcctgaaaactaaaatccctgtccttgagaaggtgttcttttttctgccgcttaatctttacttcctttggcttcataggaagtccccatgacaagttaacaggggggaatatgttggaggaataagttggatctatacaggatgctgcatcatctaaaaatggacagttaatgatttcaattcctcggttggctggtgtgagatggtatctcagcgtgattttgatttgcatttctctaatgatcagtgatgttgagctttttttcatatgttcatcagcctcatgtatgtctgcttttgagaagtatctgttcatgtcctttgcccactttttgatggggtggtttgatttttttcttgtaaatttgtttaagttctttgtagattcttgatattagccctttgtcatatgggtagattggaaaaattttctcccattctgtaggttgcctgttcactctgatggtagtttcttttgctgtgcagaagctctttagtttaattagatcccatttgtcaattttggcttttgttgccattgcttttggtgttttagtcatgaagtccttgcccat

SEQ ID NO: 138297 - DNA, 471 bp, Homo sapiens
tcgaactgtcagccttatcagtgtaaccctgtccttctctatcaccacctccaccttaactaactctagacctgccctcagtcgcttctgtggtatggggattgacataaatggaaaagaccccctaggtattttttaaatacgcattattcccccatctcccccttcttcagtagcgtcagttatagatctcacaccggttgcttctacatctaataataaaactagggtgtctattgtaaaaataagagatctaaaacagaccttagccatcgagagagtatcaagatgcaaatccctggctgaaatggattaaatattccgttcgcactttaaataaaagcgattgttacgcatcaggttataaatgagcctgtctcctttgttcggtgtactctcatggcaaagctgctggcgagtgtaccctttctgcaggaagtaaaaatggccttgctgaggtaattaaaaaaa

SEQ ID NO: 138298 - DNA, 1173 bp, Homo sapiens; identical to SEQ ID NO: 115040

SEQ ID NO: 138299 - DNA, 391 bp, Homo sapiens
atgccagcacctctcatgtgccgcagccgatatgcgggctggacgatctggcgatacggcattcagcggtacggcttaatcgcgaaagggtacactcgacagcagttttgccatgagagtacaccaaacaaaggagacaaggtcacttataacctgatccctataaaaaagagggcgcagcgacgaacgaagacgcattacttctgcgatgggaacggggtagaggagcgcgactacacatcccaggatgcaaagcgccccaactctagtcacaacctggcttgctttctggctggcgttccccgccaaagggacactaggggaggggattgtttcggttggggaatccccgaagtctactggaccgtgacatttcgaaagaggaaggaaa

SEQ ID NO: 138300 - DNA, 1425 bp, Homo sapiens
tcagctgggcttttctccttcctctcctgccctgtgttccagggcgcgaccccgctctgtccagacgctggctcccggactgatcctcaggtaggtgggtcggagcccttgcttatcggaaggttgatagctagggattgccagagtgtctgaactcagaggtaacttcccctgaagatcaacggctgtctgcagctcctggctggaagccggcttgccaacatcagtccttccacttggagcaattcttgtgcagtcattttcctgaagattgaggacgataaggggtacgaagatttcactgaatacaaagagcctgagaaactgggtgatttgactaataaaggccagtccgttatcggactgtatagagatgggaaggccaaactgaggaattatgtctgacaaaagggaagaaatgaccacggtggccttctcagatcctgtgggaaaggcttctacccatccagtgaaagtgtctacccagaccaagaggtattttagtttcctgacttggggcatgtgagtaaagtcaatttgccagtcccccttgaccactggaacactaagactgttttgggatctctgcctgactttctcagaggtgctggtgaggacattatgagtctggaacctagaaaagcgttctgactctgctgactttctcagaggtgatataaggtgattgtgatgagcatcatcatcgtcaacatcatcatcaccatccacattgccaccaccactcccattatcatcttcatcaacatcatcaccaccgccaccatcaccattatcattaccaccaccgctatcactattatcatcaccctcaacatcatcaccatcatcactatcatcaccaccaccatcatcgttactaccactaccaccaccatcaggggatcctctagagtcgcacggggttggggcaatgcaggtctgtaaactggaattgtaaaagtgaagtggcccaggtcccatttgctgtagtggtgcacagagagacagtcttgagaggtgaggagacatttcccagaggaagtgacatccaagttgagacttagaagacagcaccaccactgtcactattatcatcatcctcaacatcatcaccaccaccatcatcattattaccaccagcaccaccatcaccatcatcatcattctaccaccatcaccattatcatcaccatcaccatcaccaccgctatcatcatgataatcattatcattaccatcaccattagcattatcattaccaccaccatcactatcactatcaccatcaccacgaccactaccaccatcaccaacaccatcattactacccaccaccaccatcatcatcattccaccaccatcacaattattaccaccaccaccatcaccaccaccaccaccatcactatcatcatcagtagacat

SEQ ID NO: 138301 - DNA, 675 bp, Homo sapiens
ttaaatgtttctttcatacgcgtccgtgtgaagagaccaccaaacaggctttgtgtgagccataaagctgtttatttcacctgggtgcaggtgggctgagtccgaaaagagagtcagcgaagggagataggggtggggccgttttataggatttgggtagataaaggaaaaaggggggttgttctctttctcagcaagtaacttgtggaaacaagttacttcctccttcctttgttctcctctgcctttgtctcttttgaaaagttctaagttgctagccaatcgggacaaatacagaatgtgtggtcctgttccagccaatggaaaccggacacagcagtagagtaaacatgtcaggttataaatgaccctgtctcctttgttcggtgtactctcgtggcaaaactgctggcgagtgtaccctttctgcctgttgtttggtggccccctttcagtgatggatccagaaggcagcccaagtggctgcctaattctcttggactgggggctgactctgttactctgtctactggtggggtattccaacccaatgtgcgtggacttaattgcaatggaaaaatagtcatggggagatgtcccttggagttcgttcccattcccgctacttcccccatcagcaggaagaagccagagcgatcgacggccttttcccat

SEQ ID NO: 138302 - DNA, 6743 bp, Homo sapiens
ctagtcaaaacactttaagatgcgctctccaatcccaataaaatagaccccttgagcaatcccaaagagaggtgctatgaccagtgcccggcagccagcgcctttcatgaaggcagatggtccctcctgaatccagagtttcctggcacagtcggtgatcccactgtacatgtcctcgcccaggcctttcttgagggtttggattcgagttttcagaacatctagaggcgtcactgcgaccgcagctatggaacctgccacacagcctgacacgaaggaatgtgcaaaggacgccttaccggcgagctcgttgaaccccaggttgttaaggttggcaaacagtgggaagtagatgatggagaaaggaatgtctctgaggagagtggcacccaggcccctgtagagcccagccaggccctgagtgcggagcagctcccaggcaatgagggtggcagaggggcgcctgtgggtggaagccgaaccagttgtgtaggacctggaggtggagggtgctgaggccgagccctgatgatggacggccaggcgtccagcatcctgcagctgaatcttgagcatttccatgggacaggtcaccacgacctggcacatcccagccccacacccggcaagcatctccatcttcaggttccgctgcatcctatgggaacaggcgtcaggctccttcagccgcaggccacaggcctgccctggtgcagctgccctcttgtgagagggggactttccctggccatacccatcttccatgagcagccgccggaaaaagtcgttggccgccagcttgatggccttctctggagtgaccagagtgaggttcactgcagcccctcggtacatgccgaagaagccctccgcccgagccgtcttcatcaggcagtcgatcattcctttgtacatggctttcccatgctggttctgcaggcgagtcttggccaagtcgatggggaacacgcaggtcacccccacgagccctgctacacctccattgatgagtttggctgtgatgctcagatcctggtgggtcattctgcaggggctggggatcccaggacacaaggctgctggctccttggggtagccgctgttggggctgtcttcccggcaagtgacgacctccttgggctgcggcttcctcccctgctttcggtaagaacctctgccttttctggaacccaggatatagttcagatcgctgctgagctgatccaggggaagtgttggaggcttatgaggcggcacctcctcctgtgatgttgctgctgtgggggtctttgggaacgaggcctgcgactggaccgggtgcatctgcattcctgatggtctgtacatttcctggaaaggtcctcttattccacttctagtgccaatttgttccatcatcacagcttgaaagtgacccaggccttcttcctggcagcgatagatgggaccctcctgagagaggccgttgggctgggtggcccctgggtggtgaggtgggagggcagccacaggggaagagtaagccctgggctgaaagtgactggccggccgctgaggggtatagggaggccccgtctgcagcatcacactgtggggtggaaatgcagatgaaccaaatcccattcctgaactcagaggcggaggagttccatagagatactcgctggctgacaacgagctctgccgcttggtagctgcgttatggttgtccaggtctaaaaattctttgggactctctggcctctccatagattcatccagcttctcttcctctggaccaggattctgcccgtcatttgggactttagcagccactgcatccatacgggttggagaagttaaggcagcattcagtgtctcacagccttgcagactggccatggcattcttatctgagaagagggaccttggtgggggaggctgactggctgggggtccgcttgggcttccctggggatggagaggtctctgccagtcagaaaagctctgtggacaggcatagtaaggagttcgctgatagtggtggtaggaaggctgtggcggtgggtggtaggaatacctcattccttgtggggggcgataccggggaaagcctccagaatgtgggtggttagactgaaagccccttgggggaaaatgctggggatgggatgctggggacttccctcccatcacagggcccacaccctgcaggcctggactgatgtggtaatgggcagctgaattcgggtactctaggccaggcatatacagcgggggaaactggctcacagtgcctcccgtcaaaccggggtctgtgctgggcggtgtcgctgcgttctgtcccgtgcatggcatggtttcctgcaacgttctgcctctggggcagagcagcttttcggaaccactgctaccaaggcccttcccctccgatccacaaggagatgcttccccaatgactccgttctcggatagagcgcccctgtctgccaccgtggagaggtctctcacgcacccttgggcggctgggccggggtagctgctatccgagggccagggattcttgcccttcattgctttacagttgtccgcagattcggaggagctgcttttgagctccgggcccactgtttccctttcttgtggtgagctctgcctggtgcagtcagtctgcaggggaggtgtggggtgaggtagttgtgtgaggtagaccccctctgaagtaccaacacctggtggtttctcttcaaggccaggcaacggctctgcttggtcattctcaggctcttgtgcttcactgttctccggtgccctcccagggttgcccagggcaggcttgggggctgacacagtgactgacattgggtgagctacctgcggaaaagggccaggtaaacgggggtgtgcaggctggtgggggtggtaaggcacacctggggggcagacgcgggaggagagctgctgcatcgcaatcatctctgggctgtccatcatggagtcccctccctgcaccccccgaagagcctgggcaggtgctccaaacaaagaactgggtgctggcactggaggtggctgtaaccgatgtccggcagacttgcagggcggtcgcatgtaccctgaggaaggaactccatgaggtaggaagcctgattgttcagtccactggttgggggggacaggtggtctcatgactcgggaatccatcacgtgaccgagagtgcgaggctggtgagagggtcctggccccaggtggggcttctcatctgggcccaagggtccttggttcgtagcaccatggttcccattccagacggcagagtgtactcgattcaggtacttgtacgatcgatacatatggctgggaggaatttctgagctttcaggaaagtctggtggccgggctggagcccccccatgccggggaggaatgaatcctggctggaactgagctggagcatacatgcttccatcctgacttgggccacttatctgcccaagctgcaaggatccagggtgtgggcccatgttagaaaggtgtgtcagccccccgcacatttgcttctcctctggtgtgcctagcctgggtcctcggaggctgttaattccaactggaggctgcatggtgaaaggctgacgctgctgcacaggctccccggggtgtggctccaggactccagaggagccatacaaggtggcaggatctgatcctcgcagagggccaaatgttcctggtactgctggcctctcccgcgggggctgtgtggagctgctgctctgatcgtccccagaagagggcgctcggcgtgtggggggcaacgactttcctccattctccatgggctgctgtttcctgctggacccttctgggtccctggagcgggtccaaacatggctcccaccacttcgcccagcccgactccgtcttttctcccgcttttcatcctctcgaatccaaaattcttcatctgtgtctccatcttctccaggaaaatgtttcatcattgcccgatggaaacacctctctaaattatcagacatcttggtatactcactactttccccattatactttcgacaattcctgaacatggtcttcatgtcatttacaaattcctccttggtacagtataaacctccattcagtttcttctccatgctggaaatatccatgggggccttaataatctgataatagttaggggcataagattcatccacaggttccaagaagggccaggaatccttgtgagcctttaccacgtctagaactttatacatagcagtgaaatcatcatccaactcaaagaggtctttagtctttttttcctctctcatgggggaattggggtccagatgggaaagttctggagggagctcctttccttgagccagcagccatgccctttcttccctgagctttctcctcttcgctcgatctacaatgaacacaaaggctgagtgagctaagcacactccagacactgacatggcgtgttccttcatcacttccactgccttgaccttctcctccaactcgcgtttcctctcttcctttagcatctgctcctgctccttcttctgcactgctagaagaatctgacgctcttcttcctcctctttgcgcttttgtttttctattctggtcagcacaggagtctcctcttgcttgacgggtttgatggacaggtggtcagacatccacctaggatgcaactctgcctttgtgcgctgtggacgttttcccttctgggcgatcatgttgcagatctcaggcaggaagtcctcactgaggagcttgtagagctgccgttctcgaagggaggtcctctcgcgaaaactctcggtgacctgtctccattcctcttctgtctggcacaggagccaccaagtaccttggcctggcccttgggacccatgtcttgtctgtggctcggatgccaaggaattttcttcctgcttttcactgctcaaagagagttctccattggattttccttgcaccgggtcctctttgtacattcgtgttccatagaaataccaatatagtgccccagaattgtcttcacccaatggctccacacggagactgtctgcatccaggccctttagaagatcgaagacatcgtctgcatccagccggtaatcacagagtcggtgcaggatctccacccgtgtgcgaagaggcaggtcctggaaactggcttccctcagagggttgggcttcccttcttcgagctcccagcggtagttgatgatgtcctctaggtagctgtggaatgtctgaggcgtgatatctcttcgttgatagcagccctgaagcaggcaggcaatcaggtcactgataaactccacgtcatctctgtgaagagcggcttctaactcctttctcagcattccacaagttacttcctccttcctttgttctcctctgcctttgcctctttttaaaagttctaagttgctagccaatcgggacaaatacagaatgtgaggtcctgttccagccaatggaaaccggacacagcagtagggtggacgtgtcaggttataaatgaccctgtctcctttgttcggtgtactctcatggcacaactgctggtgagtgtaccctttctgccttgctttcctgggcattatggatttaaggatttgtagaatggctgctgagaagtttcgtttgtcctttaagaaaacgagagctgcaggtgcatttccacagggggacgatgagcactcagacatcgccttccatttctgagtgtactttggccattgggtgatcatgaacagccatgagtgtgggcctggaagtgtgaggagagatccaacaatatgcccgctgaggatggcagagtatttgagctccacatcatcgtgctggacaatgaataccaggcaatggtaaacggccatcactgttacacagctttgcccatcgactgctgccagggtctgtgaagatggtccaagtgtggagagatgtctccctgaactcaaggtgtgtctccagtggagaaactgtttcttcttcttcttcttttcttcctcctcctcctcctcctcttcctcttcctcttcttcttcttcttcctcctcttcctcttcctgatgaggctctgtttctgagtcttccttcacatgctcttccttcaggccgatgtggagttctctcactctgtggttcccattatccgcagccaggtggcctgctccagtcttccgcgggagcttctgggaggaggggcgccccaggcgtcccctggcaagtgctcgtgctccagggatgcgtgggcgagttgtccacaagccgctgctggtgatggagctgggcgagcagccattttccttcccgtcagtcaggacagccacgtcatccgcgtctgggaaggcgcctccgcggtgcccttggccagggccccgggctttgtctccgagcagtgtcccctgaggcgaggcggggcccagccgataggctccagctccagcctctcgctggctccaccagtccaggatgtacagggtatttgcttggaaacgaagaaatcctgcaaaggagtatgtcatgccctctgctgctgtcagtgccctgttttcctccacactctccaaggttagaaccatcaacctgctctctttgttctcctctgtgttttcctcacaagaatacttttctgatactacttcccttatgggaggtccattccccatcagataaccctcatccatcaccagcctcaccactgactccaggaagacaaaaggct

SEQ ID NO: 138303 - DNA, 794 bp, Homo sapiens; identical to SEQ ID NO: 133250

SEQ ID NO: 138304 - DNA, 701 bp, Homo sapiens
atgccgcagcggaagtctctatgcacccacccccgtctatacctgagcaacacattcctctttgctgctctcttacaggctacagagtgcggtggcgccagcacagagctctgctcaacgtccctctgtgctttcacgatgctgatggattatgaaggtcaaggagagcctctggatgactatgtgaatacccagggggcttcactgttcagtgtcactaagaagcagctgggagcaggaagtatagaagaatgtgcagcaaaatgtgaggaggacgaagaattcacctgcagggcattccaatatcacagtaaagagcaacaatgtgtgataatggctgaaaacaggaagtcctccattaattcattagggatgaggagatgttagttttattttgaaaaagaaagtgtatctctcagagtgcaagactgggaatgggaaagaattacagagggacgatgtccaaaacaaaaaatggcatcacctgtcaaaaatggagttccacttctccccacagacctagattctcacctgctacacacccctcagagggactggaggagaactactgcaggaatccagacaacgatccgcaggggccctggtgctatactactgatccagaaaagagatatgactactgcgacattcttgagtgtgaagaggaatgtatgcattgcagtggagaaaactatgacggc

SEQ ID NO: 138305 - DNA, 879 bp, Homo sapiens
atgtcctatagtcagtgcgtctcagaccccaaggcccatggcatactacctgggtatcactgctggttattccgggaccaagggctccttaagagtcagcacgtgattaatcctgccaaagctagtactggattcttccttcaagacacactcatggtcctggaaataaaaacaaccatcagaaactactacaaacacctctatgcacacgaactagaacgcttagaagagatggataaattcctggacacatacaccctccgaagactgagccaggaagtaattgattccccaaacagaccaataatgagctccaaaattgaatcagtaaaagggtacacccaccagcagttttgccacaagagtacactgaacaaaggagacagggtcattgataacctgacgtgcccaccctactgctgtgtctggtttccattggctggaacgggacctcacattctgtatttgtcccgattggttagcaacttagaactttttaaaagaggcaaaggcagaggagaacaaaggaaggaggaagtaacttgtggaatgctgagaaagtccctagtcacctcggatcttccagaacctggaggtgtcaccagtgaaggctgtgaaacagcgaaggtaacagcctgttcctccctctgggagctttgtcacagggaggtactgaccccttattgtcccaaagacacctgcaggaagtggctggagaccccagttaggaggtcctgcccagtgaggaggagcaggatcagtacctgcttaagaaagaagtttggccacattttggcggagcagctgagctgtgctggggttccacctcagcccccagtcatgtcacgcactctgaagcctaaaggctggaatggctaa

SEQ ID NO: 138306 - DNA, 1245 bp, Homo sapiens
tcagtagtgattcatcattttaaattctttggaaagcaaaatagggtaaaataaataaataaaccaaaatatttgcaagggatctggtgtgataaatacatgctgagtaacaaatgatgaaattggtcctccacactggttgctgactgaattttctggtactcctcgagtatagggtagacagtccaatggcagcaggctgaacaggagaaccgccttacgtacagaaatggtatcgtggcagcaggctgaacgagatatccgccttacataccatccagtggagatgggctggacaagataaccacagggcccagtggccacagtggtgggctggcaaccttcatccaacccaaaactcagggcttcaatcctctgggtggcctgtgttccaatggatgagacaggggctaagttgttcctcatatacaaggaatgaatctccgggttgaccactccacacattccggtgtgtccttgaatggccctcacattcttatcacgccagtggtccgtgatttccctggggccaggtatgcaaaggagcctaggagtaaatgccagcaacaatataaacatcttagaagtacgaggggaagtagggtgcaaaacaactgtgacctgtatgtcctgttctaggccttttccagtgctagaggctgggaagtccaagatcaaagtgctggcagagtcgtggtctggtgagggcctgctctctggttcatagatggtactgtctagctctgtcctcccaataccaccacactggtgatcaaattccaacatacaggttttggaggcacacaaacatttagactctagcatggagtaagcaaatatgtttcccgccttcgccgcagtagcagctggagcagcgacagaggcggcagctgcggcggcggcggcgcccgcgcccctcgcgccagcgcgtagagcggcggcggcagctcgggggccgccactgccccggctgccatgagttgtgcggaggtgatgtatcacccccagccttatggagcgtcccagtatctgcccaaccccatggcagcgacaacctgccccacagcctactatcagccggcgccccaacctggccagcaggtgagtcaccggacgggcagcctgctgggggcgggggcgaagggcatcgagagtatcggtctggggctcggcgacgtcccgccggcacgcgtggcgcagaggatgctctgggatctgcgggagcgtccttgagcagaaagccat

SEQ ID NO: 138307 - DNA, 1285 bp, Homo sapiens
tgggcccgtgagaggcagggctgaattccactagaactgacaccagattcttttgccagcctagtacaaggtccacattacaagccaaagctcagaaatttctggaggtggtgtatcaaaatttactctgcgagactctgctgaactggctgcatcagggagaaatttcatctcccagaagggtcgttgctcatcgtttcttcccggaaacatctgcagagactagcttttcaggctaaggtatcctccatgatgttaccattgcaaggtgcccagatgctgcagatgctggagaaatccttgagggaagagcctccccaggaatcctttaaaggtttatggaactggtctttcacataaaccatgggaaatccattcaatctgaaggctgtggtgggacaagtgggcctgattttaattacagtggttgtcttgccctcagggagcaggatatggacagatggaccttggatcactataccattactttaccaaatctactccaaagatccccaaaactgtcaggaattccttggatcaccagaactcatcaactggaaacagcatttacagattcaaagttcacagcctagcctgaatgaggctatacaaaatcttgcagccattaagtccttcaaagtcaaacaaaacacaacgcattctctatatgggcaggctggaaacagccaagggaactgactcctttcctggctggaaatcaaaggattttatctccccagtgggtgggccaaacccaaggccatgtgagtttgataaaatccagtctgtaccactcacacttctcaagtaacctcccaacttctctccctgcattcactctggctttcctacaatcaatgttgtacaaagaaatcagaattacatttttaaaaaatgtaactcagaacatgtttctctcctgcttaaaagactccaccatctcccttctcatctagaataaaccgaggcctctgggctaccacttggacctttattgcccttcctgctttccttcctccaacagctctgaccgttcactctgttccgtctttcatcacaagctcatctatattcccaggacttcacatttgttatttcttctgtctactctgtctctcaagacaatagaggtcacagcaaatacaaacctttatactaatggattttgttttcttcttggaccctccatagcaaccaagagatgtttaaactctcatccatggatgttacccgatgctcacttggtgaataaattctggcattttggtggtaaaaaaaaaaaaaa

SEQ ID NO: 138308 - DNA, 1255 bp, Homo sapiens
cctatttcccagcaattgcaagagacgcctccgcggagccggcgctcagatgccaaaggctggagtcgttggtgacgtcatccagggctgggctatgcagggtggggccaagaagcaggaccaaagttccggtatgcgcgctttcagtcttcaattaggtccgaattcccggcatataagggcgttgctttgccttggcgtttaggtttcttaagttggttttagaagttgcttagtcatgtctggccgtggtaaaggtggaaaaggtttgggtaagggaggggctaagcgtcatcgcaaggttttgcgcgataacatccagggcatcactaagccagctatccggcgccttgctcgtcgcggcggtgtcaagcgaatttctggccttatctatgaggagactcgtggtgttctgaaggtgttcctggagaacgtgattcgtgacgctgtcactttacacagagcacgccaaacgcaagaccgtgacagcaatggatgtggtctacgcgctggaagcgacagggacgcactctttacggcttcggtggctaaggctcctgcttgctgcactcttattttcattttcaaccaaaggcccttttcagggccgcccacttttttcataaaagagcagacatcttgttatcctgctttgttccagatttttgctgagaagtagttactgtgcacatgtgtagatttgcaagtctggggctcctgatggactctgaggaagatggacgtggaggatgaaaatctgtctgattattttgaactgatgtttgttgctatggagatgctgcctatatgttgatgttgcagacgttaagtcactagcccacagccttgtattccatactcagagaccctgctacttacttgacatctcaacttgaaagtccaattaatatgcacttcaaactttaataggcttcaaacagaatttctttcattatctctgcaaaacagcttctctcatcatcttgaaattagtgaatggcattttactgttttagttggagtcatttctgtggttttctttcacatcctacataacaatccatcagtaagttctatgagctcttctttgaaaacaaacagaatccaactgtttcattcccacttttgctctggtcaagccactgccaacactcacctttattattgtagcaccctcattgcctagttctgtcccacagatttccaataaaaggtgaataaaatcaggtcactcttctgctgaaaaaaaaaaaaa

SEQ ID NO: 138309 - DNA, 840 bp, Homo sapiens
tcactctattaaatcttgcagctgcacactgttctggtccgtgtttgttatggttccagctgagctttcgctcaccatccaccagtgctgttggccgctgtcgcagaccctccgctgacttccatccctccagatccagcagggtgtcagctgtgctcctgatccagcgaggtgcccattgccaatcctgatccagctaaaggcttgccattgttcctgcacggctaagtggctgggttcgtctcccaagccggagacattttttgaaattatacacccttcaccatcatgaggacctaaatagcgacaccagtaataaccttttgcagtgctgtggagtagctctggtcctttcttcacaaggcctgctgaaatatcagatgtattagtcagtgttctaaaccaatcagcacacactccccattctgagtccataaaaggccccacatagagccacagggggggaattttcccaccttctggtaggggaaacatccccaccatgtcccctctctgatgaaagccattttcatcattcagaaaaattcttctccacccttctcgcccttcaatatcctgtctatcctcatttttctcgagcatggtacaagagcttgcaaactgctgaatgcaggtacaagcctcgtggtgagtgttacagttaaagatggtgtgtccagagtttgttccttctgatgttcggatgtgtccggagtttcttccttcaggtgggttcgtggtttcgctgacttcaggaatgaagccgcagaccttcgcagtgaccgttacagctgaggtcaggagttcaagaccagcctggccaacatggagaaactccat

SEQ ID NO: 138310 - DNA, 792 bp, Homo sapiens; identical to SEQ ID NO: 122058

SEQ ID NO: 138311 - DNA, 633 bp, Homo sapiens
tcactctgttaaatcttgcaactgcactctcttctggtccatgtttgttacggctcgagctgagctttcactcgccatccaccactgctgtttgctgccgccacagacccgccgctgacttccctccctttggcagggtgtcctctctgctcctgatccagcgaggtgcccattgccgctcctgatcgggctaaaggcttgccaatgttcctgcgctgctaagtgctgcgttcgtcctaatcgagctgaacagtagtcactgggttccacggttctcttccatgacccacggcttctaacagagctataacactcaccccgtggcccaagattccattccttggaatcaagaaacctggaatgcagtggttttaagtccacactgtatccatagtagcccctccttttacctgcatgccaggtttctggtttcccttctctgagtgctttgatggccctgcttgctgtgccatagccacggaacatcacactcttctttactttgatgatatcaggctcactgaacctgatgggcacaggtaaccataccccagaggcctgaattgtgtatgtcggtacccaacagtgacttcttctgccagttctttcatcattggcgttcattcgtatcat

SEQ ID NO: 138312 - DNA, 423 bp, Homo sapiens
cggctcggtcctgcctctgcccggggctcaggatacggtcacctgtattcgctgtggcttcaacatcaacgttcggggttgacaggcgctgccctcgatgtggtcatgaaggaatggcataccacaccagacagatgcgttcagccgatgaagggcaaactgtcttctacacctgtaccaactgcaagttccaggagaaggaagactcttgacctttttcctgggcaactctacagtccctccctcctttggaaggtgaaggatactgcgtttttagatgccttgtccatcctgtctggttgcaatgttttgctcccagaagagaatcagatcatcatgtggggattaccattgttcctggagtactcctacccttagttgaatttccttattaaagttatatttttctataagaccctgaaa

SEQ ID NO: 138313 - DNA, 493 bp, Homo sapiens
acccgaccgcatgtctgtcatggacctcgccaatacttgctccagctttcagtcggacctggatttctgttcagattgcggctcggtcctgcctctgcccggggctcaggatacggtcacctgtattcgctgtggcttcaacatcaacgttcgggactttgaggggaaggttgtgaagacttcggttgtgttccaccaactggggacagccatgcctatgtcggtggaggaagggcctgagtgccagggacctgtggagaaccggagccttaccatcaaacttcggaaacggaagccagagaaaaaggtagaatggacaagtgacactgtggacaatgaacacatgggccgccgctcatccaaatgctgctgtatttatgagaaacctcgggcctttggcgagagctccacggaaagtgatgaggaggaagaagagggctgtggtcatacacactgtagggaagaggaagaggaggacgaacagagatcctga

SEQ ID NO: 138314 - DNA, 373 bp, Homo sapiens
  misc_feature (1)...(373): n = a,t,c or g
agcccacggagttggttaactcctctcaccggcccctggaaagggttccaagtcctttagtacccgacgctgtctgggaattccgggcgtttcggctccttggtcgcagagacccgaccgcatgtctgtcatggacctcgccaatacttgctccagctttcagtcggacctggatttctgttcagattgcggctcggtcctgcctctgcccggggctcaggatacggtcacctgtattcgcttgggcttcaacatcaacgttcgggacttttgagggaaggttgggaagacttcggttggggtcacccactggggacagccatgcctatgtctggggaggaaaggcctgaatggccaggacctgtgggtgacn

SEQ ID NO: 138315 - DNA, 879 bp, Homo sapiens
tagtacccgacgctgtctgggaattccgggcgtttcggctccttggtcgcagaggcaggaggcgtgcgtggcaggagggttcgggttatatactcctaggtcctgggacagaatagttacgacctctgggacaggaactcttctctcttttgttaataaacttccaactccctcctcagacccgaccgcatgtctgtcatggacctcgccaatacttgctccagctttcagtcggacctggatttctgttcagattgcggctcggtcctgcctctgcccggggctcaggatacggtcacctgtattcgctgtggcttcaacatcaacgttcgggactttgaggggaaggttgtgaagacttcggttgtgttccaccaactggggacagccatgcctatgtcggtggaggaagggcctgagtgccagggacctgtgggtgtcgctctgtcacctagcctggagtgcagcgaggcaatcttggctcactgcaacctccgcctcctgggctcagcgcctgcgcgctgtcacgttacggcggaactaatccagcgacgcctgcgctttgacgcatttggtgccgtggaagggaaaaagggggactgcagtatgcgtcacacccggaagcggcgagccggaagtggggagaaccggagccttaccatcaaacttcggaaacggaagccagagaaaaaggtagaatggacaagtgacactgtggacaatgaacacatgggccgccgctcatccaaatgctgctgtatttatgagaaacctcgggcctttggcgagagctccacggaaagtgatgaggaggaagaagagggctgtggtcatacacactgtagggaagaggaagaggaggacgaacagagatcctga

SEQ ID NO: 138316 - DNA, 1596 bp, Homo sapiens
gtgattttgggttatttattttgtgcatctgtggcaataaatgagatctcagtggtggtatggatttgactgatctctgtaactgtgtatggcaaaaggaccggaaaatgaaaaccagatcccagtaaggggtagagaggggccaagagaactgaacatctgggctgccggagaaatcaaagtctaggaagtaagaggtaagagtgtactacaggggacataccccaatctctttgctccctccctcttccttcctctcccagagacccaggtccctgggactatattggatctgtctctgaagctgaaaaacaaaaggcagaggagacagtcggctctaagtgaccaatctcaagccagctttgtcagaaatcctaaataacaggagaagggtgggaagaaaggatatgattatttcttattccattttccataagaggtgagaatgacaaggacctcttttctaactcctcttgagggtgtgagaagggttagcaggaggagaagggctgggagctctgaggtctcctgtaagacctcatatctcacaggcaaggactaagaattaggattaaatattttagtgggatagctctaaaccaggattagcaagcaaagttagggcgcaaattcctggaatctgactgggaccctggcagtgaaagctgggactgttgaaaacccaatttaagtgttcgctactcatgttgagagtgcagggccaagataactagatcccaggacaggcagtttggcagtgagaacaaaaggaagacactgggaccaaggtgcctagatccctcgagagagaagggtgggtattgggaggaaaaatgaggactggggaaacccaggaggctgggttctggaatagcagcaagtcagaatttcaggatctctgttcgtcctcctcttcctcttccctctatcaggcaagaagagagggaaggagggggcttggagaagtagccacatggatacatttagggccagacagacacaggaatgctggaggagagagggatttagtgcttgcattggccctggagaggggctgggaagggtcaggaggctggggaggggtggtgggggtcggtcctagggttgcaacgacgccgtcctttgcggtggcgcgcgtacacagtgtgtatgaccacagccctcttcttcctcctcatcactttccgtggagctctcgccaaagggccgagggtttctcataaatacaagcaagcatttggatgagcggcggcccatgtgttccattgtccacagtgtcacttgtccattctacctttttctcggggcttcccgtttccgaagtttgatggtaaggctccggttctcgggctcggttgtcacggtaaccgttgtctcagtgacggtctcgctcagcccagcccctacatcggccatggctaaggctcaggacagggaggagaggaggaatgggggatgagacacccttccctttttctgtcgctgaggtgtaagagaagcggtatcggattcagagtggtagccacgatcctccaccttctttattccccatcactcctaaacctccgcttctccacccctggggataacctggct

SEQ ID NO: 138317 - DNA, 921 bp, Homo sapiens
cgcgggcgcaaagctggcgctctatcccacggagttggttaactcctctcaccggcccctggaaagggttccaagtcctttagtacccgacgctgtctgggaattccgggcgtttcggctccttggtcgcagaggcaggagggcgtgcgtggcaggagggttcgggttatatactcctaggtcctgggacagaatagttacgacctcttcggacaggaactcttctctcttttgttaataaacttccaactcccctcctcagacccgaccgcatgtctgtcatggacctcgccaatacttgctccagctttcaagtcgggacctggaatttctggttcaaattgcggttcggtcctgcctctgcccggggctcaggatacggtcacctgtattcgctgtggcttcaacatcaacgttcgggactttgaggggcaaggttgtgaaagacttcgggtttgtgtttccaccaccttggggacagccatgcctatgtccggtggaggaaagggccttgagttgccagggacctgtggttgacagccgctgccctcgatgtggtcatgaaggaatggcataccacacccagcagatgcgttcagccgatgaagggcaaactgtcttctacaccctgtaccaactgcaagttccaggagaagtgaagactcttgacctttttcctgggcaactctacagtccctccctcactttcggaaggtgaaggatactgggtttttagatgccttgtccatcctgtctggttgcaatgttttgctcccagaagagaatcagatcatcatgtggggattaccattgttcctggagtactcctacccttagttgaatttccttattaaagttatatttttctgtaagaccccgaaaaaaaaaaaaaaaaaaaaaaaaaaaaagtcgtatcgatgt

SEQ ID NO: 138318 - DNA, 326 bp, Homo sapiens
  misc_feature (1)...(326): n = a,t,c or g
annnnnnnnnnnnnnnnnnnnatgacaaccgttatttagtttgtatttcataatcataaacttaactctgcaatccagctaggcatgggagggaacaaggaaaacatggaacccaaagggaactgcagcgagagcacaaagattctaggatactgcgagcaaatggggtggaggggtgcgtcgggtctgcgagagcgccagctatcctgagggaaacttcggagggaaccagctactagatggttcgattagtctttcgcccctatacccaggtcggacgaccgatttgcacgtcaggaccgctacggacctccaccagagtttcc

SEQ ID NO: 138319 - DNA, 598 bp, Homo sapiens
  misc_feature (1)...(598): n = a,t,c or g
tcgcgacgaggtcaaccccaccgtgttcttcgacattgccgtcgacggcgagcccttgggccgcgtctcctttgagctgtttgcagacaaggtcccaaagacagcagaaaattttcgtgctctgagcactggagagaaaggatttggttataagggttcctgctttcacagaattattccagggtttatgtgtcagggtggtgacttcacacgccataatggcactggtggcaagaccagcaagaagatcaccattgctgactgtggacaactcgaataagtttgacttgtgttttatcttaaccaccagatcattccttctgtagctcaggagagcacccctccaccccatttgctcgcagtatcctagaatctttgtgctctcgctgcagttccctttgggttccatgttttccttgttccctcccatgcctagctggattgcagagctaagcctatgattatgaaataaaaactaaataacnnnnnnnnnnnnnnnnnncctnnnnnnnnnncccgggccccaattccccctataggggggcggattacaattcccgggccggcgtttaacaacggggggactggggtacacccg

SEQ ID NO: 138320 - DNA, 778 bp, Homo sapiens
  misc_feature (1)...(778): n = a,t,c or g
tttcgtgggccgcgtctcctttgagctgtttgcagactttgtcccaaagacagcaggttggtccattttctaagtttaacaaagatgttccaattgtgacagtttgtgtgtgtgtgtgtatatatatatttttatgtatgtatatatgtgtttaannnnnnnnnnaaacagaaaattttcgtgctctgagcactggagagaaaggatttggttataagagttcctgctttcacagaattattccagggtttatgtgtcagggtggtgacttcatacgccataatggcactggtggcaagtccatctatggggagaaatttgatgatgagaacttcatcctaaagcatacaggtcctggcatgttgtccatggcaaatgctggacccaatacaaatggttcccagtttttaatctgcactgccaagactgagtggttggatggcaagcttgtggtctttggcaaggtgaacggcatgaatattgtggaggccatggagtgctttgtgtccaggaatggcaagaccggccagaagatcaccattgctcgactgtggacagctcttataagtttgacttgtgttttatcttaaccaccagaccattccttctgtagctcaggggagcaccctccaccccatttgctcccagtaacctagaatctttgtgctctcgctgcggttccctttgggttccatgttttccttgttcccttccatgcctagctggattgcagagttaagtttatgattatgaaataaaaactaaataacaaaataaa

SEQ ID NO: 138321 - DNA, 992 bp, Homo sapiens
  misc_feature (1)...(992): n = a,t,c or g
aaaccgtgtactattagccatggtcaaccccaccgtgttcttcgacattgccgtcgacggcgagcccttgggccgcgtctcctttgaggtaaggggcctggataccaagaagtgactgctcatctaatccataaagctatgttaacagattggagctgtttgcagacagggtcccaaaggccagccagaaaattttcgttgctctgagccactggagagaaaaggattttggttataaggggttccctgcttttcacagattatttcccagggttttatgtgtcaaggggtggtgaccttcaacaacgccattaatggcaactggtggcaaagtcccatcctatggggaagaaaatttgaaagattgaagaacttccatccctaaaggcataccgggtcccctggcatcttgtccccatgggcaaaatgctgggacccaaaaccacaaaatggtttccccagtttttttaacatcttgcactgcccaagacctgagtggttgggatgggcaagcaatgtggtgtttggcaaaagtgaaaggaaggccatgaatatttgtgggaggcccattggagccgctttggggtccaggaatgggcaaagacccagcaaagaaagatcatcagcattgctgactgtgggacaacttcgaattaagttttgactttgtggtttatctttaaccacccagatcatttctttttgtagctcagggagagcaccccctccaccccatttggctcggagtaatcctaggaatcttttgtggctcttcgctgcaagttccctttggggttccatgttttcctttgttccctccccatgcctagctggatttgcagcagttaaagtttatgattattgaaataaaaactaaataacnnnnnnnnnnnnnnnnnncctcgggggggggccgggcccccattcccccttatgggggggggaataacattcccggggccgcggtttaacaccgcggggagggggaaaaa

SEQ ID NO: 138322 - DNA, 439 bp, Homo sapiens; identical to SEQ ID NO: 132756
  misc_feature (1)...(439): n = a,t,c or g

SEQ ID NO: 138323 - DNA, 1059 bp, Homo sapiens
ctaagccaagaagatctgggaagcagtcagagagccttgggccagagttccaggggctctgggagtggctgccaggtgagttggacagtccgatttccagtggggtcccgcacagatgggacgcagcttaggaggaatcccgggctgcaggcattccttggcctggtggccagatttctggcacttgtagcaagctccttccagaaaagcgggaaaggggttgggtcgtggaaataaggggttggggtgcagagataagaggtcggggcatggaaataagggattggggcacagagatataagaggttggggtgcagaaataagggattgggccacagagataagaggtcggggcgtggaaataagggactggggcacagagatacgaggttggggtacttgctcctctagaaaagcggacttgccactcagggtgaaggagaaggggttgggtgtttcttgccccccagaaaggcggagaaggggtagagacacagagagaaggggttggggtacttgccccttccccagaaaagcgggacttgccgctaagggtgaaggaccaaggcaggcgtccctgcgtggtctgacacctctgaaacccgatttaaaattggtgagatgttccttgggctggtcggtctgaggacctgaggccgtaggtggatctttctcatggagcaaagaacaggaggacaggggattgatctcccaagggaggtcccccgattgggctgcataggtgccagctggggcttcagtctcatctggaacttgggtcctattccaagctcttgtaaattgttggcagaattcaggactttttggttgcaggactgagtcccttagcttcttagtagctgtcagctggagactgccttcagtttctagaggcctcccacagtttcctgccacatggccctctccacaggcagtttgcaacaccactgtttgcaccttcaaggccagcaggagagtgtctctccccagtatatctgatgtcttagggctcactgagctctttccatacatgtctaatcctttggggcctttccacat

SEQ ID NO: 138324 - DNA, 1134 bp, Homo sapiens; identical to SEQ ID NO: 125989

SEQ ID NO: 138325 - DNA, 381 bp, Homo sapiens; identical to SEQ ID NO: 127041

SEQ ID NO: 138326 - DNA, 602 bp, Homo sapiens
ctaagccaagaagatctgggaagcagtcagagagccttgggccagagttccaggggctctgggagtggctgccaggtgagttggacagtccgatttccagtggggtcccgcacagatgggacgcagcttaggaggaatcccgggctgcaggcattccttggcctggtggccagatttctggcacttgtagcaagctccttccagaaaagcgggaaaggggttgggtcgtggaaataaggggttggggtgcagagataagaggtcggggcatggaaataagggattggggcacagagatataagaggttggggtgcagaaataagggattgggccacagagataagaggtcggggcgtggaaataagggactggggcacagagatacgaggttggggtacttgctcctctagaaaagcggacttgccactcagggtgaaggagaaggggttgggtgtttcttgccccccagaaaggcggagaaggggtagagacacagagagaaggggttggggtacttgccccttccccagaaaagcgggacttgccgctaagggtgaaggaccaaggcaggcgtccctgcgtggtctgacacctctgaaac

SEQ ID NO: 138327 - DNA, 531 bp, Homo sapiens; identical to SEQ ID NO: 138163

SEQ ID NO: 138328 - DNA, 375 bp, Homo sapiens; identical to SEQ ID NO: 114502

SEQ ID NO: 138329 - DNA, 306 bp, Homo sapiens; identical to SEQ ID NO: 129173

SEQ ID NO: 138330 - DNA, 909 bp, Homo sapiens; identical to SEQ ID NO: 114873

SEQ ID NO: 138331 - DNA, 1764 bp, Homo sapiens; identical to SEQ ID NO: 115471

SEQ ID NO: 138332 - DNA, 368 bp, Homo sapiens; identical to SEQ ID NO: 132715

SEQ ID NO: 138333 - DNA, 1850 bp, Homo sapiens; identical to SEQ ID NO: 132720

SEQ ID NO: 138334 - DNA, 1247 bp, Homo sapiens
gcaaccacaggaggaaccaatttacgagatgacataatgaggcttgatgatacagtgcacgtggtgattgctacccctgggagaatcctggatcttattaagaaaggagtagcaaaggttgatcatgtccagatgatagtattggatgaggcagataagttgctgtcacaggattttgtgcagataatggaggatattattctcacgctacctaaaaacaggcagattttactatattccgctactttccctcttagtgtacagaagttcatgaattcccatttgcagaaaccctatgagattaacctgatggaggaactaactctgaaaggagtaacccagtactacgcatatgtaactgagcgccaaaaagtacactgcctcaacacacttttctccaggcttcagataaaccagtcgatcattttctgtaactcctctcagcgagttgaattgctagccaagaagatttctcaactgggttattcttgcttctatattcatgctaaaatgaggcaggaacatcgaaatcgtgtatttcatgatttccgaaatggcttatgccgcaatcttgtttgcactgatctgtttacccgaggtattgatatacaagctgtgaatgtggtaataaactttgatttcccaaagctggcagagacctatctccatcgtattggaagatcaggtcgctttggtcatcttggcttagccatcaacttgatcacatatgatgatcgcttcaacctgaaaagtattgaggcgcagctgtgaacagaaattaaacctattccgagcaacattgataagagcctgtatgtggcagaataccacagcgagcctgtagaagatgagaaaccttaacaagcatgtacgtccctgacagaacagctaacaggaacctctacatgcgggaaaccaaaatctttctttcctgggggaaaattgacgcccccccattttctattacccctaaagggtaccacacccccttagcctcaactgaccgctcatacccaccctcctcctcgcggggtctgtcaccctacatatccgcacacccccccaaccgaccttcctttgctggcctcacttcccccgcctatactgtgtccctttcttactacttccactctagtcccggcgtgaccatcaaaacgatcgcaccttcactcacagttcacgccctacccgcacacctcgtgtgactacctctcagagccgcgtgcgcgcctgacactctcgtgccg

SEQ ID NO: 138335 - DNA, 1221 bp, Homo sapiens
aaagtgtctaccttggcccaagagttattttggtttcctgacttgggacatgttgaataaagctaatttgccagtcctgggtgggggcaaaaccccctgaaccttgaatgtgtaagggaaagggagggggccctgaagaatccctgaggaatagtagaatagcagatggaacactgagaaattatttccttgaggatagatttccatgatggaaaggaaatgagaggttctgaaaggcgggctagtggcttgtactatagcatagcctgcctttgctggtgagtggcggttaggcctggtggaaccgccatcaataaatcaagtgtgatcagggtgaggaacaggaaagaaggaaatctggggaaatggggtgaatgtcaggtggatcggagagatacagtcatgggggtcagggggcttctgaggcgatctggtagtgtcagtcttcagccgctaagccgagaagatctgggaaggagtcagtcagagagccttgggccagagttccaggggctctgggagtggctgccagaatgcataattgaaacagatatacttagcagcgtggagaatttccatattggtttcctgatatgtggtatgagggctcttatgatgggaaaggctaactggaagccattagagctgcctctacctaagaaaatagcaaataacgaccaatattgcatacttacatggctggcagagatcagtatcaccatcaaaaactttaaagatttacacaaaaacttcatgaagatagctaaacagacaaacaaactctccctaactgaagtaaaaactaacatacaaattgatgctaaagtcatgaaagaaaaagagatgacctatgcaaaggaaatcgatgctcaagatttctgtaagtctgtcagtgtacagaagttcatgaattcccacttgcagaaaccctatgagattaacctgatggaggaactaactctaaagggagtaacccagtactatgcatgtataactgagcttcaaaaactcgcagagacctatctccatcgtattggaagatcaggtcgctttggtcatcctggcttagccatcaacttgatcacatatgatgatcacttcaacctgaaaagtattgaggagcagctgggaacagaaattaaacctattccaagcaatattgacaagagcctgtgtggggcagaataccacagcgagcctgtagaagatgagaagccttaa

SEQ ID NO: 138336 - DNA, 777 bp, Homo sapiens
aggaatagtcagggaagcagataatttagttaaagtgtctcagcctaataagggaactgggcaggtggggataactaaaaaggagtgcttaaaagagtattgtctaagttggcaccagagttggggagttttaagaggtttagaagcctggccatcaatacccacaacagttatggaggcaagggaaagaggcccttgaaaagagggtaatgtggagtgagtagcctctgtattgattaagaaggggacgggcttaccttccactgtgaaagttacccgaagctcggcgtccgtgaatggtctagggggcttccgaggcgatcgtgcagtgtcagtcttcagctgctaagccgagaagatctgggaaggagtcagtcagagagccttgggctagagttccaggggctctgggagtggctgccaggtgagatgaacagtccgattttcggtggggtcccacacagatgggacgtggcttaggaggaataccgtgctgtgggcattcgcttggcccagtggccagatttccagcaagtgtagcaagctccggatttaaaattggtgagatgttccttgggctggtcggtctgaggacctgaggtcgtaggtggatctttctcacggagcaaagaacaggagtacaggggattgatctcccaagggaggtcccccgatccgagtcatggcaccaaatttcatgcgcgtccgtgtgaagagaccaccaaacaggctttgtgtgagcaataaagctgtttatttcacctgggtgcaggtagg

SEQ ID NO: 138337 - DNA, 389 bp, Homo sapiens
aacctgtgcagttgggctgaagatgcaaactgaatgaatgacagctggagcacctccccctcctcctcccttcgaaacctccagaaggggtttgaggcaaccccacctgcagtgggggctgagaagatgccagtggaagcaccagatcccagaggcaccctgtagggttgcctgtctcctgtgcgctcagggcctgccacttgaaatgaataaataagctaatgaagtgggagctttctgcagcatagtcacacggtcagcgcttggtgtggaggtcaggggcctattgtgggctgcccccaggaactgctcgaacctctcctctcaatccctgtctttgcagtgctcagtgacctgtggaaaaggctacaaacaaaggcttgtctcgt

SEQ ID NO: 138338 - DNA, 1458 bp, Homo sapiens
atgggtcgaaagaacactggcaataagtccctattatctgggttctgggcccagtttcaaatacataactccggtacatgctccagagaagctcttgcatgtatgtccaaaaagaacacatgcagcgccaaacaaaatactgttagggagacatacttctggcaaaaagcaaagcaaggacacgataaatttgtaactcaagagagtggtacacctcctgtgaaaggtggggaagttgccaactctccaggtggccgagacagggcagtccctcaggtaacaggggtgaacactggggggctgcgtgcctgggcagttgatggtggtttggtagctgtattcataattctccttcccggtgtaaatctcgctgcacgagacaagcctttgtttgtagccttttccacagtggcaggccctgagcgcacaggagacaggcaaccctacagggtgcctctgggatctggtgcttccactggcatcttctcagcccccactgcagaaaagcaaaagaaagtgaggaatgattatttgagagctgaaacagggctatttggaaaagagagtattataactggccagggtctgagcatcccagagaagactgggccacaggccctcgggggccagatcgtagtaggtatcgagtgggaacaggatatggcacaattcttgaagtgtgtttcatggaaccctggttatttgggggaaattacaagctgtaacttcgaaaagaagtttttgtgcttggcttcatttagctccctggggcgattagcacaccgcgtactaagcacagcagggcgggacttcaaagaagaggcgctttccccaggacggtcagcagagggcagggttggcctgctcaagaccacctgggcctggaggatgcggctttcaggctccggcaggagagaggtacccaaacataaagccccaccccacttctgtggcccctcttgtgctgtgtatttgctatttaatgctatgctaccttgggcatggagctactggagaggagcacggaggccctcaaggcacccaggagccttcccctgcagtgtggcccaccagtgcccatctgctgccaggtcccctacactgaggcaagaggacccggagaagggaagccaggcatcctcctttcccacaggcccttcaccccaatccatggtggacaggtgccttaaaggacctcaactggatgtgtccagaaagcaactcagtctccctcaaactggtcttcgcccagtattggtaaaccagttgtctaagaagcctaccggctaccctcagacccaaatccagtgggtcctcatgagagacacaggcaaagacacagacacagaggagaaagaaggccatgcaaagatggaggcagagattggagtgatgtacccacaggaacacctggagccaccagagtctggaagagcaaaaggagagattcccctttaa

SEQ ID NO: 138339 - DNA, 354 bp, Homo sapiens
atgacagtggattatcgtaagcttaaccaagtggtgactctaattgcagctgctgtaccagatgtggtttcattgtttgagcaaattaacagtctcctggggtacatcaactctccaggtttgtgtcataatcttattcagagagaccttgatcgcttttggtttccacaagatatcacactcgtgccttacattgatgacattatgctgattcgatccagtgagcaagaagtagcaaacatactggacttattggttgcacagtgccatagagaggattccccagaacccacagtttttacagcaggaaaagagaaccaaggaggcagacatctagcttccgtggcattctga

SEQ ID NO: 138340 - DNA, 594 bp, Homo sapiens; identical to SEQ ID NO: 119164

SEQ ID NO: 138341 - DNA, 278 bp, Homo sapiens
caggagtcgtgttaatttgctcaagcaatgaaaccacatctggtacagcagctgcaattggagtcaccacttggttaagcttatgataacccactgtcattctccaagatccatctgtctgacctccataaacccgtactttaactgggggacagcaatgacgttttgggtaccctggaatcaatgtcagctcagagccagtgtccagtagtccctgaaatgtctgatcatttgcctttcccaatgcacagttaccctggtaaaaggccagaggtctc

SEQ ID NO: 138342 - DNA, 266 bp, Homo sapiens; identical to SEQ ID NO: 117721

SEQ ID NO: 138343 - DNA, 564 bp, Homo sapiens; identical to SEQ ID NO: 128541

SEQ ID NO: 138344 - DNA, 879 bp, Homo sapiens
atgctggatctcccttggtttaatgtagaggaggggatccaaaggctaagggaaattgggatgctagagtggcttagtcactttagacctacccgtctcagcagggaggatccagaagacataccgttcaccaataccttgccaaataaatttgtgaggggagtacctgcatccttgaagagctctttcattggtcttctctgtatgccagatcttaccaagacagttggatcttggagaatgacagtggattatcataagcttaaccaaacggtgactccaattgcagctgctgtaccagatgtggtttcattgcttgagcaaattaacacatctcctggtacctggtatgcagccattgatttggcaaatgccattttctccattcctgtccataaggtgaaggataagttgctgcatttggcccctcctacaaccaaaaaagaggcacaatgcctagtggggctatttggattttggaggcaacactttcttcatttgggtgtgtcactctgggtcatttatcgagtgaccctaaaggctgccagttttgagtggggtccagaatatgagaaggctctgcaacagatccaggctgcagtgcaagctgctctgctactaaggccatatgacccagaatatccaatggtgcttgaggtgtcagtgacagataaggatgctgattggagcctttggcaggcccccataggtgaatcacagcagaggcctctaggattttggagcaaggccttgccattttctgcagataactactctccttttgagagacagttcttggcctattactgggctttagtagaaactgaacgtttgactatgggtcacaagtcaccacatgacctgaactgcgtatcatga

SEQ ID NO: 138345 - DNA, 838 bp, Homo sapiens
tcagagcaaggtggccatggcagcttctggagaagcagtggggtcttcaggaaaaccagaggcctggtgacctctggtgacccaggttgttttcagattgtttcccaccaacagcagcctggacctgttgcagagccttctcctgttctggaccccactcaaactggcagcctttcggatcactcgataaatgggctggtgtaaaacacccaaatgaggaatgtgctgcctccaaaatccaaacaggcccaccatgtgttgtacctcttccttggttgtaggaggagccaaatgcagcaatttatccttcaccagtaagtccagtttgttttctacttcttgcacactggatccaatcagcataatgtcatcaatgtaatggaccagtgtggtatctcgtggaagtgaaaagcaatcaagttctctccaaataacattatgacacaaagccagagagttgatataccccttatggacaggaatggagaaaagggcatttgccaagtcaatggctgcataccaggtatcaggagatgtattaatttgctcaagcaatgaaaccacatctggtatagcagctgcaattgcagtcaccacttggttaagcttacaataatccactgtcattctccaagatccatctgccttcttgttaaagcttctgatacatattgacaatttgtcttccacaaagactgtatgaatataaatttccaccagcttagaggcaggtgggtgcccatagcattcaatccatttgcctattttctctgggctttcattcagtgtcattcttctctcttggaatgtctttctcctcctatttctaccacgtggt

SEQ ID NO: 138346 - DNA, 1200 bp, Homo sapiens
tcagagcaaggtggccatggcagcttctggagaagcagtggggtcttcaggaaaaccagaggcctggtgacctctggtgacccaggttgttttcagattgtttcccaccaacagcagcctggacctgttgcagagccttctcctgttctggaccccactcaaactggcagcctttcggatcactcgataaatgggctggtgtaaaacacccaaatgaggaatgtgctgcctccaaaatccaaacaggcccaccatgtgttgtacctcttccttggttgtaggaggagccaaatgcagcaatttatccttcaccagtaagtccagtttgttttctacttcttgcacactggatccaatcagcataatgtcatcaatgtaatggaccagtgtggtatctcgtggaagtgaaaagcaatcaagttctctccaaataacattatgacacaaagccagagagttgatataccccttatggacaggaatggagaaaagggcatttgccaagtcaatggccgcataccaggtatcaggagatgtattaatttgctcaagcaatgaaaccacatctggtatagcagctgcaattgcagtcaccacttggttaagcttacaataatccactgtcattctccaagatccatctgccttctcctcatgggtcacactctgaaccttgcctctaggggcccaccaggactttagtctagttatagctctagaagcaaacagggatgttggcagtggctcctgaggagaatcaacattatcttgcctggcaactgcctcaggggaggccatcactgttgcctcaggcagtgcagggtttatctcctcagacaaaggtggaaaggctgatggcagcatcggttggagagggaatgttgccaatactggggatggagaagctgtttcttctggcaaaaaagattgatcagggtttacaagctcagtgtccccagcttcatcagggtcctcccacacgtccccattccaagttgcagggtcccattcttttccaatcaatgccttcactttaacagtagacacctggtgaggcttggccctcatgcattggaaccgttcaccagaccacagagtccccagagatgtcaagagactgggttctgctcccattgtgactgctttagcctgcttctcaaagtttgtgaaggtctttttcgtaacttcaaatttgtacat

SEQ ID NO: 138347 - DNA, 636 bp, Homo sapiens
ttaacctctcagagcctcaatttcttcatctgcatctgcatctgtcttactcatttttatatcttcaggtgctttccatgtgagctgaagctgagaagtattatcttgtccctgcagggaagctgtggtaaggaggacaaaagcatttgggaaatactcctttatatctccagagctgggcacttgttcccacggcagtgtctgttcatgacttttctgctctggtaagcatgacactctaatcctggaagcagcagtgtgctctgcttccttacttctcttatgaatcaataagtccagtgtgtttactacttcttgctcactggatccaatcagcagaatgtcatcaatgtaatggaccagtgtgatatcttgtagaagcaaaaagaaatcaagttctctccgaataagattatgacacaaagctggaaagttgatatacccctgaggtagtgaaggcaaattgcttctggtgggcctcatggacaggaatggagaaaaaggcatttgccaagtcaatggctgcataccaggtaccaggaaatgtgttaatttgctcaagcaatgaaaccgcatctggtacagagctgccattggagtcaccacttggttaaacttacgataatccacggtcat

SEQ ID NO: 138348 - DNA, 1041 bp, Homo sapiens
aagacagatggttcttggagaatgacagtgcattatcataagcttaaccaaatggtgactccaattgcagctgctataccagatgtggtttcattgcttgagcaagttaacacatctcctggtagctggtatgcagccattgacttggcaaatgcctttttcttcattcctgtccataaggcccaccagaagcaattcgccttcagctggcaaggccagcaatatacctttactgtcctacctcagggagagaccttggttaatttttcccttcctcaagatatcacactgttccattacattgatgacattatgcagattggatccagtgaccaagaagtagcaaacacactggacttattgcccattaatcaagtgacccgaaaggctgccagttttgagtggggtccagaacaggagaaggctctgcaacaggtccaggctgttgaattttggagcaatgccctgccatcttctgcagataacatctctgcttttgagagacagctcttggcgagttactggaccttggtggaaactgcatgtttggctctgggtcatcaagtcaccatgcgacctgaactgcctataatgaactgggtgctttctgacccatctagccataaagtggttcaggcacagcagcattccatcatcaaatggaggtggtatatatgtgattgggctgtagtaggtcgtgagagcacaaaggaggatttcaataatcaatgggatggaatgacctgttctgtggacaccactcatcctctttccctaaccacctctgtcatcgccaagtgggcccatgaacaaagtgaccatggtggcagcaaagcatacccctacaccaagagacagtcaaagtgcttcattaaatgggtcctgttccctgtgctactcaactggataagatccaccaacaagggttttcagatccctatagaggagctgtcctactggcatcaggttggtgccccaagaggccagagatcccagaagaaggagcaaccacccatctttgctgtttccccgcctctttga

SEQ ID NO: 138349 - DNA, 4265 bp, Homo sapiens
gtctgaaggacctgaggcattttgtgacgaggatcgtctcaggtcagcggagggaggagacttatagacctatccagtcttcaaggtgctccagaaagcaggagttgaagacctgggtgtgagggacacatacatcctaaaagcaccacagcagaggaggcccaggcagtgccaggagtcaaggttcccagaagacaaaccccctaggaagacaggcgacctgtgaggccctagagcaccaccttaagagaagaagagctgtaagccggcctttgtcagagccatcatgggggacaaggatatgcctactgctgggatgccgagtcttctccagagttcctctgagagtcctcagagttgtcctgagggggaggactcccagtctcctctccagattccccagagttctcctgagagcgacgacaccctgtatcctctccagagtcctcagagtcgttctgagggggaggactcctcggatcctctccagagacctcctgaggggaaggactcccagtctcctctccagattccccagagttctcctgagggcgacgacacccagtctcctctccagaattctcagagttctcctgaggggaaggactccctgtctcctctagagatttctcagagccctcctgagggtgaggatgtccagtctcctctgcagaatcctgcgagttccttcttctcctctgctttattgagtattttccagagttcccctgagagtattcaaagtccttttgagggttttccccagtctgttctccagattcctgtgagcgccgcctcctcctccactttagtgagtattttccagagttcccctgagagtactcaaagtccttttgagggttttccccagtctccactccagattcctgtgagccgctccttctcctccactttattgagtattttccagagttcccctgagagaagtcagagaacttctgagggttttgcacagtctcctctccagattcctgtgagctcctcctcgtcctccactttactgagtcttttccagagttcccctgagagaactcagagtacttttgagggttttccccagtctccactccagattcctgtgagccgctccttctcctccactttattgagtattttccagagttcccctgagagaactcagagtacttttgagggttttgcccagtctcctctccagattcctgtgagcccctccttctcctccactttagtgagtattttccagagttcccctgagagaactcagagtacttttgagggttttccccagtctcctctccagattcctgtgagctcctccttctcctccactttattgagtcttttccagagttcccctgagagaactcagagtacttttgagggttttccccagtctcctctccagattcctggaagcccctccttctcctccactttactgagtcttttccagagttcccctgagagaactcacagtacttttgagggttttccccagtctcctctccagattcctatgacctcctccttctcctctactttattgagtattttacagagttctcctgagagtgctcaaagtgcttttgagggttttccccagtctcctctccagattcctgtgagctcctctttctcctacactttattgagtcttttccagagttcccctgagagaactcacagtacttttgagggttttccccagtctcctctccagattcctgtgagctcctcctcctcctcctccactttattgagtcttttccagagttcccctgagtgtactcaaagtacttttgagggttttccccagtctcctctccagattcctcagagtcctcctgaaggggagaatacccattctcctctccagattgttccaagtcttcctgagtgggaggactccctgtctcctcactactttcctcagagccctcctcagggggaggactccctatctcctcactactttcctcagagccctcctcagggggaggactccctgtctcctcactactttcctcagagccctcagggggaggactccctgtctcctcactactttcctcagagccctcctcagggggaggactccatgtctcctctctactttcctcagagtcctcttcagggggaggaattccagtcttctctccagagccctgtgagcatctgctcctcctccactccatccagtcttccccagagtttccctgagagttctcagagtcctcctgaggggcctgtccagtctcctctccatagtcctcagagccctcctgaggggatgcactcccaatctcctctccagagtcctgagagtgctcctgagggggaggattccctgtctcctctccaaattcctcagagtcctcttgagggagaggactccctgtcttctctccattttcctcagagtcctcctgagtgggaggactccctctctcctctccactttcctcagtttcctcctcagggggaggacttccagtcttctctccagagtcctgtgagtatctgctcctcctccacttctttgagtcttccccagagtttccctgagagtcctcagagtcctcctgaggggcctgctcagtctcctctccagagacctgtcagctccttcttctcctacactttagcgagtcttctccaaagttcccatgagagtcctcagagtcctcctgaggggcctgcccagtctcctctccagagtcctgtgagctccttcccctcctccacttcatcgagtctttcccagagttctcctgtgagctccttcccctcctccacttcatcgagtctttccaagagttcccctgagagtcctctccagagtcctgtgatctccttctcctcctccacttcattgagcccattcagtgaagagtccagcagcccagtagatgaatatacaagttcctcagacaccttgctagagagtgattccttgacagacagcgagtccttgatagagagcgagcccttgttcacttatacactggatgaaaaggtggacgagttggcgcggtttcttctcctcaaatatcaagtgaagcagcctatcacaaaggcagagatgctgacgaatgtcatcagcaggtacacgggctactttcctgtgatcttcaggaaagcccgtgagttcatagagatactttttggcatttccctgagagaagtggaccctgatgactcctatgtctttgtaaacacattagacctcacctctgaggggtgtctgagtgatgagcagggcatgtcccagaaccgcctcctgattcttattctgagtatcatcttcataaagggcacctatgcctctgaggaggtcatctgggatgtgctgagtggaataggggtgcgtgctgggagggagcactttgcctttggggagcccagggagctcctcactaaagtttgggtgcaggaacattacctagagtaccgggaggtgcccaactcttctcctcctcgttacgaattcctgtggggtccaagagctcattcagaagtcattaagaggaaagtagtagagtttttggccatgctaaagaataccgtccctattacctttccatcctcttacaaggatgctttgaaagatgtggaagagagagcccaggccataattgacaccacagatgattcgactgccacagaaagtgcaagctccagtgtcatgtcccccagcttctcttctgagtgaagtctagggcagattcttccctctgagtttgaagggggcagtcgagtttctacgtggtggagggcctggttgaggctggagagaacacagtgctatttgcatttctgttccatatgggtagttatggggtttacctgttttacttttgggtatttttcaaatgcttttcctattaataacaggtttaaatagcttcagaatcctagtttatgcacatgagtcgcacatgtattgctgtttttctggtttaagagtaacagtttgatattttgtaaaaacaaaaacacacccaaacacaccacattgggaaaaccttctgcctcattttgtgatgtgtcacaggttaatgtggtgttactgtaggaattttcttgaaactgtgaaggaactctgcagttaaatagtggaataaagtaaaggattgttaatgtttgcatttcctcaggtcctttagtctgttgttcttgaaaactaaagatacatacctggtttgcttggcttacgtaagaaagtcgaagaaagtaaactgtaataaataaaagtgtcagtg

SEQ ID NO: 138350 - DNA, 7806 bp, Homo sapiens
tctgatcttcaacaaagccatcaagaacatacactggggaaagggcagcctcttcagtaatggtgctggaatatgtggataaccagatgcagaagaatgaaactggactcctgaatatatacacattgcaaataatcatgtaaaaagatgattagcatcttatgtcactagggaattacaaagtaaaacaggataccactacacatcttttagcaggaagggaacacccatgactggtagtgcccctcccctgtccctgtgcctgctgccagctctggaggaccctatcagggtccccaggtttacaactttctgacttgcattttgggagtcagccggaggggaagttttctctgaggagggcagtttcagttaagcagagggaggaaccccaggactggccactcaacgagaagagaactctgtggaaggacagtgaccttccaacatggaggagaggcacaggctacagcccattcaatgaagagcctagcagccaataagatgaagatacaagtacctggcacagcttgccagagagcgagcccttgttcacttatacactggatgaaaaggtggacaagttggtgcagtttcttctcctcaaatatcaagcaaaagagcctctcacaagagcagagatgcagatgaatgtcatcaacacatacacgggctactttcctatgatcttcaggaaagcccgtgagttcatagagattctttttggcatttccctgacagaagtggaccccgaccatttctatgtctttgtaaacacattagacctcacctgtgaggggagtctgagtgatgagcagggcatgccccagaaccgcctcctgattcttattctgagtgtgatctgtgagattttggtcatgtgaaacaataccgtctctagttcctttccaatctcttccaaggatgctttgaaagatgtggaaactcatcccagctgagagggtccagaagatacacccttgaccaatcctttgtgaaacagatttgtgagggcagcacctgcatctttgaagagatctgcagggattggtcttctctgtatgccagatctaacagtgggaattgtagtcactcaactaaaaaatttaaatgcaatgggaatcactggctctgagctgacattgattccaggggacccaaaatgacattttggtcctccagttaaagtaggggcttttggaggtgagatagttaataaatatttagctcagcttggacttacagatgatccagtgggtccccggactcatcctgtggccattttcccagtgccagaatgtataattggcatagacatacttagcagcttgcagaacccccacattggctccctgactgggagggtgagggctattatgaagggaaaggctattatgaagggctattatgaagggaagggaaaggccaagtggaagatattagagctgcctctacctagaaaaataataaatcaaaaacaatatcgcatccctggagggattgtggagatgagtgccaccatcgaggaactgaaatacgcaggggtggtgattcccaccacatcccccttcaactctcccatttggcctgtgcagaagacagttggatcttggagaatgacagtggattatcgtaagcttacccaagtggtgactccaattgcagctgctgtaccagatgtggtttcattgtttgagcaaattaacacatctcctgatacctgggatgcagccattgatttggcaaatgcctttttctccattcctgtccataagtcccaccagaagcaaattgccttcagctggcaaggccagcaatatacctttaccgtcatacctcaggggtacatccactctcctgctttgtgtcataatcttattaggagagaccttgatcgatatccaatgctgcttgaggtatcagtggcggatagggatgctgtttaaaccttttggcaggcccccattggtgaatcacagcagggggctctaggattttggagcaaggcccttcaatcttctgcagataacaactctcctttcaaatcaccatgcaacctgaactgcctatcatgaactgggtgctttctgtcccatctagccataaaatgggtcatgcacagcagcattcaggaagtggcacaaatgcccagggtctccacccctgccaccctgccttctctcccccagcctgcactgatggccccgtggacagttccctatgatcagttgatggaggaagagaaagctagggcacgatatgcaggcaccatccaaaagtggacagctgcagcactacagcccctttctaggacatccctgaaggacagtggtgaagggacttctaagtggggccgttctgtggacaccactcagcctctttccccagccatccctgtcatcttccaataggcccatgaacaaagtggccatagtggcatggatggaggttatgcatgggctctgcaacatggacttgcactcaccaacactgacctagccatccagaaggccctgtatgctctgaatcagtgttcaatatatggtattgtttctcccatagtcaggattcgtgagtccaggaatcaaggggtggaaacaccactcaccatcacccctagggacccactagcaacacttttgcttcctattcccatgacattacattctggtggcctagaggtcttatttccagagggagaaacgctgccgccaggagacacaacaatgattccattaaactggaaaataaggttgtcacctggacactctgggctcgtcctacttttaagcaaacaggctaagaaaggagttacagtgtttgctggggtgattgacccgggctatcaagatgaaatcaatccactactctgcaagggaggtgagaaagagtatgcaaggaatacaggagatccattagggcatctatggagaggaggccccgccccacgctgcctctgctgtcagccctggtcaaccttggcagggttcgcggatgtgctttcccgacttgcattgtgggagtctgaaggacctgaaacattttgaactgagggacttcgcaccaaggacagaagaagccccggtctgccctgcgctgccataggacttgcaggccacagggagaggtcccacgtgcatcagaacagacgtgaggccaccccgactgcccccgtggtagagtgctgggaggtggctgccacctcgctacctcccgctgctctcagggatgtgacctgctgctcctgaacaacaggcctcatgcctctctttccaaaccttccacgcctcagctttgaggaagacttccagaacccgagtgtgacagaggacttggtagatgcacaggattccatagatgaggaggaggaggatgcctcctccacttcctcttcctctttccactttttattcccctcctcctcttccttgtcctcatcctcacccttgtcctcacccttaccctctactctcattctgggtgttccagaagatgaggatatgcctgctgctgggatgccacctcttccccagagtcctcctgagattcctccccagggtcctcccaagatctctccccagggtcctccgcagagtcctccccagagtcctctagactcctgctcatcccctcttttgtggacccgattggatgaggagtccagcagtgaagaggaggatacagctacttggcatgccttgccagaaagtgaatccttgcccaggtatgccctggatgaaaaggtggctgagttggtgcagtttcttctcctcaaatatcaaacaaaagagcctgtcacaaaggcagagatgctgacgactgtcatcaagaagtataaggactattttcccatgatcttcgggaaagcccatgagttcatagagctaatttttggcattgccctgactgatatggaccccgacaaccactcctatttctttgaagacacattagacctcacctatgagggaagcctgattgatgaccagggcatgcccaagaactgtctcctgattcttattctcagtatgatctagtctggccagccccagctgccgtcttagctggaggggctccctcccttcctcttgcaggtgctccagaaagcaggagttgaagacctgggtgtgaggacctgctgctcctgaacaatattcatcatgcctctctttctaaaccttccaggagtcaaggtttgagcaaggcttccagaaggcaattttcatactggagttggtagatgcagaggatcccccagatgaggaagaggaggaagcttcctccattttctcttcctctttccactttttattcccctcgtcctcctcctgtttttctttctcatcctcatcctcctctctgcttctgcgttctccaggggacaaggatatgcctactgctgggatgccgagtcttctccagagttcctctgagagtcctcagagttatcctgagggggaggactcccagtctcctctccagattccccagagttctcctgagagcgacgacaccctgtatcctctccagagtcctcagagtcgttctgagggggaggactcctcggatcctctccagagacctcctgaggggaaggactcccagtctcctctccagattccccagagttctcctgagggcgacgacacccagtctcctctccagaattctcagagttctcctgaggggaaggactccctgtctcctctagagatttctcagagccctcctgagggtgaggatgtccagtctcctctgcagaatcctgcgagttccttcttctcctctgctttattgagtattttccagagttcccctgagagtattcaaagtccttttgagggttttccccagtctgttctccagattcctgtgagcgccgcctcctcctccactttagtgagtattttccagagttcccctgagagtactcaaagtccttttgagggttttccccagtctccactccagattcctgtgagccgctccttctcctccactttattgagtattttccagagttcccctgagagaagtcagagaacttctgagggttttgcacagtctcctctccagattcctgtgagctcctcctcgtcctccactttactgagtcttttccagagttcccctgagagaactcagagtacttttgagggttttccccagtctccactccagattcctgtgagccgctccttctcctccactttattgagtattttccagagttcccctgagagaactcagagtacttttgagggttttgcccagtctcctctccagattcctgtgagctcctcctcctcctccactttattgagtcttttccagagttcccctgagagaactcagagtacttttgagggttttccccagtctcttctccagattcctatgacctcctccttctcctctactttattgagtattttccagagttctcctgagagtgctcaaagtacttttgagggttttccccagtctcctctccagattcctgggagcccctccttctcctccactttactgagtcttttccagagttcccctgagagaactcacagtacttttgagggttttccccagtctcctctccagattcctatgacctcctccttctcctctactttattgagtattttacagagttctcctgagagtgctcaaagtgcttttgagggttttccccagtctcctctccagattcctgtgagctcctctttctcctacactttattgagtcttttccagagttcccctgagagaactcagagtacttttgagggttttccccagtctcctctccagattcctgtgagctcctcctcctcctcctccactttattgagtcttttccagagttcccctgagtgtactcaaaagtacttttgagggttttccccagtctcctctccagattcctcagagtcctcctgaaggggagaatacccattctcctctccagattgttccaagtcttcctgagtgggaggactccctgtctcctcactactttcctcagagccctcctcagggggaggactccctatctcctcactactttcctcagagccctcctcagggggaggactccctgtctcctcactactttcctcagagccctcagggggaggactccctgtctcctcactactttcctcagagccctcctcagggggaggactccatgtctcctctctactttcctcagagtcctcttcagggggaggaattccagtcttctctccagagccctgtgagcatctgctcctcctccactccatccagtcttccccagagtttccctgagagttctcagagtcctcctgaggggcctgtccagtctcctctccatagtcctcagagccctcctgaggggatgcactcccaatctcctctccagagtcctgagagtgctcctgagggggaggattccctgtctcctctccaaattcctcagagtcctcttgagggagaggactccctgtcttctctccattttcctcagagtcctcctgagtgggaggactccctctctcctctccactttcctcagtttcctcctcagggggaggacttccagtcttctctccagagtcctgtgagtatctgctcctcctccacttctttgagtcttccccagagtttccctgagagtcctcagagtcctcctgaggggcctgctcagtctcctctccagagacctgtcagctccttcttctcctacactttagcgagtcttctccaaagttcccatgagagtcctcagagtcctcctgaggggcctgcccagtctcctctccagagtcctgtgagctccttcccctcctccacttcatcgagtctttcccagagttctcctgtgagctccttcccctcctccacttcatcgagtctttccaagagttcccctgagagtcctctccagagtcctgtgatctccttctcctcctccacttcattgagcccattcagtgaagagtccagcagcccagtagatgaatatacaagttcctcagacaccttgctagagagtgattccttgacagacagcgagtccttgatagagagcgagcccttgttcacttatacactggatgaaaaggtggacgagttggcgcggtttcttctcctcaaatatcaagtgaagcagcctatcacaaaggcagagatgctgacgaatgtcatcagcaggtacacgggctactttcctgtgatcttcaggaaagcccgtgagttcatagagatactttttggcatttccctgagagaagtggaccctgatgactcctatgtctttgtaaacacattagacctcacctctgaggggtgtctgagtgatgagcagggcatgtcccagaaccgcctcctgattcttattctgagtatcatcttcataaagggcacctatgcctctgaggaggtcatctgggatgtgctgagtggaataggggtgcgtgctgggagggagcactttgcctttggggagcccagggagctcctcactaaagtttgggtgcaggaacattacctagagtaccgggaggtgcccaactcttctcctcctcgttacgaattcctgtggggtccaagagctcattcagaagtcattaagaggaaagtagtagagtttttggccatgctaaagaataccgtccctattacctttccatcctcttacaaggatgctttgaaagatgtggaagagagagcccaggccataattgacaccacagatgattcgactgccacagaaagtgcaagctccagtgtcatgtcccccagcttctcttctgagtgaag

SEQ ID NO: 138351 - DNA, 372 bp, Homo sapiens
cctaatttaattgtttggggtacagcctgaatttctggattttaaaaagttccccagtaattctaatgtacagtgaagtttgagagttagtactctgagaacctaacataccagttcaggaagatatcaagggtaagcgaatgagaaaggacaggggcagctggatgctctctgctcaagcctttcctgggacccccttggcctgattatctgtctctctagggcctccaagtctggggtccaggttgagcatccctacattaccggtgcaatcaaagatgacacgagagctatagtaaaaactagggacttggcaaacaggttaaaatgagaagctggacctactttaaagccagatgagaagtgactttt

SEQ ID NO: 138352 - DNA, 1076 bp, Homo sapiens
atggtgcacatgaatgtcctggctgatgctctcaagagcatcgacaatgctgaaaagagaggccatgaactcagaacaaggaaagaatgtctgctgttaccacttatatccaacactgaacttggatgtttagcggcatccccggcctctacccaccagatgcctgaagcacccccacccccaggtgtgacaaccaaaagtctccagacattgccaaacgtcccctgggagctatctgtatagcctgcaatctggtagatggaccacagggaaaccactgcagcaaactaaaagtgtctatctcagatccttccaccaccatcatttccaaaatcaccgtcactatctccaccaccatcacctttaccaccatcaccactatcatcctcatccttcccatcaccatctccactgctatctctcaacaccatcatcatcaccaccaccaccatcatcaccatgagcaccacctctgtcgtcatcaaaaaagcacacaggtagaatacagtgtctttgctgaaagggaaaacgacctgggattgaacggcaccggggatgaagcattgcacgataacggcacaaccgagcgcgtcagcggcccgcccgccggctatttataccgcgcggattatgcaatcgggctccagccattcatgccccgactgggccgccgcacgcccggggcgggggggcctcattcccgggcgccggagctggcctacctgcagaaattaatcacctcacctgccaccttgccatttgtgtaccttgaaactggagggtggagcccaagagatgcccacagggtggataattttgacatggggccaagagagaacatgggctctgtttgggagaaatcttttcttttcaccaggaatccttctaaaagcagttatattgctgataaaaaccttatttatttgtatgcttctgaatgcattggaaggcaatcacaaaaagcacgggcctccaagtctggggtccaggctgagcatccctacattaccggtgcaatcaaagatgacacgagagctatagtaaaaactagggacttggcaaacaggttaaaatga

SEQ ID NO: 138353 - DNA, 381 bp, Homo sapiens
gtctgaataagatcccagagagaaatttggaaacagctttatctcaatcagtacagtctattcctttgtatctcatgccacggccaaattcagtagcagccaccagctctgcccacttggaagaccttgcttacctggatgagcagaaatgtaactcatatgtacttctttcaagatcctatcacgcctcttctgcccttcatcactgtgatcgagctcatctcaaggtgcctgtatctcaaaactcttatcagttcttacgtacgctcacctctactttgccttagagaaggaagtacttaccttcctttccagagcaattgtctcctcctctacactcttaacccacggtgttgctcattctctcacgttatttcattc

SEQ ID NO: 138354 - DNA, 1356 bp, Homo sapiens
tcagggcaaggactgattcttagagcttcttactctgcttttctgtgatgccatttgatagcaggaagtagctaaccactcagggggtttcttgggcatctgagagcccttgatggaaaagcagacattcagacagatgcactgagctctagctgagtagtctcttaaatcctgctgtgtgcgagcaccacccatgctctgtcttggcattcgtagagaagttctcaaaggtgtatgtctctgctcatccaggtaagcaaggtcttccaagtgggcagagctggtggctgctactgaatttggccgtggcatgagatacaaaggaatagactgtactgattgagataacactgtttccaaatttctctctgggatcttattcagactataggtggaagcagtcatgttttcatctactcgatacaaacaggagtccatgctggatttttgagactgccaaggttttatgtttcctccagatcctaattctttactgctttccccagcatattttgtgcgttccacattttcagaatagcttgttaatgtagctaagatgactgagctcctgggaagaggggcagcagccatcactgcagctccagtctgctgtttttcccctactggtgccagggagactgggcggtttagacccaggaagaattccccacagtgcagcacagcaactgtggcagattgtggccagactgctggctggggctcccctgtgggaatttcagtaactccagccagaggtttacgaacagaactctgatctccccagaaggagaggcagccgcagttgcagccgcagtctcggttgatcagcggacttagtctttcccgctgctggctctgaggaatccgggtagtccagacaagtgggattccccccagtgcagtgcaccccctcttatacaggagggttcccgctgacatcgggtcagtgcccctctgggatggagctcctagaggaagaagcaggcagccatctttgctgttctgcagcctccactggtgacacctccagttgtaggagggacccaggtgaacaggatgggatggacccccagcaaactgcagcagccctatggaaggagacagcaatgtacactgcagctgtgtctgctgttgctcctgcttcggactgctactgttgccatacactgctgctgtgctcctccgggctgctctgcctgtggagcagccactttgctgtactctgctcctctgggctcctctgcctatgggatagccctgctctctcctttccatcatgtgaggatgatgctgtctacgaaacaggaagttggccttcaccagacactgaatctgccttgatccaggacttcccat

SEQ ID NO: 138355 - DNA, 726 bp, Homo sapiens
atgttgaatgtgcaggcactggtggtgatggttatgtgcttcatgtgggctagtctttgggccccaggtgggcacccaagtgctggcaatatctctagttgggtgagtggactggtttcatttcctgagtggagtagttgggagctggtggtttctgtagtgggttgggcagggaaattgtggctgcatgaatccctcttgacactgaacctgtcttgtggcttgcttgtagtgctggtggcactggtgtttgatgagtggcacccatggagtggccatgttgctgaggcctgcagcacaggttattggagtacaggtggtatttggttccatgagattgcagctcctcaccagcaatggaacaaagctggatggagaatgactgatgagctgatagaagtaggcttcagaagattggtaataacaaacttctccgagctaaaggaggatgttcgaacccatcttaaggaagctaaaaaccttgaaaaaagattagatgaatggctaactagaataaacagtatagagaagaccttaaatgatctgatggagctgaaaaccatggcacgagaactacgtgacgcatgcacaagcttcagtagccaattcgatcaagtggaagaaagggtatcagtgattgaagatcaaatgaatgaaatgaagcgagaagagaagtttagagaaaaaagagtaaaaagaaacgaacaaagcctccaagaaatatga

SEQ ID NO: 138356 - DNA, 430 bp, Homo sapiens; identical to SEQ ID NO: 128706
  misc_feature (1)...(430): n = a,t,c or g

SEQ ID NO: 138357 - DNA, 1982 bp, Homo sapiens
ttacataggagatctggcaagatggctgaataggaacagctctggtctgcagctcctagtgagaccaatgcagaaggcgggtgatttctgcgtttccaactgagtggtgcctggaaccccagcaagacagaaccgttcactttcctggaaagggggcctgaagccagggagccaagtggtctggctcggcggttcccacccccatggagcccagcaagctatgaaccactggaatgaaattctcgctgccagcacagcagtctgaagacaacctgagatgctcaagcttggtgggtggaggggtggccgccattactgaggcaggagtaggaggttttcccctgacattgctaaggaggctgggaagttcgcactgggcagaactcaccacagcgtggcaaagcagctgcggccagactgcctctctagattcttcctcactgggcagggcatctctgaaagaaaggcaatagccccattcaggatcttgaagataaaactcccatctccctgggacagagcacctgggggaaggggtggttgtgggcacagcttcagcggacataaactttcctgcctgccagctatgagagctcctgctggcatcaggctggtgccccctctgggacgaagcttccagaggaaggagcaggcagcaatatttgctgttctgcagcattgctgttctacaatatttgctgttctgcagcctccgctggtgatacccaggcaaacagggtctggagtggacctccagcaaactccaacagacctgcagctgagggacctgactgttaaaaggaaaactaacaaacagaaaggaatagcatcaacatcaacagaaatggacatcaacaccaaaaccccatctgtaggtcaccatcatcaaagaccaaaggtagtataaaaccacaaagatcggggagaaaccagagcagaaaagctgaaaattctaaaaaccagagcacctcttctcctccaaaggattgcagctcctcactagcaatgaaacaaagctggatggagaatgactttgacgagttgacaggagcaggttttagaaggttggtaattacagacttctcagagctaaaggaggatgttcaaacccatcacaaggaagctaaaaaccttgaaaaaaaaattagacaaatggctaactagaataaacagcgtagagaagtccttaaaagacctgatggagctgaaaaccatggcacgagaactatgtgacgcatgtacaagcttcagtagccgatttgatcaagtggaagaaagggtatcagtgattgaagatcaaatgaatgaaatgaagcgaaaagagaagtttagagaaaaaagagtaaaaagaaacgaacaaagcctccaagtaatatgggactatgtgaaaagaccaaaatctacgtctgattggtatacctgaaagtgacgaggagaatggaaccaagttggaaaacactctgcaggatattatccaggagaacttccccaacatagcaaggcaggccaaccgttcagattcaggaaatacagagaacgccacaaagatactcctcgagaagagcaactccaagacacataattgtcagattcaccaaagttgaaatgaaggaaaaaagtgttaagggcagccagacagaaaggtcgagttacccacaaagggaagcccatcagactaacagctgatctctcagcagaaaccgtacaagccagaagagagtgggggccaatattcaacattcttaaaggaaagaattttcaacccagaatttcatatccagccaaactaagcttcataagtgaaggagaaataaaatactttacagacaagcaaatgctgaaagattttgtcacgaccaggcctgccttacaagagctcctgaaggaagcactaaacatggaaaggaacaactggtaccagccactgcaaaagcatgccaaattgtaaagaccatcgaggctaggaagaaagtgcatcaact

SEQ ID NO: 138358 - DNA, 2397 bp, Homo sapiens
atgacgaaaattattgcagtaaccgcatgtccttcaggtgttgcccatacctatatggcagcagaggcgctggaaagtgccgcgaaagcgaaaggctgggaagtgaaagtagaaacccaggggtcaattggtctggaaaatgaactgactgcggaagatgtggcgagcgctgatatggtgattctgaccaaagatatcggcatcaagtttgaagagcgttttgctggcaagaccatcgtgcgcgtcaacatcagcgatgcagagttcctcatgacgaatcgtatctctcgcctcaaaactgcactgtttgccaatacccgtgaaatctcgctggagcgggcgctgctttataccgccagccatcggcaaaccgaaggcgaaccggtgatattgcgccgggcgaaagcaacagcgtatatccttgaacatgttgaaatttcgattcgtgatgaagaactgattgccggtaaccgcaccgtaaaaccgcgcgccgggattatgtcgccggaaatggacccttactggctgctgaaagagctggatcaattcccgacgcgtccgcaggaccgctttgctatcagcgaagaagataaacgtatctaccgtgaagagttgttcccgtactgggaaaaacgttcgatgaaagatttcatcaacgggcagatgacagatgaagtaaaagccgcgaccaacacgcagattttcagcatcaaccagacggataaaggccaggggcacattattattgattacccacgcctgttgaatcacgggctggcctcgcagaaacacattttgcgttacgccgaactggcggaaacgatggcggcaaactgcacagatgcccagcgtcgcgaagagctgctgactattgcagagatctcccgccataacgcgcaacataagccgcagacgttctggcaggcgtgccagttattctgcggggtaaatgccatcagggcggccgccagaaacagtgacctgaacattgttattctccttcacgctcgaagccgtcagcggcctgttaacgcaatattacggggagacgattcgaaaatacggcagaacggtatgcgctggtcgcgggacgtgcatgcgatcaaccttttcgccgaaaaatggggaaatctccccgaacatgcggggcacccaacgggtgtataccgccacaattggttaccatgtccgggaatatccccgaagtcgtcccgcaaatatcccgccattttctccgtataccgacatggcagcattcaactggcgggtaagcgtattgagggaccgggagcagagcgtggcgtagtttttcagaatgaagggctactaccgtggcgcaatgtacaggacaacgtggcgttcggcctgcaattggcaggtataaggaggaaaaattgccaggcggactggaaatcgcgcaccaatgctgaaaaagtgggtggaaggcgcagaaaacgctacatctggcagctttccggtggtcaacgtcagcgggtggggattgctcgtgcgctggcggcgaatccccagctgttattactcgacgaaccgtttggtgcgctggacgccttcacccgcgaccagatgcaaaccctgctgctgaaactctggcaggagacgggcaagcaggtgctgttgattacccacgatatagaagaagcggtgtttatggcgactgaactggttctgctttcatccggccctggccgtgtgctggagcggctgccgctcaactttgctcgccgctttgttgcgggagagtcgagccgcagcatcaagtccgatccacaattcatcgccatgcgcgaatatgttttaagccgcgtactggaaaaactactcaccattgccggaccgcaaggctttatggacgccacgctgtggcagcatctggcagccagtctgacgcgcattatgctggcgctatttgcagcggtgttgttcggtattccggtcgggatcgcgatgggacttagccctacggtacgcggcattctggatccgataatcgagctttatcgtccggtgccgccgctggcttatttgccgctgatggtgatctggtttggtattggtgaaacctcgaagatcttactgatctatttagcgatttttgcaccggtggcgatgtcggcgctggcgggggtgaaaagcgtgcagcaggttcgcattcgtgccgaccagtcgctgggtgccagccgtgcgcaggtgctgtggtttgtcattttgcccggtgcgctgccggaaatcctcaccggattacgtataggtctgggggtgggctggtctacgctggtggcggcggagctgattgccgcgacgcgcggttcaggactcatggttccagcagcgggtgcattctccgcactgacgtggtgctggcggggatcgcggtga

SEQ ID NO: 138359 - DNA, 2413 bp, Homo sapiens
atggaaaccatttacgtggtcaccggcaaaacaatctaccgcgatatgacgcgcttctggggtaagctcttcggtatcaattttgctcttggcgtggctaccggcctgaccatggagtttcagtttggtactaactggtcattctattccaactatgtgggcgatatttttggcgcaccgctggcgatggaagcattaatggccttcttcctcgaatccacctttgtcgggctgttcttcttcggctggcaacggctgaataaataccagcacctgctggtgacgtggctggtggcgttcggttcaaatctctctgcgttgtggatattgaatgccaacggttggatgcaatacccgaccggtgcgcattttgatatcgacaccctgcgtatggagatgaccagcttcagcgagctggtctttaatccggtcagccaggtgaaatttgtgcacaccgtaatggcgggctacgtgaccggggccatgtttattatggcgatcagcgcctggtatttactgcgcggacgggagcgcaatgtcgcattacgctcgtttgccatcggttccgtcttcggtactctggcgattatcggtaccctgcaactcggagacagttctgcgtatgaagtcgcgcaagtacaaccggtaaaactggcggcgatggaaggggagtggcaaacggaacctgcacctgcaccgttccatgtggttgcctggccggaacaggatcaagagcgtaacgcctttgccctcaaaattcccgcgctgctagggatcctcgccactcactcattagataaacccgctggcaaacgcatcgccgtaccgtttatctccaccacccactacagcctgctggcggcactgaaacactggggcattaaacccgggcaagtggagattgtgaacctgcagccgcccgcgattatcgctgcctggcagcggggagatattgatggtgcttatgtctgggcaccggcggttaacgccctggaaaaagacggcaaggtgttgaccgattctgaacaggtcgggcagtggggcgcgccaacgctggacgtctgggtggtcgtgaaagcgttcgctaaaagcgccatcgatgctcagcaaccgtacattgctaacccagacgtgtggctgaaacagccggaaaacatcagcaaactggcgcgtttaagcggcgtgcctgaaggtgacgttccggggctggtgaaggggaatacctatctgacgccgcagcaacaaacggcagaactgaccggaccggtgaacaaagcgatcatcgacaccgcgcagtttttgaaagagcagggcaaggaggcgcagatgctgcaaatctctcatctttacgccgattatggcggcaaaccggcactggaagatatcaacctgacgctggaaagcggcgagctactggtggtgctggggccgtccggctgcggtaaaaccaccctgctgaatctgattgccggttttgtgccttatcagcatggcagcattcaactggcgggtaagcgtattgcagggaccgggagccagcagcgtggcgtagtttttcagaatgaagggctactaccgtggcgcaatgtacaggacaacgtggcgttcggcctgcaattggcaggtatagagcaaaatgcagcgcactggaacatcgcgcaccagatgctgaaaaaagtggggctggaaggcgcagataaacggtacatctggcagctttccggtggtcaacgtcagcgggtggggattgctcgtgcgctggcggcgaatccccagcatgttattactcgacgaaccgtttggtgcgctggacgccttcacccgcgaccagatgcaaaccctgctgctgaaactctggcaggagacgggcaagcaggtgctgttgattacccacgatatagaagaagcggtgtttatggcgactgaactggttctgctttcatccgccccccggccgtgtgctggagcggctgccgctcaactttgctcgccgcttcgtagcgggagagtcgagccgcagcatcaagtccgatccacaattcatcgccatgcgcgaatatgtaaaaagccgcgtattagcgaggcatatccccaaggggccccccaccaccatttgggaaacctggacagggcccaatttcctaaccaagagcaacagacttaccgggaaacctggcctttccaaaaagggtttccaaaagcaacggaggtttggagggcctgcaaagagaggaccccctggaaaaacagagtggcaagccttaaattttagaagaagggcacttttaacacccaaagttgacgtgggtggggcaattcgcagcggaatgcaggcttgttggatcagaccggaaaatggcgatctgatgcaaacctgggacagccgtttactgccgcatctggaaatttcccg

SEQ ID NO: 138360 - DNA, 1301 bp, Homo sapiens
atgggccccacctgctattcacatccgttgtatgccagaggcctacaacttccccaggaagccgttgtccttaataccttctgccatccaaagcaacgagctgatcatcatgaatggcaaccgtgctctcaacatccaactgctgaagagatatcaatgtacccttgacatccgctataagcaaacgtcaatgctcaactgctatgaagggacagtcataacaccgtcccatatccagtatccatgtctctctgatagttatggcctctatgacattggcataagaaatacggactttctcaaaggagagttatcaatgaatattcgtccattgcatgatcgcgtgatcgtcaagcgtaaagaagttgaaactaaatctgctggcggcatcgttctgaccggctctgcagcggctaaatccacccgcggcgaagtgctggctgtcggcaatggccgtatccttgaaaatggcgaagtgaagccgctggatgtgaaagttggcgacatcgttattttcaacgatggctaccggggtgaaatctgagaagatcgactatgaagaagtgttgatcatgtccgaaagcgacattctggcaattgttgaagcgtaatccgcgcacgcctgacatacgattaaggataaaggtaaggcttaaaacatattcgcgcatggcgatgaattgtggatcggacttgatctgcggctcgactctcccgcaacaaagcggcgagcaaagttgagcggcaccgctccagcacacggccagggccggatgaaagcagaaccagttcagtcccataaacaccgcttcttctatatcgtgggtaatcaacagcacctgcttcccgtctcctgccagagtttcagcagcagggtttgcatctggtcgcggggaaggcgtccagcgcaccaaacggttcgtcgagtaataacagccgctgacgttgaccaccggaagctgccagatgtagcgtttttctgcgccttccagccccacttttttcacatctggtgcgcgatttccagtcgctgcattttctctatacctgccaatgcaggccgaacgccacgttgtcctgtacattgcgccacggtagtagccctcattctgaaaaactacgccacgctctgctcccggtccctcaatacgccgccagttgaatgctgccatgctgataaggcacaaaaccggcaatcgattcagcagggtggttttaccgcagccggacggccccagcaccaccagagctcgccgctttccagcgtcaggttgatatcttccagtgccggtttgcgccat

SEQ ID NO: 138361 - DNA, 804 bp, Homo sapiens
atgaccgataaaatacaggatgcctgcggaaatcaccccggcgacaatatcgtcgatcatgatccccatgccgccatgcacattgcgatcaaaccagcggatcggccacggcttccacatatccagaatacggaaaatcacaaacccggcggcaacccactgccagtcattggtcggcagcgccatgagcgtgatccacataccaataaattcgtcccagacaatgctgccatgatcgtgcacacccatgtctttcgccgtttgatgacaaagatagacgccgatacagatccccagcatcaccaccagcgagtagagctgccagggcaaaaagcgagcccatcgtcccaggaacgatcgggcttaatccacttccgaatccgacagcaagtagatgccacggattactcatcttcaggcgacttttcgcgacatctttatggcgtggcaaaatggtcatatcctttccagtctaatgtaacaggttcgccgtcacgaataaaacaaagcccttcgatatcggcggtcatttgcccgatacaggtaaacggtacgcccaggtgtccgagagccacatccagcgcgccacggttcagttccggcacaggggaacacaactccgaatcttcaacggcagaaaacggccacggcaggccggtgccggtccaccatggcggacctctaaatcgacccggaggcttgaagctggccatggcggcgtttcaaaggcggcctctgtgttgcgtgttgcgtggttttgaaacggttggaaaaaattccggagggttatggatgttttggtaa

SEQ ID NO: 138362 - DNA, 3222 bp, Homo sapiens
tcagcacgggtataatactgtatgtgtcagtccgagcggccgataaatcgactcgtcaacatagcggtcaagcggctgaccggtaaccgactcgacgataaatccaagcagcatataatcgacatcgctgtagatatgtttgctgccgggctgatattccagcggcgtgcgcttgatcatctccagcgtctggcctttatcctgggaatataacgcgcccgcgaccgctttattcgggtattgcggatctgccgggaaaccgccgctgtgatgcagcaggtcagaaatccgcagggtgtttttgcctttaatggtgtcatttggactatcggcaaaccccggaatatatttcgcaatccgatcgtcaggatgcagtttgccttcgctcatcagcttttgcagggcgaagttcgtggcgtacattttggtgtttgaggccaggtcatacagcgtcccggtggtggctttgacaggctgttccatcaacacgctgccatcgtactttttcgccgctccccaggctttgcgatacacaatctgattatctttaatgatcagcaggtttacgctgggataaccgacatcaacttgctggctaatccagcgatccatctggttaagccgttcgacgttaaaccctgctttctctggcgagctttcagactggaactgctcctgaatttcagcaacttctgcttctgcctcggagatgatttcgtgtttcttctccgggatgaccatgtcatcgataccaacagatgcaccagaacgcgctgcataggcgaagccggtgtacatgatctggtccgcaaaaataacggtcggtttcagaccgagaatgcggtagcaggtgttcagcattttggagattgcttttttacccagcgcctggttgacgatggagtaaggcagacctttcggtacaatcatccacagaatggcacggccaacagtcgtgtctttcaggctggttttcgctactaattcaccgttagcatctttttcatactcggtgatacgcactttaacgcgcgcatgcagagaagccagaccagagcgatacagacgttctgcttctttcgggccagtcagcaccatgccttcgcctttggcgttaacacagtcacgggtcatgtagtacagacccagtacaacgtcctgagacggaacgatgattggttcgccgttcgccggggacaggatgttgttggtagacatcatcagcgcacgcgcttccagctgggcttccagcgtcagcggtacgtgaacagccatctggtcaccatcgaagtcggcgttatatgccgcacaaaccagcgggtgcagctggatagctttaccttcgatcagtaccggttcaaatgcctggatacccagacggtgcagagtcggtgcacggttcagcagtaccgggtgttcgcggataacttcgtccaggatatcccaaacgacagcttcttcgcgctcaaccattttcttcgcagctttaatggtggtagcaagaccacgcagttccagcttgccgtagatgaacggtttgaacagctccagtgccattttcttcggcagaccgcactgatgcagacgcaggtatggacctacggtgattacagaacgaccggagtagtcaacacgcttaccgagcaggttctgacggaaacgaccctgtttacctttgatcatgtcggccaaagatttcagaggacgcgcttcctgcagcatacgtttttcgttacgtacgatgatgtccggcgcagccagatccagcagacgtttcagacggttgttacggttaatgacgcgacgatacagatcgttccagtcggtaccggctaagattaactggcgcagaaagatatagctggcgcagcaaacgtgctggcagaaaatacgacctgtccgatttagaacaaaaacagcaagcgcgttactggcaggcgagaaatcgatgccagccagggcgtccttccattgatttactgcgcgcgttaattgctcaggaaccgctggcaggcgctctcctccatgactcaggaacaggcgaatacgctggtgatcaacgccgacgaaaatattctgcaaggctggctggatctgcagcgcgtctggtttgataaccgtaacgatcccgacatgatgaaagccgggatcgccgactggcagaaacgttatccgaacaatccgggcgcgaaaatgctgccaacgcagttggttaacgtaaaagcgtttaaaccagcctcgaccaacaaaatcgccctgctgttgccactgaatggccaggcagcggtatttggtcgcactattcagcaaggctttgaagcggcgaaaaatatcggcactcagccagtggcagctcaggtagctgccgcacctgccgcagacgtagctgaacaacctcagccgcaaaccgtggatggcgttgccagcccggcacaagcctcggttagcgatctgaccggtgaacagcctgcagcccagccggtgcagactcttttcatccggaccgttgccacgcagacccgcctgcaccagcgacccttcaaagatgacaatcgagaagcccatgatgaacgccgtcagcagcgagaacagcggcaacatttcatagctctgccacaacggatgcaccttgtagcccgccgagatcatcagcgaccccattgaagactggtgcatggtcggcagcagcgcaccgagcgcgatgatgaagaacatcaccttgtttagtcgctgtagcgacaccttccaccccagacgttcaaacagtgccggagcaaactccagtgccatcacgccgatatagatggtcatacagaccgccgtctcgaacagtaccgagttcacgttgaagtgacccggaatgtagaagtacggcaggttccagtagcgacccacgtcgatagtgatcgacaagccacccagtgagtaaccaaacagactcgccaacagcgccggacgcaccagcggatggtattgcccacggttaaagacgtataccgcccacgccagcgcccagccgccacaggcaaagccggtgccaatcagcaggtcaaacgcgatccacacgccccacgggaagccgccgttcaggtcagagacagagcccagaccgaacaccagacgcttcacaatcaggagcatacagatgacgattaacggtccaaaaatcatgaccggtttactgatgattttgccgcccagcggttgtggatcatgactcat

SEQ ID NO: 138363 - DNA, 937 bp, Homo sapiens
  misc_feature (1)...(937): n = a,t,c or g
ccanggtaatgttatttaccgttctgtaattgtcgcgggtcatcaggccggtcgccctgcgagcccggaggatatcgatgctgtttattaactgagagcgggtacaggcgctgaatcccggctggtcggtacgcaccagcgcgtatttttccacgagaaagttcaccgcatcacacagtgaaatgcctgcctcaatatgctgctcaatcacacgttcatcggcaaaagaaccgtacatcaaatggtgcttcgacggctggatgtcgcgtcgcattactatgacacttaattcattcgtttgatgaattaatttcgttatgttttcatctggcatgaacattcttaatacgttatcgaccagagcgggggcttgtttataaagatcataacccgccatattcattaaccagttttgaacaattccgctgaaggcaccatcaataataatcatcacaacatctaaatcgaggttatttgctacacaaccttgttgctgacacgcctgcaatacttcgcggagagtctgcggattaaagcccatcttttcgcgtatcactccctcggccagcatctcatcattaaattcacatttgtgatataagattttcagcaacgcctgctggcggggaattttggcaatatattgcaagccgacaatcaatttttcacgcaattgttgaaacgggtcatgctctaatccagccgtcaagtgttcctggattaactcccgcaatgaaggctgttgcaaccacatctcattaaacagttgagtcttgttttcgaagtgccagtagatagcgccacgcgtaacgttagcggcgtcggcaatgtcgttgagcgtcgtcttgcttacgccatgctgcgcaaactgggcgatggcagtttcaatcagttcttgccgggtcttcagagcttcggctttggttctttttgccat

SEQ ID NO: 138364 - DNA, 2556 bp, Homo sapiens
atgccgaacgttgatgttgtcggagagatggttaacaccatgtcggcgtcacgcagctatcaggccaatgttgaagtgctcaacacggagaaagctatgtccattgcggtaaccaccaccgatccgacaaataccggcgtcagtaccaccagcagtagttcgctcacgggcgagcaacgccgcagatttacaaagcagttttctgactttgctggtggcgcagctgaaaaaccaagacccgaccaatccaatggaaaacaacgagctgacgtcgcaattggcacaaatcagcacgacgctgcgcgcatattaaggaaaggaacaatgacaacattacttaacccctattttggtgagtttggcggcatgtacgtgccacaaatcctgatgcctgctctgcgccagctggaagaagcttttgtcagtgcgcaaaaagatcctgaatttcaggctcagttcaacgacctgctgaaaaactatgccgggcgtccaaccgcgctgaccaaatgccagaacattacagccgggacgaacaccacgctgtatctcaagcgtgaagatttgctgcacggcggcgcgcataaaactaaccaggtgctggggcaggcgttgctggcgaagcggatgggtaaaaccgaaatcatcgccgaaaccggtgccggcgatggttccgtcgcgcatcacgctaattcgatcggcaatctggcgaatttccggcagcttatgcgagataaaaacaatacccacgccagtagcaagcagctcttgcaagcgactaaacaagcgttcggtttccgcaggggtgagtttgaacacaagtattcctggtttgagggcgctctaagagagtctgcgtaccgtgatgacagagtcttgatcctgcacattcagggttccgataccggtggcattgccaccgataatcgtattttcagcccgtccccgttccggattgacccacatttaaaggccttgcattatttccgctatcataccaatgccagctttctaaagcaacaggcaatggttgatgttggcgtggtgcagtctggttataacgatccagctgcagctctgattatcaccgatcttctcgatcgcatcgccgcacctacccgcgaagagatcgacgacgcgctttctggtttgttcagccgcgatgctggctggcagcaatactatcaggtcattgaactggcggttgcacgtaaaaataatccgcaggccaccattgatatcgctccgactttccgtgacgacctagaagtcattggtaagcattatcctaaaactgatgccgcgaaaatggtgcaggcgaaaccctgctatgttgaagaccgcgtaacggctgacgcctgcgtcattaaaatgttacgtagcccacacgctcacgcactgattactcatctggatgtcagcaaagctgaagccttaccgggcgtcgttcacgttattactcacctgaattgcccggatatctactataccccgggtggtcagagcgcaccggaaccggcaccgcttgaccgccgtatgttcggcaagaaaatgcgtcacgtcggcgatcgtgttgctgcggtcgtcgcagaaagtgaagaaattgcggctccgagcactggagcctcatcgacgatggatatgaagtgctttagcccgggatggcgatcgacggagccactggcgggaagagcgcccgtcgtgcacgatgaaccggtggtggttgttgctgggcgccagataccggatactgcggctgattacggcttaatgcgcgtggtcctgaagccacactggtttcggcttcggcttttcaatgaccaccggtgcttcttttggcggttcggggatcggctcaagttccggttctggctctaccaccggctccggtggcggctgaacggcttgtggcggttcgagatcagcaagcgtaaccatcgtgacagaaatcggctgcgcaagcgcagccatttaccgccgcgcatgaaaaactggcgcgataaatacgagcatcatctgctgttaaaaatggcgggcgatggcgtgggcgaagccaaatcgtggctggtggattatttcaaacaggccgaaggcgatttctttgtctgtacgccggaggaaggcagcaaagcgtttttacaccgtttcgccgctgcgggcgcagcaattcgttatcaggcggtgcattccgatgaagtcgaagacattctggcgttggatatcgctctgcggcgtaacgacaccgagtggtatgagcatttaccgccggagatcgacagccagctggtgcacaagctctattacggccattttatgtgctatgtcttccatcaggattacatagtgaaaaaaggcgtggatgtgcatgcgttaaaagaacagatgctggaactgctacagcagcgcggcgcgcagtaccctgccgagcataacgtcggtcatttgtataaagcaccggagacgttgcagaagttctatcgcgagaacgatccgaccaacagcatgaatccggggatcggtaaaaccagtaaacggaaaaactggcaggaagtggagtaa

SEQ ID NO: 138365 - DNA, 422 bp, Homo sapiens
ccgttatagcaggtcaacgtttcgttacggactaaatccatttgccgtaataatctgccagcgcccaggtttccgctttatcaatccactcagcggcgtttcaaaacgaatatctttcgccatgcccaaactgacggctggtttagtgctttcacaaactcatcgcggcaatccgggtagccggagaaatccgtttcgcagacgccagtaattacggcttctgcttttacctgatacgcagatattgccgccagcgtcaggaacaaaatattacgccctgggacaaacgtattcggggataccatcggcttcagggttcagtaagtcagaggcaccggctgagacacgggtgtcacatcacacacaagggcacccactacatccgtcatcagcaccaactggcaaccgacggaaaccaataa

SEQ ID NO: 138366 - DNA, 912 bp, Homo sapiens
atgttactgaaaagggcttcagagagcccacggatggatgacctcagccccccagataaaggagaatgtgagctccaactgctccagttggggaagctgaaatgtgcaatgataggggtgcaagaggccaggcccaaccactcaagcacatttcaaccccctatttctgtcacatctgccaaggcaagccatgcagccaaacccaaagtcaaggatttggggaaggatatttcccttgtggagttgagtcttgttttcgaagtgccagtagatagcgccacgcgtaacgttagcggcgtcggcaatgtcgttgagcgtcgtcttgcttacgccatgctgcgcaaactgggcgatggcagtttcaatcagttcttgccgggtcttcagagcttcggcttggttctttttgccatgattaattattcaggaaataaatatattcgacacagaggcttaaatatgttctacggcggtaagatgaaaggtatgcctccgaaactgatgagcgatgatggcaaacatatcgttattcgtccgctggcctactgccgcgagaaagatattcagcgatttgccgatgcaaaagcgttcccgattattccgtgcaacctgtgcggttcacagcctaacctgcaacgtcaggtgattgctgacatgttgcgtgactgggataaacgttatccagggcgtatcgagacgatgttcagcgcgatgcagaatgtggtgccgtcgcatctgtgcgataccaacctgttcgatttcaaaggcatcacccacggttctgaagtggttaacgggggtgatctggcgtttgatcgcgaagagatcccactacaaccggcgtgctggcagccagaagaagatgaaaatcagttggatgagttacggctgaatgtggttgaagtgaaataa

SEQ ID NO: 138367 - DNA, 1031 bp, Homo sapiens
atggctcaggagatagaaggagatcggttgtttcgggcccgtttgacccgtcgggttcaagggaaaggcccttgtggcccgttgaaggctcctctggggatggtccctgaatgccactcggtcaaaccgtctcgagatactttcgactctacaaaatcatttaaggcattactactgagtttcttgaagatacccgccatagatgtccataagcccattgaccacccaatcaactttacgtttccagaccctgggcatcgagccccggcacgtcaccgtcactcgaccgctgccgctgtcaccatgtcaccatcggggccgctgccgctgcaccatcgccttgttcccccatcccccgccatggctgaggacctctccgggccacatcctactgccccgtctcctggaaacagaagcaaaactctgtctcaaacaaacaaacaaacgaacaaacaaaaacagcaaaagcggagggtgctagaagtagggggcctagaaacaaaattccggggctccctccggggccgcggtctgggctgcgcatttggctgccgcctcctcgcgaaggcagtggcttccaaactcctgcgcgcggtcatcctcaacccccctgctcgggcaagggcaccgagtgccagagcatcgcccagaacttggcttccaggatttctccagtgggcacttcttgtgggagaacatcaagacaaactattcgcgttcggaaataagcctggtcgaagggggtacagcagttcatctgagatatgggtgagcgtggaagcggtatccctcgtagttctttgttttttagaacctagcggccgaacgcggatcgaccacgtattacttaccaaggagtacacctcgtgcgtcaacccaagtagtgcagtcttccgcgcctgcacgtcagcgtcgtccaattttgaccgccgaaaagatttgcgcgttaatcgcctggagcaccatatcggtaccgatcacttgggtgcgacagtgggttgcatcgccgtagtcgcccctgcccgtggtag

SEQ ID NO: 138368 - DNA, 2598 bp, Homo sapiens
tcagggtctgatgcaatcgatcttcaacacattatgcatcgatcggcacttcaccactccaaacaaatggataggagcaacaaatttacttatcatagcacagagtgcataggttagcagtgtagcacacgatatataacacagcgactcaggattacgcaaaatcaccgtgatattgttcatgccgggaatggcttcaaccacattcggcatatccaccagacgctgcgccagtcgccagatccgtttctggctagccagcgtcaccggcggttccagttccagcactaccgccgtttcacctgcagcataaaaatgcaatccctgctcgcgggctgaatgaatggtctgttcagaaacttcgccagtaataaaagcatccacgccaaaacgcgcggcgctatcgataaaactttgcccgccgcccgtgcaccaggcgacgcgctggaccacctcaggtccggtatcgccacaccataacggcttacgtcccagacgcgcttcaatccaggaagccagctccagtcccggcacaggcatggtcagttcgccccacggcaccaacggctcaatttcgcccatgaccgtgatccccagtaacgccgccagctgtgcgtatgcacagctcaggaggaccgagcaactggaaacgccgtataaaccgcatcctgtcgtaggatttaaataagagtccaggcccagcggccagtgatgaccgataaaatacaggatgcctgcggaaatcaccccggcgacaatatcgtcgatcatgatccccatgccgccatgcacattgcgatcaaaccagcggatcggccacggcttccacatatccagaatacggaaaatcacaaacccggcggcaacccactgccagtcattggtcggcagcgccatgagcgtgatccacataccaataaattcgtcccagacaatgctgccatgatcgtgcacacccatgtctttcgccgtttgatgacaaagatagacgccgatacagatccccagcatcaccaccagcgagtagagctgccagggcaaaaaggtcatcagataccagaacggaatcgctgccagcgagcccatcgtcccaggaacgatcgggcttaatccacttccgaatccgacagcaagtagatgccacggattactcatcttcaggcgacttttcgcgacatcggtttcggcacagattttacccacgatgtcaccgttgtggtgaccgatgaacgggttcaggtaagtaacgataccgatagagttgtaaacgtaaccttcgcacacttctttgttagcagtgatgccgttaatgcatttttccagcaggttgtagcaagcgttggtcagaatgtgaacggattcgaacatggcctggccaatgaccggctccataacgttcaactgcagctgacctgcttctgctgccatggtaacagtggtgtcgttaccgatgactttgaagcatacctggttaaccacttccggaacaaccgggtttactttagctggcatgatggaagagcccgcctgcagttccggcaggttgatctcgttcaggccggcacgtgggcctgaagagagcaagcgcaggtcgttacagattttggacatcttcacagccaggcgtttcagcgcgccgtgaaccataacataagcgccgcagtcagaggtcgcttcgatcaggtcttcagccggtacgcatgggaagccagtaacttcagccagttttttcactgccagcggagagtactctttcggcgtgttcagaccagtaccgattgctgttgcaccaaggttaacttccagcagcagttcagcgtacgttaagttttggcaggtaccgagctgatcatgatccgctatcagcgcatgcagggcaaaaacaccctgtggcaggtcggtactgaccacgccgggatcgctacccagatggtcgttgagcgcaagattgccgcagaagaaggtaaaacccgtcacgactacggccgcgaagctttcatcgacaaaatctgggaatggaaagcggaatctggcggcaccattacccgtcagatgcgccgtctcggcaactccgtcgactgggagcgtgaacgcttcaccatggacgaaggcctgtccaatgcggtgaaagaagttttcgttcgtctgtataaagaagacctgatttaccgtggcaaacgcctggtaaactgggatccgaaactgcgcaccgctatctctgacctggaagtcgaaaaccgcgaatcgaaaggttcgatgtggcacatccgctatccgctggctgacggtgcgaaaaccgcagacggtaaagattatctggtggtcgcgactacccgtccagaaaccctgctgggcgatactggcgtagccgttaacccggaagatccgcgttacaaagatctgattggcaaatatgtcattctgccgctggtaaccgtcgtattccgatcgtggcgacggaccgaggtacgatactgtaatcgcaaggtgattaccttgggaagttaagaaatataaaactatttgcgtggagataccacctggccccttcgtgccatttccttcatccatggcaaaggcttcggcagttttacccat

SEQ ID NO: 138369 - DNA, 1992 bp, Homo sapiens; identical to SEQ ID NO: 124847
  misc_feature (1)...(1992): n = a,t,c or g

SEQ ID NO: 138370 - DNA, 4815 bp, Homo sapiens
tcaaggttgagggcggtacgtcccgctggcgatgggggccataacgccaatcgtcagaatgattatcccgatacttagcccctgtttttcaatccacggaaaaaagagcttcgccaacgtggtgcggtaggcgcgcagcaggaaaatcgcttcaacgttatcgccgctggcctgtttcagcgccagcgccgccagttcgcggtcggcaatgccgccttcggtcatcacgcgatctaccgcgaggttaagctgctgttcaatctgggcgacgctcagttcgggcaaatcggtatcgcctcggcgtcggctctcttgcagggcgtgggcggcgtcgatcgccttctcgccccctttcacggcaacgtacatcagcacacctccacatgagtggttcgcggaatagccagcaggcgctcgccacaggtcaggatcaggtcgatgccgagcgggaacggatgcgggcgctcggtgagttcgtgcagaatgcactccggcagctgcggagcgatcattcgttcttcggcaatacccgcaccagtaaggcgcaacatgcgtccgccgctcaggctggcgaccagcggcgcgttggtatgaaaacgcagggctctggttgacgatatcgttatttaatggggtagaaagccacaccggcgtgtcgttatcggccagcgtcagcagcacgctggtggtggcgatattcagcggttgccagccgcgtttgagcatcgtaaagaagtcgacccggctggcgttcacttcggcctggcgtgcggcaatgcgtgccatacggtcagcgtccagcggggcaataagggtttctgataagttttgaaagtggcgagattgctgcatcagcgcgtcaatcagcgcgcagcgttcggcgtgctgtttatcacgcccctgcacccagctgtagccgagcgtgccgtcagtcaggcgcacggcggcgcgggtcagcgtggcgtcgccggcaaaaaaacgttcgccggtgccgcccatccgcgcctgaatctgtaccaggccagtttcagcggcgcggatcccatcatagtcgccggtaatgtttagcgcgaacaggcgtgcaaacagttcagccggttggctgtgcgccagcacggacatccagtgcacagcattatccagacaattgccttttctggacatgctttgtttaataccatgttctttaaggatattttgatatcttctcatacgatactgccatccctggtcagagtgcagaacaggatgctcgtgaggattaagctttttgaatgcctgatcgagcatattctcaaccatgttcatcactggtctttccgaaaggctgtaagaaataacttcgttgttgaagagatctattactggagacaaatacagcttgcgcccattgactgcaaattcagtaacatcggtaacccacttctcgtttggccgcgtagccttgaaatctctttggagaacattaggggcggtttgccctacctctcctctgtaagagcggtatcgcttgaccttaatcgctgctttaagtgagagggttcccatcaggcgctgaacagctttatggttaatctgtttcccttctcgatgaagagacagcgttaccctacggtatccgtatcggcctctattctcgtgataaatctcactaatacgctttttaacgtccgcatacttgtcaggcttgctgagagcctttagatgataataaaacgtactgcgcggtatctccgcagccctgagaagctcatcaagaggataaaactgccttagctcgttgagtactttcactttttcgtgggatgagctaaggctttcagctgccagattaccgcaggccaccagaagtgcgttaatcagccaagttcgccaactaataacgccccgactttttgccatcaccgtcattaccgacgaggtgaacaggctggtgccgcaaaccgccagcaaaataaagccgagtgtaaagcaaaggccgcccaccagatgggttaatgcctgtgaagacggggcatcggcgataacggaaaggtaaaaagtaaatccgatcgccataaacacgccagcggacatcgccattaaaaagaccgacactttactgcgggcaattttatgggcggcaatccgttcagcgattgccgcttttctggcgctcaactgcaagtcgaaagagagtttgtttctcatgcatactccgagatccccagccgctgcattcgtgacagcagcgtggtgcgcttcatccctaatcgcgtcgtgcgccacggggcccggcaacaatgccattggtttctcgcaatacctgaacaatgcgctgacgttcttcttcgtcattctctggcgtcgtcgggtgcagtttactgcgccatttgaactgcgaagcgctgaatcttcatttagcgtcagcagtaactgcgcccgctcaatcacgttttccacgtcgcgcacgttgcccggccaatcccacgacatcaactggcgtagtgcctcggtcgggatggcgtcaattgcgcgattcatatggcgcgccattttttgcgtgaaatgttttgctaaaagagggatatcttccggacggtcgcgtagcggcggcaattccagtgggaagacattcaggcgataaaagagatcgctgcgaaactggcgatcttcaaccatttgccacaaatcacggttggtggcggcaatgactctgacattcaccgggatcgttctactcccgccgagacgctcaatctcccgctcctgcaatacgcgcagcagtttaggctgaagttctaacggcagatcgccaatttcatcgagaaacaacgtgccgccatcggcaatttcaaaacgaccacgatgggtattaatcgcaccagtaaacgcccctttgtcatgaccgaataactcactttccagaagactggcggggatggcagcgcagttgattttgaccagcggcttgtcgcgtcgcgggcggagtagtaaatcttcattcaggatcaaaggtccggttttcaccatattcgccaggctgaataacgccgggcgcttgccatccgggctaagatgacgatggtaaatattcatatcgccaaaaatgaagcccgcttgttgaatgctgttaagaagcagttcaccgtttagctcgctaccgtgatgcgccgcgacgttcatgataatcaccgcttctttgcgcttcggtttatccataactggagcaggttccgctacaggctcaggctgtggtgccgctacgggttctgcaggctggaaagcctgttgtgccggttgcggtgctgaatgcacaggctgcggcgctggcgcgacctgtggcgaaactggctgctgcaacggctgttcaggctgcggctgataggcaggctgctgcaccggctgcgctggatgcggagcatgttgcggcggtacctgcgcttcaggcggctgctggaccggttgacgcggctgcgcagacgcataaggcggttggtactggtgttgcggcgacggacgagcagcctcatgctcctgagcgttagccggggcatgattcacgcggtgaacacgaacctcaccaacgccctcatcatcttcgacatcctcgtcataagaatcgtcgtcacgttttgacttcattcgttttaatggccgatcgcggaacatagaagatcgttctttacggttcgcttcgccgtttttcatttcgcccatagctttcagctttttggagatatcgcggcgttctttggagagctcggcatttttgatgatgtaatcgtcaacgcgatcttcatagtcacctttcatgctggcgatgatgccctggattgcttcaacgctcatccccggcttgatgtaatcgctcaggttgtccagcagcaggacgcgcttctggttgtcacggatctttttctcaacgtcctgaatttcacgttgcagtttgttcttacgacggaacagacgaacaaattccagtacgtcctggaatgaaggcttggtagtttccatttttatacccaaatcgtctttgaagctctgatgagtaacctgcgtaaagaggcgaaaatcaaaattggcgatgcgctggaacagcaataatcctgaagccgcctcgcaaaaaaatgcgttgcagctgtaacaagaaaaggtcgctttcgcggccttttccatttctgaacattgccatttgtttactgttttcactgccgttaaggtgattccactgttaacaaacaaggagaaaacagtatgaaacacggaattaaagcactgctcattaccctgtccctggcctgtgccggaatgtctcatagcgcgctggcggcagcttctgtggcgaaaccgacggcggtagaaaccaaagcggaagctcctgcagcacaaagtaaagcagcagtaccggcgaaagccagtgacgaagaaggcacccgggtcagcattaataatgccagcgcggaagagctgcatgacgtcctgccagacctgcggattttgttcgctcattgggcaaacatcgccgagcaatccggcattatgcaaaacaccatccagacgcggataattaacggcaatgcgctgtgccagttgttggcaattttcggacgtgcaggtcagcaaatcgagaataaaccactgatggtgacgcccagtttcttcgtttatgtggctggctacctgacgtaatttttcttcattacggcccaacagaatcactgtcgcaccatagcgtgcatacgtcatcgcggcttcacgaccaataccatcgctggctcccgtcaccaggataatgcgatcattgagtaaatcttgttttggctggtaatgcat

SEQ ID NO: 138371 - DNA, 503 bp, Homo sapiens
ttttttttttttttttcctgggagaagccgcgggaatgtctttattggacgttacgaagggaattggggtttctctcctgggaagaaaaagcccgacctgtgccggcgagagcaggctgccttgggctgggggcacctccgagcgctgcggcgggacgtcggggtccggggcgaaaagagccagggcgcggaccgacgtctgctgcttttctgcggcattgctgcccgaacgaacgaacgaacgaacgaacgaagcggtttcgtttaggaaaaataccctcttgacgcgaagccacggctgaagtcccgggccacgcagaggggccagcaattccatgggtggtggggccctccatccctggacgcagcggggagcagcgggcggccctctctcctgcccacttctcctgggcagcgctgcgtctgcggctcgtgggctccgggctcgcccgccgcggactctggctcaggtttcggctccggctggggccccggatccagct

SEQ ID NO: 138372 - DNA, 2760 bp, Homo sapiens
atgttgacgatacgacgcaccatgcgatcggcgttaacacgtgaaccggtttcgccacacccatcagcacgggccgacagtcacaccttccgagctggaaacacgcacttccatgttcggcatcaccagaatattggcggaaccttcaaagagctgtccggcatacggtcgttgcgaatcgcttccaccagcgcgcatcgccgtgcatttcaccatcaatcatcagttctggtgcacgttcccgaccagttccagcgcctgacgcattttgctcgacgacgggcagtcagaaaaccaaagttggagtgcgacaacaaagcaacgcgcggctcaataccaaacgacggacagtttctgccgccatcaaggtgttaccactcgcagcagcagcgcgttcatggcacctgcggttggtatagtaaacgaatcagtcagcttgtcgatgtagacgtcgacatcagcaatcggacgagtcgcagcccgactccatcgcggcttagcgaccgaagagcgatctacgatcagccggtcaacgcgttgcaagattatccggaccaagccaaccggaagcaaatgaaccccatcgctggccgctgcgcatcagcgcagacacgcgatgagttacagagcggtcccagccggcctgcaaacgaaaggactccagcgaatcaacgcaatggcagacttagcgaaaatgtagcaagggcacacggcgcatcgcgtaaaccatcgcccaacaaattgaacgccacgtgtagccgcgcacaggcgggcaacgcgggacggacaaagcggatggatatccgttgcatgcgtccacacggaaaaggacgcagaaaaccggagggaagcatcaaggcgaacgacacacgcataaagagaacacagccacgccaaagaaccgggagagtaagggatccaacaaggggcggcacgcgtgtcccaagactctgcgcagatttgtgggagcataacaaagcggaaaagagataccagaaaaggagagcaaaaacagacacaccaaagacacaggaaacagaccaaaaaaaaagcacaaagaacagcaacacacgacaacaggaagaagaacaagaaagatccggtgatacgataaccgcaacggtcagccctgctggatctgcaagcaacagtaaaccggtggacggtgcgaaatccttgaacgacgcttatcctcgttactggcggctttcggcgcatcgaccacgttacagaagatgcgcgagcttcagcggcttcgctgacgcgctggttaagcgcgtcatcatccgcgctgcaatcgccagccagcagttgccgccatcgccaccacgctcggggctaaggttccacgcatcaggtcggggacaaagcccacatcctgcggacgcacgctatcgccagctggatctgccaggagaagaccgcgcggatattctctttggcgatgtccgattgaaatgcgccatcgcaaacgcctgcttccagggtggtggtgccgtaagtgccagatccagcgtattaccgctgttgccgcggatcacaccctgcaccagagaaactgcagcggctgggcaaccagttgtgtaccaccgttactggcgctatcgctacattgtaagaaccgttcggcgcagtgctgccatcagtcaacgtccgtcccagctcaacaccaaacggcgtggtcgtggtcacagcccttcttcactgccggttcccgcaagaacagtggtgccggggatcctcacgcagttgaccgatcaggttacgggcctgtaacgactggctgttatcaatctgtccggaaatagatccgagcgtggtattgagtttttcaatcccgctgaccgtgctgatttgtgccaattgcgacgtcagctcgttgttttccattggattggtcgggtcctggtttttcagctgcgccaccagcaaagtcagaaaactgctttgtaaatctgcggcgttgctgcccgtgagcgaactactgctggtggtactgacgccggtatttgtcggatcggtggtggttaccgcaatggacatagctttctccgtgttgagcacttcaacattggcctgatagctgcgtgacgccgacatggtgttaaccatctctccgacaacatcaacgttcggcatttttacgtagccctttgcatctgccagcggattacccggttcataaaccagtttgtccggggcctgactttctataacatcggcaacctttacgccgcctgtcgcagcacctggtgcagcgttaacctggaataccacctgttttgcccgatatggctgtccatcgggaccggtcacgctatcagcattcgccagattactggccgccacgttcaggcgctgggagttcatcatgcctttgatttgcccgctcaacgcgctaaggctcatctggtattgcaggctgttatcggcaaactgggtgcgttcgcgatccatatcgacggtattaccgtcaagcgaaggctggtccggaatacggtattgcagttctgcggtaggaggcgtcagcgcctgcgccggaatgtgttgcgttgaggtcatcgtcagtgcaaccacactggttgcatcccgtccacgttgcatgacttttttaagttcactggcaaaatcgatatcgcgcgcctgataaccaggggtatcggcattggcgatgtttgctgccagcacttcctgacgctgggcgcgcagattgagcgcctcttgttgaaaacgtaaggcggcgtcgagcttatcgagcat

SEQ ID NO: 138373 - DNA, 1776 bp, Homo sapiens
gaacgtgctggcaccaaagttggcaacaaaggtgcagaagctgcactgaccgcgcttgaaatgattaatgtattgaaagccatcaaggcctgaaattagtaaggggaaatccgggaaacctgctgctcgtcgccgcgctcgtgagtgtgccgtccaggcgctctactcctggcagttgtcccagagcgacatcgctgatgttgaataccagtgcctggctgaacaggatgtaaaagacgttgacgtcctgtacttccgtgagctgctggccggggtggcgactaataccgcatgacctcgacggactgatgaagccatacctgtcccgcctgctggaagaactggggcaggtagaaaaagcagtactgcgcattgcgctgtacgaactgtctaaacgtagcgatgtgccatacaaagtggccattaaggaagcgatcgaactggcgaaatcgttcggcgcagaagacagccataagttcgtcaacggcgtactcgataaagcagcacctgtgattcgccctaacaaaaagtgatatccaggccggtagattcacggaagaccgttccatgatcgccggccttttcttttttcctgctgaggcataacgtatggcatgtggcgagttctccctgattgcccttattttgaccgtgtaagaagttctcgtcttgatgtcgaactgggcatcggcgacgattgcgcacttctcaatatccccgagaaacagaccctggcgatcagcactgatacgctggtggcgggtaaccatttcctccctgatatcgatcctgctgatctggcttataaagcactggcggtgaacctaagcgatctggcagcgatgggggccgatccgggcttggctgacgttggcattacccttaccggacgtagacgaagcgtggcttgagtccttcagcgacagtttgtttgatcttctcaattattacgatatgcaactcattggcggcgataccacgcgtgggccattatcaatgacgttgggtatccacggctttgttccgatgggacgagccttaacgcgctctggggcgaaaccgggtgactggatctatgtgaccggtacaccgggcgatagcgccgccgggctggcgattttgcaaaaccgtttgcaggttgccgatgctaaagatgcggactacttgatcaaacgtcatttccgtctatcgccgcgtattttacaggggcaggcactgcgcgatctggcaaattcagccatcgatctctctgacggtttgatttccgatctcgggcatatcgtgaaagccagcgactgcggcgcacgtattgacctggcattgctgccgttttctgatgcgctttctcgccatgttgaaccggaacaggcgctgcgctgggcgctctctggcggtgaagattacgagttgtgtttcactgtgccggaactgaaccgtggcgcgctggatgtggctctcggacacctgggcgtaccgtttacctgtatcgggcaaatgaccgccgatatcgaagggctttgttttattcgtgacggcgaacctgttacattagactggaaaggatatgaccattttgccacgccataaagatgtcgcgaaaagtcgcctgaagatgagtaatccgtggcatctacttgctgtcggattcggaagtggattaagcccgatcgttcctgggacgatgggctcgctggcagcgattccgttctggtatctgatgacctttttgccctggcagctctactcgctggtggtgatgctggggatcccgggtac

SEQ ID NO: 138374 - DNA, 3568 bp, Homo sapiens
ttaggttttcccctggtattgtgtcttccctgttctattgttgttccgtgttgttttaattggtgttcttgttgtttcaataggtccaaggtttcccgtcagtcctctctgctgcacggggcgcttgctcgggccggcagcggtgcgaggcgctgtgatcagctccacagacacagcaacccaagggagctgcgccaggattgtctgcctaagtccatggacgctgtctggttcctgagaatggctgagcttggggaagaagactaggaaggaggtagcagctggtcgcacaactgtgccgggagagcaggctgccttgggctgggggcacctccgagcgctgcggcgggagtcggggtccggggcgaagagagccagggcgcggaccgacgtctgctgctttctgcggcattgctgggcagcgctgcgtctgcgctcgtgggctccgggctcgcccgccgcggactctggctcaggtttcggtccggctggggccccgatccagctctggctgggatccttagagtcgaccaggatgccattcctaaaagtctcctgtgacaggacctccacaaagaggcagtccccacaagacaacgaggtccctggggattccagcctgctaccctccagtgggtcaaccttcaagacgcaagtggctgtgtgtgaagaatccacaaaagcaagagaattggagccaataggtgcttggaaggcagaggtgaacgtgtcatgagccgtattaaaaaacacggggtagtgccctcgtgaaacaacagccaggcgcagcaccttcaacatccgtatttctacaaacagttctttcacaacaatgaagtgttttttaaagtgattttggttttctttaccatgttcctcattcttctgagtcttagtaaagttgttaacatccatatttctaatagtagtctggaggtagagatagagggttaaccaaataaccatacagacgaactgattagtacaaccattgtgagactcgtaaggagatagcctcattttatcagtagaagacataacatagcccccgccgttcagcatcgtttgcattaacaccgcaatatgccggtattggaaaacaaacctgcgtgcccggaaacgccgcccatcgaaaaaaggctttttcatcgtgcaccgtagtgtcaggccgagcgggcgataaatcgactcttcaacatagcggtcaagggctgaccggtaaccgactcgacgataaatccaagcagcatataatcgaatcgccccaagttcctcgcccaaatttccaagggcttgcggcaaaccttgtttgggagaaaggggccgaatccggggtccggggccttctttcggcttaattaaccgcccaagcacccccgatccgacaattaccggcgtcagtaccaccgcagtagttcgctcacgggcagcaacgccgcagatgtacaaagcagtttctgactttgctggtggcgcagctgaaaaaccaggacccgaccaatccaaggaaaacaacgagctgacgtcgcaattggcacaaatcagcacggtcagcggattgaaaaactcaataccacgctcggatctatttccggacagattgaaacagccagtcgttacaggccagtaacctgatcggtcacggcgtgatgaccccggcaccactgttcttgcgggaaccggcagtgaagaaggggctgtgccacgaccacgccgtttggtgttgagctgggacggtacgttgctgatggcagcactgcgccgaacggttcttacaatgtagcgattagcgcagtaacggtggtacacaactggttgcccagccgctgcagtttgctttggccgccgaaagattctgcgcgttatcgcctggagcaccatatcggtacgatacttgggtgcgacagtgggttgcatcgccgtagtcgccactgccctggtagacccgcaagcatagcttcggttgaagtagcgcagcagggcaatgctccagtccggctgggctttttgagatcggtgaggatctgttccaccatcagcttgcttttgccgtaagggcttgcggtgtgccggtcgggaagctttcaacgtatggaattttgggctgacgccataaacggtggcggagaagtctgtgtcgaatatatttatttctgaataattaatcatggcaaaaagaaccaaagccgaagctctgaagaccggcaagaactgattgaaactgccatcgcccagtttgcgcagcatggcgtagcagacgacgctcaacgacattgccgacgccgctaacgttacgcgtgggctatctactggcacagcgcatttggccatgcgaaagtattcgttttgaacgccgctgatgtggattataaagcggaaacctgggcgctggcagattattacggcaaactggatttgtccgtaacgaaacgttgacctgctataacggccgggtgccttttcgtcactggctttcgccggtactgctgctttactttgtgctgcaggacttccgctttggtttctaccgccgtcggtttcgccacagaagctgccgcagcgcgtgcaaaggccgccctgtgcttgtgtacaacctttaagggtctggggcgatacgatgcaggcaaaacgtattgggtagcggtgcaaggcttgcacacatgggcatgttataacctgggggatgtcgtacttttcacacgcttctgctccatgggtgtaaccccccacataaaccttacatacactgtgcgggtccgtcataggggccatggcagtgagtagggcacataagcaactccagtccgcccccttccctttacatttcagggcaaccgcggcgccataacggcccggggagcccgcagtcctcctaatgcctggcacgttttcccgcgttgtacgtgccctatgacgtcccaaatccccgggtagcgtagcccggacggggggcgcagtaaacacggcattctcatacgtcatccatgtacgccggcaagtgtgggggtggggtggggtaattgctcggctatccgcaaagggcgatcggggtaggctccacggcacaactgttcgcggggtggttcgccccacaaagtaagggcaaatataattggtatgggttccggcaggtggcgcgcttgaaatgattaatgtattgaaagccatcaaggcctgaaattgtaaggggaaatccgtgaaacctgctgctcgtcgccgcgctcgtgagtggccgtccaggcgctctactcctggcagttgtcccagaacgacatcgctgtgttgaataccagttcctggctgaacaggatgtaaaagacgttgacgtctgtacttccgtgagctgctggccggggtggcgactaataccgcatacctgacggactgatgaagccatacctgtcccgcctgctggaagaacggcgtagacgaagcgtggcttgagtccttcagcgacagtttgtttgatctttcaattattacgatatgcaactcattggcggcgataccacgcgtgggccttatcaatgacgttgggtatccacggctttgttccgatgggacgagc

SEQ ID NO: 138375 - DNA, 2940 bp, Homo sapiens
tcacaaatgttgctcggcccagcgtaagaaatcttctttcggtaatgccttgctgtagagccagccctgaccgtagtgcacgccatgctggcgtaaggactcttcttgtttactggtttcgattccctccgctaccattttcagtttcagtgtttttgccatttcgatgatatgcggcgtgacatttttatattccagcgcatcaacgaaagatttatcgatcttcagaatgtcgacatccagatcctgtaaataacttaaacttgaataccccgtaccaaaatcatcaagataaatttcatggcccgcctcccggtagcgagaaattatcggggcgctggttttcggatcggcaaactcgcgttcagtgagttcaagcgcgatctgtctgtcgtaccgggcttcaggagaataagtggcggacggccagtaatggtactggcactgtcgacgcttcccccccggcccaacgcgttgggcggttgattttacttgcagggtctgcgacagcagccccaggtccgtcagcccctgaatattggagtgaccgcgcagggcgttaacgctgccgcctgccatccccatattgccgagcagcagctggatcatcgccatcgtacgaatgttttgcgcaccaacggagtgttgcgtccagccgagggcatacaggaacgaggcagttttatcgtgagcactggtttctgcgatgtattcgcagactttcaggaacgcgtcttttggcgtaccacagatgttttcaaccacatctggcgtgtagcgggaaacgtgctgtttcagcaagttccacacgcagcgcggatgttgcagcgtggtatcgcgtttggcgaagccgttttcgtccagttcataagtccaggaggatttatcgtacttgcgtttttccgcgtcgtagccggtgaacaggccatcttcaaagccgtaatcctcacgcacgatcaggctggcggtggtataggcttcggtgtattcgcggttgaatttttcattgttcagcaggtacagcaatacgcctgacaggaaagcaatgtcagtaccggaacgaataggggcatagtagtcagctaccgccgccgtacgcgtaaagcgaggatcgatcacaatcagcttcgcgccgttgtgaattttggcttccatcgcccagcggaacccgaccgggtgagcgcccatcaccacgacgaggttggcgttcttgatgtcgacccagtggttggtcatcgcaagacgtttttcgatatctggcatgatgatcaattcattgaccagcgggttaggcggttcagcggcgataatcgacggctgcaggaccgcgaacaagttggcctgcaaagcgcgaataattcgcccatcgacaaaagcctcttccgggggattaatcagttccagctttacgccgcgttcacggcgcaagacgttaatatcgacattttcaaaacgagacagcaattctttgctgttatcggtcaaactaccggagttcagtacggcaagtgaacagttgcgaaacagttgatagatgtcgctgctggcggtgcgtttaagcatatccacttccagcagtcttgtggtcgatgggacaaaatcgctattactgcgccacgggttaatgtccagaccgccacgacgggtataacgtgcgtaaacgctcaatttttctggctggcagaagcgtaacaggtcattaaagatgcgttccacgcactgttcgtggaactcgttgtgatgacggaatgagaccaggtaacgcagcagtttttctctgtcaatttggcgtccacgatactgaatttggagcgaaccccaatctgggtgatgggtgatcaggcagtttgatttcagcacgtgggtgacaagcgtctccttcactacttttttcacacaggtggcattctccagataatcagtaggtgaatcatacgtatcgatagtgatatccagcggggcggatagttttgcgcggccctgaatctgcacaaagccctgctcgtcaaaacgcacaatatcgccagtgtcataccagccgcgctccatttcgccgcgaacattctcggcggtgggcacttccagtacacctggcttctccacccgcagatagccgttcattatgttcggccctttcagttgcaggcgtccgccctcttcgataccagggaccgacaacaggcgcgcatccattcctggtagaatacgccctaccgtaccgggtttcgccgccatcggtacgttgatagaaacgacaggcgcgcattcggtcacgccgtagccttcaaggatgcgcaggccaaatttatcctgccaaagctgtttggtactttcttgtaatttttctgcgcctgccaccacatagcgtagacgatagaagtcatacgggttggcgaaacgcgcgtagtgaccgaggaaagtcgaggtgccgaacaacacggtgcaactgcggtcatacaccaactccggcacaatgcggtaatgcagcgggcttggataaaggaacacttctgcacctgtaagcagtggcgtaaacaggcctaccgtcagcccaaaggagtgaaacagcggtaacgccgacataaagcgatcgttggtggtgaagtcggcaatcgttttaatctgctcgacattcgccagaatgcttttatggctatggacgacgcctttcggatggccttcagaaccggagtaaaaaggatcagcgcctcttcttccggctgctgtataacctgtgccagacgcggcatcagcaaagtgagcgaagatccatactttgtcggcagtggtgacatctgcttttaaatctgagtaacttgctccggcagatgccagagtttgcgttttatcgagaaactggcgggaagtcaagatcgttttgacttcagccgccgtaatagcactggtcagcccttttaccccggcagtgtagttcatcat

SEQ ID NO: 138376 - DNA, 1273 bp, Homo sapiens
tcagcgtgacacggtcgggtcgcactggccgctaccgtcgctgttgtcctgccagctatagccagcccagaaacgaacactactgaccgcttcattcggcgctttgacttccagacgataagcgccccactctaccggaaaactgaccttgccggtttcgtccgctttcagatccagagtttgttcattttcgatcagatctttttgatcaaactgtgactgccagccttcatcttctgaccagttccagtagtaatcgcgcgttcgcgaatcaggcgcacctctggaactttgtggctcaagcttgatgttagtggatgtgtttgattctaggggcggggagaagtctgcaggaacttcttcggcggcagtgtagagactgctgcttagggccagcctgggtgggaacagatggggctgctcacctcccagcggaggcgcagccatgagcgatctgcataacgagtccatttttattaccggcggcggatcgggattagggctggcgctggtcgagcgatttatcgaagaaggcgcgcaggttgccacgctggaactgtcggcggcaaaagtcgccagtctgcgtcagcgatttggcgaacatattctggcggtggaaggtaacgtgacctgttatgccgattatcaacgcgcggtcgatcagatcctgactcgttccggcaagctggattgttttatcggcaatgcaggcatttttgatgcagggcaggtgacgccaaactgggcttagcctatgagagttcttggctttgcccaggaaagaactcgagggcaaactggaggtagaagaaaatggctttatggaagcagcagtgttacggctctggcggtgatccagctccgtgattgctagaggaactccatcaagaatgctggctacttctccggccatccgcgacgagacgaacgtgcagaatgcggtttccaccacctcagcggaatcttttgcattttttagttcctggacatctgcctgcgctcgggtgaggcggtgacgctcatagtcaatcgtaccaggctgaaggtcggattccgatgcaagacgaaggtcttccacctccttccgtaatttctcattctcaatgcgcgcgtcgcgtgcggaataccattcgatagccgcggaagattcatagaggacctcattaccttttccaccgccacgtgctacaggcattccctgatcctgccagttctgaatggttcgcacgctgaccccaaatatttcagaaagacgctttttgttgacctccat

SEQ ID NO: 138377 - DNA, 483 bp, Homo sapiens
tgacccgattacggtttcactgtccgtccccttacatcgccgggaccgagaaaaccctggtgttccccgacttatacgccccgctgaacattttacaacagggccatgccagtgtgctggcgcatccgcagctgcgtgagcgggcagtggcggtttcttcatttggcaagacctatcatatgaccggctggaaagtgggttattgtgttgcgccagcgcccatcagcgccgaaattcgcaaggtacatcagtatctgaccttttcggtgaataccccggcacagctggcgcttgctgatatgctacgtgcagaacctgagcattatcttgcgttaccggacttttatcgccagaagcgcgatattctggtgaatgctttaaatgaaagccggctggagattttaccgtgtgaaggtacatactttttgctggtggattacagcgcgctttctaccctggatgatgttgagttttgccagtgtc

SEQ ID NO: 138378 - DNA, 1500 bp, Homo sapiens
ctaatatttcgttagtatggtggtgtttggtcgtggatctcgtttctgatgcgcgtttgctccttctgggatatattggcgagcaattgtgtggttaatagttttcttctgtggcgagggttgtcgatcaactgctgaccattctgcttgtgattctttccgttgtgtcctcattgtttgcgtttgcgtgccgtctatgttgcctccttggtaacctttctggtacggattgagtattcgcttgggtacgggtttgggctcttgcgtaaggttgcctggggatggcctagtgttggctcgatgacgcgttggagctgcctgggcttggagggatcctttgaatgggggctccttggctgcatcgtcctcgacgtgccctccagcgatggcggcttggaagcggtttctcttgtgggagtgggctcgggcttcaggagaataatggcggacggccagtaatggtgctggcactgtcgacgcttccccggcggccaacgcgttgcgggtgtgagttttactgtttaataaagccaggattccgactgggtatgaagtcagtgaaaatggagattcgaggtctctgggctggcggagaagataaaatcgcggttccggccgaaccacgcagtgccgggccggagcgcacactgagcgatctgcataacgagtccatttttttaccggcggcggatcgggattagggctggcgctggtcgagcgatttatgaagaaggcgcgcaggttgccacgctggaactgtcggcggcaaaagtcgcagtctgcgtcacgatttggcgaacatattctggcggtggaaggtaacggacctgttatgccgattatcaacgcgcggtcgatcagatcctgactcgtccggcaagtggttaatactcccgcagagacgctcgaaaccggcttccacgagctgtttaacgtcaatgttctcggttacctgctgggcgcaaaagcctgcgctccggcgttaatcgccagtgaaggcagcatgattttcacactgtcaaatgccgcctggtatccctggcggcggtggcccgctgtacaccgccagtaaacatgccgcaaccggacggtgagctgcatctgttttccgatgagcacatcttccttatgaacgacctccactctcgaaatccatgttgctggaaattccccgcagttacagcaggtgttacccgctaacttcacacggaaaatctccagccggctttcatttaaagcattcaccagaatatcgcgctctggcgataaaagtcggtaacgcaagataatgctcaggttctgcacgtacatatcagcaagcgccagccgtcccgctgaagctgtggagtacatttctcgcaccttgcccagctcgaaaaaggggagagggtctgcgggcaagtcgaccgcgccgcctactaataaagcatcaggattcctgctatcgtgcagctttcccttcaggcgggattcatacgcggccagccatccgtcatccat

SEQ ID NO: 138379 - DNA, 1788 bp, Homo sapiens
atgattgttgccgaaaccatttttgccaattcaggcattggttatcagccgatgaatgcgtgggagtatgttgcaaacgaacgtggtggtagtcgttattattctttacgccctgctcggcaaactggctcccgtcagcgcgcagctgttagagcgcctctggttgcgctggaacccggcttatcatttgaaggaggccacggcaatccggtggtcgttggaggagccgacgtgcagcttggttgccttgggttaggcgttgtgcgtccggcacaacctgcggttcttgacagcacattttggcagctagttgtaaatttagccgcgccggtgacagacccagaaatgaacgtgcgcgttaatcctcatgttattcctggcatggtacaagctgaatctataagcttttttaccggactcaccatgcgctggttccgcgatgctttctgtgccgaagaaaaactgattgccgaacgtttaggcatcgacacctatacgctgctggaagagatggccagtcgggtgccgcttgggtcgtggggcgtaatgccgatcttctccgacagaatgcgctttaaaacctggtatcacgctgcgccttcctttattaacttgtccattgacccggataaatgtaacaaagcgacattgttccgtgcgctggaagaaaatgcggcgattgtatcagcgtgtaacttgcagcaaattgctgatttctcgaatattcatccttcatcgttagtctttgcaggcggaggttcaaaagggaaattaggagtcaaattctcgctgatgtctcgggatatagccgttgttcattcgcgtcgttttgccgtcgatttcgttggtggtgatctgaaagctgccgcgccaaaaggcattgagccggtgattacgctttccagtggggaagcgaagcaaatcgaaattctctatattgaacccatcgatggttatcgtattcagtttgactggtatccgacttcggactccactgatccggtcgatatgcggatgtatctacgttgtcagggggacgctatcagtgaaacatggctgtatcagtatttcccgccagcgccggataaacaataccgagatttaatatcccgtctgaaaaacgaaaatcctcgctttatgtccttgttcgataaacacaataaacttgatcatgaaattgccagaaaggaaggttccgacggtcgagggtacaatgcggaagtggtccgcatgaaagacctgcaggcatgcgagctaggaggacagacgctgttgctgaccaccagagagagagtaaccgctctggtgcaatttatctttggtttcgttccacaatgcggctttggtcaatgcccactgcacgcgctcgtccatgtcggcacgggagagcttctcaaacagacgaacgccaaaagcgatgttgtcgtagatggacatcggaaacggcgtcggtttctggaacaccatgcccactttcgcacgcagcagtgcgatatcctgagagttggtcaggatgttgtcgccatcaagcagaatttcaccttccgcacgctgctccgggtacagttcaaacattttgttgaaggtacgcagcagcgtcgatttaccgcagccggacggcccgataaacgccgttacctggtttttagcgatatccaggttgatgtttttcagggcatggaatttgccgtagtagaagttcaaattacgaacctgaattttactcggggcagtttcaaccatactcattgcaatcttttcctcatcgtgcctgatgcacttcgctaa

SEQ ID NO: 138380 - DNA, 1762 bp, Homo sapiens
gaaatctcaactgcacgacccctgctgtgccccaattcagcaggaagcagttagagcagttgttggccaacctcctcaacagcacttgggttttcctgttgagaggggagtctgccaaagagagtgtgattttgaaaaggaactggaagcacgcattgcctctctttccgatagcgtgtctaacgcccgtgaagagcgcatggcactgcgccaggagcaggaacagctgcagtctcgcattcagagtttgatgcagcgtgcgccggtttggctggcagcgcaaaacagtctcaaccagttgagcgaacagtgcggcgaagagtttacctccagccagagaacacatggacacagtgaggggaacatcacaaaacggggcctgctgggggaattacgtttcgaaaacggcgatcccagtaatgaccagagttacggacgtcataaagacggtatggcggaaattggcacttttcacggcggcgatttacgcggcctgaccaacaaactggattacctccagcagttgggcgttaatgctttatggataagcgccccatttgagcaaattcacggctgggtcggcggcggtacaaaaggcgatttcccgcattatgcctaccacggttattacacacaggactggacgaatcttgatgccaatatgggcaacgaagccgatctacggacgctggttgatagcgcacatcagcgcggtattcgtattctctttgatgtcgtgatgaaccacaccggctatgccacgctggcggatatgcaggagtatcagtttggcgcgttatatctttctggtgacgaagtgaaaaaatcgctgggtgaacgctggagcgactggaaacctgccgccgggcaaacctggcatagctttaacgattacattaatttcagcgacaaaacaggctgggataaatggtggggaaaaaactggatcagaacggatatcggcgattacgacaatcctggattcgacgatctcactatgtcgctagcctttttgccggatatcaaaaccgaatcaactaccgcttctggtctgccggtgttctataaaaacaaaatggatacccacgccaaagccattgacggctatacgccgcgcgattacttaacccactggttaaatcagtgggtccgcgactatgggattgatggtttcgggtcgatacgccaaaatgtttacgctgtaatccgtcgattaccatcggcaccaactattcagcatcgtaacctcaatggtcaagcatacctggggctctgtgagggtgacggcatgggctggtgcttgccctgggcaccctcagtcctgctgctggatcatctgagacagggtttcaccatgttggaagaaaacctgggcaataccattcaggacataggcatgggcaaggacttcatgtctaaaacaccaaaagcaacggtaacgaaagccaaaattgaaaagtggaatctaattaaactaaagagcttctgcacagcaaaagaaactaccatcagagtgaacaggcaacctacagaatgggagaaaatttttgcaatctactcatctgacaaagggctaatatccagaatctacaaagaactcaaacaaatttacaaggaaaaaaacaaacaaccccatcaacaagtgggcgaaggacatgaacaaacacttctcaaaagaagacatggatgcagccaacagacacatgaaaaaatgctcaatcatcaatggccatcagagaaatgcaaatcaagaccacaatga

SEQ ID NO: 138381 - DNA, 4473 bp, Homo sapiens
ttacggttcccagcgcagttcgtcgtttgacaatgcatcgaacggttcgacaagcgttagcgtgatctcattggaggagacacgctgcccctggttatcttccaccaccacagacaatcgccagtgattgcttgccccttccccgttctgccagtcaggcatgatcagcgtccagccctccgcgctgttggcttgtgcgcccggcgtcaaacttaatatctgcgtatcgccctgccaaatcagttgccgaataccgtaacgactgcggatttgtaatttcagcggcactgtttcgacaggttttagatcccacggcggtgtcgccaaaaacaccgttaacgtttttcgctgtcggtactcaagagtcggtagattatttcgctcggcagccgtaaagcacatcaaatcgaaaataatccgcgcgttagcctgctgttcccgtggcatacccttgagcgccaggtgatggtgatcggtaaagcagaacgactttcgactctcgaagtgatgaaatattttcatagccgcccgcgtgatagccagattggtgcatgggtttcgaagcagtccagtcgcatttctgcccgcggtatccttgaaagtaaattcctggagctgaagcagaagtttcaacagggcgaagtgccattgccgagcttttggggcggttttcgcgttatcttcaatcgtgctcaccgttaagcgcggctgtttgtccagcagctgtacggtcaacaccgggcgctcacgagcggtatccgccaccgcaattccacgatatttcacacgcgtcacttcagataacggttccggctcctgatgaatcgggtgatcaggcgcggcaacgtagacgttcattaacgtatagagcttgcgcgagttgatctccgacgaggaacgaaaatgcatatccggcgcgataacaatatccgcccgcccctgctccagccgttcccacgcccccgccagcacttctgtgatgattgccagttgggtattggcttttgccgccagtttgtcgattaacgggaaaaaggcaggtgtcggtaccagcggatggcccgagcggtcaaacagcaccacatccagctcttcttccagtttttgcatggtgtagctaagtgcggaaggcacgcgtcccagctcatccgccgccgccgcaaaactgccccggcgatcgatcgcatccataacccgtagtgcttccagcgttaatgccctttctttggccatttcgttctcattcaggaaatttgaacataccgggcagaatatctggctaacaatgtagcgtccagcccgtcgagccgcgaaatgtgttgaggcgatgcgcgtcccgtgcggtgtgcttagagcgcagggaaggtgctggcgccgcagggtgccggccttgtgagccgcgagacctatcgccgaaagtcgatattttggatgtgattctgatggagaaccggaaagcacagtgtcgatatgttcttctggcccggggcgaaactgttggtagccaaaggtttcttgtaaaacctgtttagctccggactccagattcaagcacttccgctgcgccacattcaccccgattgcccccacaccgacacgggtctggttgaagttatagtcgatgagcgattcgccatagccgctgtaaacctgagtataaaggcgcacatgtttggtgatcgggtaacttaagcctaactccgcgccgccgtagccggtgttccagttgtactgtcctttcgcactgagcaccgcatcaccgaggtgatagccgattttaagctggtagtaacccatatatttggtgatatccgggttatcgtcagtattacccaccacataccacggcttcacttctaccagccagttaccgttttctgccatcaggcgagtataaaggcggttccagctgcgggaggtcgggtcggaacgcccgttagagtcgtggttataccccatctccacatcgcgcagcgtccaaccggcaaaatattcacgaagcttgtcgcttaaaccgcctggattggtggcagaaatgcgctcatagccttctttgcgataatggatgtccagcagctgcaccatgcgttcgctgtactcttcccattcaaccgcccgcaggcgaaattgctcatcgcaaatcacccacagtggacccagtggcgtggcaattttttcttcaagtaatctcagcatccgttctctcttaagacaaacgtgggtaaatacccggaccggcgctaaaggcaatacggatgagtcggcaatacgaaagaggatttgcgcaaatgccgggtgaaagccaagtagcataaacattggtacgaaaatgggggcgagaatcgaccagattgcggaaccgctggcaataaacatgcataagaaagaggaaagcaacgccagaccgacaaacgccgggatgccgctaagccctgaactttccagtatatcggtcagccccacggcgatgaatttccccatgttgctccagttaaacatggcgacaaattgggcgaggggaaaaaccatcacgataaatcccgccatctctttcatcggttcaatcattaaatgcggtaaatccgcctgacgtcgaattgtgcgggtagcgatgccataagccagcgagacaacaaagaaaaaaagaatgatcagtggcacgatacctttaataaagggtgatggcatcacggtgtgattaatcggatcgcgcaatatcccgttttgcgggatcaccatcagcgcaatcgcagcaataaaaagtagcgatacgacacctgctatgcgtaaaccaaaacgctgactttcggtcaatgtctgcagtttctcatcgctgtttccctgcccggtgagatcctgaaaatcctgcgccatcatgatttccagcagttgcgcgttagtaaagctggtatgcgcgggtacatctgccagaaattgtcgtgtatctgttaccagttcacgggcgtcggcaaggtcaatcggatcggcaaaccagtcatcccaacgttgggttaacgcttttgctgatttctccatttgatcctgatgcggttgtgacgcctcaacactgttcagcgcccagtccgcagcctgggcggtcatctgcacaacatagtacaaacgatcgcgcgcatcggggatggcttccgccgcttcggcaatggcctgatccagccccagttcccgcaaactgtcgcgcagcatacgcgtcaggatgcccagtttctcaaagattttgttgagtttttcctccagcgtcgcggcggtaaatggcttcaccacatagccactggcccccgcttgcgccgcagcaatgatgttctctttcttcgcttctgcagtcaccattaacactggcaatgccgacatcgcgccatccgcacgaattgttttcagcaattccaggccatccatattgggcatgttccagtcggagataacaaatccataaccgcctgcctgcaacttattgagagcgtcgacgccatcttccgcttcctcaacattattgaatcccagctctttcagcaggttacgcactatgcgtcgcatggtggaaaagtcatccacaaccaaaaatttaagttctttatccgccatttcacactcctgatttaaatacgtatcgcccgaacgcgcctgggtgacagcgctgcgggccagcaggttcatcccccgttcgccatccgcgctcaggttcagacggcgaacaacatcggtaattggctcattgcaccaccatccagataaccatgtcccacgtaaacgacggcggcgaacggtcgcatgagcagaaagcgtcaggcagtgttgtatccactcggtgggaaggtgttcttctacataatcacgaccgtagtaggtatccagcagaatctgtttcagctcggagatcagcgggtaacgcgggttagcgccggtgcactggtcatcgaatgcatcttcagacagtttatccacgttcgccaggaagtctgcttcctgaacgccagcttcacggatcgatttcggaatacccagttcactttcagcgtttccagccatgccagcagtttctcgatcccgggttgcaacatttattacaattttaacccgccattttcgagactctgccataacgccccggaaaccgaaattcatggaatcgatccccgttgtgcgtgaaaatgcgggcgatcccatgtgcgtggcaatcttcattgggcttggtatcgccatctgtctatgaacggacgtttctatgcgggcttcctcggcgtcttcctcgggggacgtattggttatgttctgttctacaatttcccgcagtttatggccgatccgctgtatctgttccgtgtctgggacggcggcatgtctttccacggcggcctgattggcgttatcgtggtgatgattatcttcgcccgccgtactaaacgttccttcttccaaaccagtccttgggttagatggaacagggcggatacccat

SEQ ID NO: 138382 - DNA, 416 bp, Homo sapiens
aaaaatatactgccgcacggtttacccgtgacctgattgccgggataaccgtcgggattattgctatcccgctggcgatggcgttggctattggtagtggtgtggcaccccagtacggtttatataccgcagctgttgcggggattgtcattgctctgacggaaatagacccggtgcttaaggagttgttgtacgcctattcggtaatatcccgtgcccgacgttatgctggaatggctggggtctcttttctgctggcggttgccacgctgaacggcgagcgtctggatggtgagatgagtgaaggcgagctggtggatgcattccgccatgtgagtgatgcgtttgagcaaaccagcgaaaccatcggcgtgcgcgccaataacgcgatcaacgacatgcctcaagaaccatga

SEQ ID NO: 138383 - DNA, 1935 bp, Homo sapiens
atgatgcacaggttgaatctcaatggctatgaacccgaccgacaccatgaagccgcggtcgcattttgtattcacgccggaacggatgagttaaccagtcctgtacatcagcaccgcaaaggacagctgatactggcgctacatggtgcaattacctgtacggtggaaaatgctttgtggatggtgccgccacaatatgcggtttggataccgggcggggtggaacatagcaatcaagtaacagctaatgctgaactctgttttctgtttatcgaacccagcgcagtgacaatgccgacaacatgttgcacattgaaaatatcgcccttatgccgggaattaattttaaccctggcaaacaggacgacgactcagcgtgctgagccaatgacccgcagattaattcaggtcctgtttgatgaactccctcagcagccacaacaacagctgcacctgcccgtttcttctcatcctaaaatccgcacgatggtggagatgatggcgaaagggcctgtcgagtggggggcattggggcaatgggctggcttttttgcgatgagtgaacgcaatcttgcccgactgatagtaaaagagacggggttgagttttcgccagtggcgtcagcagttacagctgattatggcgcttcagggattagtgaaaggcgatactgtacagaaagttgctcatacgctggagggccataatgactgggtgatggatgttgccattagcaacaacaagaaatggatcctgtctgcttccaaggtaaaagtggtcaagcttacaatatcgatcacgttcgccaggattggtgatagtggaagagttattgccaagtataaaattcctgggtgggttcgcgccctgctcggcaaactggctgacgtcagcgcgcagctgttagagcgcctctggttgcgctggaacccggcttatcatttgaaggaggccacgggcacgccattgttgctcaatgcagtaagcaaacattacgcggaaaatatcgtcctgaaccaactggatttacatattccggcaggtcagtttgtggcggtggtgggccgcagcggtggtggcaaaagtaccctgctgcgcctgctggcaggtctggaaacgccaaccgcaggcgatgtgttagcgggcaccacaccgctggctgaaattcaggaagacacgcgaatgatgtttcaggatgcgcgtctgctaccgtggaaatcggtgattgataacgttgggttaggccttaaaggccagtggcgcgatgccgcacgtcgagcgttggctgcggtaggactggagaatcgcgcaggggaatggcctgccgcactttctggcgggcagaaacagcgagtggcgctggcaagagcgttgattcatcgaccgggattattgttgcttgatgaaccgctcggggcgctggacgccttaacgcgactcgagatgcaggatttgattgtgtcactttggcaggagcacggctttaccgtactgttggtgacgcatgatgtgagcgaagcggtagcgatggctgaccgggtgctgttaattgaagagggaaaaattggtctggatttgacagtggatatcccccgtccgcgtcgattagggtcggtgcgattagcggagctggaagcggaggtgttgcaacgggtgatgcaacgtggtgaatctgaaactcgcctgagaaaacaggggcgaatcagcggttcaatcagacgtgaagccacctgcgggttacggctgttgaggtcgtggggagggactgaaagtgctccccgagtgggccacagcatgtttcttgcatgcaaagctcagcgtgcatgtgaacacacgcacacgtgcaaacaggagcattcacctctgtccctggccaatcagcttcagcctgcccacctcagccgcattcgcccatcatccacaatggccggctga

SEQ ID NO: 138384 - DNA, 3453 bp, Homo sapiens
atggtgcgcgagggaaaaatcagtggctatatgtcgattcgtacccgggcgacggatgaagagatcgcggcggtggagccgctgtacaaagcgttgaacgccggacgtaccagtaagcgtattcataaaggcctggtggtgcgtacaggctggctgggtaaactgccttcattaccgcttcgctggcgggcgctgtggagtgatgaccctgatgtttatcttgctggcggccatgctttggtttgttgctgccccggtggtgacgtatatcctctgtgcgttagtggtattgttggcaagcgcctgttcttgaagtggcagattgtgcgcccgatagaaaatgttgcccatcaggcactgaaggtggcgaccggagaacggcaacttggcctgatgtgccgttggctaattaacgatgtctcaagccaggtgtccagtgtcagaaatggcagtgagacgctggcgaaaggcaccgatgaactgaacgaacatacccagcagacagttgataacgttcagcaaacggtggcgaccatgaaccaaatggcggcgtcggtgaaacagaactctgccacggcgtcggctgccgataaactgtcaatcactgccagtaatgcggcagtgcagggtggggaggcgatgaccacggtgatcaagacaatggacgatatcgccgacagtacccagcgcattggcaccattacttcgctgattaacgatattgcgtttcagaccaatattctggccctgaatgcggcggtggaagcggcgcgtgccggcgaacagggcaaaggttttgcagtggtggcaggggaagtgcgtcatttagccagccgcagcgctaatgctgccaacgatattcgcaagctgattgatgccagtgctgataaggtgcaatccggttcgcagcaggtgaaaaacgtcacccagttgatcgcccagattagccattcaacgctggaacaggccgatgggctttccagcctgacccgtgcagtggatgagcttaacctgatcacccagaaaaatgccgagctggtggaagagagtgcgcaggtgtcggcgatggtgaaacaccgcgccagccgactggaagacgcggtgacgggaattccttcacgacaacctgccccaataatacccaattctgacagttacgttataaattgtgtgagaaatgcggaattcccctcaacgacctactccgttggaggtagccacggacgtcccagcgccgatccctgtaacgagatagagccgatacgataccgtagagatttcaaggctacgcggccaaacgagaagtgggttaccgatgttactgaatttgcagtcaatgggcgcaagctgtatttgtctccagtaatagatctcttcaacaacgaagttatttcttacagcctttcggaaagaccagtgatgaacatggttgagaatatgctcgatcaggcattcaaaaagcttaatcctcacgagcatcctgttctgcactctgaccagggatggcagtatcgtatgagaagatatcaaaatatccttaaagaacatggtattaaacaaagcatgtccagaaaaggcaattgtctggataatgctgtggtggagtgtttctttggaaccttaaagtcggagtgtttttatcttgatgagttcagtaatataagcgaactgaaggatgctgttacggaatatattgaatactacaacagcagaagaattagcctgaaattaaaaggtctgactccaattgaatatcggaatcagacctatatgcctcgtgttaactgtccactttttggggctccgtcccagcggcgtccgtcggcctcgccgccggcatcaccttgcatgcatctggcgatcagctcctggcgggcgctgattggcttttcaattggcggatcgctggggttgattttgggactgattagcgggctatctcgctggggagaacggctgctggatacctcaattcagatgttgcgcaacgtgccgcatctggcgctgatcccgctggtgattttgtggtttggcattgatgaatccgcaaaaatctttctggtggcgctcggtacgctattccccatttatatcaacacctggcatggcatccgtaatatcgatcgcgggttggtggagatggcgcgtagctatggattatccggcataccgctgtttatccatgtgatcctgcctggtgccctgccctcaattatggtcggcgtgcgttttgcgttgggcctgatgtggctgacgctgattgttgccgaaaccatttctgccaattcaggcattggttatctggcgatgaatgcgcgggagtttttgcaaacggacgtggtggtagtcgctattattctttacgccctgctcggccaactggctgacgtcagcgcgcagctgttagagcgcctctggttgcgctggaacccggcttatcatttgaaggaggccacgggcacgccattgttgctcaatgcagtaagcaaacattacgcggaaaatatcgtcctgaaccaactggatttacatattccggcaggtcagtttgtggcggtggtgggccgtcagcggtggtggcaaaagtaccctgctgcgcctgctggcaggtctggaaacgccaaccgcaggcgatgtgttagcgggcaccatcaccgctggtctgaaattcaggaagacacgcgaatgatgtttcaggatgcgcgtctgctaccgtggaaatcggtgattgataacgttgggttaggccttaaaggccagtggcgcgatgccgcacgtcgagcgttggtctgcggactggagaatcgcgcaggggaatggcctgccgcactttctggcgggcagaaacagcgagtggcgctggcaagagcgttgattcatcgaccgggattattgttgcttgatgaaccgctcggggcgctggacgccttaacgcgactcgagatgcaggatttgattgtgtcactttggcaggagcacggctttaccgtactgcttcttaatcaggtcgataacttatttattctgccggtcgctgagtgtatttcgctcggttgggacagcagccgccagacgctggatgcgcaggtcattagcggcgaaggggaagataatgtgctgacgttatcattaccagcctcagccagcgcaccttatgccgttgaacgcatggcggcgcttttgcaacaaacagacgaccccgtgtgtctggtttctggctttgtcagttttgttgaagggcaattgacactggaaccacgggtgatgatgacaaaaacccgtgcctgggcgctggacgcagaaactacgcctgtggcaccgctaccttctgccagcgttttgcctgtgccgtctactgctcatcagttgctgatacgctgccaggcgttacttattcaactgctccataacggctggcgctatcaggaacagagtgctattggtcaggcatag

SEQ ID NO: 138385 - DNA, 2099 bp, Homo sapiens
atgcgctatcgagaaccgccagcaaggggggttgagcccaatgagctccatgcctgcaggtccgaggataaactgtctgaagatgcattcgatgaccagtgcaccggcgctaacccgcgttacccgctgatctccgagctgaaacagattctgctggatacctactacggtcgtgattatgtagaagaccgactctcttttctgctggcggttgccacgctgaacggcgagcgtctggatggtgagatgagtgaaggcaagctggtgatgccattccgccatgtgagtgatgcgtttgagcaaaccagggaaaccatcggcgtgcgcggcaataacgcgatcaacgacatggtgcgtcaacgtctgctgaacccgctttaccagcgagcaggcggaagggaacgcaatttaccgtctgacgccgctcggcatcggcattactgactactacatccgtcagcgcgagttttctacgctgcgtctttctatgcagttgtcgattgtggcgggtgagctcaaacgcgcagcagatgccgccgaagagggcggtgatgaatttcactggcaccgtaatgtctatgcgccactgaaatattcggtagcagaaattttcgacagtatcgacctgacgcaacgtctgatggacgaacagcagcagcaggtgaaggacgatatcgcccagttgctgaacaaagactggcgggcggcgatttccagctgtgaattgttgctttcggaaacttccggaacgctgcgtgaattgcaggatacgctggaagcggcaggcgacaaattgcaggctaatctgttgcgcattcaggatgcgacgatgacccatgacgatctgcatttcgtcgatcgtctggtgttcgatctgcagagcaaactcgatcgtattatcagttggggccagcaatccatcgacttgtggattggctacgaccggcacgtccacaaatttattcgtaccgggatcgatatggataaaaaaccgcgtccctctcgacgctgtctctaagtcatcgaatgactgcggatctccttcgatcagatagagatcttccgggcaatcggtcaagccttccaggtgttcagttacctgtgacagatctggcaccacgatggcgtggcgtgacgggccatacagcgctgagaagtacggcgcatcttccaggctaacgtcgtcataaatttctgacagcagcacaccaccaaaacgctccgccagcgcgttcagacgctgatcttcagagccgccaggctggcttaaacgttcgatctcttcatcgacggcgtttttgcgcgcgcccacttcatcgcgttcaacaatcgcctctcgctcacgctccagcaattgttgcagatattcggtgacgtcctggctggaggtaaactcttcgccgcactgttcgctcaactggtttaggcttgtttggcgttgccagccaaaccggcgcacgctgcatcaaactctgaatgcgagactgcagctgttcctgctcctggcgcagtgccatgcgctcttcacgggcgttagacacgctatcggaaagagaggcaatgcgtgcttccagttcctgatgcagggcttccagttcgtcgatatcaaaattcttgcccgtggcctccttcaaatgataagccgggttccagcgcaaccagaggcgctctaacagctgcgcgctgacgtcagccagtttgccgagcagggcgtaaagaataatagcgactaccaccacgtccgtttgcaaaaactcccgcgcattcatcgccagataaccaatgcctgaattggcagaaatggtttcggcaacaatcagcgtcagccacatcaggcccaacgcaaaacgcacgccgaccataattgagggcagggcaccaggcaggatcacatggataaacagcggtatgccggataatccatagctacgcgccatctccaccaacccgcgatcgatattacggatgccatgccaggtgttgatataaatggggaatagcgtaccgagcgccaccagaaagatttttgcggattcatcaatgccaaaccacaaaatcaccagcgggatcagcgccagatgcggcacgttgcgcaacat

SEQ ID NO: 138386 - DNA, 1338 bp, Homo sapiens
atgaggattgtcatggctgaattactgttaggcgtcaacattgaccatatcgctacgctgcgcaacgcgcgcggtaccgcttacccggatccggtgcaggccgcgtttattgccgagcaggcgggagcggacggcattaccgtgcatttacgtgaagatcgccgtcacattactgaccgcgacgtgcgcatcctgcgtcagacgctggatacccgcatgaatctggagatggcggtgaccgaagagatgctggcgatcgccgttgagacgaagccacatttttgctgcctggtaccggaaaagcgtcaggaagtaacaaccgaaggcggcctggatgtcgcagggcagcgtgacaaaatgcgcgatgcctgcaaacgtctggcagatgccgggattcaggtttctctgtttattgacgccgatgaagagcagatcaaagctgcggcagaggttggcgcaccgtttatcgagatccacaccggttgctatgctgatgccaaaactgacgccgaacaggcgcaagagctggcgcgtatcgccaaagccgcgaccttgccaacagcctggggaccaggggcatccaatcgtgggcttgagaaatcgacggtccaacggttggctgggcttcgcataagtatccgcttgcatcggcaatctgtgcatccggattccgacgttcactcgcagttatgtgagtcggaaacgcttgcgtcagcaatatacggtagcggcgcgcgcggtattcgtaacggtgatgtggtacgcgtctttaacgctcgcggtcaggtgttgtcagggtcagtggtttctgaccgctatgcacccggcgtggcacgaattcacgaaggggcatggtacgatccagataaaggcggcgagcctggtgcgctgtgcaaatacggtaaccccaacgtgttgaccatcgacatcggtacatcgcagctggcgcaggcgaccagtgcgcacactacgctggtggaaattgagaagtacaacggaacagtggagcaggtgacggcgtttaacggccccgtggagatggtggcgcagtgcgaatatgttcccgcgtcgcagttgttctcccgtgagctggacgatgaacaactgacgcaaatcgccagtgcgcagatggctgaatggttttcgttgctgaaaaacgaaccgccgctcactgcggcggtgaacgagctggaaaaccgtattgtccacgctgacagtatcgtgacgatgcccgtctggaactggtccgcggacttttgcggcctgtttctgatgaccgacaaacaagcggcgctgctgtatgcatcggactacaaacaggatcgagcaagagagtaa

SEQ ID NO: 138387 - DNA, 583 bp, Homo sapiens
tcgaagctgtaaaactacaaatggagcccaagatgcagtccaagactaagatctaccgcagacccctggaccggcctgctagcccacgatctgatgttaatgacatcaaaggcacccctcgtgaggaaatctcagctgcacaacccctaccatgccccatttcagcaggaagcaggtagagcggtcgtcagtcaacctccccagcagcacttgggttttcctgttgagagggggtactgagagacaggactagctggatttcctaggccgactaagaatccctaagcctagctgggaaggtgaccgcgtccacctttaaacacggggcttgcaacttagctcacacccgaccaatcagagagctcactaaaatgctaattaagcaaaaacaggaggtaaagaaatagccagtcatctatcgcctgagagcacagcaagagggacaatgatcgggatataaacccaggcattcgagccagcaacggctaccctctttgggtcccctccctttgtatgggagccctgttttcactctattaaatcttgcaactgcaaaaaataattaaaataagtctagatggta

SEQ ID NO: 138388 - DNA, 808 bp, Homo sapiens
aacatattgaaagacaggaccagctggatgtcctaggctgactaagaatccctaagcctagctgggaaggtgactgcatccacctttaaacacagggcttgcaacttagctcacacccgaccaatcaggtagtaaagagagctcactaaaacgctcattaggcaaaaacaggaggtaaagaaatagccaatcatctattgtctgagagcacagcgggagggacaatgaccgggatttaaacccaggcattcgagctggcaacggctaccctctctgggtcacctccctttgtatgggagctctgttttcactctattaaatcttgcaactgcacactcttctggtccgtgtttgttacagcttgagctgagctttcactcgccgtccaccactgctgtttgtcgccgtcacagacccaccgctgacttccacccctccgaatctggcagggtgtctcatgtgctcctgatccagcgaggtgcccattgctgctctggattaggctaaaggcttgccattgttcctgcacagctaagtgcccgggttcatcccaattgagctgaacactagtcgctgggttccacggctctcttctgtgacccaccgcttctaatagagctctaacactcactgcatggcccaaggttccattctttggaatggcgatcgtcagcatctcttcggtcaccgccatctccagattcatgcgggtatccagcgtctgacgcaggatgcgcacgtcgttgtcagtaatgtgacggcgatcttcacgtaaatgctcggtaatgccgtccgctcccgcctgcat

SEQ ID NO: 138389 - DNA, 404 bp, Homo sapiens
gcacagctcgcagcaatctccgcgattcgccccggcgtgcgctgcccagcaggttgacgatgccgcgcgccgggtcattacagaagcaggttatggcgactatttcggtcataacaccggtcacgctatcggcattgaagttcatgaagatccgcgtttttcaccgcgggacaccacgacgctacagccaggcatgttactgaccgtggagccggggatttatttgccagggcaagggggcgtgcgcatcgaagatgttgtgctggttaccccgcaaggcgcagaagtgctctacgccatgccgaaaacagtgttgctcacgggagaggcataatggatttatcgctattaaaagcgttgagcgaggcagatgcgatcgcctcctcggaacaggaagtgcggca

SEQ ID NO: 138390 - DNA, 1306 bp, Homo sapiens
tggaagcgaccggtattcgcaaaattctgcaaattgaactggcggtactgccagacagcgatcgccgtggcatgaccgcttccggcatgattgtgattaaccccccgtggaacctggatcaacagatgaataacgtgttgcctgtggctgcacagcaaactggttccggcaggcaccgggcacgccagcggtatactcggacagtgctctagtcctgcgaacacagtgttgctcacgggagaggcataatggatttatcgctattaaaagcgttgagcgaggcagatgcgatcgcctcctcggaacaggaagtgcggcagatcctgcctggaagaagcggatcgcctgcaaaaagaagtgcgagttgatggtctgggatcggtgctgatccgcctgaatgaatcgacaggtccgaaggtgatgatctgtgcgcatatggacgaagtgggatttatggtgcgcagcatctcccgcgaaggggcgattgatgtgctgccggttggcaacgtacgcatggctgcccgccagctgcagccggtgcgcatcaccacccgtgaagagtgcaaaattccaggcctgcttgacggcgaccggcaggggaatgacgtcagcgccatgcgcgtggacattggtgcgcgctcctatgacgaagtgatgcaggcgggaattcgtcccggcgatcgcgtcacgtttgataccacttttcaggttctccctcaccagcgagtgatggggaaagcctttgatgaccgcctcggttgctatctgctggtgacgcaactgcgcgaactgcacgacgccgaactacctgcggaagtgtggctggtggcaagttccagcgaagaggtgggattacgcggcgggcaaacttcccacccgcgcggtgtcgccggacgtcgccattgtgcttgataccgcctgttgggcgaaaaactttgattatggcgcggctaaccatcgccagattggtaacgggccgatgctggtgttaagcgacaagtcgctgattgcgccgccaaaacttaccgcctgggtcgaaaccgtggcggcagaaattggcgtgccgttgcaggcagatatgttcagcaacggcggcacggacggcggggcggtgcacttaaccggcaccggcgtgcccacagtggtgatggggccagcaacccgccatggacattgcgccgcatcgattgccgattgccgcgacattttgcacatgcagcaacttttatctgcctttattcacaagtcaaatgagttaggcggcgtgctacggttacgcattcagatatgtcgggacggaaatgaa

SEQ ID NO: 138391 - DNA, 1131 bp, Homo sapiens; identical to SEQ ID NO: 120493

SEQ ID NO: 138392 - DNA, 1463 bp, Homo sapiens
  misc_feature (1)...(1463): n = a,t,c or g
aacaccgtagtccgccggactgccagcccattaagacccacggacaccgccctagtccccaaccggtggcaccgccctccccccgatacgacccgcggtttcattaccctccctcttcccgcacgaacacgcagctccgcatcagcaagaaacggtcgcgccatcgataccatatcggcatcgccgcgcgagagaatatcgtcggcaacctgcggatcgttaatccggttggtggttaccagcggcagcgagacgtggcctttcagtttgcgcgtgacccatctaaatgcgccgcgcggcacgggcgtggcaatggtcggaatacgtgcttcatgccagccaatgccggtgttgataatggtcgcgcccgccgcttcaatggcctgcgccagctctaccgtttcggcaaaagtcccgccgtcttcgaccaagtcngtcaaatagttcaatgtttagatgtgccttcatatacatttatatggtttgcagttctcgatcctatttatggtgattccgtatcaacaggtttagtggtagcaattatttctattattgttaacgcaattactattcctattggtctgtatttgctgaatccttcttcaggagcggatggtaagaagaatagtaatctgagcgcattaatttctgcggcaaaggagccagtagtatgggcacctgttctggcaacgatcctggtgttggttggggtaaaaattccggcagcatgggacccaacctttaatctgattgcgaaggctaactcaggggtagcggtattcgctgcggggttgactctggctgcacataaattcgagttcagtgccgaaattgcttataacaccttcctgaagctgattctgatgccactggcactgcttctcgttggtatggcatgtcatttgaacagcgaacatctgcagatgataagcactggcaagcgcattaccgccggcattctccctgaaattaatttattgcgcagccggcgtttaatgtgctacacccgtactggtacaacgtcattggctattacgttaacggaaaccgttacacagaagctgacaggaagcaggccgcgtattagtagttacggtcgcaatctcatgtggccgttggcctggtacaaggacaacggcaaacctcatctttgcagccaattggagaccacccgtattcactcaacagcggcacaaggcagatcttcagggtcgttgcgacggggcctgggcgccagcccattttaccgtcagcacgaccaggcccgttccgaggggcaaattccaattacccgaattccaatggggctggcgcaaagagcgccaaaagggcgggcacagcccaggggcctgacggcacctttcaccaatggggccctggggcagccccagggacggggcacaagcaagcaagcaagccaaacaaggccgcgggccagcgcttggccacacacaccaacctaa

SEQ ID NO: 138393 - DNA, 461 bp, Homo sapiens
cgtgcttcgattcgaagtcaggactttgaggttcaggttatcaacgatgtcataataatgctgcatcagatcgtctacgttcttacaggaagcagccagcggagcgttgttagcaccaccgatagacagcatcacatcgccgccagcctcacgcagagctttgattttgctgtactgagcgtaattctgcataccgtaagcggtaccccatgtcggcagacaggtgttcgcatctttactcaccacaaacgccagcgtgaagtggttgacgttatgattggtgcataaacgctgtttcggccacgctttcttcggcgtacctacgcgctctttggttccggtccagtcaacaaaaacacgccacgggttgctgtcagaaggagaaactttctgcactttactctgagaaatgtagttcacaccgttaaagcgaatcagcgtatcgctggcataaagcgttt

SEQ ID NO: 138394 - DNA, 3480 bp, Homo sapiens
  misc_feature (1)...(3480): n = a,t,c or g
atgcctcgccagaatcaacagaacagcaaaatctggagtggtaatgctaaacttgtcacttggatgaacaaccagcggngtcgatggcgggtagtcaactactactcatatctgtcgacgatatatacgaacagatcacaatacgtacactacactttcatgcaacgctaccgacgactacgcatctaccgcttcgctctccacgaccacaccacgagagacgcctctaacctatgtggcgaagatgacatagctacgcattctcaaccgcgacggcaaagaagaccacttcactatgaaggcggcatcaaggcgttcgttgaatatctgaacaagaacaaacgccgatccacccgaatatcttctacttctccactgaaaaagacggtttggcgtcgaagtggcgttgcagtggaacgatggcttccaggaaaacattactgctttaccaacaacattccgcagcgtgacggcggtactcacctggaggcttcccatcatcatcatgaccgatgcgacgtcgacggctcgcacattcgtacgctgctgttgaccttcttctatcgcagatgccggaaatcgttgaacgcggtcacgtctatatcgctcagccgagctgagcaggaccagcagcagctccatgctgtcagtttcgtcgtttccaaaatgctctgtaaacggaaaaatgtcttcgatttcccccagtggatgccaggagactggtgcttgggcgtgtggaagtcgatggctgagtcacgtggtcactctgtgtggcacgccgggaaatgggggccgaaggaagtggggtactgggaggtgcaccttaaggagggctccaatagtgacaataagctgaatgctgaaaagacgactcagacggagatggttggggcctcattgcctgctggagttggatcatgggacccaagaggagccgcctgcggtgagctgctgacagacagacaggcgcccaatcgggggacccttgactggaagggcccccccaaattggagccaagttcacccggggacccctgtcaaatccggaagaaagaaggggccccggcccacgggtactgtgcttgcaatatcgccttctttcctggcgttcccgtcaccgggttccccgccgttaatctaccaagcctatacgtggaaggggccctaggaagaaggccctctcgtcactgcatgtggaactcgaccattggggcaagacagggagctctcacacgcgggccactgaccaccgtctgcactcccatgctttctgtcgtgagcaccgtgctagggtcccccaattcacagaagcacactgaggctcagaggctgccaggcaacgtgccaagcactccctcaacaggaggggttcaacaccacactggaagaagatcacgtggaatgggggatcttgtggactttcacagtgttatggtaaacacaggcaaagacaagaaggcaagcacaactcccacgtgggaagagggagggtggctggagtcagtgctgacattacctggtgagcacagcgcctcggaggtggactgggatgtcaactttggtccaggtgtcctttctggtattgtagacatagactcgttatacaaaaaagtctacaggaaggaagaagaatgtcagtgtcacaatgatacgcttccaaggaagtggaagttcctctccttccctcctcccccaccgctgctgaatgctgagaaggaagctgacctagcttcagggaactcaccatccaacagtacagaaaaactctactatcagataaatgcccacataaaggggacaagcattcaggcccttcaaaggtcctacacctgtttacatgcaggggacgaacgcagctgtcgtgatgcgagtcgtttctcggcgtacccggttctcagtgcgtgctgcctttcggtgagtgggaagcgctctgctgccctgaggttccctctggcgccctggcccggggaccgcggcccgctgtggaatgtgctgggtaacgccgtctggcgtcgtcttgtgtcccctacagggctggagtaccagaggccgaagcgtcagacctcctgtgacgactcgagagacaaggagagtcggagaagctcaggcccagaggaacctgaggaggcgacaggacgaaacggccagtgggacctcgacgggatccctgggcaggatgagctgcggagcactggggcagtgaagaagtgtgggccacgctcccggaccctggtgacaggagaacagaggctaaggttgtttgcaggaggcaccaccattctgacacattcagcaatgctggtggctgcggctgactccccacagacccccaccctcgcgctgggctccgagggtgcaacagttgcccacatcggccgctccacggtttctacaccaactcgacacagaaagaacgtgcctttagtcaatgacacatcgctatggggccccccttccaacaagctgggcaccagagctgcctccaatgatgtaaacagaagaccacaggagaagagctgcacacaggcagcgagaggctggtggccaacaacaagaggaacctggagaacacaccaggcagctggcaccccccacacccggcccaggcttctgtatgaaggtccagagaaaatgtggtctcccaggacccagcgaggctgggctccagactgtgacccaagttcctctgaaccctggtattctgaggtctgctccgacactcgggctcagcacacaagcacagaagagccatgcccggagctcagctctcatctggcttcttacttgacttgttcccaggtcttggtggccaaatcaggacccagagatccttgtagtggtagaactgctctccgttgggagagcaaactcccctccaaagacccacagctgtccgccaccttgaggcactacaccgcctgtgaaaagaaaggtgacaggttttatggtgctgtttcctgcgtttacaccacagctctttttgcgtctttcctggattccacacagcagccctgtgaggcgctgtcctcctgctgcccggagaggagactgaggccagagatgcggcaaatttcccaaggccacacggccaggcacgacaccagccgcgaacgacgacgcccccaccacaccaacaccaccgagacacgacgcaacaaacacgaacacaacggccgcgccaaccacaaccacaagcgcccccacacggaaccagcagacaaaccagacacaccacaaaaagaaagaaaggaaagcacacaaaaatcaccagacgaaagagaaaaaaacgaaaagatcccgtcccaggctccctcaggagatgcatctgagtaccttgggaggactttaaacaccctccaggctctgcgctgccacgaagaacggcagctttgggaagggagactcattctgcaaggcgccgcagctgtagtccagtgtctgccacaggatgaagtgacgacgagcacggagaacacttga

SEQ ID NO: 138395 - DNA, 1908 bp, Homo sapiens
tcataaccgttcagggatggaccccataaatcgagtcacacggttttttcttctgtttgtttttgtgtgtcggcttgcccttttccgtacctttttgtccttggtggcccggcacacgtgccttccggcatgttgcacatccgcatggtgatatcggggttccccgaatcgataaaccctggaacccctggctttagttcttaacggaccaaatcgttcaccggttcccagtctgtggattttcttgttcttcaatggataactgaccaaagcacaatcgactgcgaggttagcgcaaccagcgtcacgccagtcctgccatccagcatcgcttggcccagccttttgttgcgcaaactctgccagcaacggccagcgttttaatgccgcggccaactgttcgcgttgggaaatatcggcataatcaatatcaggcagtgaaaatgcctgctttaacgccacaatatcattctggaagatatagccaatatggagcttgtctaacgtcgtccagttgtcggaaaggccaattagcgcgccgaggcctatcttatcaatccccgcacgccccagccgatccggcgtttccagccgccagaagaagtcctgttttttgcctttcagatgatggcgggcataagtcgcctcgtgatatgtctcctgataaaccatcacgccatccagaccaagttgctttaactcggcgtattccgtctccgccagcggttgcacttccatctgtagtgaagagaactgttcacgaagggcagggagatgacgacgaaagtaatccatccccactttcgcctgatgttcaccagtgactaacagcagatgttcaaagcccatctcccgtatagcggcactttccctggcaatatccgcttcatccagcgttttgcgcttgatgcgattactcatggaaaatccacagtacgtgcagtcgttagcgcaaagattggaaagataaagcgggacgtagaaactaactgtgttgccaaatcgctgacgggtcagacgctgcgcccgttgggccagttgttccagatagccactggcggcaggcgataacagcgccatcatgtcgtcgcgggttgagttgcgaaggcccatgtggtcttgtgtgcgcggtgggtccgttgtagtgttcgtgtgcgtgtgtcccggtgttggatttttcgcttgattcgaggttggttttgccgtgtgttgtggatttccgttgtgtatcctcgtgccatcctcggtattctttgacgatgtaccctggtatcctggtcgtgttgatggtgccgctcttgtttgggaccgtgtgacggcattgaagttatcccagtcatgacagtcgacgtccatagtgtcactggtattatcatggtaaccaccagtatgttcagtcaatgggcaggtaatgttgtctatgttcgtatgttcggtaagtgtataagtttgttcaagtctggcttcagtaagcttgtcccatgccattatgcggaatgcgtttacgggtttgcgtcgttcggggttattaagcgtcacgggcacgctacgctgtctcgccctatttctgacgataaatcgaacggttgtctggatttggcatgataacggtgttagatcgagtccggtttcactgtacaatcgggctatcgggtaacaggttatcgaagaagttaaatacggcatcaggagtgtgatattccccctctgcaatggcagcgaaagtgacaacggtctggcataacggcttgctaaccactccggtgcatacttaaaggtgtgcgcgccgttggctaacttcgttaactcgcctacccgctggttgttcatccaagtgacaagtttaggcattaccactccagattttgctgttctgttgattctggcgaggcatttttcgcgtcgcat

SEQ ID NO: 138396 - DNA, 2118 bp, Homo sapiens
atgcgccagttcgtcaacatcacacatatgttcggtaatcgccacgatcgcgtgttttttacctttcgcgatacccgctttgatttcgtttaccaggtcttcacggctgaattcaacttccggaaccacaacgaattcacagccaccggcaatggccgcagccaacgtcagatctccacaataacggcccatcacttccaccacggaaatacgctggtgagaagaagaggtgtcacgcagacggtcgatcgcttctacaacggtgctcagcgcagtgaagaaaggggatcctctagagtcacctgcgataaccgctatggttgctcggcggtgtggttggcctcctgcggggcattgctgacgggcgcgctgccgtctgtcagtcatgcggctgctgaaaaccgcccgccaattccgggatcgctggggatgttgtacgactcgaccttgtgcgtaggctgccaggcttgcgtcaccaagtgtcaggatatcaatttccctgaacgtaacccgcaaggggaacagacctggtcgaacaacgacaaactgtcgccgtataccaataacatcattcaggtgtggaccagcggcacaggggtcaacaaagaccaggaggagaacggctacgcgtacattaagaaacagtgtatgcactgcgtcgatccgaactgtgtctctgtgtgcccggtctctgcactgaaaaaagatccgaaaaccggcattgtccattacgacaaagatgtgtgcaccggctgccgttactgcatggtcgcctgtccgtacaacgtgccgaagtacgactacaacaacccgtttggtgcgctgcataagtgcgagctgtgcaaccagaaaggtgtggaacgtctcgataaaggcggtctacctggctgcgtagaagtgtgcccggcgggcgcggtgaattacgggacgcgtgaaaaactgagggggaagggaaaaaggctgggccgaaaccgggaggaaaacccaatccggttaagcggaacgggaaataccggaggggcaaaatccgagttggggaagacgggccagccgcgtggcagagcgcacaaacactgcgagagaaggaatcagggcgcaaataacccgaggagcggaggggagagggcccccaaggagggcacgacacaacaaagcaagtggctctggaaaaaaatcatcgccctgtacgagcaggccgccgaatgtgacggcgaggtggttcgtcccaaagaaccgaactggacagcctgggcaaacgaaattcgcctgatgtgtgtgcaggatggtcgtactcacaaacaaatctgcgagatgtacagccgcgtcagccgcgatccgttctggtgccgtaacgtgctcagcccgtcgaagctgcgggaaaaatgggatgagctttccctgcgcttatcgccgtccgtcagcacgtacacagaaaaacgcgaagacccgtacttcaaagccagttacgacaatgtggactacagccagatcccggcaggattcaggggacctgtgcgcaatttctatgtcggcactaacgacccgcgggtgattttgtgcctgacccgccaggcggaagaactggagtccaggggcttataccgtcgtgctgcaacggtgtggatggcggcattccgtgaaagccactcccagccagaacgaaacaattttctggcgcgtcgtgaacggtgtttacggaaaagcagacggcgactgagccgagaagcgacgcaaccccaccacgagacgaacgcaacagagagacacagagacaccaagcaagaagccatgacgagcagagacgagaacaacaacgagagcgcagacatcagcacaacagagactgctggcggagtgtcattcatccgtttctcaccgatgaacaggtcgccgctggtgatcgtctcaagcccggcaatcatgcgcagtaaagtcgatttaccgcagccagacggtccgacaaacaccacgaattcaccttcatggatatcgagattgatatctttcgataccacgacctcgccccaggctttcgttacattttgcagctgtacgctcgccatgcccttctccctttgtaacaacctgtcatcgacagcaacattcatgatgggctga

SEQ ID NO: 138397 - DNA, 891 bp, Homo sapiens
atggtgtggctggcaaacgttgccaatgatactgctgattgcctcgctgggtggcattggttacgccatcgtttcacaacttctgcaacgccggactataaccactatcgcattcggcccgtggcttgcgctcggcagcatgataaacctgggcgtacagctaccgctgcggaattgagtcagtacggtaacccgactacctgtgaaattgataacggcggcgtcattgttgcggatggtttccaggccagcaaagcgtacagcgcggacagcatcgtagattataacgatgcacattataaaacttctgtcgatcaagacgcatggggctttgtcccgggcggcgataacccgtggaagaaatacgaaccggcgaaagcatgtgttgccctgtttgtgttggcgatcccggcgtttattctgattaacagtaacgtcatcggcctgatttttgccgggttactgatgctggcggtgatccttaactgctttacgggcgttatggcttctaccttgccagcgatgttcccgacgcatatccgttacagcgcgctggcggcggcatttaatatttcggtgctggttgccggtctgacgccaacgctggcggcctggctggtcgaaagctcgcagaatctgatgatgcctgcctattacctgatggtagtggcggtggttggtttaatcaccggcgtaaccatgaaagagacggcaaatcgtccgttgaaaggtgcgacaccggcggcgtcagatatacaggaagcgaaggaaattctcgtcgagcattacgataatatcgagcagaaaatcgatgatattgaccacgagattgccgatttgcaggcgaaacgtacccgcctggtgcagcaacatccgcgaattgatgaataa

SEQ ID NO: 138398 - DNA, 1650 bp, Homo sapiens
ctaacggcagcaacgttccagcgcgaagtaatactcaacagtctggttctgcaacgcaatgggatattccagaaggctaaggaaatcgaaacaatcaccagcctgaatggcctcaagaaaagcctccctttcttcctcatccattccttcgctgtcattaaatgaatgccagttcaaacgctctgccagcaaagaagcacaatttaatgaaagatatcgcgcttctatggcgattgcacacagcggccagcgtaattgatcgacatcctccatgttccaggtatttaattgctgaataaatttctgccaggcggaaggctgaaaacgatcactttctgaatccagtaatgtcctgaatgcacgtagtatttcatgttcagcggcagcatctttttcttcatcatctgcttcctcgacaggatttaccgccagtcgcagggcctcttcataggcctggcgtaatgctttaaacccttgcggatcggtttcgggatgacacaacggtaagcgagcaagataagcctggcggataatgtctatttgcgtcgtgctttcaatttcgaggatttgccaacatgttttcataggtcgctcacatcgttttggtctgtctctggttcgtgcactgcaggcgaacaaggcgttgtcgaatgtgcctacgttgaaggcgacggtcagtacgcccgtttcttctctcaaccgctgctgcttttgcttccagcagcttgagcgtatcgggctaaacctttttcgacacgcagctcgtccggcaacactgatggtggaaacgcgggcattggtcgcttcggcgacgtcaccataatcgatgctattcaccaccatggcactgtagatgatccggtccgcggcgtctttcaccacaatggtcggcgacatcgacgacagcgggcgtttgttcggcccgacggcgttggcatcaccgcccaccagcccgtaaacgttcggtacgcccggtttggcggagaaatcatccatctggttattaagcagaataccgctctcgcccgcgacaatgcccgtaccgaaggtggtgttcagcgtataggtcaccgccaccgcgttaccatctttatccaccactgagtaatgggtagtttgattactctcataaggcgcaagcttgccggggcgaatttcgctggatggcttcgctttattgatatcaatttgatcggcaatagatttggcataggctttattggtcagcggctgccacggtactttgacaaaatccgggtcggccagattttccgagcggtccgcgtaggcgtatttctccggttttggccctggattggatcggctctgcgggtcggatgcgccgtacaactcaccgtccggcccaaccataatgctttgtgtactgcccatcgcctctttcagcgccactttctgaccgatgaacaggtcgccgctggtgatcgtctcaagcccggcaatcatgcgcagtaaagtcgatttaccgcagccagacggtccgacaaacaccacgaattcaccttcatggatatcgagattgatatctttcgataccacgacctcgccccaggctttcgttacattttgcagctgtacgctcgccatgcccttctccctttgtaacaacctgtcatcgacagcaacattcat

SEQ ID NO: 138399 - DNA, 1992 bp, Homo sapiens
  misc_feature (1)...(1992): n = a,t,c or g
atgcatacctccgagttgctgaaacacatttatgacatcaacttgtcatatttactacttgcacagcgtttgattgttcacgacaaagcgttcgctatgcttcgtctcggcataaatgaagaaatggcgacaacgtttagcggcactgactctttccgcaaatggtttaacctgggcagaaaccaatcaacctggctttgccactttccgttttggacaggccccagaacaattactccagttgacgccaggattcccgcgtttgacaacttccaccaaattccttaccgcatcatgccttttataacgcttgcgtcgaagatggtaaacaccctcggtcaaggggagatttctgcctcgcctctattgcaaggatctccgagcaaggtctcggattcaaaggggctcttaagggggattccccaggttcaacgtttagcgcagatggaaatcaacccgggcggcacattagaactgggtgtcgactacggtcgtgccaacttgcgtgataactatcgtctggttgatggcgcatcgaaagacggctggttattcactgctgaacatactcagagtgtcctgaagggctttaacaagtttgttgttcagtacgctactgactcgatgacctcgcagggtaaagggctgtcgcagggttctggcgttgcatttgataacgaaaaatttgcctacaatatcaacaacaacggtcacatgctgcgtatcctcgaccacggtgcgatctccatgggcgacaactgggacatgatgtacgtgggtatgtaccaggatatcaactgggataacgacaacggcaccaagtggtggaccgtcggtattcgcccgatgtacaagtggacgccaatcatgagcaccgtgatggaaatcggctacgacaacgtcgaatcccagcgcaccggcgacaagaacaatcagtacaaaattaccctcgcacaacaatggcaggctggcgacacnatctggtcacgcccggctattcgtgtcttcgcaacctacgccaagtgggatgagaaatggggttacgactacaccggtaacgctgataacaacgcgaacttcggcaaagcgttcctgctgatttcaacggcggcacttcggtcgtggcgacacgacgagtggacttcgcaaaacctgggccggataaggcgttcacgccgcatccggcaatcggtgcacgactgcctgatgcgacgcttgcgcgtcttatcaggcctacagccgttgccgaacgtaggctggataagacgtttacgccgcatccggcatttcgttatggcaaaggatattcagcttcttaacgtttcatatgatccaacgcgcgaattgtacgaacagtacaacaaggcattcagcgcccactggaaacagcaaactggtgataacgtggtgattcgtcagtcacacggtggctcaggtaaacaagcgacgtcggtaatcaacggtattgaagctgatgttgtcacgctggctctggcctatgacgtggacgcaattgcggaacgcgggcggattgataaagagtggatcaaacgtctgccggataactccgcaccgtacacttccaccattgttttcctggtacgtaagggaaatccgaagcagatccatgactggaacgatctgattaaaccgggtgtttcggtgatcacgcctaatccgaaaagctctggtggcgcgcgctggaactacctggcagcctggggctacgcgctgcatcacaacaacaacgatcaggcaaaagcacaggattttgttcgggcactgtataaaaacgtcgaagttctggattctggcgcgcgtggctccactaacacttttgtcgagcgcggaattggcgatgtactgattgcctgggaaaacgaagctctgctggcagcgaatgaactggggaaagataaattcgaaatcgtcacgccgagtgagctgaatgctgtccagggagggggcaagagagatcaagggaccagatag

SEQ ID NO: 138400 - DNA, 1542 bp, Homo sapiens
tcagcagtattcagaataatcttcctccacgtagttgcagggaaccagccaaccggtgattttcgtgtttcgtaacgggtgcccagtggcgggggtggaaccgcaccggtatgcctcggtccaaagagggtataagatgaacacggggacccgctcgttcatcatgactaaccggcagaccagcggtccgacggtaactaaccaggtgacagtttgcgccgctttaatgcgatctctgctgtttcgccatcgcggatctctccgatcatgatgacgtaggatccaccccgacatggtaagtcgcaatacgaaatgagacggcgtttcctgccagttcgacagtgaattcccgtcctgcggcaggcgatgttccgcaatatccaggtttcccagcactttaatctggcggttaatgcgactccggcatccggtgaaacatccggtaaggatgcaatacgccgtcgatacgcaagcggatgcggtaggcattgtccgtggttcgatatgaatatcagacgcgcgttgttccagcgcagattgtaacttcgagttagcaactctgctttgggctgatgcttctcctgaacagctacggcaatgtctgttgtgtgcgactggcgtgaccttcctttgttggggcgtacgcgggttctccctcgttgggtgtacgaaatgcatcgttccgtaccctggaggtgctcgctccgcgattgccccctttctggctccgcggaccctttgcgccggggtggcggggatctgcggccctggggccacgcggccttcccgcgcagcgccctctatattagcgccccgagcgcaggtagtaggtcggtaaccaatccagtacatgaagcacggcatcaatgccgactgtaaacgatgatgcggcgtctgatatcgcgccagccagtattgccgctgcagaaatgtttctccgtactgatcagcaatccgtggcgtgttttcggtggaactggaggcggtaaccaagagcgcgtaggtacgccgaagaaagcgtggccgaaacacgtttatgcccgtagtgtcgactttacgctgaatacgatcccggatctggctgcgctggtttgtctttgtaatggtatcagcgataaaaaaattcgtggacatgcagctgcctgcctgtttgatcgactctagaggatccctcagcataatattgcgaacagacatgagtttctcctcagactggtaaaatgcccgcgcggtaagcagcacgtggactttatcttttgcttcttcagatggccaggcgcggtagatgccgacggagagttccggagcaaagttaggctggcggttatcgcaccgtcgccgcccagcagcatcgtattcagcaaagatcatcgtaaccgcagaataccgaaaacgacgggcgtaccgacttaacgtgttgatcatcgtacgcaagtgaccaacgctgtcgatggtgtctttaagtttcagtataaacgcatacataggcatagttgtgatcatgggaatgtgttgtaagctcctattaactctaatacccat

SEQ ID NO: 138401 - DNA, 3663 bp, Homo sapiens
atgattactctgcgcaaacttcctctggcggttgccgtcgcagcgggcgtaatgtctgctcaggcaatggctgttgatttccacggctatgcacgttccggtattggttggacaggtagcggcggtgaacaacagtgtttccagactaccggtgctcaaagtaaataccgtcttggcaacgaatgtgaaacttatgctgaattaaaattgggtcaggaagtgtggaaagagggcgataagagcttctatttcgacactaacgtggcctattccgtcgcacaacagaatgactgggaagctaccgatccggccttccgtgaagcaaacgtgcagggtaaaaacctgatcgaatggctgccaggctccaccatctgggcaggtaagcgcttctaccaacgtcatgacgttcatatgatcgacttctactactgggatatttctggtcctggtgccggtctggaaaacatcgatgttggcttcggtaaactctctctggcagcaacccgctcctctgaagctggtggttcttcctctttcgccagcaaccatatttatgactattccacgaaaacgcgaacgacgtttcgatgtgcgtttagcgcgatgggattcacccggggggcctttgaccgggttccctccgtcggcacttgcttgtacctcgggggtgagcggccaaaagggggttcccggaccacccgaggcgcaggttacctttgcgaccccaaaaaaacccggaaaggaggcgtgctcgtctatacaagtcctcaaccgggggtaccggccaccgacattttcatacaacacgggcgtcaggagatccgcccgcgactattaccctcgacgccaaaggtcaatctcgacaaactcaccgtcgcggcgctggaagggaaaactgaactcaaggcgttgctcgactggcaacaggccattagttggcgcggtgagctaacgcttaacggcattaacaccgccaaagagttcccggactggccgtcgaaactcaatggcttgattaaaacccgcggtagcctgtacggcggcacctggcagatggacgtgccggagttgaagctgaccggtaacgttaaacagaacaaagtgaacgttgacggcacgctgaaaggcaacagttatatgcagtggatgatcccagggcttcatctggaactcgggccaaacagtgccgaagtgaaaggcgagctgggggtaaaagatctcaatcttgatgccaccatcaacgcgccggggctggataacgcgctgccggggcttggcggtacagcgaaagggctggtgaaagtacgcggcacggtggaagcgccacaactactggcagatatcaccgcgcgcggcctgcgctggcaggaactttccgtggcgcaggttcgcgtggaaggcgatatcaaatccaccgatcagatcgccgggaaactcgacgtacgcgttgagcaaatttcgcagccggatgtaaatatcaacctcgtcaccctgaatgccaaaggcagcgaaaagcagcacgagctacagttgcggattcagggggagcctctggacgatcggatcctggcactgcaatcacaggggatcttcaccgatcctcagtcatatattacttacgcgaccgcgctggcttatcgtggcgaaaaagcacgcctccagcattatctcattgaaaataagccactatttaccacggacgcacaagagaaaagttggctctatctgttatctaaatacagcgctaaccccgttcaggcgttggcgaattatacggtacagtttgccgacaaccgccagtatgttgttggcgcgacgctaccggtgctgttaaaagaaggtcagtacgacgcagcgcaaaaactgctcgccaccctccccgccaatgaaatgcttgaggagcgttatgctgtcagcgtggcgacccgtaacaaggctgaagctctgcgtctggcacgattgctgtatcagcaagaaccggcaaatcttacccgcctggatcaactaacctggcaactgatgcagaacgagcagtcacgcgaagctgccgatttattgctgcaacgctatcctttccagggcgatgcgcgtgtcagccagactttaatggcgcgactggcgtctctgctggaaagtcatccttacctggcaacgccggcgaagttcgcttgctggggcgatatgtcgccttcctacgatgccgccgcctggaaccgtctggcaaagtgttatcgggacacgctacccggtgtggcgttgtatgcatggcttcaggccgaacaacgacaaccgagcgcctggcaacatcgtgcggtagcctatcaggcgtatcaggttgaggactacgccaccgcactggcggcctggcagaaaatcagtcttcacgacatgagcaatgaggatctgcttgctgctgccaataccgcccaggcggcaggaaatggtgcggctcgcgatcgctggctacaacaggcagaaaaacgtggactgggaagcaatgccctctactggtggctgcatgcgcaacgttacattcctggtcagccggaactcgcactgaacgatctcacgcgctcaatcaatattgcgccttctgccaacgcttacgttgcgcgccggtgtacagtcaccggaagtgactcatacccgccaggtatgcgcatgctggagcgttttgtgcgtgatatctgccagtgtgaagccctgtggacgccagcgaaaattatcgacgatgctgtagctcgcatccgcgagcaggtaggcgacgataaagtcatcctcggcctctctggtggtgtggattcctccgtaaccgcaatgctgctgcaccgcgctatcggtaaaaacctgacttgcgtattcgtcgacaacggcctgctgcgcctcaacgaagcagagcaggttctggatatgtttggcgatcactttggtcttaacattgttcacgtaccggcagaagatcgcttcctgtcagcgctggctggcgaaaacgatccggaagcaaaacgtaaaatcatcggtcgcgttttcgttgaagtattcgatgaagaagcgctgaaactggaagacgtgaagtggctggcgcagggcaccatctaccctgacgttatcgaatctgcggcgtctgcaaccggtaaagcacacgtcatcaaatctcaccacaacgtgggcggcctgccgaaagagatgaagatgggcctggttgaaccgctgaaagagctgttcaaagacgaagtgcgtaagattggtctggagctgggcctgccgtacgacatgctgtaccgtcacccgttcccgggaccaggccttggcgttcgtgttctgggtgaagtgaagaaagagtactgtgacctgctgcgccgtgctgacgccatcttcattgaagaactgcgtaaagcggacctgtacgacaaagtcagccaggcgttcactgtgttcctgccggtacgttccgttggcgtaatgggcgatggtcgtaagtatgactgggttgtctctctgcgtgctgtcgaaaccatcgactttatgaccgcacactgggcgcatctgccgtacgatttcctcggtcgcgtttccaaccgcattatcaatgaagtgaacggtatttcccgcgtggtgtatgacatcagcggcaagccgccagctaccattgagtgggaatga

SEQ ID NO: 138402 - DNA, 3402 bp, Homo sapiens
tcatagtattccgccaagccacaggtctgctttggcgaagaccatctccagcatgccgagacgcgtcgagaagaatggccaatcgcggcacatagcctccagctcgctctgtttgccgtcttcgaccactttttgcagcgccgtacctgcacccagccaggcggggagcatcagacggttttgcgtccaggcgaagatccacggaatggcgcgtagtgactcgacgccgccggttgggcgacgtttcgccggacgtgaacccaacggcagtttgcccagttcttgttccggcgtagcggagcggaagtaaggcacaaaatctttgttttcacgtacgtagccgcggtagacatcgcaggagatgactgacagttcatccataatgcgacgccagctctctttcggctccggcggtggcagcaggttggcttccagaatcgccccggtataaagcgacaggctgctgacggtgatttctggcagaccatatttaaagcggatcatctcgccctgttcggttacgcgcaggcccctttcaggcttcgtgaggtcgatgttgttctggttggtgccccaagaattggtaccagtagtcgagatcttcatgttagttaagatgtaggggatatctagatgaggtccgggatgaatttctggtagccttccatagtttcttcgagtgagaccacacggcatggcatccgcaatctccctccgatcaaactttattacaacactcccttcgcaccggtcgagattagcaattacatgacggatgtaggggaagtgagcaccctggtatgagcctcttttgcgacgactagacccgtcacgaagttggcaatgagagtcgctatcttcgactccgtggtaggtcagaggtattggggtagtgccgcaagtcccgaacactccagatttgctgttctgtggattctggcgagcatttttcgcgtcgcatagcgtcattgagagttcaagcgactgtaaaatcttaaaaaatgtcgtgagcgtggtattgtcagggttgttttcgaaattggaaatcgtcgcctgcttaataccaatttttttcgccagctcgctctgcgtccagccattttgctggcgaaccagtttcattgcattcgccaattgcgttgggctatagatcttctgaaagctcatcatgtcatacgtccacagcaagtttatccgttcaccgagattacgcgcaccttcacggcctacggtttgaccattcatcttcacggcgtagactttgctattgttgatccagttcgcttcaatgtaaggctggaactcacgctgtttaccatcgtcacgctggtgatggctgttcaggtaggttttcaccccaagtcgcgtttgcacatttccgtcgccttccgtttcaatgcgcgttccgtctttccggtattgctgccgtatgacccacaggcgattgattggccgtcgcgcctgctgttcgcccgggaatgggcggccaaggccaagcgttggggtcccttgggggggcccaatcctccggtaggtccaggccctggtaatgggggtttccgggccgaagtagttgtgtcgtcgcggcgtgatggcagcgacccgcgtgtcgctcggttcggtaatggcctgcctgctgctggtgctgacattagggggctttccggtgcgggccatgtgcgggtgtttgtcgatcatctggcaggcgcggtgatcccttcgctgctggtgctggcaacgctggatatcggccatatgatgctgcacgtcgcggggatgtctttccttggcctcggtgtgaccgcgccgaccgccgaatggggcgtgatgattaacgacgcgcgccagtatatctggacccagccgctgcaaatgttctggccggggctggcgctgtttatcagcgtgatggcctttaacctggtgggtgacgcactgcgcgatcatctggaccctcatctggtgacggagcacgcacactaatgccgcaacagattgaactacgtaatatcgcgctacaggccgcgcagccgctggtacacggtgtatcgttaaccctgcaacgcgggcgcgtgctggcgttagtcggcggtagcggcagcgggaaatcattaaccgcgtgcctatagaagcggtggggctggaaaacgccgcgcgcgtgctgaagctgtacccgttcgagatgagcggcggcatgttgcagcgcatgatgattgcgatggcggtgctgtgtgaatcaccgttatcatcgccgatgaaccgaccaccgactaacgtgtaggaccgagctgatgaaaatcggctcaatcggcaaacgctgcatttggtgcgatagctgtagcggctgatacgcgctgtaccggggtcgataacgtatttaatccccggtacggtcagcgacgtttccgcgacgttggtcgccagcacaatgcgccgtccgctgtgcgactggaataccctattttgttcgctgttcgaaagccgcgcataaagcggcaagatttcggtatggcgtaagttcagcttgttcagcgcatcggcggtatcgcggatttcccgctcgccgctcataaagatcagaatgtcgccatggctttcctgactcagttcgtctacggcgtcaaaaatcgcctgcaactgatcgcgctcggtgtcatcggcttcttcaacaatcgggcgatagcgcacttccaccggataggtccgaccggagacttcaataatcggcgcattattaaagtggcgcgaaaagcgttccgggtcgatagtcgcggaagtgataatgatttttaggtcaggacgccgcggcagcaactctttcaaatagccgagcaaaaaatcgatattcaggctgcgttcgtgcgcttcgtcaataatgatagtgtcgtactgcatcagcaggcggtcttgctggatctccgccagcaggataccgtcggtcatcagcttgaccatcgtgttatcacttacgtgatcgctgaaacgcactttgtaaccgatgcaaccgcccggctccgttttcagctcttccgcaatacggttcgccactgttcttgccgccagacgacgcggctgggtatggccgatcagtcctttaatcccgcgccccagctccatacagattttcggtaactgagtcgttttaccagaacccgtttccccggcgacgatcaccacctggtgatcacgaatcgcttcgagaatgtcctgttttttctgactaaccggtaaattgtcaggataagtaatttccggtcgtgccgcttcacgcagcaggactttccctgccgcctggtcaatctctttcgccatctcctggaaaatggcctgttgtgcatcaggatttttaaccttcttcacgccgtgcagacggcgagaaaaacgcagtctgtcacgcagcat

SEQ ID NO: 138403 - DNA, 1431 bp, Homo sapiens
tcatgtcggataagccgtaattacgcgcctttgacgtgagctgtatacccgcgttcgcctgcagctcgaacggacacgagcggcaagcgagtccagctgagtcgaggtaagtcgtgaacgagctgctccaagtacgcaaaacgcgcctcgtgcccgcgcggcgtatggaccgatgtcatgtaactgcacgtctgtgcactgagcagcgtgttgccgcgagaccgcagccgaacaccacgctgtaggcatgatcaggtctggtctcagaagctgacaatggcttccaggctcggctgcgcgcgcgttccgacggactgccacggtttcaggtgcgcacgcacttcgggcaggatgcgttttgcatcgcttatcgtcggcaataccgatcgggatgacgtccacggcggccagcgcatcggcgaacgagagttccagcaccacaatccgttgtggcgttttttcgagtgtaaacgtgccgtgttcgtcctgaaccgtggcggcaaaggcgtggctgatcaccagcagcaggcctgcagaaagtaaacggatagatgccgacatgatcacattccagcacagcaccccatagcccgctaccgcgccgtaaaccgcatcatgtaaatcaattaatccatactgcgcattaaataccaagccaagccagagcagcggtaaggtgagtttgtcggccaggagctgagtgcgaaaatcaataacactgagcgtgagtacgaaacagaaatagagaaagagtgcgccagtcacgatgggcgtgaaaggtgccagggcgcaggcgatagcagcagcaacacaaagtatcaggggcactgtatcatgccaggcatattttttttgcctgaaatgaaccaatacctggcgaaacgttaacgccgttttatcctccaacggcgagaggtgataggcgatggcattaacaaaataatctccccttattggatgagagtcaacttgacgctttgctggataagctctctggttatgcccaaccggaagagcgcattctgatcctggcgcgttaccatcacatgaggcctgccagcctggaacaaagcggcaacacgctggccgaagttgcaaatcgactttatgaccattcatgccagcaaagggcaacaggcggattacgtcatcatcgttggcttgcaggagggaagtgatggttttccggttcagacggtccgcgagataacgctgataatcggggatcagaatatcgaccgcgtcgttgaaatgcggcgactggattatgaagtctgccgttgccacgttggtggcgaccgcgaatgttccatacccgtcgccagacgcagcaaggatatttctccgctgctctattgccgtaatcgcctccacgcgttgttgatgacgaccgccttcgtactgtgcgcccagccacgcatccacaatcat

SEQ ID NO: 138404 - DNA, 699 bp, Homo sapiens
atgtacaagtggacgccaatcatgagcaccgtgatggaaatcggctacgacaacgtcgaatcccagcgcaccggcgacaagaacaatcagtgcagaattaccctcgcgcaacaatggcaggctggcgacagcatctggtcacgcccggctattcgtgtcttcgcaacctacgccaagtgggatgagaaatggggttacgactacaccggtaacgctgataacaacgcgaacttcggcaaagccgttcctgctgatttcaacggcggcagcttctgtcgtggcgacagcgacgagtggaccttcggcctacaacggctgtcaaatgtaggccggataaggcgtttacgccgcatccggcatgaccaacgatcacgttatcagtcatttcaggctggatggctccagcctcgcattagcaaagatgagattatttcgcctgtggtgcagttttgctggtggattgaacacaaagaaaaacacttcatcgcgcgaggcaatggcggcaatactatcaatatcgcgtccatgctctccttccagggcgggatccgagtgccttcttataccgcatcaaaaagcggcgtgatgggtgtgacgcgattgatggcgaacgaatgggctaaacacaacattaatgttaatgcgatagccccgggttacatggcgaccaacaatactcaacaactacggggcagatga

SEQ ID NO: 138405 - DNA, 738 bp, Homo sapiens
atgttcacaccggactatcgcagcgtttcacgcgtacttggctctggaccaggctacgcgagccggatgaaccaaccagatgttatgccagacatacccggtaagcgcttctaccaacgtcatgacgttcatatgatcgacttctactactgggatatttctggtcctggtgccggtctggaaaacatcgatgttggcttcggtaaactctctctggcagcaacccgctcctctgaagctggtggttcttcctctttcgccagcaacaatatttatgactataccaacgaaaccgcgaacgacgttttcgatgtgcgtttagcgcagatggaaatcaacccgggcggcacattagaactgggtgtcgactacggtcgtgccaacttgcgtgataactatcgtctgggtaaagggctgtcgcagggttctggcgttgcatttgataacgaaaaatttgcctacaatatcaacaacaacggtcacatgctgcgtatactcgaccacggtgcgatctccatgggcgacaactgggacatgatgtacgtgggtatgtaccaggatatccactgggataacgaccacgggcaccaagttggtggacccgcgggtattcgccccgatgttcaagtggacgcccatcatgaacaccgggatgaaattcggtacgaaaagttgaatcccagggcccgggacaaaacattcgtacaatttacctcgcaaaaccctgacagatgttga

SEQ ID NO: 138406 - DNA, 3417 bp, Homo sapiens
atgattgttcaaccactggccattatcggtagccattttgacagcattgctgcgggtaatctggcgcgtccgattgcggtatatggtcgtaatgagatcaccgccatttttgccagtctgaagaccatgcagcaggctttgcgtgggacggtaagtgatgtgcgtaagggaagccaggagatgcacattggtatcgcggagattgtcgcaggcaataacgatctctcaagtcgtaccgaacagcaggcggcatcgctggcacaaacggccgccagtatggagcaattaaccgccacggtagggcaaaacgccgataacgcacgacaggcgtcggaactggcaaaaaatgccgcgacaacggcgcaggcgggcggtgttcaggtcagtaccatgactcacaccatgcaggagatcgccaccagctcgcaaaaaattggcgacattatcagcgttatcgacggaattgctttccagaccaatattctggccctgaatgcggcagtggaagcggctcgcgccggagagcaggggcgtggttttgcggtagtggcaggtgaagtgcgcaatcttgccagccgtagcgcgcaggcagcaaaagagatcaaagggctgatcgaagagtcagtcaatcgtgtccagcagggttcgaaactggtgaataacgccgccgcgaccatgatcgatattgtcagttcggtgacccgcgtgaacgacattatgggagaaattgcctctgcgtcggaagaacaacagcgggggattgagcaggttgcacaggctgtcagccagatggatcaggtgactcagcagaacgcctcgctggtagaagaagcggcggtggcaacggaacaactggcgaatcaggccgaccatctttcgtcgcgtgtggcggtatttacccttgaagaacatgaagtagcacgacatgagtcggtgcagttacaaattgcgccagtggctggcgatgactcatcactgcgaattattaaaacagctgataacctgcctgaaaataaagagtcgctgttctacattaatgttcgtgccattccagcaaagaaaaaatcagatgatgttaatgctaacgagttgacgctggtatttaaaacacggatcaaaatgttttatcgccccgcacacctgaagggacggcgcttctaccaacgtcatgacgttcatatgatcgacttctactactgggatatttctggtcctggtgccggtctggaaaacatcgatgttggcttcggtaaactctctctggcagcaacccgctcctctgaagctggtggttcttcctctttcgccagcaacaatatttatgactataccaacgaaaccgcgaacgacgttttcgattggctggaccgtcggtattcgcccgatgtacaagtggacgccaatcatgagcaccgtgatggaaatcggctacgacaacgtcgaatcccagcgcaccggcgacaagaacaatcagtacaaaattaccctcgcacaacaatggcaggctgcgcgacagcatctaggtcacgcccggctattcgtgtcttcgcaacctacgccaagtgggatgagaaatggggttacgactacaccggtaacgctgataacaacgcgaacttcggcaaagccgttcctgctgatttcaacggcggcagcttcggtcgtggcgacagcgacgagtggaccttcggtgcccatttccagaaatggggcgcgttttgtgtggcgccaacagtattttggcgcccctttgttgaggccacacagggtggagagttctcttcgcgaaaaaacctttcctcccttataaagagcacaagggtagcgcactatttgccagtggctgcggaaaaagaaatgaccattggcgcaatataccttgatactcagggatactacgctggagtgcgtcagggcgttcaggatgcggcaaaagattcctcagtacaagttcagttaatagaaactaacgcccagggtgatatttcgaaagaaagtacctttgttgataccctcgtggcgcgtaatgtcgatgccattattttatcggcagtgtctgaaaatggcagtagccgtaccgttcgtcgcgccagtgaagcgggcattccggtgatttgctacaacacctgtattaatcaaaagggggtcgataaatatgtctcggcgtatctggtcggcgatccgctggaatttggtaaaaaactgggtaacgctgccgctgattattttattgccaataaaattgaccagccgaaaattgccgtcatcaattgcgaagcctttgaagtttgtgtgcagcgacgtaaaggatttgaagaagttttaaaatcccgcgttcccggcgcgcaaattgtcgctaatcaggaagggactgttttagataaagcgatttccgttggtgaaaaactaattatctccacgccggatctcaacgccattatgggggaatcgggcggtgcgacactcggcgcggtaaaagcggtacgtaatcaaaatcaggccggaaaaaattgctgtattcggttcggatattacaccgaaaatgctcagggagctggaaaacaatcagtgctgaaagcggtatggatattccgcaacagaaaaaacgccagcagcaacagagaagacacaaaagagacgaacaataacagaaccgacgaaggagaaggagtaaagaaagaaaaagatatcgaaaatgtgacaaatatcacaggtgttcgtcaaattgagttatggcggcgtgatgatttacaacacccacggttagatgaggtcgcggaagaagttcccgttgcgctggtctacaacggcatttcgcatgtggtgatgatggcgtcgcccaaagaccttgagtactttgcgctcggtttttcgctttccgaggggattatcgaaagtccgcgcgatatcttcggcatggatgtcgttccttcctgtaatggtcttgaagtacaaattgagctttccagccgccgctttatggggttgaaggagcgccgccgggcgctggcgggacgtacgggctgtggcgtatgcggcgtggagcaacttaatgacatcggaaaaccggtgcagccgctaccgttcacccagacgtttgatctcaacaaactggatgatgcattacgtcatctcaacgattttcagccagtggggcaactgactggttgtactcacgccgctgcctggatgttgccatctggcgaactggtcggcgggcatgaagacgtgggtcgccatgtggcgctggacaaactgttaggccgccggtcacaagaaggggaaagctggcagcaaggtgcggtactggtttccagtcgtgccagttatgaaatggtgcaaaagtcggcgatgtgcggcgtagagattttgtttgcggtgtctggcgcgaacaacgcttgctgtaaaagtgggtga

SEQ ID NO: 138407 - DNA, 2496 bp, Homo sapiens
atggaccagcctacttgtggactggtcgttctgactggctctgtgttggctgattcgcctatccgcctcaacttgcaggtagaagatgaaacccgcactcaggaacgtctgcgccgcggcgaagtggtcggcgcggtgagtattcaacatcaggcgctgccgagttgtcttgtcgataaacttggtgcgctcgactatctgttcgtcagctcaaaaccctttgccgaaaaatatttccctaacggcgtaacgcgttcggcattactgaaagcgccagtggtcgcgtttgaccatcttgacgatatgcaccaggcctttttgcagcaaaacttcgatctgcctccaggcagcgtgccctgccatatcgttaattcttcagaagcgttcgtacaacttgctcgccagggcaccacctgctgtatgatcccgcacctgcaaatcgagaaagagctggccagcggtgaactgattgacttaacgcctgggctatttcaacgacggatgctctactggcaccgctttgctcctgaaagccgcatgatgcgtaaagtcactgatgcgttactcgattatggtcacaaagaattgagccgtcgggagaaaactgtcgactcgctggttcatcaaaccgcggaagggatcgccatcaagccgctgtataccgaagccgatctcgataatctggaggtgacagcgggcgtcgctatcgacaccgtggaagatatgaaagtcctgttcgaccagatcccgctggataaaatgtcggtttcgatgaccatgaatggcgcagtgctaccagtactggcgttttatatcgtcgccgcagaagagcaaggtgttacacctgataaactgaccggcaccattcaaacgatattctcaaagagtacctctgccgcaacacctatatttacccaccaaactgcctcatttccggtgcgtgtacgtcgtctggaataccgcggatatgactctgccggtctggccgttgttgatgcagaaggtcatatgacccgcctgcgtcgcctcggtaaagtccagatgctggcacaggcagcggaagaacatcctctgcatggcggcactggtattgctcacactcgctgggcgacccacggtgaaccttcagaagtgaatgcgcatccgcatgtttctgaacacattgtggtggtgcataacggcatcatcgaaaaccatgaaccgctgcgtgaagagctaaaagcgcgtggctataccttcgtttctgaaaccgacaccgaagtgattgcccatctggtgaactgggagctgaaacaaggcgggactctgcgtgaggccgttctgcgtgctatcccgcagctgcgtggtgcgtacggtacagtgatcatggactcccgtcacccggataccctgctggcggcacgttctggtagtccgctggtgattggcctggggatgggcgaaaactttatcgcttctgaccagctggcgctgttgccggtgacccgtcgctttatcttccttgaagagggcgatattgcggaaatcactcgccgttcggtaaacatcttcgataaaactggcgcggaagtaaaacgtcaggatatcgaatccaatctgcaatatgacgcgggcgataaagacattaccgtcggtaccgagctatcccatctctctgtgtctggttgctatgtagtagactgcatctattatcacttgtgcgagcgcgtaggtacgccgaagaaagcgtggccgaaacacgtttatgcaccgtatgtcgactttacgctgaatacgatcccggatctggctgcgctggctaagaatcataacgtcaaccacttcacgctggcgtgtgtggtgagtaaagatgcgaacacctgtctgccgacatggggtaccgcttacggtatgcagaattacgctcagtacagcaaaatcaaagctctgcgtgaggctggcggcgatgtgatgctgtctatcggtggtgctaacaacgctccgctggctgcttcctgtaagaacgtagacgatctgatgcagcattattatgacatcgttgataacctgaacctcaaagtcctggacttcgatatcgaaggcacctgggttgcggatcaggcatctattgaacgtcgtaaccttgctgtgaagaaatctgcatataccgaaggccagaacattcacggtaagtgtgcaacgtctgcgattgccaacctgcattcacaattgaaaggcctccatcccaataagagcgatgcagaaattgacgctatgatgggtaccacgccgatggttggcgtgaacgacgttcagggcgaggtgttctatctctctgatgctcgtctggtcatgcaggatgcgcagaagcgtaatctcggtatggttggtatctggtcaatcgcgcgcgacctgccgggcggcactaacctgtctccggaattccacggcctgactaaagaacaggcaccgaagtacgcatttagcgaaatcttcgcgccgtttactaagcaataa

SEQ ID NO: 138408 - DNA, 2298 bp, Homo sapiens
  misc_feature (1)...(2298): n = a,t,c or g
atgcagccagccttgctgatagttctcaacaaagtgcgacaggaagcccgccgccgtgctcgcgcctgccggatacgccgcgcttccggtattgttcagttcggcaaagttagacggcagctggctgcggtggaactccgccagcggcagacgccagaacggttcgttctcctgcgcggcactcgccagcaagcgaccggccagcgcatcgtcaaaactgaacagcgcgtgataatcattacccagcgcagttttcgccgccccggtgagggtcgccgcatcaatgatcatttccggtttcctgcgcacttgccatcaatcagaccaatcggcaagcaccagacgcccttcggcatcagtggtcatcacttcaacttttttaccgttgcgataggtgatgatatcgcccagcttgaccgcattggcgctaatcagagtgtcctgaagggctttaacaagtttgttgttcagtacgctactgactcgatgacctcgcagggtaaagggctgtcgcagggttctggcgttgcatttgataacgaaaaatttgcctacaatattttttcaacggtcacatgctgcgtatcctcgaccacggatatcaactgggataacgacaacggcaccaagtggtggaccgtcggtattcgcccgatgtacaagtggacgccaatcatgagcaccgtgatggaaatcggctacgacaacgtcgaatcccagcgcaccggcgacaagaacaatcagtacaaaattaccctcgcacaacaatggcaggctggcgacagcatctggtcacgcccggctattcgtgtcttcgcaacctacgccaagtgggatgagaaatggngttacgactacaccggtaacgctgataacaacgcgaacttcggcaaagccgttcctgctgatttcaacggcggcagcttcgggtcgtggcgacagcgacgagtggaccttcggtgcccagatggaaatctggggcttatctcgggcatccggtacgctggttacccgggcctggagatacaaaactacgccgacgcgtcactgtttgctgatgaatcattacgctggcgaagcagctatgaggtggaaaaactacctgaagagcacacaaaaagttcaactgcagaactttgccaactggccgaaatactctctctccaccctatttcactttcccttctcgaaaagttgttaaacagcacacggggcaatacacagccggataatcagcttgcggcgttgttatgcgcgcgtataaatggcagtcctgcttgttttgccacctgtatggattcatcaaatgaatataaaaaaatcagcacccttatgcgcaagggcgaaaatgaaattaaccaatgggctgaccgtcattctgttgagcgcgctaccgttcaggcgatacaatggctgacccgagcacccgatcgctttagcgccgcccagttcagccctttactcgaacacgaaaaatcatcaacgcagattattaatctgctggtatggagcgggctgtgtggctggataaatcgcttaaaaatcgcgttgggctgccagtcgaccggtattttccagccagtcagaaacctggtcatacaccagctttgctttggattcgatggtggcggcaaagaattcgatattatcttcaatggtgccatcagcggagagcgtcatgcggcatgccacaatccacgcggttgggtcggcaatcgccacaatcagctgaagtctgtcatccggcaacgccttagcgaaaagggcgtcatccatatcttctgtgctggcactgtcgatggtgacaaaatcagcgcggtcagatcttcacgaaccagaccttcatcgagcatttcggtagcgacggcgtctggtgcttctgctgtcagattatggcgtgcaagtctgcatagagagacgatcgctttcagcggattacggcgaattccgcaaccgccagtcggcttcttgaactcgttgttcaggccacgggttcggcgcaggaatggcgtctttaagagtgatgatcgggacgatggcagaccgtcatttttgcctgaccttaccacgaaacgaagtagaaaaaccggaaacgctaaaaatcagagtgcctctcttcctccaaaggaacgcagctcctcaccggcaacggaacaaagctggacagagaatgactttgacgagttgagagaggaaggcttcagaagatcaaattactctgagctaaaggaggaagttcgaaccaatggcaaagaagttaaaaactttgaaaaaaaaattagacgaatggataactag

SEQ ID NO: 138409 - DNA, 795 bp, Homo sapiens
atgtcattccttcattccgctccttccattccgtattatccattcgttcggttcggtcagttccgtacggcctgttgtttcatacgatccgtccgttggttccctccaattcgtaccggtgggcccgtttattggagtggtgtttctcaccgttgtgattcgacccccggtgtggtgcagtcaataattcattcgttcgttcgatccgtccttcgttccatcggtcctcgatcgtttcttcgtcctatcgacagtcttccactcgtcgtccatctttcttgtcgtcatcgatcgaccgtcctgcgtcggagaaccttcgttgttctaagtggggggctcttgcccgacaaactcactttaccgttgctctggcttggcttggtatttaatgcgcagtatggattaattgatttacatgatgcggtttacggcgcggtagcgggctatggggtgctgtggcgcatggtgtggctggcaaacgttgccaatgatactgctgattgcctcgctgggtggcattggttacgccatcgtttcacaacttctgcaacgccggactataaccactatcgcattcggcccgtggcttgcgctcggcagcatgataaacctgggataattttgcaggcccatcttctgaatcagatcaagttccgtttccagccagtcgatatggccttcttcatcacgcaaaatttctatcatcatatcgcggctgacgtaatcatgaacgctatcggcataaccaattgcctcacgcaaattcttcgcgccatccagctcaagcccaaatag

SEQ ID NO: 138410 - DNA, 3463 bp, Homo sapiens
atggataccctggcgggtatcttcggtatcggtcagcatccgaaaggcgacaaagacccgtttgcgctgcgtcgtgccgcgcttggcgtgctgcgaattatcgttgagaagaacctcaaccttgatctgcaaacgctgaccgaagaagcggtgcgtctgtatggcgataagctgactaatgccaacgtagttgatgatgttatcgactttatgctcggtcgcttccgcgcctggtatcaggacgaaggttataccgttgacaccatccaggcggtactggcgcgtcgtccgactcgtccggctgatttcgatgcccgtatgaaagcggtatcgcatttccgtaccctggatgcagctgctgcactggcggcggcgaacaaacagccggaagaaattaaactggcgatgcaggttgtggtgctacgtgacaagctggagccgtactttacggaaggtcgttaccaggatgcgctggtcgaactggctgagctgcgtgaaggggatcctctagagttcttcgttctcctcttgagtgtctgtgctctgtgggtctttgatctcatcgtgtatgtcggtgtgcatgtttacacggagaaaagagaggagtcagagaagaacgaagaacaaaaacgttctttcgtgtttgccgtttacacctcaataagccaacagtggtatatgcgttggctgaaatcatttatcgactttgttcctctcgacccgacgcaacctatggctattaaacatctggtacgtctggtggaacagggccgaccagtggtgattttccctgaaggacgcatcaccacgacaggctcgctgatgaaaatctacgatggcgcgggttttgtcgcggcgaagtctggtgcaacggttattcctgtgcgtattgaaggggcggaacttacgcacttcagccgcctgaaaggtctggttaaacgtcgcttgttcccgcaaattactctgcatattttgccaccaacgcaggtggcgatgccggatgcgccgcgtgcccgtgaccgtcgcaaaatcgctggcgaaatgctgcatcaaataatgatggaagcgcgaatggcggtgcgcccgcgtgaaacgctgtacgaatctttactgagtgcaatgtaccgcttcggagccgggaagaaatgtgtcgaagacgtcaactttaccccagactcctatcgcaaattgcttacgaaaacgctgtttgttggacgcatccttgaaaaatacagtgttgaaggcgaacgcatcggcttaatgctgcccaatgcaggcatcagctaccgtggcccttcgtttgattccgcgctctgtcaatgcgccgtatggcgggcttcagtggcgccgcttcttcagtgttgtatatcggcgtttgctaaagatatcaatctcgatatccatgaaggtgaattcgtggtgtttgtcggaccgtctggctgcggtaaatcgactttactgcgcatgattgccgggcttgagacgatcaccagcggcgacctgttcatcggtgagaaacggatgaatgacactccgccagcagaacgcggcgttggtatggtgtttcagtcttacgcgctctatccccacctgtcagtagcagaaaacatgtcatttggcctgaaactggctggcgcaaaaaaagaggtgattaaccaacgcgttaaccaggtggcggcaggtgctacaactggcgcatttgctggatcgcaaaccgaaagcgctctccggtggtcagcgtcagcgtgtggcgattggccgtacgctggtggccgagccaagcgtatttttgctcgatgaaccgctctccaacctcgatgctgcactgcgtgtgcaaatgcgtatcgaaatctcccgtctgcataaacgcctgggccgcacaatgatttacgtcacccacgatcaggtcgaagcgatgacgctggccgacaaaatcgtggtgctggacgccggtcgcgtggcgcaggttgggaaaccgctggagctgtaccactatccggcagaccgttttgtcgccggatttatcgatgagattatcgaacgtgctgaaaaaggcgattgcgaggctcaatatattgttgggttttattataatcgcgatagcgcaattgattctccggacgacgaaaaagccttttactggctgaagctggccgctgagcaaggtcattgtgaagcacagtattccttagggcaaaagtataccgaggataaaagccgtcataaagataatgagcaagccatcttctggctgaaaaaagctgccctacaaggccatactttcgcttccaacgcccttggctggacactggatcgtggagaagcccccaattataaagaagcggttgtctggtatcagatagccgcggagagcggaatgtcttatgcgcaaaataatcttgggtggatgtacagaaatggcaacggagtcgcaaaagactatgcgctggcatttttctggtacaaacagctgcattacaaggccatagtgacgcgcaaaacaatctggccgatctttatgaaggggggaccgcatcggtcgaggcgtggcagcgttggtccgtcctccacgatcagcccgttcccgcagccggggcagaacagcagcatggtcgcgaacggcgcagggtccaactcccggcagctcccacgccgggtcagcgccgaggcgccgcccgcctcgagctcacattggtcctggcagccttcccgccacaccaaccaaccaatagacagggcgattctgcgctcccggccctgctgcaggctgtctcgcacttgtcattggtcactgcagccgccccaccccccccggcgcgccagtggctgggcggcctcgctggggcgggccgcagttcctgcgcgtgcgcgcttggcctccctagtgcgggctggcagtgcgggcagagcccggctgagaggggcggccctggaggagacggaggccgcgggtgggaccgaggcgcaagaggaagatgaggacgaagaagaggcgctgccgcactccgaggccatggacgtgttccaggagggtctggctatggtggtgcaggacccgctgctctgcgatctgccgatccagaggaaacaggtggctgcgatttcgacattttgctgtttactgatcggctatccgctggcgtgggcggtggcgcacagtaagccttcgacccgtaatattttattactactggtgatcctgccgtcgtggacctcgtttctgatccgcgtttatgcctggatgggaatattaaaaaacaacggtgtgctgaataattttctgctgtggctgggggttatcgatcaaccgctgaccattctgcataccaatctggccgtttatatcggcattgtttacgcttacgtgccgtttatggtactgccgaatttataccgcgttgaattcgtattgattattcgctggtggaagacagcgctggatctcggtgcacgacccgcctga

SEQ ID NO: 138411 - DNA, 8420 bp, Homo sapiens
  misc_feature (1)...(8420): n = a,t,c or g
tcagaactcaatcttgcaggcagggaaggactcatcctgcatcaccacggtgctgctgctagccaggaccaggacattcagttgttgctgctgctcatgagtttgttggtaccactcacgagtcacctccgtgtcatgagtagggatcagagtcaccttcacctgaagattctccccccactgggccttgcccctccagcagggcatccagcacagcccggcttggctcgccattggcagggtcattcccactgaccacatagtaggatgcacgcactcgacggaagaagtcaaggtcagcagtcttgccactgcaatgattcgggatgtaggcgagatccacatatacaggggcaccagagctgcccttggaactcaaggccattggtcctgccttgagtccattgactaggcctttggacatggggctgtgtccatccttttcctctgctggggtgacctggcttgtggtgctgcgtggtcgaggtggggcccgggatgctcgatctgcaggccctttaccaggggtgggtgagcgttttccccgaagatccagacgccgtgcaggggacgctggcttggccttgcctggggccctgcgccctactcgcccctgaaccttttccttctcccgtagcctctctactctcccagactctgagctgagcccctcggggtcagccatgcacacatcagggcggggaggggatgggcgggggtctggctgtgggagaggaggtgggtcatggccaggcctggggtggtgagtaccactgacacccccagctttgtccacaggtaggaagtctccatcttcatctgagtcgagggctgcctcagctgtgatggacggccactcctcagtttctggcgggacatcagaatctgactgtgaggagcctgagtcactggctgatgtagggggtgtctcatcagtcacagggcatgggcccccagtggtccctggcccccctacccggcgccgcccccctcttcctactagccgaacttcctcagttgagaggtccctatcatctatggatgggggcagaggtgggttcaggaaggatggggagagctccccacgatggggccgaggctcagtggcacatccctggggcccagcttcgacctcaggagaggcactgctgggtgggcccccggagccccctgcaggacacactggctgctcaggggagagcaatgtgtcaggccgggagctcctctcagctccttcaggccaggccccacgttcccaggcagggcaagccgcagcctcttcattttcagccttggctggggcagggcctggggggttagggctggtttcagttgggccattggctgcacaatcctcagagggaacctggaaggggcttggcttctccgtggctgccctctgagcactccaggtggcacggcaggatgccatcacccatgtctccaggcaggcttggagctggagctagggccaagtccagtgaagctgggggtgctgggctcagaggagtgaggtcccagagsctgtgggcagctggttccattcctgggtccagctctccagactcctgttctgcagcctcaaggcttggagagaagcgctccgccacacttgaaatcacaggcgtggtagcctcagaggaggagccctcagacaaaaaaggtgaggcaggtcgtggcagattggagaggagaggggccccaggagaactgggtgatgggagctggggcagtgaggaatccaggctgggggccttggtcacttccaggtattcatcatgccgggttctggtggggggtcctgccgccagagccagagctcgatccccagagaaggcaagggagccacagggtgccgagcggggttcagctggagagggcagctgtgggggagctggctgcaatgaggagaagccaaaggctgaagcagggaagtccagactgggtcgggcaggccccaggtgtgagtccaagggagggctaacatgtgcctcagtttctggccataatgtgggggaccccataggaatggggtgaggaggacttggggattgggcctctttttctggctgttcccgagcccccttctccagttctgagtcactagtgctgtcatcccagtgactccggcctgattccttgggggatggggacctcctatctgggctgcagctcaggatgttaccattaagaggggggcttgggcctttgctcaggataggagcacgggggggaactgcaggtggggtgaggctgggctccatacttggccctggctctggccttgggggtacagtgggtcctgccagggctgcatagctgaaggttggagtgtcagactggaggctcttgggtgagataggagatgaaagctccttctctgcagatgtgtttcggccggcagctgcctccttggttgagaggcatgggggccaatccccagctgctccaagtggaggctctctagtggggcatgcagggccaagcccagtaagcatcatctgctcatagatgtctgcatactgaaagcttctctcatcaggatagggtgtgggctctctctgctccggctcagtctgctcaggctccgtggtggcatggcttttgctggcctctggtacctttgagctgtgtgagcttttgtcaggagcctcagccctaccttcttcttccctttccccttcagccttgcggtagtccttccccaggggggagtatggcccaccttccaactcagctgccccctcctgcactgcagccaccacactgtcatactcggctgtgccccaagagaagggtgcaggagtatgggattccggggcaggtgtggggggaccaggagctggggagaggggtgcaggggggaggggtctgtccttgggcacccagggtgggatgtcagccagccatgagggagtagtgggttcattcttcatgtgtggcatgagcttagggtctgggataggactctcttgtcctggggctgaaggaaccctttgtccaaccatctcaggtggggaagctggaggggagatgatctcaaagggagagcgggtcagtttgtcctcttcctctggtggcaacccaactggtgattcagcaagccagcgctccacctctagccccttctgtggtgaggattcctggaaatccttgaagtctgaggcccaggggctccgggttgcgtgttcccgcaggggtacttcttgctcatcatctgggccctcatctaggaaagtgctttcccgttcctcagtgtagtgtgggcgggccccctggacatccagctcgtgagggaaccagaccttccgctcacagcttagctccctccagtatgtgtcctgttccaaggacacatcctctctgcccctccaatacctattgtcctgctcaggagatgtgtcctcccatgccggggcaagctctttctgttctccagccggctcctctctggtaggagatgtttcttgacactcctggaccacatcctgccccctccagtacttttcttcctgctctctggccctgccctcctgcactaggctctcttccaggcccagagctttggtcttctccagaagagcttctaacttctcttccatggccttgaccttttctggggatttttcctctagcatcttnggtttcctggttttatcctcctgcactaggctctcctgctcctgagtttggtggttctcttccagagcctgaatgtttngttccagggcttcatccttctgtcccaaagcccagtatttgngttctaaggcctgatccttcttttctgagactttatccttttgttcctgggcctggtgtttctgttcaggggctttgtctgtctgttctaggtctctgtccttcatttcagcgaccgtgtcctccggagccttatgttcaacacttctgactttttgatctaaggctttgtctttctcttctgggatcttctccttctgttctaggaccctgtccttttgttccaagtctttatcttttggttccagggccttgtccttctgttccagggctgtatccttttgttctaaggctttgtctttctctrctggaatcttatccttctgttccagggccttgtcrttttnttctaagtctttgtcttttggttccagggccttgtccttctgttctagggctgtgtcttnttgctctaagtctctgcccttttgttctaaagccttancctgctgtttcacagcctcattctttacatgcagagcctcatctttctgatagatggctgtatccttcggctctaccacctccttgtgctccagagttttgtctttctgctgtaaaacttcatcctttggctcaggttccttcttctgttctgaggttctgtctttcaaccctggaactttatcttcccactttatggcaatgtccnccaaggcagggcctgscaaagactcaggactcttggagaaggagctatcagntgtcagaatgtgttcatcagggcttgtgatcgccccaggtaagtacttcccatttcctgaaggtgtagagtgagagaatgagctggcaggtgacttcctgtcaaggctgtcatctgtgatgtctgtctgtgcagagtatcgagttgtcccatctgtgggaggtgacgctgtggctgcatggggctctggaacagacatgggagctgtgtggtgagaggtatcctcggcctgcatcagatgccccatttcttccttcccaaggtttagttccccaaactggagggtgccaaggctttctggagagagctgcttagaagagacatccagggaggtctccttgctgggactctcttctgacagagaaagtgactgggtgtcttctggagatacctctgmccaccggtctttgtgtaggtnctgttctstcagyccacagggagacttgggggtaggctcttggmtgncagtgtctggggagggcacgctgaggacagagagggattctncatcttcaggagagaggcttcggtcaggatatctgagcacctcatctttctgaggtttgccaggttcttggggtaaagtcctcaaacctccgggaagggcttctgctcccagaattgggcctgtgggctctcctgcctccataatctcaaagactattgctttatcctgtgctggcaacagttgaatggtacagcctgtaagcccctcatcaatgttgacaggtgcttcctgggcctgggggctcctgggaggaggaactttctcttccttctctagtgtgccctcttcaggccctggcttgactgtctcctcagcagcatcttctttgcccacacctggtgtgcgcttagtgtctccccaggagtctgcctccttgaagtcttggggctcagacttttcttccactggggactgatgaaagggtgtgtgggtggcactgggtgggccagatggtggaggagaagccatcttcactgtgctgtcatctgggctaaggcaccgctcctctgcttctccaagggctggttctcctggatgtagggcatncccaggggcactaaacactggagttccanattgactncaaagtttctcagacatctctacgtttgctgtctcctcctcttcctcttccacagctctctctccagacaagcctttccctatgatctctcctctcttctctgactccccagtcacagagaagtcctcacagggtggtgatmtgaagcccttstcttctnccagtgaggaggtgggtgagatggtaccagctgatggcacatagtccaagccctgcgtagcttcagtacgggaggaagggatgcttgtgactgtgtcaagcagcagggagctcttgcctgtctcctctgtctggggagctgtaagtgaggccacagattggtcctcagccactgatgtggcaaaggaagaaagtttgtcacactcagtgattgaagtggccgaggacacatgttcctcttcagccaaaggggcagccactatgttagtggggtaggtgagttcagtctctggcgttccatagactttgccagaggtagcaggaacagcactatcggcaggttggctggcttcgaatgggccagcaccttcaggcccgggcaggtcatatgtacttgtatgaaatctgggtggagctgggcgctcctccggctcatcatggatctcctcatctgagatggtctgctcagtctctgagtagccagggattgtctcatcctggatgtaagagacatgctcagtggctcctgcaggtgtggtcaggctgcttaggaataacgaggtctccttctcaggggccttgccctggagtcccaattcccgacccccaaaagcctcccggctccttggagttacctncaagggttcctgcatatgttnggggtaaaaaccctcagntngggtcgcgtcctcttcctcctcatctgaagggtgtacctcctccatttcttctaactcagccttttctatcacatcctcctttactncaggtncactttcctctctggcttctgttctgtctgggagcctctctgcttccctctgcttcttttcctcccaggtatctttctcttcctctgtttcagccccagagtctaggcctctgtccttgctgccttgttcctcagggacctctgggacaagctctttctccttcatcacatgttcttcttgtcccagccctggaacagagggtggtgttccctggatagctgtacttgggggtccctcctctgcagtgtctagagggaatggcttatctcctagtcctgtgtccctttgttcagccagcaaagccctctcctcacgcttcatctcctcaaagtcctgtgtgaggtcctctggtgaggataggaccagctccctgtgcccactgatggttgggagtggtacagttcccttctgggctgggggtgtctggggctcagaagacagctccttctccccacggatagcacggctcctgtctattnggactcttccagggaccttggctttatagagggtcttacgtacctcaggagtaaagggctttaggtctggcttggaaatcttcttgagctcaggtttggtatctttcctcttctcctccttcttggnatccttcttctcctccttccttccttcatccttcttgagctctttcctctcctntgggatctcttttrtctccttgtcttttttttcttccagcttwgatatcttttctttaaggtgctttttccctaccttgtctttgatcagctttcgcttctctgcctncagtgcctcacttgactctgtcttcaccctctcaggcttggnaggcttctctgggggcttctcagatgactcttgngccttcttctctgtcttggataactccttggacagctctgaacgtgcctccttggctccctcttctaccacctcctcccgtgtggacaacttgctcacggncgtcttggtagtggctttgaggctctccttgctatcagcccgctgtttgattttgctgggcttgaggttggtaggcacagccccagaagccaggtccttctgcgtggccacagggtaacgcaggaagtccagatgccgaagcttttctaggccctccaagatcttgttttggggagcatttcctggaaaaagcacacgcacaatcttctcagtgggattggctggtagccagaccaccagagcagtgatagaggtaaggtagggcacggagatctcagcctccttcccattgggcagcacgatgcctgtcttggctttactattgcctgcccacttmtgcatgaggaactgcatctccttgctgtccttgacagggttgaggacatacatgtccagccggsccacacccattttgtggaagagggtcagtggctcaatggtattgctgaccacacgatatagaggctcagcctggatgcccaggcggtttaagtgctgcagagtgaggcaggcctcctcaatgctacgcttggctttccgggaggcatcaggaagccgcagcttctcaggcacgttgaaaaagacaactccaagctcaggagagataaggttcttcacccagtcgctgtaactgctagagccctgggactgctcctcctctagctctgccactttgcgctgcagtagtccattgatgcctggcaggttgtctgccccaatgtgtgtgagtagcaccgagtcaatgcggtccaagtyccgtaccagcttccacaaacaggacttgcgatcagagccaccatccaccaggatgttgaaaccattgacagcaaagagggcagagtccccncgaccacctgggaagatgtagcaacaaggcttggagagcttgaggaagccccctgaggtggggggctctagtaggtcanatggggatggcacgtccacagtctcagagacatactcggagaactcagccacgccgtccat

SEQ ID NO: 138412 - DNA, 5048 bp, Homo sapiens
tatagcccaacgcaattggcgaatgcaatgaaactggttcgccagcaaaatggctggacgcagagcgagctggcgaaaaaaattggtattaagcaggcgacgatttccaatttcgaaaacaaccctgacaataccacgctcacgacattttttaagattttacagtcgcttgaactctcaatgacgctatgcgacgcgaaaaatgcctcgccagaatcaacagaacagcaaaatctggagtggtaatgcctaaacttgtcacttggatgaacaaccagcgggtaggcgagttaacgaagttagccaacggcgcgcacacctttaagtatgcaccggagtggttagcaagccgttatgccagaccgttgtcactttcgctgccattgcagagggggaatatcacctctgatgccgtatttaacttcttcgataacctgttacccgatagaacgattgtacgtgaccggatcgttaaacgttatcatgccaaatccagacaaccgtttgatttattgtcagaaatagggcgagacagcgttggtgccgtgacgttaatacccgaagacgaaacccaacatcattatgagtctttaacaataactgatgaaggtgaattcgtggtgtttgtcggaccgtctggctgcggtaaatcgactttactgcgcatgatcgccgggcttgagacgatcaccaccggcgacctgttcatcggtgagaaacggatgaatgacactccgccagcagaacgcggcgttggtatggtgtttcagtcttacgcgctctatccccacctgtcagtagcagaaaacatgtcatttggccatgcaactggactggcgcaacacaaagaggtggcggaagtgctaccatctcggcgcatttgctggatcgcaaaccgaaagcgctctccggtggtcagcgtcagcgtgtggcgattggccgtacgctggtggccgagcccaagcgtatttttgctcgatgaaccgctctccaacctcgatgctgcactgcgtgtgcaaatgcgtatcgaaatctcccgtctgcataaacgcctgggccgcacaatgatttacgtcacccacgatcaggtcgaagcgatgacgctggccgacaaaatcgtggtgctggacgccggtcgcgtggcgcaggttgggaaaccgctggagctgtaccactatccggcagaccgttttgtcgccggatttatcggttcgccaaagatgaacttcctgccggtaaaagtgaccgccaccgcaatcgatcaagtgcaggtggagctgccgatgccaaatcgtcagcaagtctggctgccagttgaaagccgtgatgtccaggttggagccaatatgtcgctgggtattcgcccggaacatctactgccgagtgatatcgctgacgtcatccttgagggtgaagttcaggtcgtcgagcaactcggcaacgaaactcaaatccatatccagatcccttccattcgtcaaaacctggtgtaccgccagaacgacgtggtgttggtagaagaaggtgccacattcgctatcggcctgccgccagagcgttgccatctgttcccgggcgtaatgtctgctcaggcaatggctgttgatttccacggctatgcacgttccggtattggttggacaggtagcggcggtgaacaacagtgtttccagactaccggtgctcaaagtaaataccgtcttggcaacgaatgtgaaacttatgctgaattaaaattgggtcaggaagtgtggaaagagggcgataagagcttctatttcgacactaacgtggcctattccgtcgcacaacagaatgactgggaagctaccgatccggccttccgtgaagcaaacgtgcagggtaaaaacctgatcgaatggctgccaggctccaccatctgggcaggtaagcgcttctaccaacgtcatgacgttcatatgatcgacttctactactgggatatttctggtcctggtgccggtctggaaaacatcgatgttggcttcggtaaactctctctggcagcaacccgctcctctgaagctggtggttcttcctctttcgccagcaacaatatttatgactataccaacgaaaccgcgaacgacgttttcgatgtgcgtttagcgcagatggaaatcaacccgggcggcacattagaactgggtgtcgactacggtcgtgccaacttgcgtgataactatcgtctggttgatggcgcatcgaaagacggctggttattcactgctgaacatactcagagtgtcctgaagggctttaacaagtttgttgttcagtacgctactgactcgatgacctcgcagggtaaagggctgtcgcagggttctggcgttgcatttgataacgaaaaatttgcctacaatatcaacaacaacggtcacatgctgcgtatcctcgaccacggtgcgatctccatgggcgacaactgggacatgatgtacgtgggtatgtaccaggatatcaactgggataacgacaacggcaccaagtggtggaccgtcggtattcgcccgatgtacaagtggacgccaatcatgagcaccgtgatggaaatcggctacgacaacgtcgaatcccagcgcaccggcgacaaagaacaatcagtacaaaattaccctcgcacaacaatggcaggctggcgacagcatctggtcacgcccggctattcgtgtcttcggaaccttaagccaagtgggatgagaaatggggttacgactacaccggtaacgctgataacaacgcgaacttcggcaaagccgttcctgctgatttcaacggcggcagcttcggtcgtggcgacagcgacgagtggaccttcggtgcccagatggaaatctggtggcaaaaaaaatatgcctggcatgatacagtgcccctgatactttgtgttgctgctgctatcgcctgcgccctggcacctttcacgcccatcgtgactggcgcactctttctctatttctgtttcgtactcacgctcagtgttattgattttcgcactcagctcctgcccgacaaactcaccttaccgctgctctggcttggcttggtatttaatgcgcagtatggattaattgatttacatgatgcggtttacggcgcggtagcgggctatggggtgctgtggcgcatggtgtggctggcaaacgttgccaatgatactgctgattgcctcgctgggtggcattggttacgccatcgtttcacaacttctgcaacgccggactataaccactatcgcattcggcccgtggcttgcgctcggcagcatgataaacctgggataattttgcaggcccatcttcttgatcagatcaagtcacttcgagctcggtacctccgcatccactgtgtacgctttgaagcgctgttctggacgcaaagtgacaaccctgctctggtggcgaaccaaaacgccaccggtagcaatagccgcccgtggaagccgttaggtaaggctcagagctatagcaacgaagagctgaataatgcgccgcagtttaatccagaaacgctttatgccagcgatacgctgattcgctttaacggtgtgaactacatttctcagagtaaagtgcagaaagtttctccttctgacagcaacccgtggcgtgtttttgttgactggaccggaaccaaagagcgcgtaggtacgccgaagaaagcgtggccgaaacagcgtttatgcaccgtatgtcgactttacgctgaatacgatcccggatctggctgcgctggctaagaatcataacgtcaaccacttcacgctggcgtttgtggtgagtaaagatgcgaacacctgtctgccgacatggggtaccgcttacggtatgcagaattacgctcagtacagcaaaatcaaagctctgcgtgaggctggcggcgatgtgatgctgtctatcggtggtgctaacaacgctccgctggctgcttcctgtaagaacgtagacgatctgatgcagcattattatgacatcgttgataacctgaacctcaaagtcctggacttcgatatcgaaggcacctgggttgcggatcaggcatctattgaacgtcgtaaccttgctgtgaagaaagtgcaggataaatggaagtcaagagggcaaagatattgctatctggttttaaacattcgaattcgagctcggtacccccttctctggggatcgagctctggctctggctccaggaccccccaccagaacccgcatgatgaatacctggaagtgaccaaggcccccagcctggattcctcactgccccagctcccatcacccagttctcctggggcccctctcctctccaatctgccacgacctgcctcaccagccctgtctgagggctcctcctctgaggctaccacgcctgtgatttcaagtgtggcggagcgcttctctccaagccttgaggctgcagaacaggagtctggagagctggacccaggaatggaaccagctgcccacagcctctgggacctcactcctctgagcccagcacccccagcttcactggacttggccctagctccagctccaagcctgcctggagacatgggtgatggcatcctgccgtgccacctggagtgctcagaggcagccacggagaagccaagccccttccaggttccctctgaggattgtgcagccaatggcccaactgaaaccagccctaaccccccaggccctgccccagccaaggctgaaaatgaagaggctgcggcttgccctgcctgggaacgtggggcctggcctgaaggagctgagaggagctcccggcctgacacattgctctcccctgagcagccagtgtgtcctgcagggggctccgggggcccacccagcagtgcctctcctgaggtcgaagctgggccccagggatgtgccactgagcctcggccccatcgtggggagctctccccatccttccttgacccacctctgcccccatccatagatgatagggacctctcaactgaggaaagttcgctagtaggaattacgatgtcggtgcctgcaggtcgactctag

SEQ ID NO: 138413 - DNA, 864 bp, Homo sapiens
ttaagggaagcggtagatcaatacctgataaatcaatcgcaaacagcaagaaccagtgttcctggcatctggcaagggtgtgaggaagatggtgtcgaatatcagcgtaagcagagcacagtaggtgctctgtaaacgcttacccagcgcacagaaggtgctctgtaaacgcttacccagcgcacagaaggtgctctgtaaacgcttacccagcgcacagtaggtgctcggtttattatggcggatgcgacgaaatgtatcggtgccgtacctgtgaagtggcttgcgcagtgtcgcatcatgagaatcaggatgcgctgcgttgtcaccagacgagtttatttcccgtattcgtgtcattaaagaccactgctggaccacggcagtagcccccggctcaattttctccggttctggtacgtagttcatgcgcatacattgatgcgtatgacagaaggctgggccgggtttgatattcttcgaccctaccgctggcgtcgggtcatcgcctttgtagtcgcgttttacttccgtcacctcatcgcccttctcgttgtgcagatgcacttcaagctggttaaaggcaatgttgatgtcgttttcacggcacagctgatcgatagtacggttcagctcatcgacagtacgactacggtcacgcagttcacgcacatacagacgcagctcatgatccaacgtgctggcaccaaatgccgtaaagaagacttccggcattggttcgtgcatcacccttgggtgctcagtcgccgccttcagtaacactttacgcactttttccagatcggagccataggccacgccgagacggatcaccagacgcgtagtagttttctccagcaccat

SEQ ID NO: 138414 - DNA, 1398 bp, Homo sapiens
ttacccccgtccaaactccagccgctgcacattcaccatcccaggcttctcagcagcactgacatcaatttgtgtcacccgcagcgcatatttttcatccagtgcgtttaaccatttcagcaggtcattaaacaccacaggttctatccagacctgaatattctccccacgatcggctatccgcctgatgaccaccgagtgcgcggaagcactgtcactgatgacccgcgatacctgcgcaggcgttgttgtggcagattttcgcgctgcaataatatccggcgcggcgttcttcagtcgggtgttcatcgccaccagctgctgcaatattgtctcctgttgctcaatccgttcgctcaacggctgccagatgaggacgtaatatccgacgctaaacaggaacaccaccgctgccagtaacatgcccttttcacgcggagaacgccccgccaggtgttgtgccagccagtgttcgccacggcttaactggcgttcacgccattggccgccggaaaccgcatcaccctctttctgtaacgcgtcctgttgcacaacataatcggttgccagtacactacgcagtttgtttcgaactggcaaagttcgcggcccgtagaggcgtgagagtttcggtcgtggctttgaagaaatctgccacgcgctggcagacatcgccaccacgcaccaggacatccaggttacgcaaaaattacggctgagcatgcagatatgcgttacgccgtgatcagtctgctgctgctccatctcgtataatgctgatccattgagcagcgtgttgaggatctggtcctgggttttgatggtctgggcgttagactgatagttacgctgggcaacgatcatattgaccagttctgtactgagatcgacgttggacgcttccagcgcaccgttggtcagggtgccaaagtttcccgtcccggctgtccccaacagcgccacgccagaagattgcgtcgcagaccagacgttgtcgccttcggatgccagaccttcgttgttggcaaagttcgccagtacaatctgccccagcagttgggtttgttcgttggaatagttgccgacaaccgtaccgtcatcattgatttgataactcaccagatcgcccggtttgtagccgttctgggtggttgccacaatattgttagcgccggtattttgctgcatggagttgaggaagctcagactaaacgtggcgggttctgcaccgttaattgcgccggttgcgatattattcgccatcgcaccatccactaatgtgccattagcattaaattccagtgttgtcgctgtcttcgcaatgctgtttggatcactgctatcctgggtgtagacctgccagttattatccccggtcttcacaaagtagacgctcat

SEQ ID NO: 138415 - DNA, 1185 bp, Homo sapiens
atggacaaattcgacgctaatcgccgcaaattgctggcgcttggtggcgttgcactcggtgccgccatcctgccgacccctgcgtttgcaacactctctaccccacgcccgcgcattttgacactcaataatcttcataccggagagtcaatcaaagcggagtttttcgatggcagaggctatattcaggaagaattggcaaaacttaaccattttttccgcgattaccgcgcgaacaaaataaagtccatcgacccaggattattcgaccagttgtatcgcctgcaagggttgttaggcacgcgcaaaccgtcctgcggctacgtgaccaccgcgcctgccgcacggagttatcgcctgaccagcaaatttattgccgtcgggcagaaggcgctgtcttcgctgaatatcattcatatcgccgctccgcatcttgaggcactgatcatcggcgagagtgacaccaaaaacttcgctagtcacgatcacgctattttgatttataagctggaacccacaaccgggatgctgcgaacccgtgcctatattggccagcatatgccgctctactgttccgcaatgggcaagatctacatggcgtttggtcacccggactacgtgaagtcatactgggaaagccatcagcatgagatccagccgttaacccgcaataccattaccgagctgcccgcgatgttcgacgaactggcgcacattcgtgaaagcggacgcacgatggacagagaagaaaacgaactcggcgtctcctgtattgctgttccggtgtttgatattcatgggcgggtgccgtacgccgtgtcgatttcgctttcgacatcacgtctgaaacagcgcgtcaacatcgattccggctccgggaaagacagcctgctggcggaactccgcctgcgggaacaaactcagttactggtggcgcatcgctacatcacgcgcgatgccagcgccggaagtgaaaaccatatcgccctgagcgagcaggagttttttacccgcgcggggcaaaatctgttggccttaagctggcacgctaacggtctgtattatggcgtcggcgtcgagattgatctctggctgcacgccggattcgacgtgctggtcaacggctcacgcgcccatctgccgcaggcgcgggcgcgctatcaatcggtgtcactgttcgagtga

SEQ ID NO: 138416 - DNA, 804 bp, Homo sapiens
atgatgtgtgaaatgattaagcgtaacgatctgctgcgcctgtctgaaacagtcatcaaaccgttttactaccagcgtgttcaggaaactatcgccatcattcgccgctatttaccggaaaatcgctgcctgattcataaaccggaaggagccattttcctctggctatggtttaaggatttgcccattacgaccaagcagctctatcagcgcctgaaagcacgcggcgtgctgatggtgccggggcacaacttcttcccagggctggataaaccgtggccgcatacgcatcaatgtatgcgcatgaactacgtaccagagccggagaaaattgaggcgggggcttcaacacaggccgggtccagatgtcccggtgcaagagcaggtgggagttatacgcgctgggctttatgggcgaagaaaggacctcgatcggaacgtctacatggacgggttggtcacccggactacgtgaagtcatactgggaaagccatcagcatgagatccagccgttaacccgcaataccattaccgagctgcccgcgatgttcgacgaactggcgcacattcgtgaaagcggagcggcgatggacagagaagaaaacgaactcggcgtctcctgtattgctgttccggtgtttgatattcatgggcgggtgccgtacgccgtgtcgatttcgctttcgacatcacgtctgaaacagtgcaaaggagtgatcatgaaccggtttattattgcggatgcgacgaaatgtatcggttgccgtacctgtgaagtgggcttgcgcagtgtcgcatcatga

SEQ ID NO: 138417 - DNA, 1953 bp, Homo sapiens
atgatggatggcatcaacggtctgcaaattatcttccgcatcaccgtgccgttgccgatgtccgggctgatatccgtgttcgtctactgctttatggtggcgtggaacgactatctgtttgcgtcgattttcctctccagcgccagcaatttcaccttaccggtgggcctgaacgcgctgttcagtacgccagattacatctggggacggatgatggcggcctcactggtgaccgcattgccggtggtgattatgtatgcgctttcggaacgttttattaagagtggtttgaccgccggtggcttagtagccacagcaccgcgtgttgctgcgctggttgagtatgaagatcgggcgattttagctaatgaagtgaagatccgcgtgcgtttcggcgcaccgaaacacggaacggaagtggtcgacttccgcgccgccagcccgtttattgatgaagactttaacggcgaatggcagatgttcactccgcgtccggcagatgcgccgcgcggcattgagtttggcaaattccagctagcgacatcaagagcgcattcaaagcagtccgcgctcgcccagctcgtcgagcacgcggccgagcgactgcttggtgatgccgagcagtccgatcagttccgagacgctcatctccggccccccaaaataattaaagccaatatacatacgatagccagcaccctgaaatcagcgtcactttccgacatcgaaatgcgtggttttacctttgatcaaaaacgccagatacttcacctccagctacgggccgcgaactttgccagtttcgacaaactgcgtagtgtactggcaaccgataatgttgtgcaccaggacgcgttacagaaagaggcggtggtgttcctgtttagcgtcggatattacgtcctcatctggcagccgttgagcgaacggattgagcaacaggagacaatattgcagcagctggtggcgatgaacacccgactgaagaacgccgcgccggatattattgcagcgcgaaaatctgccacaacaacgcctgcgcaggtatcgcgggtcatcagtgacagtgcttccgcgcactcggtggtcatcaggcggatagccgatcgtggggagaatattcaggtctggatagaacctgtggtgtttaatgacctgctgaaatgctgcccgcgatgttcgacgaactggcgcacattcgtgaaagcggagcgggcgatggacagagaagaaaacgaactcggcgtctcctgtattgctgttccggtgtttgatattcatgggcgggtgccgtacgccgtgtcgatttcgctttcgacatcacgtctgaaacagtgcaaaggagtgatcatgaaccggtttattattgcggatgcgacgaaatgtatcggttgccgtacctgtcaagtggcttgcgcagtgtcgcatcatgagaatcaggattgcgctgcgttgtcaccagacgagtttatttcccgtattcgtgtcattaatgaccctcacacaccctcacacggcatgattattacctgctggcagaaacgccgcgtcgattttctgcgcgctaccgatttcaacgccctgatgccgggcgttgtcgaaatcgacggcaaaaatatttatacgcaaattatcgatttaaccacacgcgaagcggtggtaaaccgtccggaagtgcatcgtcggtatatcgatattcagtttctggcgtggggcgaagagaaaatcggcattgctattgatacgggaaataataaagtcagcgaatcactattagagcagcgcaatattattttttatcacgacagtgaacatgaatcatttatagaaatgataccgggcagctacgcaattttctttccgcaggatgttcaccgaccaggttgtattatgcaaacagcctctgagatacgaaaaattgtggttaaagtcgcattaacggcgctgaattaa

SEQ ID NO: 138418 - DNA, 998 bp, Homo sapiens
atgctggcagtcgcgacccgggaagggtttgatgtcagtagatttatttgggtacagcgcctggtagcgagcaacccgctgataagctcgcatgttacgctgataaacgcgctgagtgccgcgattgaggagcaacacagctggcgtgaaggattttgcctgccggatggcgatgtcgccgccagcgtgctgacctgctggcaggataatccttacgatgtgatgtacaccatcgcggatgccagaaggccattaggcggggatatgcaggccgagctgattgacttttgccaggctaaaggggattacacggaaaatcggcagattgcagagcaggaggcgcaagcgttgcaaggcaatgggcgttgacgttaaccgtgtgtactcgctcgatgaactggtgagggggaacgatatcctctttagcgctacgggcgtgacgggcggtgagctggtgaacggtatccaacagacggcgaatggggtgcggacgcagacattactgatcggcggcgcggaccaaacaccaatggcgacgctgacagaagatgatgtgcttgagcaactggatgcacaggacaatttattttacatttatgaaaactgcgcataccattttgctccaggggatacgccagtttctgccgtcgctgtttgtcgataacgatgaagagatcgtggaatatgcagtgaagccgttactcgcccaaagcggccagattgacgatattgatgttgcactgcgtttgatttatgcgttggggaaaatggataaatggttgtacgccgatatcacgcatttttcccagttctggcattacctgaacgaacaggatgaaacgcccggatttgccgatgacatgacctgggattttatcagtaacgtcaatagtataacccgcaatgcgatgctctatgacgcgttaaaagcgatgaagttcgctgatttctccgtctggtcagaggcgcgttttagcggaatggtcaaaacggcgtga

SEQ ID NO: 138419 - DNA, 1413 bp, Homo sapiens
atggatggcaaagatccgcgctctgatatcgcgctgatccaaatccagaacccgaaaaacctgaccgcaattaaaatggcggattctgatgcactgagcgtgggtgattacaccgtagcgattggtaacccgtttggtctgggcgagaccgtaacttccgggattgtctctgcgctggggcgtagcggcctgaatgccgaaaactacgaaaacttcatccagaccgatgcagagatcaaccgtggtaacttctgtgggatgagcgatgatttcacgccgccgatttttgcaggctactgccgcgacgatagccacgagctcaggtttcggttatatgcattactcctgaattctgacgcgattgctcttggcatagaacaaaggcccgatttgatattactgggcggcgattacgtattatttgatatgtcgctgaattcttctgcgtatagtgacgtactctccccccttgccgaatgtgcgccgacgtttgcctgcttcggcaaccacgatcgccctgttgggacagaaaaaaatcacttaattggcgagacgttgaaatcagccgtcatcacggggatgcttaaccaggctacggtgatcgcctacgccaacaggccattcgaactggtaggcactggtgacttatggagcggacaatgcaaatcggcttccgccagcgaaaccaatctgtcaagactggtgctggcgcataactcctgcagcaaagaagtcatgcgtgatgaaccctgcgatctgatgctgggcagtcatactcaccgctggcaactgagcgtaccgatggctggagaacctttttgccatgtcgcagatgaacgttacgttctcggattaaatgccttttgcgaaagacacatatacacaatccccagggggggcaagaggatcccccaaacttttgctgccgatctgccgggcaaaggcattactgttaatccagttcagagcaccatcactgaagaaaccttccagacgctgctggtcagtcgtgcgctggagaaattaggttataccgtcaacaaacccagcgaagtagattacaacgttggctacacctcgcttgcttccggcgatgcaaccttcaccgccgtgaactggacgccactgcatgacaacatgtacgaagctgccggtggcgataagaaattttatcgtgaaggggtatttgttaacggggcggcacaaggttacctgatcgataagaaaaccgccgaccagtacaaaatcaccaacattcgacaacttgaagatcccgagatcgccaaacttgtcgataccaacggcgacggaaaagcggatttaaccggttgtaaccctggcttgggcttcgaaggtgcgatcaaccaccaacttggcgcgtatgaactgaccaacaccgtgacgcataattag

SEQ ID NO: 138420 - DNA, 2913 bp, Homo sapiens
atgcgcaccaggaagccgccagtgagttgcaaacagtgggggactacaactgcaccccgcttagcgcggaatgccccaggcccagtgcgctgccacccgcttgcggtgacacacctttacagccttgaaaaggcggagaacggcgccaatgcaggccatgcacgtgatgcgaaacaaaatgggcccatgaacaggtacagcgacggggccaacagacgccgttgggcacggaggggccgcgtgataagcagaatagaagtggaggagggccaggcggggcgagcacctaggcgatgcccaccagataaaacgcgagcgccaggcaccgtgcaaaacgggagaaagcgatatcgccgatttaagcacaaaaagaagaagattatgaaaggcgacgcggactaccgcctgcacgccttaagggaaaaacttaggccatgtgtgctagcaggaccggggcaacccgaacggggatcgctgcaaaggacggaacgaatgcagcctattgaaaagagcgttgtgcacggggaagatagaacgggagtaatgaatttgagaattataagacccaaggaagacgcattaacgagcaataaacgggcccttacgcaggtgcgggccatggaaggagcagatgggaatagcatgcctctcgcagtaatctatagttctcgcattatggtagcgcgcgccagctggtatagcacgggtggacacggttatcgtactcagcgggcgcctgttggtcgccgtaggagttatccattgcgtttcgggtgggacggcagactccatggtcggcaattctttagcgctcgatataaagtgcttacgcaaccgttgagagaggaaatccagcaggctgaccgtgacgatgataagcaccatcagggcgcaggtttgttggaactggaaaccgcgaatcgcttcccacagggtgacgccgatcccgcctgcgccgaccatgccgacgacggtcgccgagcggacgttggattcgaagcgatagagggagtaggagatcagcagtggcatcacctgtggcagcacgccgtagaggatctcttcgagcttgttggcaccggtggcgcgaatgccttccaccgggccgggctcaatcgcttccaccgcttcggaaagcagcttggagagcacgccggtggtgtggataaacagcgccagcaaggccagaacgccagcgaacgggccgaggccgacggcgaccacgaacagcatggcgaagaccatttcgttaatggcgcggcaggcgtccatcaggcggcgaacgggctggtaaacccaccacggcaccaggttttcggcgctcatcaggccaaaggggatggagagaaccaccgccagcgcggtgccccagacggcgatttgcagcgtgacggccatttcggtgaggtaatcctgccactggctgaaatcgggcgggaagaagtcggcggcgaacgtcgccatgttgccgccgtctttgatcagcgtaagcggggccatttccgcgccctgccacgagacgaccaacacggcgagtacaacggcccagctcagaagcgagaaccagctgcgcttgggtggggcgatggtgatggtttgcatgtttggctccggtctgtaggccggataaggtgcttgcaccgcatccggcatcaacgcctgcacattgtcggatgcgacgccggggcgtcttatccgacctacgatttactgcaccgctttactcaccgtaactcatcgcgcttagcgcgttgttcaggcggtccaggtcatccagctgcgcctgaatctcggtggtttttgccagcttgtcctgctcattcacgcgagctggcgaatcggcaccagttgcaggtcgctggaagcgcggaatggcgcccagcccaggcgttccagcaccgctttttcttccggcgttttgccgtagttcataaagaagtcgtagatcttgtcttaggtggtttcggaaagattcttgcgccagacgatcggatcgcctgggatcagcggcgaattccagatcagcttcagttctttcagcttctctggcgcggaagcgcgtaccgtagccgccgaattcagccagcccggcatagacgccaatcatcgcgaacggcaaaccaccagtccgatgctggtcagcgcataccacgccagccagattttcagttgcgtgtcgaaatcattgttgaacgccaccagtccggcgaaacaggttcctggttacaccgcacgagccatagcggagagctaccgtcaggcggcaaatcctttaccgtcaatttcgctaaacctggcaactacaatctgacattacgcgataaagacggcttaattctcgctgggttaagtcatgccgtcagcggtaagggcagcacggcgcatactggtacggtagatatcgtggcggataaaacgctgtaccagccaggcgaaaccgcgaagatgctgattacctttccggagccaattgatgaagcattattgacgctggaacgcgatcgcgtggaacagcagtcgctgctttcgcatccggcaaactggctaacgctacaacgtttaaacgatacccagtatgaagcccgggttccagtgagcaattcctttgcgcctaacatcactttttcggtgctgtatacccgtaacggtcagtacagttttcagaacgccgggatcaaagttgccgttccccagctggatatccgggtgaaaacggacaaaacccattaccagcctggtgaactggtccatgtcgaattaacctcgtcgctgaaaggtaaacctgtttctgcgcagctaacggtaggcgtggtcgatgaaatgatctacgcgctgcaacagaaatcgcgcgaatatcggaaattttctatcggtggggcgtacatgtgctaccaactccaccggtcttattag

SEQ ID NO: 138421 - DNA, 1704 bp, Homo sapiens
atggccatctacaagcagtcacagcacatgacggaggttgtgaggcgctgcccccaccatgagcgctgctcagatagcgatggtctggcccctcctcagcatcttatccgagtggaaggaaatttgcgtgtggagtatttggatgacagaaacacttttcgacatagtgtggtggtgccctatgagccgcctgaggttggctctgactgtaccaccatccactacaactacatgtgtaacagttcctgcatgggcggcatgaaccggaggcccatcctcaccatcatcacactggaagactccagtggtaatctactgggacggaacagctttgaggtgcgtgtttgtgcctgtcctgggagagaccggcgcacagaggaagagaatctccgcaagaaaggggagcctcaccacgagctgcccccagggagcactaagcgagcactgcccaacaacaccagctcctctccccagccaaagaagaaaccactggatggagaatatttcacccttcagatccgtgggcgtgagcgcttcgagatgttccgagagctgaatgaggccttggaactcaaggatgcccaggctgggaaggagccaggggggagcagggctcactccagccacttgaagtccaaaaagggtcagtctaggaggatccccagcgacttcaagcgcaccgtcaacgccgggcatgaaaccaacgcgctggccgtcgccaacaagcaggtggatgttgccaccaacaacaccgaaaacctcgacaagctgaaaacctccgcgccagagaagctgaaagaactgaaggtgatctggaagtcgccgctgatcccaggcgatccgatcgtctggcgcaagaatctttccgaaaccaccaaagacaagatctacgacttctttatgaactacggcaaaacgccggaagaaaaagcggtgctggaacgcctgggctgggcgccattccgcgcttccagcgacctgcaactggtgccgattcgccagctcgcgctgtttaaagagatgcagggcgtgaaaagcaataaaggactgaatgagcaggacaagctggcaaaaaccaccgagattcaagcgcagctggatgacctggaccgcctgaacaacgcgctaagcgcgatgagttcgaccggagccaaacatgcaaatttgaacttctgcctgcagtcagcccaaacaggaaaggatacaaccacatggagagaaaaatggttgtgcatgtcagaggacaactgtgctgaggagacccctaaggcacagatgtgtgaagagggtacccacaaggagtgttggaagtgtggcctgatgggactggatcatggatgcggacttctcatgaacggtttagtaccatacccttggtgctgtccttatgatactatccgcgacattctgcgtagcgccctggcgcaagaggccacccagcagcacggcacgcaaggtttcgcggtgctgtcgtatgtgtatgaacacgaaaaacgcgacttagccagccgcattgtctccacccagcatcatcaccacgacctctccgtcgccacgctgcatgtgcacatcaaccacgacgactgtctggaaatcgccgtgttgaaaggtgacatgggtgacgtgcagcattttgccgatgacgttatcgcccagcgcggcgtgcggcacgggcatttgcagtgcttgccgaaggaagattga

SEQ ID NO: 138422 - DNA, 1470 bp, Homo sapiens
atgttcagcctcagcaccctgttaagcccggcgcacgccgaagagcaggaaaaggcgttgaatttcggcattatttcaacggaatcacagcaaaacctgaaaccgcaatggacgccgttcttgcaggatatggagaagaagctgggcgtgaaggtcaacgccttctttgccccggactacgcgggcattatccaggggatgcgcttcaataaagtggatatcgcctggtacggcaatctgtcggcgatggaagcggtggatcgcgccaatggccaggtcttcgcccagacggtcgcggcggatggatcgccgggttactggagcgtgttgatcgtcaacaaagacagtccgatcaacaacctgaacgatctgctggcgaagcggaaagatctcacctttggcaatggcgatcctaactccacctctggcttcctcgtccccggctactacgtcttcgccaaaaacaatatctccgccagcgacttcaagcgcaccgtcaacgccgggcatgaaaccaacgcgctggccgtcgccaacaagcaggtggatgttgccaccaacaacaccgaaaacctcgacaagctgaaaacctccgcgccagagaagctgaaagaactgaaggtgatctggaagtcgccgctgatcccaggcgatccgatcgtctggcgcaagaatctttccgaaaccaccaaagacaagatctacgacttctttatgaactacggcaaaacgccggaagaaaaagcggtgctggaacgcctgggctgggcgccattccgcgcttccagcgacctgcaactggtgccgattcgccagctcgcgctgtttaaagagatgcagggcgtgaaaagcaataaaggactgaatgagcaggacaagctggcaaaaaccaccgagattcaggcgcagctggatgacctggaccgcctgaacaacgcgctaagcgcgatgagttcggcgttgatgccggatgcggtgcaagcaccttatccggcctacagaccggagccaaacatgcaaaccatcaccagcgccccacccaagcgcagcgggttctcgcttctgagctgggccgttgtactcgccgtgttggtcgtctcgtggcagggcgcggaaatggccccgcttacgctgatcaaagacggcggcaacatggcgacgttcgccgccgacttcttcccgcccgatttcagccagtggcaggattacctcaccgaaatggccgtcacgctgcaaatcgccgtctggggcaccgcgctggcggtggttctctccatcccctttggcctgatgagcgccgaaaacctggtgccgtggtgggtttaccagcccgttcgccgcctgatggacgcctgccgcgccattaacgaaatggtcttcgccatgctgttcgtggtcgccgtcggcctcggcccgttcgctggcgtgctggcgtgctggcggtaccgagctcgaattcgaaaggagtaa

SEQ ID NO: 138423 - DNA, 2301 bp, Homo sapiens; identical to SEQ ID NO: 122757

SEQ ID NO: 138424 - DNA, 900 bp, Homo sapiens
atggggaaaaaacagagcagaaaaactggaaactctaaaaagcagagcacttctcctcctccaaaggatcgcagttcctcaccagcaatggaacaaagctggatggagaatgactttgacaagttgagagaaggcttcagacgatcaaactacaagctacaggaggaaattcaaaccaaaggcaaagaagttaaaaactttgaaaaaaatttagacgaatgtataactagaataaccaatacagagaagtgcttaaaggagctgatggagctgaaagccaaggctcgagaactatgtgaagaatgcagaagcctcaggagccgatacgatcaactggaagaaagggtatcagcgatggaagatgaaatgaatgaaatgaatgatggggagaatggaaccaagttggaaaacaatctgcaggatattatccaggagaacttccccagtctagcaaggcaggccaacattcagattcaggaaatacagagaacgccacaaagatactcctcgagaagagcaactccaagacacataattgtcagattcaccaaagttgaaatgaaggaaaaaatgttaagggcagccagagagaaaggtcaggttacccacaaagggaagcccatcagactaacagagcatctctcggcagaaactctacaagccagaagagagtgggggccaatattcaacattcttaaagaaaagaattttcaacccagaatttcatatccagccaaactaagcttcataagtgaaggagaaataaaatcctttacagacaagcaaatgctgagagattttgtcaccaccaggcctgccctaaaagagctcctgaaggaagcactaaacatggaaaggaacaaccagtaccagctgctgcaaaatcatgccaaaatgtaa

SEQ ID NO: 138425 - DNA, 856 bp, Homo sapiens
accaaaagtagatacaaccacaaagatggggaaaaaacagagcagaaaaactggaaattctaaaaagcagagcacctctcctcctccaaaggatcacagttcctcagcagcaatggaaaaaagctgggtggagaatgactttgacgagttgagagaggaaggcttcagacgatcaaactgctccaagctacaggaggaaattcaaaccaaaggcaaagaagttaaaaactttgaaaaaaatttagacgaatgtatatctagaataaccaatacagagaagtgcttaaaggagctgatggagctgaaagccatggctcgagaactacttgaagaatgtggaagcctcaggaaccgatgcaatcaactggaagaaagggatattatccaggagaacttccccaatctagcaaggcaggccaacattcagattcaggaaatacagagaacaacacaaagatactcctcgagaagagtaattccaagacacgtaattgtcagattcaccatagttgaaaggaaggaaaaaatgttaagggcagccagagagaaaggtcgggttacccacaaagggaagcccaacagaccaacagcagatctcttggcagaaactctagaagccagaatagagtgggggccaatattcaacattcttaaagaaaagaattttcaacccagaatttcatatccagccaaactaagcttcataagtgaaggagaaataaaatactttacagacaagcaaatgctgagagattttgtcaccaccaggcctgccctaaaagagctcctgaaggaagcactaaagatggaaaggaacaaccagtaccagccactgcaaaatcatgccaaaatgtaa

SEQ ID NO: 138426 - DNA, 1743 bp, Homo sapiens; identical to SEQ ID NO: 137823

SEQ ID NO: 138427 - DNA, 1410 bp, Homo sapiens; identical to SEQ ID NO: 118421

SEQ ID NO: 138428 - DNA, 957 bp, Homo sapiens
atggttatcctggaactggagattatcccagtcctttgttgcactggcaatgggcagggcctcattgtctgtggcccgacagccacagtgtatgcgggcaccgagaggtatgcactggagaccgaggttcccggatgttcagtgtacctggcagcaggggggacacacctgacctcggagcttgtctggcaggctcgaccaatcagaagaggtcttgggcgggcgctgccgtccagcgagccaataggcgggcagtcggagccgggcttgcccgggcatgtgggagctgccggctttccggacgccacgtgcagaccggaagagacacgcggggcttcagaaaagcaggccgggcgccgcctgtctccagccctcgctctgctcgggggtccagggccagagggggcggcgctggtcgttgggactcggcccagctgccgcggccagcaagtgaccaacgcccgagtccttcccgaaggaaaactaacaaacagaaaggacatccacaccaaaaacccatctgtacatcaccatcatcgaagaccaaaagtagataaaaccacaaagatggggaaaaaacagagcagaaaaactggaaactctaaaaagcagagcgcctctcctcctccaaaggaacgcagttcctcaccagcaatggaacaaagctggacagagaatgactttgacgagctgagagaagaaggcttcagacgatcaaattactctgagctatgggaggaaattcaaatcaaaggcaaagaagttgaaaactttgaaaaaagtttagaagaatgtataactagaataaccaatacagagaagtgcttaaaggagctgatggagctgaaaaccaagcctcgagaactacctgaagaatgcagaagcctcaggagccgatgcaatcaactggaagaaagggtatcagcgatggaagatgaagtgaatgaaatgaagtaa

SEQ ID NO: 138429 - DNA, 2742 bp, Homo sapiens
atgctcttctacacaggactgaagtgtggaattcgcatggtcaacatgaaaagtaaggaacctgccgtgggatctagattcttctctagaattagtagttggagaaattcaacagtgactggacatccatggcaggtctccctaaaatcagatgagcaccacttctgtggaggaagcttgattcaagaagatcgggttgttacagcagcacactgcctggacagcctcagtgagaagcagctgaagaatataactgtgacttctggggagtacagcctctttcagaaggataagcaagaacagaatattcctgtctcaaaaattattacccatcctgaatacaacagccgtgaatatatgagtcctgatattgcactgctgtatctaaaacacaaagtcaagtttggaaatgctgttcagccaatctgtcttcctgacagcgatgataaagttgaaccaggaattctttgcttatccagtggatggggcaagatttccaaaacatcagaatattcaaatgtcctacaagaaatggaacttcccatcatggatgacagagcgtgtaatactgtgctcaagagcatgaacctccctcccctgggaaggaccatgctgtgtgctggcttccctgattggggaatggacgcctgccagggggactctggaggaccactggtttgtagaagaggtggtggaatctggattcttgctgggataacttcctgggtagctggttgtgctggaggttcagttcccgtaagaaacaaccatgtgaaggcatcacttggcattttctccaaagtgtctgagttgatggattttatcactcaaaacctgttcacaggtttggatcggggccaacccctctcaaaagtgggctcaaggtatataacaaaggccctgagttctgtccaagaagtgaatggaagccagagaggaaagggtaaggtctgtggaaaaatattgccttcaccattgctggcagagaccagtgaggccatggttccatttgtttctgatacagaagacagtggcagtggctttgagcttaccgttactgctgtacagaagtcagaagcagggtcaggttgtgggagtctggctatattggtagaagaagggacaaatcactctgccaagtatcctgatttgtatcccagtaacacaaggtgtcattggttcatttgtgctccagagaagcacattataaagttgacatttgaggactttgctgtcaaatttagtccaaactgtatttatgatgctgttgtgatttacggtgattctgaagaaaagcacaagttagctaaactttgtggaatgttgaccatcacttcaatattcagttctagtaacatgacggtgatatactttaaaagtgatggtaaaaatcgtttacaaggcttcaaggccagatttaccattttgccctcagagtctttaaacaaatttgaaccaaagttacctccccaaaacaatcctgtatctaccgtaaaagctattctgcatgatgtctgtggcatccctccatttagtccccagtggctttccagaagaatcgcaggaggggaagaagcctgcccccactgttggccatggcaggtgggtctgaggtttctaggcgattaccaatgtggaggtgccatcatcaacccagtgtggattctgaccgcagcccactgtgtgcaattgaagaataatccactctcctggactattattgctggggaccatgacagaaacctgaaggaatcaacagagcagaattctacatcagctcaggccaaactgaatgacttcagctatgttggtacagagctacatctgaacttaaatacatttctaacaacactttctgcttacttcatcatcgagctctctctgaatgtttcttcattagatggtggcctagcaagtcgcctacagcagattcaagtgcatgtgttagaaagagaggtctgtgaacacacttactattctgcccatccaggagggatcacagagaagatgatctgtgctggctttgcagcatctggagagaaagatttctgccagggagactctggtgggccactagtatgtagacatgaaaatggtccctttgtcctctatggcattgtcagctggggagctggctgtgtccagccatggaagccgggtgtatttgccagagtgatgatcttcttggactggatccaatcaaaaatcaatgggataacaatagaaaacaatacaggaagttggccaacccaagacaaacgtagcattccagctgttgaccaatttcgaatggaaaattcggacagaaatacaaatgtgctgccagccatgcttggagagcctagaccaaaagtagataaaaccacaaagatggggaaaaaacagagcagaaaaactggaaactctaaaaagcagagcacctctcctcctccaaaggaacgcagttcctcaccagcaatggaacgaagctggatggagaatgactttgacgagttgagagtagaaggcttcagatgctcaaactacgagctacaggaggaaattcaaaccaaaggcaaagaagttaaaaactttgaaaaaaatttagacgaatgtataactagaataaccaatacagagaattgcttaaaggagctgacggagctgaaaccaaggctcgagaactacgggaagaatgcagaagcctcaggagctgatgcgatcaactggaagaaagggtatcagcgatggaagatgaaatga

SEQ ID NO: 138430 - DNA, 1909 bp, Homo sapiens
atgcatctcccacaaacctttgcaatcctcaggtcaagagatcccctcctgatcccactccaccagagcctttggtctgacacacacagctgtgtggagtctcagcggagcagctgctcaggcatgcacaaagacccaggggctttatgtactctggctctcggttccctggcaaatgggactgtaactcaggcaaggtccttgatttgcgtccacactgggcttccccaactggggcctccagttccttggcccaagagatttgatttctccctgggatggagtccccagagaaaggggcaggctgttttaggtgacttagacgttctacctgcagcctttggagtgcccgagcccaccaaggcagaagcagttccccggcacagcacagaaggaaaactaacaaacagaaaggacatccacaccaaaaacccatctgtacatcaccatcatcaaagaccaaaagtagataaaaccacaaagatggggaaaaaacagagcagaaaaactggaaactctaaaaagcagagcgcctctcctcctccaaaggaatgcagttcctcaccagcaatggaacaaagctggatgcagaatgactttgacgagttgagagaagaaggcttcagacgatcaaactactccaagctagaggaggaaattcaaaccaaaggcaaagaagttaaaaactttgaaaaaaaatttggacgaatgtataactagaataaccaatacagagaagtgcttaaaggaactgatggagctgaaagccaaggctcgagaactacgtgaagaatgcagaagcctcaggagccgatgcgatcaactggaagaaaggcaccacaccacacctattccaaaattgaccacatacttggaagtaaagctctccccagcaaatgtaaaagaacaagttataacaaactgtctctcagaccacagtgcaatcaaactagaactcaggattaagaaacccactcaaaacccctcaactacatggaaactgaacaacctgctcctgaatgactactgggtaaataaagaaatgaagtcagaaataaagatgttctttgaaaccaacgagaacaaaaacacaacataccagaatctctgggacgcattcaaagcagtgtgtagaggcaaatttatagcactaaatgcccacaagggaaagcaggaaagatccaaaattgacaccctaacatcacaattaagagaactagaaaagcaagagcaaacacattcaaaagttagcagaaggcaagaaataactaaaatcagagcagaaccgaaggaaatagagacacaaaaaacccttcaaaaaattaatgaatccaggagctggttttttgaaaggatcaacaaaattgatagacggctagcaagactaataaagaagaaaagagagaagaatcagagagacgcaataaaaaatgatgaaggggatatcaccaccgatcccacagaaatacaaactaccatcagagaatactacaaacacctctatgcaaataaactagaaaatctaaaagaaatggataaattcctcaacacatacaccctcccaagactaaaccaggaagaagctgaatctctgaatagaccaatagcaggctctgaaattgtggcaataattaatagcttaccaaccaaaaagagtccaggaccagatggattcacagccgaattctaccagaggtacaaggagaaactggtatttggtgcaggttattttggaatgtgggccttggctgcacttcccagcaacttgctaaagctgtctcaactctgtcaggaggcagcagaagtgaacgtcctggtacaatttgtctgtatttgtcctgcacaggaacctaccgaaattgacgtgcttttttctgtgttaccccctctttcccttatcttaaactag

SEQ ID NO: 138431 - DNA, 1968 bp, Homo sapiens
atgtcgatggccagacgattactcgagttacgtcaaattcctctgcatactattgcggaaaaatgtggctatagcagtacatcgtactttataaacacatttcgacaatattatggtgtaacgccacatcagtttgcgcaacattcgccagttctctttcgcagtttgccaggcggtatcggtattttcaggaggaaaagactcggcatgtttgggattattaagctgacaattcatacgattacgggaatgtggcgcgccagaaacggcaccatgactgataaccagcggcagcacgccgagaataaagccagagaggtcatcaggattgggcgtaaacgcatcgcgccgttacatgaatggcctatcggggttacctatttttgcatcattcagggcaatcgacatcaggcattatcatttgtcctgttattacccaaaacctggggtatcttgataccttcctcttactcggtaccgagctcgattcgaatcatgtcatacggcgtgcagctacgcgaaattgaagccagcaaagccatcggcgaccagtgggtcgtcacctctggcttgcaggctggcgatcgggtgatcgtttccggtttgcaacgcattcgtccgggtggtctggcgatcatgaacttaccggttgcgcagtatccgcagattgcgccaccgaccattaccgtcagcgctacctatccaggtgccgatgcgcaaacggtagaagactcggtcactcaggtgattgagcaaaatatgaatgggcttgatggcctgatgtacatgtcttcaaccagtgatgcggcgggcaatgcctctatcactctgaccttcgagactgggacatctcctgatatcgcacaggttcaagtgcaaaataaactgcaactcgctatgccttcattacctgaagcagtgcagcagcaggggattagcgtcgataagtcgagcagtaatatcctgatggtagcggcgtttatttctgataacggcagcctcaaccagtacgatatcgcggactatgtagcgtctaatatcaaagacccgctaagacaaggaaaattaacaaacagaaaggacatccacaccaaaaacccatctgtacatcaccatcatcaaagaccaaaagtaaataaaaccacaaagatggggaaaaaacagagcagaaaaactggaaactctaaaaagcagagcacctctcctcctccaaaggatcacagttcctcagcagcaatggaacaaagctggacagagaatgactttgatgagttgagagaagaaggcttcagccgatcaaactacgagatacaggaggaaattcaaacccaaggcaaagaagttaaaaactttgaaaaaaatttagatgaatgtataactagaataaccaatacagagaagtgcttaaaggagctgatggagctgaaagccaaggcacgagaactatgtgaagaatgcagaaggctcaggagccgacgtgatcaactggaagaaaggttcccaggtgtcaggacccagagattcctatacaacacaggggaccctgtgaagaaggctgtgttgagagcaggcagccttagtgggtgttggcatgggcaggatgtggccagaactcaagagacaccactgaggacaccagaggacactccggaggacacttcctggattcaatggtttcatccttctgccaaagcacctggtcctacccccagatataattttagaacaggtcacaggaaagggacaaagtgcctcggtaccgagctcgaactcgtatcaagggcagaggcagagacttctcaatcatacctgtttgcctgggtatcagcagcggtgtctgcagaacagtggtttttcgtgaaccgcgaatgctgctgtctgattgtcctctggaagttttgtctcagaggagtacccggccgtgacatgattacgaatcgtgctcggtaccagtatctgaatgggtga

SEQ ID NO: 138432 - DNA, 6441 bp, Homo sapiens
tcatttcatcttccatcgctgataacctttcttccagttgattgcattggctcctgaggcttctgcattcttcacgtagttctcaagccctggtttcagctccatcagctcctttaagcacttctctgtattggttattctagttatacattcgtctaaatttttttcaacattttgaacttctttgcctttggtttgaatttccttctgtagctcatagtttgatcgtctgaagccttcttctctcaactcgtcaaagtcattctccatccagctttgctccattgcttgtgaggaactgtgttcctttggaggaggagaggtgctctgctttttagagtttccagtttttctgctctgttttttccccatctttgtggttttatctacttttggtctttgatgatagtgatgtacagatgggtttttggtgtggatgtcctttctgtttgttagttttccttctctagacctaagaaacaggatcgacagcaacacagtgatagtggggtactcaatactccatgacagcacagtgtgatcctgatgaaaaagcacaagcaaagcaatgtctaccaagagtggaagtggtcccgtcaaagcacaagtgaaccagtcaagagcaagagacatggcaacagttctttgggaatactcaaggcattttgcttgttgactatctgtctgtgggaaagaggtggtcttcacaatcgatgaatcataatcctcataactgattatcatcatcgataatttactgtcaaaggcccattcctgagatgaagactgctctgctttcttgattctagaaaggcatggagttgaattttcagggcccttggccacgaacagctgctggcatggccactccttggccttagctggtgctataggaacctgtagctcctcaaaatagtaagagccatctatgacaaacccacagccaatgtcatatcgaatggtcaaaagctggaagcattccctttgaaaaatggcacaagacaggaatgccctctctcaccactcctattcaacatagtgttggaagttctggccagggcaattaggcaggaaaaggaaataaagggtattcagttaggaaaagaggaagtcaaattgtccctgtttgcagttgacatgattaaatatctagaaaaccccattgtctcagcccaaaatctctttaagctggtaagcaacttcagcaaagtctcaggatacaaaatcaatgtacaaaaatcacaagcattcttatacacaaataacagacaaacagagagccaaatcatgagtgaactcccattcacaattgattcaaagagaataaaatacctaggaatccaccttacaagggatgtgaaggacctcttcaaggagaactacaaaccactgctcaatgaaataaaagaggatacaaacaaatggaagaacattccatgctcatgggtaggaagaatcaatatcgtgaaaatggccatattgcccaaggtaatttatagatacaatgccatccccatcaagctaccaatgactttcttcacagaattggaaaaaactactttaaagttcatatggaaccaaaaaagagcctacatcaccaagtcaatcctaagccaaaaggacaaagctggaggcatcacgctacctgacttcaaactacactacaaggctacacagggtacttccaacagacctgcagctgagggtcctgtcgtgttagaaggaaaactaacaaccagaaaggacatctacaccgaaaacccatctgtacatcaccatcatcaaagaccaaaagtagataaaaccacaaagatggggaaaaaacagagcagaaaaactggcaactctaaaaagcagagcgcctctcctcctccaaaggaatgcagctcctcaccagcaacagaacaaagctggacggaaaatgactttgacgagttgagagaagaaggcttcagacgatcaaactactccgagctacaggaggaaattcaaaccaaaggcaaagaagttgaaaactttgaaaaaaatttagacgaatatataactagaataaccaatacagagaagtgcttaaaggagctgatggagctgaaagccaaggctcgagaactacgtgaagaatgtagaagcctcaggagccgatgcgatcaactgcaagaaagggaatcagtgatggaagacgaaatgaatgaaatgaagcgagcagtgaagtttacaaaaaaaagaataaaaagaaatgaacaaaccctccaagaaatatgggactatgtgaaaagaccaaatctacgtctgattggtgtacctaaaagtgatggggagaatggaaccaagttggaaaacactctgcaggatattatccaagagaacttccccaatctagcaaggcaggccaacattcagattcaggaaatacagagaacgccacaaagatactcctcgagaagagcaactccaagacacataattgtcagattcaccaaagttaaaatgaaggaaaaaatgttaagagcagccagagagaaagactttaaaccaacaacgatcaaaagagacaaagaaggccattacataatggtaaagggatcaattcaacaagaagaactaactatcctaaatatatatgcacccaatacaggagcacccagattcataaagcaagtcctgagtgacctacaaagagacttagactcccacacattaataatgggagactttaacaccccactgtcaacattagacagatcaacgagacagaaagtcaacaaggatacccaggaattgaactcagctctgcaccaagcagacctaatagacatctacagaactctccaccccaaatcaacagaatatacatttttttcagcaccacaccacacctattccaaaattgaccacatacttggaagtaaagctctcctcagcaaatgtaaaagaacagaaattataacaaactatctctcagaccacagtgcaatcaaaccagaactcaggattaagaaactcactcaaaactgctcaactacatggaaactgaacaacctgctcctgaatgactactgggtacataacgaaatgaaggcagaaataaagatgttctttgaaaccaacgagaacaaagacacaacataccagaatctctgggacacattcaaagcagtgtgtagagggaaatttatagcactaaatgcccacaagagaaagcaggaaagatccaaaattgacaccctaacatcacaattaaaagaactagaaaagcaagagcaaacacattcaaaagctagcagaaggcaagaaataactaaaatcagagcagaactgaaggaaatagagacacaaaaaacccttcaaaaaattaatgattccaggagctggttttttgaaaagatcaacaaaattgatagaccgctagcaagaccaaaaaagaagaaaagagagaagaatcaaatagacgcaataaaaattgataaaggggatatcaccaccaatcccacagaaatacaaactaccatcagagaatactacaaacgcctctatgcaaataaactagcaaatctagaagaaatggataaattcttcgacacctacactctcccaagactaaaccaggaagaagttgaatctctgaatagaccaaaaacaggagctgaaattgtggcaataatcaatagcgtaccaaccaaaaagagtccaggaccagatggattcacagccaaattctaccagagctacaaggaggaactggtaccattccttctgaaactattccaatcaatagaaaaagagagaatcctccctaactcattttatgaggacagcatcatcctgataccaaagccgggcagagacacaaccaaaaaagagaattttagaccaatatccttgatgaacattgatgcaaaaatcctcaataaaatactggcaaaccaaatccagcagcacatcaaaaagcttatccaccatgatcaagtgggcttcatccctgggatgcaaggctggtccactatacacaaatcaataaatgtaatccagcacataaacagaaccaaagataaaaaacacatgattatctcaatagatgcagaaaaggcatttgacaaaattcaacaacccttcatgctaaaaactctcaataaattaggtattgatgggacgtatctcaaaataataagcgctatctatgacaaacccacagccaatatcatactgaatgggcaaaaactggaagcactccctttgaaaactggcacaagacagggatgccctctctcaccactcctattcaacatagtgttggaagttctagccagggcaattcggcaggagaaggaaataaagggtattcaattaggaaaagaggaagtcaaattgtccctgtttgcagacgacatgattgtatatctagaaaaccccattgtctcagtccaaaatctccataagctgataagcaacttcagcaaagtctcaggatacaaaatcaatgtgcaaaaatcacaagcattcttatacaccaataacagagaaacagagaaccaaatcatgagtgaactcccattcacaattgcttcaaagagaataaaatacctaggaatccaccttacaagggacgtgaaggacctcttcaaggagaactacaaaccactgctcaatgaaattaaagaggatacaaacaaatggaagaacattccatgctcatgggtaggaagaatcaatattgtgaaaatggccatactgcccaaggtaatttatagattcaatgccatccccatcaagctaccaatgactttcttcacagaattggaaaaaactactttaaagttcatatggaaccaaaaaagagcccacatcgccaagtcaatcctaagccaaaagaacaaagctggaggcatcatgctacctgacttcaaactataccacaaggctacagtaaccaaaacagcatggtactggtaccaaaacagagatatagatcaatggaacaaaacagagccctcagaaataacgccacatatctacaactatctgatctttgacaaacctgaggaaaacaagcaatggggaaaggattccctatttaataaatggtgctgggaaaactggctagccatatgtagaaagctgaaactggatcccttccttacaccttatacaaaaatcaattcaagatggattaaagacttaaacgttagacctaaaaccataaaaaccctagaagaaaagctaggcattaccattcaggacataggcattggcaaggacttcatgtctaaaacaccaaaagcaatggcaacaaaagacaaaattgacaaatgggatctaattaaactaaagagcttctgcacagcgaaagaaactaccatcagagtgaacaggcaacctacaaaatgggaggaaattttcgcaacctactcatctgacaaagggctaatatccagaatctacaatgggctcaaacaaatttacaagaaaaaaacaaacaaccccatcaaaaagtgggcgaaggacatgaacagacacttctcaaaagaagacatttatgcagctaaaaaacacgtgaaaaaatgctcatcatcactggccatcagagaaatgcaaatcaaaaccacaatgagataccatctcacaccagttagaatggcaatcattaaaaagtcaggaagcaacagatgctggagaggatgtggagaaataggaacacttttacactgttggtgggactgtaaactagttcaaccattgtggaagtcagtgtggcgattcctcagggatctagaactagaaataccatttgacccagccatcccattactgggtatatacccaaacgactataaatcatgctgctataaagacacatgcacattgagtctaccagaaatccgcaactgcccaacgaaaagtgtcccagtccccttctctgttgatgaaactcagtatcatgttgaagatactagtcctgtaagctggcaagtaaaagttctaggcaagcatatacatcagggaagcagctatgaagatgtttggctgcctcagcgcatgcaaggaaaactaacaaacagaaaggacatccacaccaaaaacccatctgtacatcaccatcatcaaagaccaaaagtagataaaaccacaaagatggggaaaaaacagaacagaaaaactggaaactctaaaaagcagagcgcctctcctcctccaaaggaacgcagttcctcaccagcaatgcaacaaagctggacggagaatgactttgacgagctgagagaagaaggcttcagacgatcaaattactctgagctacgggaggacattcaaaccaaaggcaaagaagttgaaaactttgaaaaaaatttagaagaatgtataactagaataaccaatacagagaagtgcttaaaggagctgatggagctgaaaaccaaggggggtgctttagagtcgcactga

SEQ ID NO: 138433 - DNA, 3345 bp, Homo sapiens
atgacctggacacatgaggctgttaataggagagaacctttgaggggatgcgagccgaactgggatgtcgatgtcaagcctgcggggtgtatgatctcccgtcgtaacgagctgccgtacaccttaggtttacgcatcgatatgctggtcgatcttggtacgcccgcttctctgatgggccaatcctcagtatataatacgacggaccgacacagcacacaccggatggacgggctggaacagctcatgcagcaggcagattttgcggctgatattgctgttgtggcgccgtgggacaactggtcccccaccgctggtaggttcggccttatccgactgctggatgaacaaacagcaccttatgcctggtatacctctccaatgcacctgatggatgaaaaatgttcatgccaccgtcagcgcccggtcatcggccttaatcagccacagtaccagagtggcaccatcgaagtcgataacgtgtcatttgcttatcgcgatgactatctggtgttaaagaacattaatctctctgtgccttcgcgcaattttgtggcgctggtcgggcataccggcagtggcaaaagcaccctcgccagtttattgatgggctattacccgctaacggaaggtgagattcgccttgatggtcgtccattaagttcgctaagtcacagcgcgctgcgccagggcgtggcaatggtgcagcaagatccggtggtgctggcggataccttcctcgccaacgtgacgctgggtcgggatatctccgaagaacgcgtctggcaggcgctggaaaccgtgcaactggcggagctggcgcgtagcatgagcgacggtatttacacgccgctgggcgagcaggggaataatctctcagttgggcaaaagcaactgctggcactggcgcgcgtgctggtcgagacgccgcaaatcctgatccttgatgaggcaaccgccagcattgactccggtactgaacaggcgattcaacatgctctgcggcgtgattgctcaccgcttatcgaccattgtgatgccgacaccattctggtgcttcatcgtgggcaagccgtggagcagggcactcaccagcaactgctggcggcccagggacgctactggcagatgtatcaactgcaacttgcgggcgaagagctggcagccagcgtgcaaccattaccgaattctgaccggaggggatctatgaagctggtgaccgtgataatcaaaccattcaagctggaagacgttcgtgaagcgttatcttccattggtattcagggcctgaccgtcaccgaagtgaaaggtttcgggcgtcagaaagggcatgccgagctgtaccggggggcggaatacagcgtcaatttcctgccaaaagcggcttacaccggaaaaattggcgacggcaaatcttcgtcgctgaattgcaacgcgtcattcgtattcgtaccggcgaagccgacgaagcggcgctgtatctctggcacacagcaacagaacgagatggtccgttccggaattttacggccggggcatttcgggcctccctaccccatcctgcccgtcatggtcggagaccaattttggctgcaccctttatgcccgtcaatccttcaaggcttcctccacgccgacggcatttggcgtccggtagatcgcttcgatttaattgctgtacagcaggcgacgaaacctgttctgcgcgcagcggggagcgtcgtagcctggtattttgactttggttttgcgggttttgttattgcctggtacgtgtcgaatctggttggcggcaccatgtactggtggtttgccgcgcgcgaattacgccgccgaaatatccataacgccttcaaattgaatctgtttgagtctgcccgatacattaaaggcgcgtggagttttgtctggtcaaccaacattgcccactccatctggtcggcgcgtaactcgtgcagcacagtgttggtggggatcgtgttaggacccgctgccgccgggttatttaaaatcgccatgacattcttcgacgccgccggaacgccagcgggtttgctgggtaaaagtttttacccagaggtgatgcgtttagatccgcgcaccaccagaccgtggttgttaggtgtgaagtccggtttactggcgggcggaatcggtattctggtggcgctcgcggtgttgatcgtcggcaagccgctcatttcgctggtgtttggcgttaagtatctcgaagcgttggccagcgtgaataacatcgccagttggttatcgtttttcagcaaccccttgtatctggctttcacgaagccgaactgtcgcttgatgatgcgaaatgggtgctccaacctggcccggatgctggctttcatgattcatgtatggccgggccaggtattaccgctttatgcgctggacgatctcgcaaacctttttggtgtgaagaaaattctcgtcaaagacgaatcaaaacgattcggtctgaacgccttcaaaatgcttggcggtgcgtacgccatcgctcaattattgtgtgaaaaatatcatcttgatatcgaaacgctgtcatttgagcacctgaaaaatgccatcggcgaaaaaatgactttcgcgaccaccaccgacggcaaccacgggcgcggtgtggcgtgggcagcacagcaactcggacagaatgcggtgatttacatgccgaaaggttctgctcaggaacgcgttgacgccattctgaacctcggtgccgagtgcatcgtcacggatatgaactatgacgataccgttcgcctgaccatgcaacacgcgcagcagcacggctgggaagtggtacaggacacggcatgggaaggttacaccaaaatcccaacctggatcatgcaaggctacgcaaccctggcagatgaagccgtcgagcaaatgcgtgaaatgggcgtaaccccgacgcacgttctgctgcaagccggtgtcggagcaatggccggtggtgtgctgggttatctggtcgacgtctatagcccgcaaaatctgcacagcattattgttgaacctgacaaagctgactgtatttatcgctccggcgtcaaaggcgacatcgtcaaccgttggcgcgttgccgcattaggtatgcgcgtgctgggtaatccgtacggcaacgacccgcgcatcatctccggtgaatccggcgctgtcggtttgggcgttctcgcagcggttcattatcacccgcaacgtcaaagcctgatggaaaaactggcgctgaacaaagatgccgtggtgctggttatcagcactgaaggcgacaccgacgtgaagcactaccgcgaagttgtctgggaaggcaacacgctgtag

SEQ ID NO: 138434 - DNA, 684 bp, Homo sapiens
gggggtgctggcggataccttcctcgccaacgaaacacacattgttgtataatagggaagaacgcgtctggcaggcgctggaaaccgtgcaactggcggcgtggcgcgtagatgagcgacggtatttacacgccgctggcgagcaggggaataatctctcagttgggcaaaagcaactgctggcactggcgcgcgtgctggtcgagaccccgcaattcctgaccctgaatgggcacaccccagccagttgcttccggtactgaacaggcgattcaacatgctctggcgccggtgcgtgaccataccacgctggtagtgattgctccccgcttatcgaccattgttgatgccgacaccattctggtgcttcatcgtgggcaagccgtggagcagggcactcaccagcaactgctggcggcccagggacgctactggcagatgtatcaactgcaacttgcgggcgaagagctggcagccagcgtgcgtgaagaggaatcattgagcgcctgaatagcgcaatatttcatcgttggtgcaaaaatgtaacgcactgtgcactgtcatagtgcgttttcattttcaaacttcttaacttcctgctctctttctcgtttttcatttctggcacaccgcttgcaataccttcttcgtgtagcagaaccattaccgaattctgaccggagg

SEQ ID NO: 138435 - DNA, 2208 bp, Homo sapiens
atgctgttggtttctgcatcggtcaatgcaatgagcatcagcggtcaggcgggtaaagaatacaccaatattggtgtcggttttgggactgaaacgacgggcctggcgttaagcggtaactggacacataacgacgacgacggtgatgtcgctggcgtggggctggggttgaatctgcctctcgggccgttaatggcgaccgttggcggaaaaggcgtttacaccaacccgaattacggcgatgaaggttatgccgcagcggtaggaggtggtttgcagtggaaaattggcaacagcttccgtttgtttggcgagtattactactctccggattcgctctccagcggtattcaaagttatgaagaagcgaatgctggcgcgcgttacaccatatgcgtccaggtgtttgtggtggtgatgttaattcgcaaccagctgttcaccccagtgaacacagcgatagacggcttcgccacgaactacgcgattatgccggcgtacgcggtaggggaaggtgttgcgacgcacggattgcagttcgaactgatgcgtacgacgggcgggaacacccagcacgttttccatcatccacttccactctttgccatgtggcgctacgcggccgaaatgtttccataccagcaaatgtgccagttcgtgcggtaccacttcttcaataaaagcttcactgttttccaacagcaaaacgggattgaggcgaatttcatagctttccagccaggccgttccggcggaggttccgcgctgggtcgaaacgtgtttggtttccggtaccagccacaatgtcagcaggataaacagtacgttcagagccgcatacacccagaaggtgttggcgttacccagcgtgttgagcatggtcaggaacgttgcgccaacgatcatgtgcaatccagtgggaccgagctgatgcaagagggcgttatgtcagcttccctgaagaatcaacaaggctttagcctgccggaggtaatgttggcgatggtgttgatggtgatgattgtcactgcgttatcgggtttccagcgaacattaatgaacagtcttgccagcagaaaccagtaccaacagctctggcggcatggctggcagcaaacgcaactgcgcgcgatttcgccacctgccaactggcagtcaggagccgctatgttaagggtctaccattccaatcgtctggacgtgctggaagcgttgatggagtttattgtcgaacgcgaacggctggacgatcctttcgaaccagagatgattctggtgcaaagtaccggtatggcacagtggctgcaaatgaccctgtcgcaaaagtttggtattgcggcaaacattgattttccgctgccagcgagctttatctgggatatgttcgtccgggtgttaccggaaatccccaaagagagcgcctttaacaaacagagcatgagctggaaactgatgactctgctgccgcaattgctggagcgcgaagactttaccctgttgcggcattatctgactgacgatagcgacaagcgaaaactgttccagctttcctcaaaagcggcggacctgtttgaccagtatctggtctatcgtccggactggctggcacagtgggaaacaggacatttggttgaagggctgggagaagcacaggcctggcaagccccgttgtggaaggcgctggtggaatatacccatcaactcgggcaaccgcgctggcaccgcgccaatctctatcagcgctttatcgaaacgctggagtccgcgacgacctgcccgccggggtaccttcgcgcgtctttatatgcggcgattcaacatgctctggcgtcggtgcgtgaacataccacgctggtagtgattgctcaccgcttatcgaccattgttgatgccgacaccattctggtgcttcatcgtgggcaagccgtggagcagggcactcaccagcaactgctggcggcccagggacgctactggcagatgtatcaactgcaacttgcgggcgaagagctggcagccagcaaagggcatgccgagctgtaccggggggcggaatacagcgtcaatttcctgccaaaagtaaaaatcgatgtggcgattgctgatgaccaactcgatgaagtgatcgatatcgtcagtaaggcggctacaccggaaaaattggcgacggcaaatcttcgtcgcatgaatgcaacggtaccgagctga

SEQ ID NO: 138436 - DNA, 2094 bp, Homo sapiens
tgattgctcaccgcttatcgaccattgtgatgccgacaccattctggtgcttcatcgtgggcaagccgtggagcagggcactcaccagcaactgctggcggcccagggacgctactggcagatgtatcaactgcaacttgcgggcgaagagctggcagccagcgtgcaaccattaccgaattctgaccggaggggatctatgaagctggtgaccgtgataatcaaaccattcaagctggaagacgttcgtgaagcgttatcttccattggtattcagggcctgaccgtcaccgaagtgaaaggtttcgggcgtcagaaagggcatgccgagctgtaccggggggcggaatacagcgtcaatttcctgccaaaagcggcttacaccggaaaaattggcgacggcaaatcttcgtcgctgaattgcaacgcgtcattcgtattcgtaccggcgaagccgacgaagcggcgctgtatctctggcacacagcaacagaacgagatggtccgttccggaattttacggccggggcatttcgggcctccctaccccatcctgcccgtcatggtcggagaccaattttggctgcaccctttatgcccgtcaatccttcaaggcttcctccacgccgacggcatttggcgtccggtagatcgcttcgatttaattgctgtacagcaggcgacgaaacctgttctgcgcgcagcggggagcgtcgtagcctggtattttgactttggttttgcgggttttgttattgcctggtacgtgtcgaatctggttggcggcaccatgtactggtggtttgccgcgcgcgaattacgccgccgaaatatccataacgccttcaaattgaatctgtttgagtctgcccgatacattaaaggcgcgtggagttttgtctggtcaaccaacattgcccactccatctggtcggcgcgtaactcgtgcagcacagtgttggtggggatcgtgttaggacccgctgccgccgggttatttaaaatcgccatgacattcttcgacgccgccggaacgccagcgggtttgctgggtaaaagtttttacccagaggtgatgcgtttagatccgcgcaccaccagaccgtggttgttaggtgtgaagtccggtttactggcgggcggaatcggtattctggtggcgctcgcggtgttgatcgtcggcaagccgctcatttcgctggtgtttggcgttaagtatctcgaagcgttggccagcgtgaataacatcgccagttggttatcgtttttcagcaaccccttgtatctggctttcacgaagccgaactgtcgcttgatgatgcgaaatgggtgctccaacctggcccggatgctggctttcatgattcatgtatggccgggccaggtattaccgctttatgcgctggacgatctcgcaaacctttttggtgtgaagaaaattctcgtcaaagacgaatcaaaacgattcggtctgaacgccttcaaaatgcttggcggtgcgtacgccatcgctcaattattgtgtgaaaaatatcatcttgatatcgaaacgctgtcatttgagcacctgaaaaatgccatcggcgaaaaaatgactttcgcgaccaccaccgacggcaaccacgggcgcggtgtggcgtgggcagcacagcaactcggacagaatgcggtgatttacatgccgaaaggttctgctcaggaacgcgttgacgccattctgaacctcggtgccgagtgcatcgtcacggatatgaactatgacgataccgttcgcctgaccatgcaacacgcgcagcagcacggctgggaagtggtacaggacacggcatgggaaggttacaccaaaatcccaacctggatcatgcaaggctacgcaaccctggcagatgaagccgtcgagcaaatgcgtgaaatgggcgtaaccccgacgcacgttctgctgcaagccggtgtcggagcaatggccggtggtgtgctgggttatctggtcgacgtctatagcccgcaaaatctgcacagcattattgttgaacctgacaaagctgactgtatttatcgctccggcgtcaaaggcgacatcgtcaaccgttggcg

SEQ ID NO: 138437 - DNA, 1164 bp, Homo sapiens
atgccgccttctttcggccacaccacgtcaattggcgtacccgcctggcgtgcaacgaaagcagaaccgttccagatcatgccgaggttaacttcgccttccatgtacgggttcgccgggttatcggagttaaaggctgccacgtttggcatcagttttttcagctcgttatatgcagcttcaatctctttcgggatcgttggtgttacccggagtagccccagcttacgcagcgcccatctggaacacttcacgggcatcgtcggtcaacagcaggctgcctttgtactctggcttccacagatcggcccagctggtgacagatttcggatccaccgcatcaccgttaacaccaatcgccgtcgcaccccagatatacggaatggagtagtcgttattcgggtcaaaaggcttgttgagcatgtctggatcgagattgctgaaggagggagggagagagggcaaacagtggtttacactgtggcccttgcgttaaggttattcgggggtaatccgtttgttcccttacccttgagcccattggttactggcagccggacagactcacacacgtggcgccaggacgttgcagatgacaaggcactgcgggaagactggaaccagcggcgtaagagaatcatgggccctgatagcgcaaatttcatcgtgggccaaaatgtaacgcactgggcactgtcatatgcgttttcattttcaactgtcttaacttcctgctctctttctcgtttttcatttctggcacaccgcttgcaataccttcttcgtgtagcagaaccattaccgaattctgaccggaggggatctatgaagctggtgaccgtgataatcaaaccattcaagctggaagacgttcgtgaagcgttatcttccattggtattcagggcctgaccgtcaccgaagtgaaaggtttcgggcgtcagaaagggcatgccgagctgtaccggggggcggaatacagcgtcaatttcctgccaaaagtaaaaattgatgtggcgattgctgatgaccaactcgatgaagtgatcgatatcgtcagtaaggcggcttacaccggaaaaattggcgacggcaaaatcttcgtcgctgaattgcaacgcgtcattcgtattcgtaccggcgaagccgacgaagcggcgctgtaa

SEQ ID NO: 138438 - DNA, 2661 bp, Homo sapiens
ctaaagctctctgcgtgtcagcgcacccatggttttcagttcatcacccgcccaggttgccacttcttcactgtgtgtgatttccggtttgtacagcacgtaggaaagccacggcgcaatgataagcaagataaccccaaccggcaggaagcagaggaaccactgcaaccagctaatctggataccggcaattttgctgacgaactccagacccagcacgtttggtgccgcaccggtgacaaacatggacgaactcagactggtactaatgaccatcatccacatcaaatagccgccaatacgacgcgcggacggatcgttcgggaatgatttaaacaacggcggcaggtttttaatgaccggaaaaaccgtacccccggtacgcgcggtgttggaaggtgtaaacggtgccagcagaatgtcgataatgacaatcgcataacccaacgtcagcgtgcgtttgcccatgaatttcaccaggaaaagggcaatgcgacgacctaacccggaaacttcataccctaatgcaaaaataaatgcgccaaataccagccataccgtggtgctggaaaaaccagccaggccccatttcagcgcctgtttttgcgcattaaacgctgggtcagctaattctttggcatcaaagagcaggtaattactgccaataacgcaaatagtaaccgcaataaaactgatcgctgttgccggaattggctcgaggatcatgccgacaatcattgccacaaacacagcgaagtaatgccatgcctgcggcggcataccgtcggggacagggataagaaacatgacacccatcaccaccagtggggccaatagtttccatatattatcttttggttggtatcgccgttgatcgccatcagtaggagcaaggtatcgacccacggtctgcgccagcgggatttcatactcctgcgcgaggcgagtcagagttttcgctttgtactgcgcgtttacgatgtcgccgatcacattgccggtaaatttaccgtccatgatctccagttcattggctaccacggcggtcaggcgcagcttgtcgcgcaggtattcagcaaagaaagtaaagccgccggaggcaatcgccactttccagcccagcgtttccagcttgagcaccagttgcgttaagcctggcatcagcggcagattttcacgcacctgttgcagaatattggcgtcagcgcctttcagcgtcgccacacggctgcgcaggctggcggtaaaatcgagttcgccgcgcatcgcccgttcggttacttccgccaccatctcgcccgttccggccagtttggcaatttcatcaatacattcaatctggatggcggtggagtccatatccatcaccagcaaacccggcgtgcgcaggtgcgggattttccccagcggggcgacatccagctgcgcttcgtgggccaggcgtgtagcccgtgcggtgagtgaacctgccagacgaatcacctgataatcttccacgcaccaggcggcaacaatcaccatcgccgcacccagtttgctctggtattgggtcagacgttgtttatccagcccacgaccatacagcagccagccgctacgacccagtatgttgcatttttccggcccgcccatgtacggcgcaatgtgcgaatatacacgcagcggattctggcaatccttgtggcgcatggcgcggctaaactcatactggttgaattccgctatagcgcccggcagcagcggatgctgggttttacgtttcgcttcgtcttcggtaaagcccgccatatacaagccgattggcccggcggtgcacagcaccagatctacccagtccagcgccttgtcagatgccaacaacggatcgctttctccggtcaacgcttcggcttcatcttcgttcatcgcaaggatagagacgtgatctttgaggaattgctgccaccactgcggattctcggcaatgacaaacttggtgcccagcgtcagcaccaccggtacgttatatttcttcgcgtactcaatggctttcatggttgcttccggcatgggttcacccggcttgcaacgcaccagatatgaggtgagaaccagtgccgaggctccggcaatcacatcttccggaatgctttcagcccgcagctggttcatgtggcctggactgatagcaaaggtacgttccccggactcgccaatcagcgtaaagcaacgaccaatcgggccatccacgccttgtagatagttaagatcggtacggctggaagtgttacacaggtaacgataggcataactgccaatttcaatattgctgcacatgacgcccagcagcaccgaacggtcgtccgcgagcaccgagtagttgtgcatggtgttaccaatggtgccacccgcaaactgatgggtaatcaggtttttctgttttagttcctgataaagcgcttcggctacatcatcctcaatcaccagtgaatgcccggcgcttaatccataacgctcaataaattcatcatccactttcgcttcaatatcgaccagcgtttgatcgatacccactacccaggcagcgctggtttcgttttctggctggaattgctgaagcagcggatcgcgtgcgtttacggggaagtaatgtttggatttacgtttaccgggaaatttcat

SEQ ID NO: 138439 - DNA, 1264 bp, Homo sapiens
tcactcattgctctctccggttatgatcacatcgatccctttctcttccagcgcctgacgaaacgccggatcgatacctgcgtcggtaatcagcttatcgacgctttcaagactgcaaactacgttggggcttttacggccaaactttgatgagtccgccatcaaaatcacttcgcgcgcggcattgcacattgccttactgacggtataaacctcgttaaaggtggttacgcccgcattgagatcgatgccgtcggtgcccataaacaatttatcgaaggtgaaatgctcgaaggcattctctgccagttgcccgtgaaatgaggccgattttttgcgaaacgttccgcctggcatcaggatagtttgttcgttatccagttcggatagcgcattgacgatatgcaggctgttggtcatcaccgtgatgttattaaagcgcgagagcaggggaaccatctgcaaaacggtactgccagcatcaagaatgatcgaatcgccatcatggataaaactaacggcagcttctgcaatcagctctttcttgtgggtgttgatgagtgttttatgatcgataggcggatcggattcctctttattcaacaccactccgccataagtacgaatgacggttccggcatgttccagaatgaccagatcgaagcaggggtagttgacaaaaacccgtagcggtgtcgccacgataggcgcgacacgccttatagcccaatggtctcctcctcgaggagatgctggatctttcgtaatgtatggggactccacaccaatgttggatttttctgtttgaagcagagataaaataaggacataaatccctgacggccaagcccacagttgtttattttcaatagtgacccgtaaaacaggcgaagccttcgccgccgggctggcacctgactgtgcaataaccgtacatacccaggcagatacgtccagtcccgatccgttatttaatcctctaaaaactggcgtttgccaactggataacgcgaacgtgactgacgcgatcctcagcagggcaggagggtcaattgctgactttaccgggcatcggcaaacggcgtttcgcgaactggaacgggtgcttaattttccgcaatcaaacttgtgccttaaacgtgagaaacaggacgaaagctgttcattaacgcaggcattaccatcggaactcaaggtgagcgccgacaatgtctcattaaccggtgcggtaagcctcgcatcaatgctgacggagatatttctc

SEQ ID NO: 138440 - DNA, 1635 bp, Homo sapiens
atggtttcaacctttcttagatcttgtgggggatcctatagagtcgacttgcaggacagcaagctcgacggcttgttcgacttaagtaccatgaatgatgctgttaggctggaatgcgccaagcataaaggtggggcatggcatcaaaaggaacccaagagggagccgatcactgtgggggaaggactactgggactgcgacaagttccaggaaccacgctctggcaggacaaagcagtctttacctgcagcatagcaccttctcgggggtgccggcccggctgcatccagacagacccactgcgtgcctgtctccacactaggaccatcggggaccagcaactgacatgtggtggaaaccctacggccctggagcccaaggagagcaacggctgtaacaagtgcacaggtgaccctgggcaaatcgcacaggctcctggaacttcagaaaggggaagaattattcctgcctctggcgacatcagcgaatgtgccttgagttacgggagtgttttgaaggctgaaagctttgtgtacatggaaggggtcaaagacagccacaagcctgtccctttggtcttggtcatcatgttaaccccaggtttcgatttaatcctacatgctcctttcttatgtgtgaggctgagccagggtggcatcctcgtcagcagtcgcacctgccaggccatgccacagcttgtgccacttggcctgtctgttattcacacacgtctgttgcactgggcaacaacccctgtgctgtataccccacacttcaatcagcccttgccagcgaccatccacccatttctgcccagctgggctgtcaatcagctgcaagcaggcccagcaaccagcatctgccacattccaccaaccagattgctgccagacctagcacatggctgcacatggccgcccttgcatgctggctgcctggagaaactcaaaatttctgtgacacaggcctcttgtacattgcaagtgggagtacacaatggttacaacctccatgagggaggaattttggcaacgccggaaatgtttgtcgcttttctcaccacttattgcgtgggtaccctgattggtcccgcactggcaaaacctctgaccgactggaaatgtaaagtcactatcttttggtggacgaacgccctgctgccagtgattagcctcgcgatgttctttgttcccatgcaggccagcatcactatgtttgtcttcatcttcgtgattggtgtgttgcatcaactggtgacacgtatccagtgggtaatgatgtccgataccgtcgactacggcgagtggtgcaatggtaaacgcctgaccgggatcagttttgctggcacgctgtttgtgctcaaactggggttggccttcggcggcgctcttatcggctggatgctggcttatggcggatatgatgcggcagaaaaagcgcagaacagcgccacgattagcatcattattgcgctattcacgattgttccggcgatctgttatttgctgagcgcgattatcgctaaacgctactactcactcacgacgcacaatctgaaacccgttatggaacagctggctcagggtaaacgccgttgccagcaacaattcacctctcaagaagtgcagaactaa

SEQ ID NO: 138441 - DNA, 3024 bp, Homo sapiens
tcaaagccttcccgggtctgcgactgccagcatctcctgtttcacttcgtcagaaatggttggcgtgcgggagagtatccacaggtagtcgcggtccgggccggaaaccagcgcatggcggtattcccgatcgagtgcaataacgttataaccgccatagaaaggaccaaagaatgacactttcagcgcagcgcgagttggtgcgccggtaaagtacgctttcccttcactctgctgccacattcctctgtcagggttatagcctttattaatgacattcaggccgccgtcatcacgcaggctgtatgttgcggtgactttttccagtccacgttcaaagcggtgatcaaaacgggcaatctcataccaggtaccgagataacgtttggcgtcgaaattatttactacggtcacgccacgcggcggcgtaggagaactgcaggcaacgaccagaaatgcagctgtcgctggaataaagcggaaaagatcaaaccgagggcgaccagcagaagaaccagagctgaccgcagacagaggacaaggagaaaacgagataacggaagctgccacggcagcgaaggcccggcgcacgatgcggccgaaaaccggcaaccaaaatccagacaaacaccgcacgcgtggcttgcagatttgccacaccttcaatgcgaatggcaaccgcgcccgctgttctgccgctaatgccatggcggcgacgatttcgggtttatcgagcgggctgtccggaaccggctggcaggagacaatcaggccaccgttagcagcgattttttgatccagttgtgcaagtaacgacatacatcttcctaaatcgtttttggcgctgccaaacggcacggcaccgctgaatggtttaccgtcgatagcgtcatgagtacgcaacgcttccgggcgcgaccaacgctgaacgcgagaaggcatatccagcccaatcagcaggatcaccacgaacgtcagactgaacgagagcgatgccagcgcagtacccagatccagacgttgagcgatcaacgcgccgatgattggggccagtgcaccgcccaatgcgccaacgttgtaggtgaagcccaggcccgctgtcacgccggtttctgattgcgtccatgacattttgctgttttcgccttcgcacaaagcacgcttggtgacgaagttgagaataccgccggtgttgttatcgccaggaaaccagttttgtaccgtggaatatttcacctcggcgtttttatggatgatgacttccaccactgccgcgtgtaactgatagctgtcacgcaccggagcggaacagccttcaatgtagctgacgtagctgtcttcgtcggccaccagaatggtgcgctcaaactgcccggttttttctgcgttaatgcgaaaataggtggaaagttccatcgggcagcgcacgctggtcatgcgtacgacgtcatcaaaccatttgtcggtggcggttttggtaataaacagtgatgtactggaatgagccaatggcggcattcctgaccagacaagcttgggggcattccggtgaaagtttcccttagccgtgaagagtgtttcctcgcaacccgtacccggcacgcttttaccattgacgggcaaatgggcgtgaaccgtgacggaacattgaaaggttatagtctggatgttctgtctaacaccggcgcttatgcatctcacgggcactccatcgcttcgcgttgcggatcgtagccgctgaccatcgccccttcctggcgggatgatgtcgctgccgtataacgcatcgtacagtgagccccagcgagcgttcgccgcgttcagcgcgtagcgggcgttcattgccggaaccaccagctgcggccccgcctggctggtgatttcgctgtcaatgcccgtggtttccaccgtcacgcgctccggttgcggcaccaggtagcccagttcacgcaggaaagatttataggccgctttatcttttaccggccccggattgctgcgatgccactcatcaagcgctgcctgaatgcgatcgcgttctgccagcaactgacgattttctggtgccagatcatgaacgatctcatcaaaattgcgccagaacgccgcagcgtccagccctgttcccggtaaaacttcttcatccacaaaacgtttaaaattggcgtcaatgcgtaaacggctcgctttgcacgtgggaatgactctagaggatcccccttcgtctggctgtaatttcagagcgttacacagagtttgccgactggcatctgttatctcaacgtgtatatccccggtaacttccccggcatgcacttcagcccgaccacccacattcacggacaggttttgcgtcttaccggaactgtagagctgaaggccatccgtccccagacgataaatggatccattctcaacaatagtgtcagagtcttcaccaccgagattattcatggtgccaccagcaagcaacgtatcactggctttcccggccagcataaaaacgccgccctgattaatctcacaattgctggcttccccacctggatacaccaacaattcaccaccttcatctaccacgaccgctgaggttgtcccattaaccaacaggccgccctcttgatcgagaatgattttttccgcgcgatgtccttccagtacacgcaggttaccgccattttccagcaacaaaccgcaggcataacctttatcaacgctgaattcaccttcgggatggcggccattaaccgtagcgagcgtagagagactaattgcgcctccctcggactgaacaatatctgtggcaatggcaccatcgctgaccgatagcgtgccattgttaccgtactgtgtgcatttggcgatcccaccggttgccactttcaaccagccagcccccgtgaccacggtattttcggctcttccgccagcttcaacaatcaactcgcctcgccgtctaacactgtagcggtgcgtttccctgggactctcttcctcatctacagtagcaggcttttgcatcat

SEQ ID NO: 138442 - DNA, 1008 bp, Homo sapiens
ttatataaacgacccatttccgccccacatattacaggctccgtgtgggaaagaattattgatgttcatgtgaccggtattataaagcgtaccggactggttgatgtgcacagcattcttgtcgttatcaagaataaactcgccgcggttattgaaagctgaattattattaacttccagcatcccggtgttgttaccctcactactacttccgaggttccaggttccttcgttatttgccactgcagtacctgtcagcgcagcacctctcataatcgccccgtcagtttgattattaaagaccccgccagccgacatcatccgccctgttacactgccactattattgaatacccccgcgttctgcacgattttattgatggttccggtgttgttcactaacgaactatcagcaccagcattcatggtaatttgcgcagtcatttctccggcattattgaggattccaccgctaacatcgacgttattcgtcatcaccccggcatttttaatgacggcacccttgtcaagttttactaagttattgatgatgccaccgctggtattttccagaagaccgcttgataccgtaatttgatcaccggaaagcgttccgctattaacggggatcctatctacaacgaactggtgtggaacgtgctcaaggacaccgctggtgaggaagaagctgtcttgtttgcccgctcgggctccgccgttgcgcagaaaatccagtgaccagaactcacctttgctgacacgcgcgcttaagatgacatttcgttcccccatatggaaagatagcgtctttacgtcatcacgtatgtagtttttgacattacttgtatggtgccatttacttttacctatggattgtacgctcattgaagttatgttgttgatcccatccccctcgtcatacaagttgcgccgcgttaagtcaggcatgctctggtaactccttttcatgtgccatcgatatatgatgcagccattttccaaagccat

SEQ ID NO: 138443 - DNA, 1065 bp, Homo sapiens
atgtgggggatcggtaatatcaactacggcctgaccatgcgttatctcggcatgtcgatgggaattggcatcgccattggcattacgttgattgtcggtacgctgatgacgccaattatcaacggcaatttcgatgtgttgattagcaccgaaggcggacgcatgacgttgctcggcgttctggtggcgctgattggcgtagggattgtaactcgcgccgggcagttgaaagagcgcaagatgggcattaaagccgaagagttcaatctgaaaaaagggctggtgctggcggtgatgtgcggcattttctctgccgggatgtcctttgcgatgaacgccgcaaaaccgatgcatgaagccgctgccgcacttggcgtcgatccacttcaggtgaaaaataatggctacgtgcaggacacgaataatcaacgcaattatatgtttgagcggcttgatcttggcgttggcgaaacagtttacggtctgggagagcgctttactgccctggtgcgcaatggccagacggtagagacctggaaccgggacggcggcacaagtactgaacaggcgtataaaaatatcccgttctacatgactaaccgtggttatggggtactggtcaatcatccccagtgtgtctcttttgaagtgggatcggagaaagtctccaaagtgcagttcagcgttgagagtgaatatctcgaatactttgttatcgacggcccgacgccgaaagcggtacttgatcgttatacccgctttactggtcgtccggcgctgccgcccgcgtggtccttcggcctgtggctaaccacttcatttaccaccaactacgacgaagcgacggtaaacagctttatcgatggtatggcggaacgcaatctgccgctgcatgttttccactttgactgtttctggatgaaagccttccagtggtgcgattttgagtgggacccgctgactttccctgaacccgaaaggatgatccgccgcctgaaagcgaaaggactgaaaatctgcgtctggattaacccctttattggtcaaaaatcccccgtcttttaa

SEQ ID NO: 138444 - DNA, 3222 bp, Homo sapiens
ttaatcccgatgcttaaagagatgatccgccacgctggcaacagcggcacccgcgaagtggttctcgggatggcgcaccgtggtcgtctgaacgtgctggtgaacgtgctgggtaaaaaaccgcaagacttgttcgacgagttcgccggtaaacataaagaacacctcggcacgggtgacgtgaaataccacatgggcttctcgtctgacttccagaccgatggcggcctggtgcacctggcgctggcgtttaacccgtctcaccttgagattgtaagcccggtagttatcggttctgttcgtgcccgtctggacagacttgatgagccgagcagcaacaaagtgctgccaatcaccatccacggtgacgccgcagtgaccgggcagggcgtggttcaggaaaccctgaacatgtcgaaagcgcgtggttatgaagttggcggtacggtacgtatcgttatcaacaaccaggttggtttcaccacctctaatccgctggatgcccgttctacgccgtactgtactgatatcggtaagatggttcaggccccgattttccacgttaacgcggacgatccggaagccgttgcctttgtgacccgtctgtatccacaatgccatcagcgggatgttccgtgcagcgcaaatcactacgcgctcaccgttaacctgcgcttcaatgccagacccgaccagcgcccgctgtgattcggcggtgggaatggcgagttcagcaacctgtgcttcgcgtacgatggcttgcgccagtggatgcgtcgcgccttgctcgaccgccgccgccagtgtcagcagttcagattcactaatacccgttgccggatgaatcgcggtaacgcgcggtttaccgacggtcagcgtaccggttttatcaaacgccacctgagtaacacgacccagctgttccagcgccgctccgcctttaatcaacgccccacgacgcgctgccgccgccagcccggaggtaatcgccgcaggcgttgagataactaacgcacacgggcagccaatcagcagcagcgtcagccctttataaatccactcctgccagctggcggcaaacagcagcggtggcaccagcgtcaccagcagagcgacggccataatcgcgggcgtatagatacggctgaaacggtcgataaaccgctcaatgggagcgcgacgctcttcggcttcttcgatcagtttcagaatccggtcaatggcgctggctcccggttctgacagcacttccaacgtcaccagacggtctacgctggtggcaccagcagggactttatcgcccgttgcgcgctccaccggaatggattcgccggtcagggcgctttcatcaaaactggcaaacggtgagagcagtttaccgtcggcaggcaaacgcccacctgcggcgacttcaatcacatcgccagggcgcaggctgttaatcgccacctcttcccgctcacccttacgcaggcgcgtggcggtttctggtttcagcgccattaacgcgctaacgccctgacgcgcgcggctggcggcccagccttccagtcgttcaccaatcaaaaacagcagcaacaccatcgcagcttcagccgttgcgccaataaacagtgcaccaatagcggctacgctcattaaggtttcaatggcgaagtagctgccggatttgatcaaccgtaatgcctgatcgagcaatcgggtacagcccaaccagcgtggtcgcgataaacgccagttgcccgaacggatgattgaatttttcgtgggatgagctaaggctttcagcttttttagatacataagccgcgtttcaagaaatcgaacttgcctttcaagatcctcaatgcgtcggtcttttgacagctccaatgctgatgccgctttttctggatcaactgatattgcaatgtttcttttggtgccaatcttgagcgcgcgtaaaccagcttctccgcgctcttcatagaccttcagccacctggctacagaaccactaccagcaagcataaagtgagcagcagcctgattaagggacatgtgctgctcgatcacagctttcacgaccttaatacgcaactctggatcagcactaacgcctttaggtttgggaattaaacctttttctccatgtttttcatagagggcaacccatgtcctgacctgggttcgggggacaccaaaacgtgccgagatgatcttaaagcagcgattaaggtcaagcgataccgctcttacagaggagaggtagggcaaaccgcccctaatgttctccaaagagatttcaaggctacgcggccaaacgagaagtgggttaccgatgttactgaatttgcagtcaatgggcgcaagctgtatttgtctccagtaatagatctcttcaacaacgaagttatttcttacagcctttcggaaagaccagtgatgaacatggttgagaatatgctcgatcaggcattcaaaaagcttaatcctcacgagcatcctgttctgcactctgaccagggatggcagtatcgtatgagaagatatcaaaatatcctcagctacagccggttcacggcgcgcggctgaaacaggtccgaccctggcgctgggcacttgtccggcgagggcttcacgcaccggaacatctttgccatgcagctctgaaaactcatcaatgtaagtcatgctggtgaagtgcgtccattcgcgttcgaacggatacaccgggatctgaatcagatctttacgctcgaccagatagttgaacagacgcaattccatcggtgaaatcacatcttcggcgtcatgcagaataaaaccagcaaaagcgaaattggcgctacgctcaaattgggtgatggcgtccagcacgttgttcagacagtcggctttgctggtggggccaggacgcgcgcagactaccttatgcacattcgggaagcgagcgcacacttcgtcaacatcacgctgagtatcggggtcgttggggtaggtgccaacaaagatatgatagttttcgtagtcgagcgtggtcgccgccagctcggccatattgccgatgacgcccgtttcattccacgccggaaccataatcgctaacggtttttcatctggtttatacagttcgcggtaactcattcgcgggtagcggcgataaacactcaacttgcgtttaatgcggcgtacccagtagacgacatcaataaaaaaatcgtccagcccgctgatgaacat

SEQ ID NO: 138445 - DNA, 2050 bp, Homo sapiens
tcagctcaacgccagtagctgacgcgtatactcctgctgcggtgtggcaaacacgcgcgcgcacggtccttgttccactacttccccttgtcgcagtatgataacctgatgacataacgcgcggacaacgtgcaaatcgtggctgataaacaaataggccagttgatgcttttgttgcaatgatttcaatagcgtcaatatttgcgcctgtaccgttttgtcgagtgatgatgtcggttcatcaagtatgatcagcgagggcttaagaattaatgccctggcaatcgcaatacgttgtcgctgaccaccagagaactccgccggataacggtggcgtgtttcaggatctaatcccacttcatgcatcacggctatcacttgttgttcgcgttgtgcggcagaaagcgtcggctggtgaacccgtaagccttcctcaataatctgcaaaacgttgagtcgtgggttgagcgaggagtttggatcctgaaataccacctgaatgcgatgacgaataggtaacagctggcggcgatttaaattttgcagtggctgaccgtcaaagatgatgctgccctgagaattaatcagtcgcagcagcgccagtcccgtcgtacttttcccggaaccggactcgcccactaaacccagtgtttcacccgctcgtagcgtaaaactgatgtttttcaccaccacattatgatccacaatgcgcttcaaaatccctttgcgaatggggaaggcaacctgaagctgttcaacatccagcaacgttgaggcaggttctggcaacggcactggatcgcctgacggttcactgttgagtagcttttgtgtgtaaggatgagtgggtgatgcaaatagcgtagcggcgtaattttgctcgacacagcgaccgttttgcattaccgccacgcggtgggccagttttctgacaatgctgaggttatgagtaataaacagcatgcccatattcagctcgccttgcagttcgcgcaacagctgtaaaatctgcgcctggacagagacgtccagtgcggtggtcggttcatcggcaattaataattccggtcgcgttaacagcgccatcgcaatcatcacccgctgccgttcgccgccggagagctgatgcggataatctgtcagccgttttgccgcctggcggataccaacgcgatcaaggcagttaagaatttcgccaggtaccgagatcgagtcgtatcaaaccaaccatatacgactcgagctcggtaccccacctgggacctacttcagccccaggatgtgatgagccgacatcgaggtgccaaacaccgccgtcgatatgaactctgggcggtatcagcctgttatccccggagtaccttttatccgttgagcgatggccttcgcttaaacgttgcggatgaacggcgacgatttcacgcccttcctgatacgccagcgcaataatgtcggtgatgtagtattcgccctgagcattattgttggtcagcttcgccagccagcgtttcatatctgcgccgttggcaatcagaatgccggtgttgatctcctgaatctgacgctgctcgtcggtggcatctttgtgctcaacaatgccggtaactttgccgttttcacgggtgatacgtccataaccggtcggatcatccagtttcaccgtcagcagaccaatgccaccctgcggtttagcatcacgcagacgctggagtgtttcgacagagatcagcggcacgtcgccgtagagcattaaaatgtcttcatcatcggcaaagaaaggtgcggcctgctgcattgcatgacccgtacccagctgctctgcctgaagcacccagttaaggttgtcgtctttcagcgcctgttttagcagatcgccgccgtgaccgtacaccaggtgaacgtgcgctgcgcctaattcattcgcagcatcaatgacatgctgaaccatcgctttcccggcaagggtatgcagcactttcggaagatcggaatacatgcgcgtgcctttgcctgcggcaaggatcactacgctcatagcattattcaacat

SEQ ID NO: 138446 - DNA, 5976 bp, Homo sapiens
  misc_feature (1)...(5976): n = a,t,c or g
atgaacgaagataaagccaaagcgttgaccgaagaaaacgatgcgttgttggcatctgacaaggcgctggactgggtagatctggtgctgtgcaccgccgggccaatcggcttgtatatggcgggctttaccgaagacgaagcgaaacgtaaaacccagcatccgctgctgccgggcgctatagcggaattcaaccagtatgagtttagccgcgccatgcgccacaaggattgccagaatccgctgcgtgtatattcgcacattgcgccgtacatgggcgggccggaaaaaatcatgaacactaatggagcgggggatggcgcattggcagcgttgctgcatgacattaccgccaacagctaccatcgtagcaacgtaccaaactccagcaaacataaattaacccgggttaacctattcatcgtttgcgcagggggtgtaaatatgctaaccgtgtgagctatcagctttggggtataggcggtactatgtctcgtaatactgaagcaactgacgatgtcaaaacctggaccggcggcccgctgaattataaaggaggattcttcacccagttagccaccgatgagctggcaaaggggataancgaagaggtggtgcgcgcaatttcggcgaagcgtaatgagccggagtggatgctggagtttcgtctaaacgcctatcgcgcatggctggagatggaagaaccgcactggttgaaagcgcactacgacaagctgaattatcaggattacagctactactcagcaccatcgtgcggtaattgtgacgacacttgcgcgtctgaacctggcgcggtgcagcaaactggcgcgaacgcctttttaagtaaagaggtggaggcggcgtttgagcagttgggcgttcccgtgcgggaaggcaaagaggtggcggtggatgccattttcgactcagtttcggttgccactacttatcgcgaaaaactggcggagcagggaattattttctgttcctttggtgaggcgatccacgatcacccggaactggtgcgtaaatatctcggcaccgtggtgccggggaatgacaacttctttgccgcgcttaatgcggcggtagcctctgatggtacgtttatttatgtgcctaaaggcgtgcgctgcccgatggaactttccacctattttcgcattaacgcagaaaaaaccgggcagtttgagcgcaccattctggtggccgacgaagacagctacgcggcaaaacggctgacagattatccgcatcagctctccggcggcgaacggcagcgggtgatgattgcgatggcgctgttaacgcgaccggaattattaattgccgatgaaccgaccaccgcactggacgtctctgtccaggcgcagattttacagctgttgcgcgaactgcaaggcgagctgaatatgggcatgctgtttattactcataacctcagcattgtcagaaaactggcccaccgcgtggcggtaatgcaaaacggtcgctgtgtcgagcaaaattacgccgctacgctatttgcatcacccactcatccttacacacaaaagctactcaacagtgaaccgtcaggcgatccagtgccgttgccagaacctgcctcaacgttgctggatgttgaacagcttcaggttgccttccccattcgcaaagggattttgaagcgcattgtggatcataatgtggtggtgaaaaacatcagttttacgctacgagcgggtgaaacactgggtttagtgggcgagtccggttccgggaaaagtacgacgggactggcgctgctgcgactgattaattctcagggcagcatcatctttgacggtcagccactgcaaaatttaaatcgcccggtaaagtcagcaattgaccctcctgccctgctgaggatcgcgtcagtcacgttcgcgttatccagttggcaaacgccagtttttagaggattaaataacggatcgggactggacgtatctgcctgggtatgtacggttattgcacagtcagggatggtttacaaaatgcgttatcggtctcagcacccctatagcatcaaggaaaagcagatgaagagtgaagtgttgtccgttaaagagaaaattggttatggcatgggagacgccgccagccacattattttcgataacgtaatgttatatatgatgttcttttataccgatatttttggcattcctgccggttttgtcggaaccatgtttttggtcgctcgtgcactggatgcgatttccgatccttgcatggggttgttggccgatcgaacgcgctctcgctggggtaaatttcgtccgtggcacgccagatctcagtatgaacggcaaaatgatctatgcagcaattacttacaccctacttaccttactttataccgtcgtcaatatcccttactgcgcattgggtggtgtaatcaccaatgacccgactcagcgtatctcgctgcaatcctggcgttttgtgctggcgaccgcgggaggcatgctttctactgttctgatgatgccactggttaatttaattggcggtgataataaaccactcggtttccagggcggtatcgcggtcctttccgtggtggcattcatgatgctggcattttgtttcttcaccactaaagaacgcgttgaagcaccacctacaacaacgtctatgcgggaagatttacgtgatatctggcaaaacgaccagtggcggattgtcggtttactaaccattttcaatatcctggcggtgtgcgtacgcggtggggcgatgatgtattacgtcacatggattttgggcacgccggaagtgtttgtcgcttttctcaccacttattgcgtgggtaaccctgattggttccgcactggcaaaacctctgaccgactggaaatgtaaagtcactatcttctggtggacgaacgccctgctggcagtgattagcctcgcgatgttctttgttcccatgcaggccagcatcactatgtttgtcttcatcttcgtgattggtgtgttgcatcaactggtgacacctatccagtgggtaatgatgtccgataccgtcgactacggcgantgttttgctggcacgctgtttgtgctcaaactggggttggccttcggcggcgctcttatcggctggatgctggcttatggcggatatgatgcggcagaaaaagcgcagaacagcgccacgattagcatcattattgcgctattcacgattgttccggcgatctgttatttgctgagcgcgattatcgctaaacgctactactcactcacgacgcacaatctgaaaaccgttatggaacagctggctcagggtaaacgccgttgccagcaacaattcacctctcaagaagtgttcgaggttgaacagcaggataatgaaatggtggtctatgctgccccccgtgatgtgcgtgaacgtacctggcagcttgatacgcctttatttacgttgcgctttttctccccacaggaaggtattgtcggtgtgcggattgagcattttcagggggcgctgaataacggtcctcattatccgctcaatattttgcaggacgtgaaggtcacaatcgaaaacacagaacgttatgctgagtttaaaagtggcaacttaagcgcgcgtgtcagcaaaggtgagttctggtcactggattttctgcgcaactgcgaacgtattaccggtagtcaggtgaaaaataatggctacgtgcaggacacgaataatcaacgcaattatatgtttgagcggcttgatcttggcgttggcgaaacagtttacggtctgggagagcgctttactgccctggtgcgcaatggccagacggtagagacctggaaccgggacggcggcacaagtactgaacaggcgtataaaaatatcccgttctacatgactaaccgtggttatggggtactggtcaatcatccccagtgtgtctcttttgaagtgggatcggagaaagtctccaaagtgcagttcagcgttgagagtgaatatctcgaatactttgttatcgacggcccgacgccgaaagcggtacttgatcgttatacccgctttactgcgacggtaaacagctttatcgatggtatggcggaacgcaatctgccgctgcatgttttccactttgactgtttctggatgaaagccttccagtggtgcgattttgagtgggacccgctgactttccctgacccggaagggatgatccgccgcctgaaagcgaaaggactgaaaatctgcgtctggattaacccctatattgtttgcgcttccgctttcacttcctgccagatagcttcatcatgctgcgcccagccgctaaagccccaacgcccacggtgcaagcctggtgcgcgatcggtcgccagcatcgctgcttcaatcagcaacgtaccggaaccacacatcggatcgagcagcggtgttcctggctgccagccggatcgcatcacaatagcggctgccagggtttctttgatcggcgcaataccagcacgatcgcgatagccacgcagatgtaaaccatcaccactcagatcaagagcgatactggcggtttctccgggctggcggcggcagcgcgtcgtggggcgttgattaaaggcggagcggcgctggaacagctgggtcgtgttactcaggtggcgtttgataaaaccggtacgctgaccgtcggtaaaccgcgcgttaccgcgattcatccggcaacgggtattagtgaatctgaactgctgacactggcggcggcggtcgagcaaggcgcgacgcatccagagaacatttcgcgatttataaagattaagtaaacacgcaaacacaacaataacggagccgttatcaaactccagccaggtgaacggaacatccggatattgttccataagatgtaccatgctgttgccgacttcacaaatcaacacgccatcatcagcaaggtaatctgccgcgttaccgagaatgcgacgcgtcagtttcaggccgtcagtgccagatgccaggcccagttccggctcgtggcggtattcgtttggcaggtcggacatatcttccgcatcgacatacggcgggttagtgacaatcaggtcgtactgcactttcggcaagtcgcggaacagatcggaacgaatcggaatgacgttgtggatcagaccgtgttcttcgatgttctgttcagcaaccgccagcgcgtctggagagatatccaccgcgtcgacttctgcatccgggaaggcataagcacaggcaatggcgatgcagccgctaccagtacacatatctaaaatatgctgcggttgcttgcaataaatttgccggagtttggtttttggatttacacggtctgacgcagctgcaggccaagcaggaactgggggcgttgattgccgcctgccgccgtgaacatgtgttttgcgcctgcgtgatgcatgggcacgggaagcatattttgaagcaacaaacaccgctgtggctggcacaacatccgcatgtgatggcctttcatcaggcaccaaaagagtatggcggtgatgcggcgttgttggtgttgattgaagtcgaagagtggctgccgccggagttgccctgaggagttgagcgcgttgcgccaggtacgggtaatggcaggggcgaatgcacctgcgaagctcgaggtgtattctgtcagcggtcgagtgcatcatcaactcaacccagcggatgccgcgaagttgggtgtgaacgcaggtacacgcgtctcctttagttacgatggcaacacggtcacgctgccggttgaaatcgccgaacggatgtaggtgacatgtgggccccacactcgtatgtgtcaagagcaggaaaatcggttgagcacgggaataaagctgcctggggcaattgccgtcccgcgctcgagcaacgcatacaaggtgccaatcgagttcaagaaggccaataatgatggcgtacattaggaccctcggatgcat

SEQ ID NO: 138447 - DNA, 494 bp, Homo sapiens
aacttcgccacgcgtacggaacaggtttccgagcgtaaggggggcttcaacggtgcctgtatcctctttaagcatatcgagaaacaggtctaccgctttatcctgttgattactaagcaggaagttaacccccgctacgtaatcacgcgacaagcggttggcttcatcttgcttgttttgttgcgcacttctgcggcccatataccagccataggcagcggctacaggcaaaagcagaaacaacaactccagcatagaaagttattccttcgccgctgacgagtgcggcactacagccacgtcagtcgcgggtgaaagctggttttccagtcgctttattttacgttcagcgcgcgccagggaaacacgaactcgcagccagaacaggccacaaatcaaccaaccgatagcaaaccccgcagcaaacaataccgccagcaatgtggaaatacggtactccccttgcgctaacagataattaaacgtcacctgtt

SEQ ID NO: 138448 - DNA, 1509 bp, Homo sapiens
atggcgatgagtaaagtgaaaagtatcacccgtgaatcctggatcctgagcactttcccggagtggggtagctggttgaatgaagaaattgaacaagaacaggtcgctcctggcacatttgcgatgtggtggcttggctgcaccgggatctggttgaaatcggaaggtggcaccaacgtttgcgttgatttctggtgcggcactggcaaacaaagtcacggtaacccgttaatgaaacagggtcaccagatgcagcgcatggctggcgtgaaaaaactgcagccaaacctgcgtaccaccccgtttgttcttgatccgtttgcgattcgccagatcgacgcggtactggcgactcacgatcacaacgatcatatcgacgttaacgtcgctgctgccgtgatgcagaattgtgcagatgacgtaccgtttatcggaccgaaaacctgtgtggattcgtggattggctggggcgtaccgaaagagcgttgcatcgtggtcaaaccgggcgatgtagtacaagtgacagcacttgaaattcatgcgcctgatgctttcgaccgtacggcaccgatcacctggctggccgatcaaaagcggcggcgtaccgtcaaagggaggacgacgcgcccttgtaacaggtcagttaccgtccgtccacgccgccgcgatgctgttattggtcgcttttatcgtcatcagtctattactcaaaaaggccttttgctcatggttatgcccggttgtgcattccctttatggattgactcagaacttaatttaacgttcattgatgctctgtttgaaggggtttctggaataacaacaacaggagcaactgtaattgatgatgttagttcattacctcgggcatatttgtactatcggtcacagttaaattttataggtggtttaggagttattgttctggcggttgctgtattgccattattgggtattggtggtgcaaagctttatcagtcagaaatgccggggccatttaaggatgacaaactcactccccgcctggccgatacgtcacggacactgtggataacttattctttattaggtgcaggacttaaaaacagagtctttgaaagttacagatttgaacttgacccctatgaatctgcccacacacagaaaaatcctattcatccaggcgtgtgccccaaggtccaagaagttcccacttttagaatgaaggatgcgctacagaagctggtggaaaacggcaagctgaaaaccaatccgatgaaagggatggtagccgcagtttctgtcggaattgtgaacggcgaagcggtttgcgatctggaatacgttgaagactctgccgcagagaccgacatgaacgtagtgatgaccgaagacgggcgcatcattgaagtgcaggggacggcagaaggcgagccgttcacccatgaagagctactcatcttgttggctctggcccgagggggaatcgaatccattgtagcgacgcagaaggcggcgctggcaaactga

SEQ ID NO: 138449 - DNA, 420 bp, Homo sapiens
gcggagaatagataaactctctctgtaccgcctttagcgacacaataggcaagcgaccatcgttacctttgcagtcaaagcgttccgcttcgaggaatacctgcctgttacttgttacaagcaccgttgactcgatggcgtggatcccaccgtcacgcaggatttgcgcggcaatagattcagcaattagcaggtcaccccaacgttggctgaccgcggtttgctgtggtacggtgaatttcaccaacacatgtttattgcctgacggcgtttgtgcatagtaggtaaattttggctgctcgccgtacgcacaacaacccacaatttttctggccagtgcttctatggccagctgtttgtaatgggtaagtctttgttcctctagactcagctagcaggcatgctagctgtgcactggcc

SEQ ID NO: 138450 - DNA, 1419 bp, Homo sapiens
  misc_feature (1)...(1419): n = a,t,c or g
atgagtgaactcccattaacaagtgctacaaacagaatagaatatctaggaatccaacttacaagggattttgaagatcctcttcaaggagaactacaaaccactacgcagcaaaataaaagaggacgcaaacaaatggaagaatattccatgctcatggataggaagaatcaatttcatgaaaatggccatactgtccaagctacaaaacgcgccttgtttgataatgaatgcggggccgattatccgcgctggcagggccagtgcagtgcctgtcatgcctggaacaccatcaccgaggtgcgtcttgttgcgtcgccaatggtggcgcgtaacgagcgtctcagcggctatgccggtagcgccggggtggcaaaagtccagaaactctccgatatcagccttgaagagctgccgcgtttttccaccggatttaaagagttcgaccgcgtactaggcggcggcgtggtgccagnaagtgccattctgattggcggtaaccctggtgcggggaaatccacgctgctactgcaaacgctgtgcaaactggcccagcagatgaaaacgctgtatgtcaccggcgaagagtcgctgcaacaggtggcaatgcgcgctcatcgccttggcctgccgactgacaatctcaatatgttgtcggaaaccagcatcgaacagatctgcctgattgccgaagaagagcaaccgaagctgatggtaattgactcgatccaggtgatgcatatggcggatgtacagtcatcgcctggtagcgtggcgcaggtgcgtgaaacggcggcttatttgacacgcttcgccaaaacgcgcggtgtggcgattgtcatggtggggcacgtaaccaaagatggttcgctggctggcccgaaagtgctggaacactgtatcgactgttcggtgcttttggatggcgatgccgactcccgttttcgcaccttgcgcagccataaaaaccgcttcggcgcggtgaatgagctgggcgtcttcgcgatgaccgaacaggggctgcgtgaagtcagcaaccctcgggggcgtgggaaacggaaattcatttccccgaaaaaaacgccagcccttgccaaatttcgccgaaaccttttgccccccaaggtacccgggaatggaacttcggtcaggttccggcattctcgaatttgttggatgaaccctttacctggggcggcgtggaactgcattttaacgttaaaaaagccaatatcacccggggtccaggtttttcccgaaagcttcaccccggcgcggttggaagccttcgccggccgctcgcaagcctgccttgtcccggcgcagaatatcctccaccagaagtcccaggcctggttgtttgacttcccggaacaggaaaaagagctacgggagttatcggcatggatggcgggggct

SEQ ID NO: 138451 - DNA, 7005 bp, Homo sapiens
tgaaagagagttccggtaaagcgcgccacgatctcggctatatggcgcaaaaattttcgctctacggtaacctgacggtcgaacagaatttacgctttttctctggaggtatggcttacgctggtcgggcgcagaacgaaaaaatctcccgcatgagcgaggcgttcggcctgaaaagtatcgcctcccacgccaccgatgaactgccattaggttttaaacagcggctggcgctggcctgttcgctgatgcatgaaccggacattctgtttctcgacgaaccgacttccggcgttgaccccctcacccgccgtgaattttggctgcacatcaacagcatggtagagaaaggcgtcacggtgatggtcaccacccactttatggatgaagcggaatattgcgaccgcatcggcctggagtaccgcgggaaattaatcgccagcggcacgccggacgatttgaaagcacagtcggctaacgatgagcaacccgatcccaccatggagcaagcctttattcagttgatccacgactgggataaggagcatagcaatgagtaacccgatcctgtcctggcgtcgcgtacgggcgactgtgcgttaaagagacgcggcagatcgttcgcgatccgagtagctggctgattgcggtagtgatcccgctgctactgctgtttatttttggttacggcattaacctcgactccagcaagctgcgggtcgggattttcctggaacagcgtagcgaagcggcgctggatttcaacccacaccatgaccggttcgccctacatcgacgccaccatcagcgataaccgtcaggaactgatcgccaaaatgcaggcggggaaaattcgcggtctggtggttattccggtggattttgcggaacagatggagcgcgccaacgccaccgcaccgattcaggtgatcaccgacggcagtgagccgaataccgctaactttgtacaggggtatgtcgaagggatctggcagatctggcaaatgcagcgagcggaggacaacgggcagacttttgaaccgcttattgatgtacaaacccgctactggtttaacccggcggcgattagccagcacttcattatccccggtgcggtgaccattatcatgacggtcatcggcgcgattctcacctcgctggtggtggcgcgagaatgggaacgcggcaccatggaggctctgctctctacggagattacccgcacgggaactgctgctgtgtaagctgatcccwtaattactttactagggatgctggcgatgtttgctgtgtatggctggtgtcagtgtttattctcggcgtgccgtatcgcgggtccgtgctgattctgttttttatctccagcctgtttttactcagtaccctggggatggggctgctgatttccacgattacccgcaaccagttcaatgccgctcaggtcgccctgaacgccgcttttctgccgtcgattatgctttccggctttatttttcagatcgacagtatgcccgcggtgatccgcgcggtgacgtacattattcccgctcgttatttcgtcagcaccctgcaaagcctgttcctcgccgggaatattccagtggtgctggtggtaaacgtgctgtttttgatcgcttcggcggtgatgtttatcggcctgacgtggctgaaaaccaaacgtcggctggattagggagaagagcatgtttcatcgcttatggacgttaatccgcaaagagttgcagtcgttgctgcgcgaaccgcaaacccgcgcgattctgattttacccgtgctaattcaggtgatcctgttcccgttcgccgccacgctggaagtgactaacgccaccatcgccatgtacgatgaagataccggcgagcattcggtggagctgacccaacgttttgcccgcgccagcgcctttactgcatgtgctgctgctgaaaagcccacaggagatccgcccaaccatcgacacacaaaaggcgttactactggtgcgtttcccggctgacttctcgcgcaaactggataccttccagaccgcgcctttgcagttgatcctcgacgggcgtaactccaacagtgcgcaaattgccgccaactacctgcaacagatcgtcaaaaattatcagcaggagctgctggaaggaaaaccgaaacctaacaacagcgagctggtggtacgcaactggtataacccgaatctcgactacaaatggtttgtggtgccgtcactgatcgccatgatcaccactatcggcgtaatgatcgtcacttcactttccgtcgcccgcgaacgtgaacaaggtacgctcgatcagctactggtttcgccgctcaccagctggcagatcttcatcggcaaagccgtaccggcgttaattgtcgccaccttccaggccaacattgtgctggcgattggtatctgggcgtatcaaatccccttcgccggatcgctggcgctgttctactttacgatgatggggaaacggtttagaaaggaccccggaaagagcaggcggagaaagctagctcggtaccatctctatcagttatcggcgtggcccatcgccaggatgcggtacaacacgcccagcaattgctgaagatgatggggtacggcgtgtagcgtttcacctctttcaccaactgtgccgcaaccacctcggcactgacgcgcttttcaccgacgacaaaaaagcgttcggtgatattttcactttcgacttcaagcgagacggtattacccggcccctggtcgcgcggcagggttatgtcagtaccgaagagctggtagagcatttctccgtcagcccgcagactattcgccgcgacctcaatgagctggcggagcaaaacctgatcctgcgccatcatggcggtgcggcgctgccttccagttcggttaacacgccgtggcacgatcgcaaggccacccagaccgaagaaaaagagcgcatcgcccgcaaagtggcggacgaaattccccaatggctcgacgctgtttatcgatatcggcaccacgccggaagcggtagcgcacgcattgcctcaatcacagcaatttgcgcattgtcaccaacaatttcaacgttgctaacacgttgatggtaaaagaagattttcgcatcattctcgccggtggcaaattacgcagccgcgatggcgggatcattggcgaagcgacgctcgattttatctcccagttccgccttgatttcggcattctggggataagcggcatcgatagcgacggctcgcttttggagttcgagccccacgaagttcgcaccaaacgcgccattattgagaactcgcgccacgttatgctggttgtcgatcactcgaaatttggccgtaacgcgatggtcaatatgggcagcatcagcatgaacgatcaacaggtgacgtttaattatctgttagcgcaaggggagtaccgtatttccacattgctggcggtattgtttgctgcggggtttgctatcggttggttgatttgtggcctgttctggctgcgagttcgtgtttccctggcgcgcgctgaacccgctgcctatggctggtatatgggccgcagaagtgcgcaacaaaacaagcaagatgaagccaaccgcttgtcgcgtgattacgtagcgggggttaacttcctgcttagtaatcaacaggataaagcggtagacctgtttctcgatatgcttaaagaggatacaggcaccgttgaagcccaccttacgctcggaaacctgttccgttcgcgtggcgaagttgatcgcgctattcgcatccatcagaccctaatggaaagcgcctcgctgacctatgaacagcgtctgttggcgattcaacaactggggcgtgattacatggccgccgggttatatgaccgcgcggaagacatgttcaatcagctgaccgatgaaactgacttccgcattggcgcgctgcaacagttgctacaaatctaccaggctaccagtgagtggcagaaagcaattgatgcttgccgaacgcctggtgaagctggagaagatcgggtgattcgctttggtaaagcacgggcaacgcgatatgcactgctgcgtccttatcgcggaattgagcgtattcccgtctggcgggtggacgataccggaaaggcgcataaattcgccgacatccggttgtgctggccgcagggaagttgtctggaagaagatgtgctctacgccctgaccgtatttaacggtgaatatactggcggttggttggtcggggaggggaattatcagcgatggattactgcacaacaccctgcggaaattcctctggatcaaaaactcacccattacgaacagctggcaagtgatgcactggcaggagaaatcctaaccgcggtcagccaacgttggggtgacctgctaattgctgaatctattgccgcgcaaatcctgcgtgacggtgggatccacgccatcgagtcaacggtgcttgtaacaagtaacaggcaggtattcctcgaagcggaacgctttgactgcaaaggtaacgatggtcgcttgcctattgtgtcgctggaggcggtgcagagtgagtttatctcttctccgggatcgtggccgcaggcaatgcgccgtttgtgtgagcaacaacttgtcactcaccagagcgtggcgcaaacagaagtgatctgggcatttgggcgacttatcgccaacagcgatatgcacgcaggtaatttatcgttttatttatctgaaccgccatttgcgctgacgcccgtctacgacatgctgccgatggtctatgcaccaaacagcgctggaatgctgcgtgatgctgccattgaggtgaagtttgatcttaacgtcagtaaaagcgcttggttaacggcgatcccgctggcgcagcagttctggcaaacggtcgccagagatccgcgtatcagcgaggcgtttcgccacattgctgtcgactctagaggtcccccacaccgtgtggttgtactactaggtgcacactctggaagtccattctcgattggcggtaaccactggtggcggggaaatccacgctgcgactgcaaacgctgtcgcaaactggcccagcagatgtccacgctgtatgtcaccggcgaagagtcgctgcaacacggtcggcaaatgcgcgctcatcgccttggcctgccgactgacaatctcaatatgttgtcggaaaccagcatcgaacagatctgcctgattgccgaagaagagcaaccgaagctgatggtaattgactcgatccaggtgatgcatatggcggatgtacagtcatcgcctggtagcgtggcgcaggtgcgtgaaacggcggcttatttgacacgcttcgccaaaacgcgcggtgtggcgattgtcatggtggggcacgtaaccaaagatggttcgctggctggcccgaaagtgctggaacactgtatcgactgttcggtgcttttggatggcgatgccgactcccgttttcgcaccttgcgcagccataaaaaccgcttcggcgcggtgaatgagctgggcgtcttcgcgatgaccgaacaggggctgcgtgaagtcagcaacccttcggcaattttcttaagtcgcggcgatgaagtgacctccggtagctcagtgatggtggtatgggaaggaacgcgtccactgctggtggagattcaggcgctggtcgatcactcgatgatggcgaacccacgccgtgtggcatggggctggaacaaaagcgtcatgggaatcctgctggctgtgttgcaccgtcaaggtggtcttgaaatgggcgatcaagatgtgtttgtgaacgtggtcggcggcgtgaaggtgaccgaaaccagtggcgacttagagttactgctggcgatggtttccacaccgggcgaaagaacgctggcgcaggaacctgggacaaaaaaaaggcgactcatcagtcgccttaaaaatcagtttgccagcgccgccttctgcgtcgctacaatggattcgattccccctcgggccagagccaacaagatgagtagctcttcatgggtgaacggctcgccttctgccgtcccctgcacttcaatgatgcgcccgtcttcggtcatcactacgttcatgtcggtctctgcggccgagtcttcgacgtattccagatcgggggaaatatttctccagcgcgaggggcatatccaacaacaaatggggggaataaatgcccgcgcaaaagttgctggcttgatgatgcgccaggacgatagcgacacgctgaattctctgggcgtttttgtctgggcatggccggatggaccgcagttaatgtctgatcgtttaaaagagctggctaccgcaggttttactctaacgcagacgtatacccgtgcggtgaaaaatgctgatgaagttgcgcgcgtacgcaatgagtggtggaaagcggaattacccttcgtcaccgatggcgtagttgtacgagcggcgaaagagccagaatcccgccattggctaccgggccaggcagagtggctggtggcctggaaatatcaacctgtagctcaggttgccgaagtgaaggcaattcagtttgcggtgggtaagagcggtaaaatatcggtggttgcgtcactcgcacctgtcatgctggatgataaaaaagtccagcgggtgaatattggttccgtcaggcgctggcaggagtgggatattgcgcctggtgatcagattctcgtcagccttgccggtcagggtattcctcgcattgatgatgtggtgtggcgcggtgcagaacgtcaaaaccgacacgcagaaaaccgctttaactcgttgacctgctactttgcttctgatgtccgtcaggaacagtgcattccacgcttagtctggctgcggccaaaacaggtacttgggctggctgacatcggtgacgccgaacgccgcgcgctgcatcacagtcatcgctcagaacatatatcccactggctcacatcaaagcaaccctgcgcagtgtgtcagttttag

SEQ ID NO: 138452 - DNA, 2916 bp, Homo sapiens
tcaacactgtgccgtacggcctttcggcagcggattggtcagttgcgcgacatctttcacctcaaaggtgatcagttcaccaatccccgcaagacgggcgttagtgcgtgcacgttgaatcacccgtgcgtcgctgtccgaaccgtaaaaatgagagctatactcagccaggcctttacgggcgcgagtttgcgcttccgctttcacttcctgccagatagcttcatcatgctgcgcccagccgctaaagccccaacgcccacggtgcaagcctggtgcgcgatcggtcgccagcatcgctgcttcaatcagcaacgtaccggaaccacacatcggatcgagcagcggtgttcctggcagcacgatcgcgataccacgcagatgtaaaccatcaccactcagatcaagagcgatactggcggtttctttatgcagccagacgttaacgcggatatccggcgcatcgcgatcaacatttggacgcggcagatttttccgcgtgaaagcatcgacgatcgcgtctttcactttcatcgcgccgtactgactgttgcggatggtgtcattcaaaccactgaaagtgacagcgaaggtcgcgccaggattaaacatctctgtccagttgattcgctgaacaccgagatagaggtctaaatcgctgtaaacgttacactcgctttcaatggtggtaaacaactccgttgaagtacttccctgctgtgctgccaggaaggcctcgcgttcgcggttaatctccgccagcacttccgggtccagaccattagcttctttttcctgccagttttgcgtttctggcggccaggtatccagcaagccaagaaatgccaccctgcgccacgtaccgccaagggaataccccagcaggtaataagggccatgcggttgttgttcaagtaacgttgccagatgcgcttcgcagacttcatccaggtttgccgccgtctgcatggggccattggggcgcggtgactgaatgccgataatcgaccattgtggatcgagataacgcgagagcacgctgaactgccaggcaaaaccggacgcaggatggaaacaaaacagcgtcgggccattaccttcacgcaacggcagaatggtttcgaatcccatacgccgggtgctgtcttcttcagcatcaataatcgttgccagtttggcgacagttgacgcgaccatcacttgccccggcgtcacctggcgggcaacctgccgacttaactgcgctgccagtttcattgccagtagcgaatgaccgccaagcgcgaagaaatcagcatcggcatcctgcacgtcacaccccagcaacgacgagaatgccgcggcgataatcgtttcactgcccgctttcggcgcacgccctggcgcttgtgccttcagttcaggcaacggtaaggctttgcgatccagcttgccgttggcgctaagtggtaactgtggaagttgcagcagaaccaccggtaccatatgtggtggcaatgtttcacgaagctgcgcctgcaatgcgctggtatccaacggcaggcccgattgcgacaccagatagcccaccaattgacgcgcatcaccaccggtggcagccgcctggttaatcacacaggcgtgggtaacggcttgttcgacatccggcagcgcctgcatcacgcgatcgatttcgcccagttcgatacgctgcccgcgaatttttagctgatcatcactgcgcccgaggtactccaccgcgccgttatccagccagcgggcaacgtctggggcaaaaggatcggcaataaagcggctggcggtcagatcggggcgtccgagatagccctgcgccagttgaatgccagtgagatagagatcacccgccacacccggcggcaccggatgcatcatcgcatcaagaatacgcagacccgtattccataccggataaccaatcggcacactgctgccgcgcacctgtgccagttcctcgccaaaagccggataccagctgacatctaccgccgcttccgtcgggccatatagattatgcaacggcgcgccagttaagaggcaacaatgctgcacatcgacgcacaagtcgtggtcgtacgcatattcgcataatgctgcatacgacggtccggtccttccgtcagcatacagtttgcctcgataacgcagaaaatcacacggaatcaactgaggttttgggccattttttatagcaaagattgaataaggcgcatttttcttcaaagctttattgtacgatctgactaagttatcttttaataattggtattcctgtttattgattatgaagagcagcatattacagccgtatgggtctacttgacagtaaaatttgaagagcattggaagcctgttgaagtcacaatgaccgccgtcgctaccacgaagttgctgccggagcatcggtttaaacgcaggcaccatttctgcaatcagcacaggtgtcgctaccgcggcccctgcggaactggaagcggcaattccggcagtgccatcgccaccgccaatcaatttatcggcgataatcaacggaataccggtcacgataattactgccacacccaacaggatccccagcaaaccagtctgggcaatcacagtcaaatcaatggtattgcccagcgcgaaggcaaagaatggaatcagcgtttgcaccgctttgctgaaaaattctcgcaattcagggtcaaggttccccagggcaaagcccaccaggaacggtaatactgcgccgacgaaaacatgcggttcaaacgaggcaatcccggcagtgcccagaataatcatcgtcatgagcggcccggactccaacgacatcaacacaaatgccccagcttcttcttttgtgccgtactgctgcatgatggaagcgtaaagtccgccattggtcatatccat

SEQ ID NO: 138453 - DNA, 827 bp, Homo sapiens
aactgattttagtcaagctcggcacccggggatcgctttatcgacgcgatgctggctatttgcgcagaaattgaccaggtgaaagccggggtctggccgctggaagataacccgctggtgaacgcgccgcacattcagagcgaactggtcgccgagtgggcgcatccgtacagccgtgaagttgcggtattcccggcaggtgtggcagacaaatactggccgacagtgaaacgtctggatgatgtttacggcgaccgtaacctgttctgctcctgcgtaccgattagcgaataccagtaattcactgattcgactattttctaaaggcgcttcggcgcctttttagtcagatgacaaagtacaaaagtgctcagacagtcccctcgcccctttggggagagggttagggtgaggggaacaggccggcactggcgcgaatatttacccttgccccggccctctccctgaaagggcgagggggaaaagcgtgccaacattgaagattgagccagtttgttagcaatctcaaagatacgtcaacgaattaatttttctcggaaaaacaaatggctatagcacttgtgactggtggcagtcgcggcatcgggcgggcaactgcattactgttggcgcaagaagggtatacggtggcggttaattatcagcaaaacctccacgcggcgcaggaagtgatgaacttaataacgcaagccggtggcaaagcattcgtgctccaggcggatatcagcgacgaaaaccaggtcgttgcgatgtttacagcaatcgatcagcacgatgaaccgctagcagcgctggtcaataacgcc

SEQ ID NO: 138454 - DNA, 626 bp, Homo sapiens
tcagcgactttggctggcgcgtaaccctccggtaaagcattacgcgggccgtgattcaacacgtcgccaaggatcaccagccactgggcaccgctttgggcaaacaactccagaacacgttccgtcgccggtaacgacccatgaatgtccgatgcaaacatcagtttcatcactcactcctcgtcgaaaaaacgtaagctatgatactggattctgtcgttgctatcagccagattgcttcgccgaaagtgcaataaaacgctggacagacgctcgctgccactggaatgttgcataatccaccaggcggtctggcacctcatcgccatgtagtaccaggcggttaatcattagcgccagatcagtatcagcaatgcaccattcaccaaataaattcggctgacccagtactaacaaatgttctgccatcgcgaacagtttctctgcactggcttttccctcggccgttagtggcgcttttttcgcccccgcaaagacaacatccgtcggacgctcttcgcggatgggcatcagatcgctgcgcagccaggcctgaatctgtcgtgcacgcgcacgattttctaaatcaagcggataaatacgttcccaggtcggtggcgcaaatc

SEQ ID NO: 138455 - DNA, 774 bp, Homo sapiens
tggtccagtacgtagaagacaaaatcgaaactgataccggtgaccacacgcacgcggatcggtacgctacgcagtggtccaaagatgaacgacagcgccatcagcatcatcaccgccacagatagcggctggaagattttgctccacatgttgagctgataacgtccggcatcctgaccgctcgacttcagatacttcacatagttgtgcaaaccgctgatagagagtgcatccgggtccagcgccaccacgcccagtttgtccggcgtgaggttggttttccaggtgccgctcaccgtctgcgaaccggtaatctgtttcggattggtcagatcagattcatcaacctgcgacagacgccagactttatgttccggctcaaacttcgcagtagcggcatagcgtacggattgcagacgacgattctcgttaaaggcataaatgctgatgccacctaactcttcgtcacctttaacccgctcaatgtagacgaagttgttgccatctttcgcccataagccttgctgggtagagagcaacgagccgccgtacatcgcctgcgcacggtagttacgcgccatctgctcgccctgcggcgcgacccattcgccaatcgccatcgtcagcaagaccagcggaatggcggttttcatcaccgacagcgccacctgcatacgggtaaaaccagaagcctgcgtcaccaccaggttcgctgcgctgcgccagcatcccaagaccaagcgacgccccgagcagagccgccatcgggaagaa

SEQ ID NO: 138456 - DNA, 594 bp, Homo sapiens
tcattgtgttttctgcttcagtgtaaccatagggtagtgcagtgggtggcagatagctacatagcggtcataggccatgaccaccaggatgaaggcttctgagcaggagaagctgtggaacaggtacatctgtaggaagcaggcagggaagctgaggaagtggtccccaagcaagaacaggggcagcgtcttggggacggtgactgtagtggagaggatgtctagggctgagaggtttatcaggaagaagtacacaggcttgtgaaggctggcctctgccatcacaaccaccaggatttcgctgtcgttgttgccgcgcacatcgataaccttatgtgccacttcattaagacgttcagcgactttggctggcgcgtaaccctgcggtgaagcattacgcgggccgtgattcaacacgttgccaaggatcaccagccactgggcaccgtcctcgtcgaaaaaacgtaagctatgatactggattctgtcgttgctatcagccagattgcttcgccgaaagtgcaataaaacgctggacagacgctcgctgccactggaatgttgcataatccaccaggcgttctggcacctcat

SEQ ID NO: 138457 - DNA, 1008 bp, Homo sapiens
atgctggcattgatgattaagttgctgccgtggttactactggcgattgcggtggtgtgggttattaaggcgattaaagcaccaaaagtgccgaaatatcagcgttatgaccgctggcaattggcggttagacgatcccctctgctgcccgatcacaccatttcacccgccgttaaaaatgcgattgccgcagctcgcgcccgtggcgtgaatgtcgtgctaacgacgggtcgcccgtatgcaggtgtgcacaactacctgaaagagctgcatatggaacagccgggcgactactgcattacttataacggcgcgctggtacagaaggccgctgatggtagcaccgtggcgcaaactgctctcagctatgacgactatcgtttcctggaaaaactctctcgcgaagtcggttctcatttccacgccctggaccgcaccacgctgtacaccgccaaccgtgatatcagctactacacggtgcatgaatccttcgttgccaccattccgctggtgttctgcgaagcggagaaaatggaccccaatacccagttcctgaaagtgatgatgattgatgaacccgccatcctcgaccaggctatcgcgcgtattccgcaggaagtgaaagagaaatataccgtgctgaaagcaccgaatctccaacaaccacatggaagttcaggctccagcttccaccgagaaatctttttctcctccagatctgaagacaaaaggagaggaggcctggtggtgagcgggatatctctgttagttgtcagcgcaggtccatgggttaggaatgctaatgagcctcttggccagctgaagacttggttctctctctcgcacaccctgacgctcacatacactcgggctcctgcatgccgactgacaagcacacagacagagcctcgtgcacgaccctgtctctctcctctttcctctgagcccagagatcgatcgctgaccccacggttgggccaacgctttatttatctggctgtgcaatga

SEQ ID NO: 138458 - DNA, 2659 bp, Homo sapiens
atggtggattgcccttcccccaccaagcctggagcattccagggtggaccttcagtactgctggtgcctggcaacgaagaattttcaaagcccttactgcgggcgtacgtggagatccagcggcgttttgctgggttcgccgccaatttctcgcgccagtttcggcaccagatatcccgacaccagtgtcagcaactcacgcataatctgccgtgcttcgtcatcactcaccataaaatgcgccgcgccctgtactttatcgagcacatgcaagtaatacgagcatacacgggcatcgaacaacgcattactcaagtttaccaacgaagtcggcttttggcgtacgcagatgttttcaacgacgtccggcgtgtagcgggaaacgtgctctttcagcaggttccacacacagcgcggatgagtcagtgtttcatcgcgtttcgcatagccgttttcatcgagctgatagttccaggacgatttatcgtattgacgtttttcagcgtcgtagccgctgaacagaccgtcttcgaaagcaaaatcatcacgcaccagcaggctggcgttggtgtaatgcttaacgtattcggcgttgattttgttgttttcgatcaggtagcgcaaaacgccagacaggaacgtaatgtccgtaccggaacgaataggcgcgtaaatatccgccacagaagcggtacgcgtaaaacggggatcgacaacgatcaaggttgcgtcgttgttgtttttcgcttccatcgcccagcggaaaccgacgggatgcgcttcagcagcgttaccgcccatcaccatcacgactggttggtcatcgcaccgcgaccaaatgttggagcaagacttgctaccgttggtccgtgtcagacgcgcgcctggttgtctaccgccagcatcccgagggagcgcagccatgttatcagtcaggggcaacgtgccgatgaccttacccgccagacggcgggtgaatttgccgagcagtttaatctgcacctgtttccacaaacctgggtgacggatatcgatgccgaagcccgtgtggtgaaaagccagaataatcagtggcaatacgacaagctagtactggcaaccggtgccagtgcctttgtcccgcctgtgcctgggcgtgagttaatgctgacgttaaatagtcagcaagagtatcgcgcctgtgaaacgcaactgcgggatgcccgacgcgtgttgattgttggcggtggtttgattggtagcgaactggcgatggatttttgtcgtgcaggcaaagcggtcacgctaatcgacaacgctgccagtattctggcgtcgttaatgccaccggaagtaagcagccgcttgcagcatcggttgacggagatgggcgttcatctgctgttgaaatctcagttacaggggctggaaaaaacggattctggcattcaggcaacgctggaccgccagcgcaatatcgaagtggatgcggtaattgccgccaccggactgcgcccggaaaccgccctggcacgacgcgccgggctgacgattaatcgcggcgtttgcgtcgatagttatctgcaaaccagtaataccgatatttacgcgctgggcgattgcgcggaaattaacggtcaggtattgccgttcctccagccgattcaacttagcgcgatggtgctggcaaaaaatcttctcggcaataacacgccgctgaaactcccggcgatgctggtgatctgcattccgcacggcggtggtggtccgggcgcggtttctgcggcaccgttcggtagcgcctctatcctgccaatcagctggatgtacatccgcatgatgggcgcagaagggctgaaaaaagcaagccaggtggcaatcctcaacgccaactatattgccagccgcctgcaggatgccttcccggtgctgtataccggtcgcgacggtcgcgtggcgcacgaatgtattctcgatattcgcccgctgaaagaagaaaccggcatcagcgagctggatattgccaagcgcctgatcgactacggtttccacgcgccgacgatgtcgttcccggtggcgggtacgctgatggttgaaccgactgaatctgaaagcaaagtggaactggatcgctttatcgacgcgatggctggctatccgggcagaaattgaccaggtgaaagccggtgtctggccgctggaagataacccgctggtgaacgcgccgcacattcagagcgaactggtcgccgagtgggcgcatccgtacagccgcgctggtaaaaggcgaacactcgcacatctgattgaagatatccctaccggtatttacaccatcccggaaatcaactctatgggcaaaaccgaacagcagctgaccgcaatgaaagtgccatatgaagtgggccacgcccaatttaaacatctgacacgcgcacaaatcgtcggcatgaacgtgggcacgctgaaaattttattccatcgggaaacaaaagagattctagatattcactactttagcgaacgcgctaccgaaattattcatatccggcaagcgattattgaaccagaaaggtgccgccacacttttgaatacttcgtcaacaccaactttaacgaccccacgattgccgaaacctatccgggaactacctttaaccggtgtaaacccctattttaa

SEQ ID NO: 138459 - DNA, 2295 bp, Homo sapiens
atgaaacatgaccattttgttgttcaaagcccggataaacctgcgcaacagttgttactgcttttccacggtgtcggggataacccggtggcaatgggggaaataggcaactggtttgcaccgctgtttcctgatgcgctggtggaattacttacgaagcataacttcgataaagtctttccagttccccagttcacgttcaatcataacaacctctcttataattatgggtattctacggaaacaatataccgtggattcattatggttacactttacggtatcaaaaattgtgacaccattaaaaaggctcgccgttggctggaagccaataacatcgactatcgttttcatgattaccgcgtcgatgggctggacagcgaattattgaacgattttatcaacgaattaggctgggaagcgttactcaacacccgtgatgaacaggctattcgtcgctttctgcgcacggcgctggaaggcgacgggatgcgcgtctttgaggccgaaacgctgcaacgcggcttgctggaagcggcaacccgtaagccagatttgattattctcgatctcggcctgcccgatggtgatgggattgagtttatccgcgacctgcgccagtggagcgcggtgccggtgattgtgctttccgcacgcagcgaagagagcgacaaaatcgccgcgctggatgccggagcggatgattatctgagtaagccgtttggcattggcgaattgcaggcccgtctgcgcgtcgcattacgccgccactctgccaccaccgcgcccgatccgctggtaaaattttccgatgttaccgtcgatttagccgcccgcgtgattcaccggggtgaggaagaggtgcatctcacaccaattgagttccgcctgctggcggtgctgctcaacaatgccggaaaagtactcacccagcgccagctccttaaccagggcaccgttgaaaaccttaccgcagagcgaatcaaccgagtactttccaccaacgtgacgggatattttctctgctgccgcgaggcggtaaaacgcatggcgcttaaaaatggtggcagtggcggcgctatcgtcaatgtctcttcggtggcctcacggttgggttcgccaggggaatatgttgattacgcggcatcgaaaggggcgattgatacgttaaccaccggactatcgctggaagtcgccgcgcaggggatccgcgttaactgcgtgcgggcagggtttatttataccgaaatgcacgccagcggcggcgagcctggacgcgtcgatcgcgttaaatggaacatccccatgcaacgtggtggacaggcaaaagaagtcgcgccagccattatcttgcttctaaataataaacccttttcccgtcacggaaaactttatgcaattgcacgaaggagaaataaaaacaagtgcacccaagatcccaaggtagggcagtttctctcagaactattgaccaaccgaaaggagaacattcctttcaagctttctgaagactgtctttacctcaatatttacactcctgctgacttgaccaagaaaaacaggctgctgacttacatggagaccccagagagaataaggagaaaggaagaagaagaaaaagaggaaggagaagaagaaaaagaggaagaagaaaaagaggaagaagaggaggagaaggaggaagaaacgaagaagaagaggaaagaaagaaagacggaagaacacgaagaagaaagaaggaagaagaagactaagaaggaggaggaggaagaggaggaagaggagaaagggaaagaaagaaaaagaaagaaagaaaagaaaagaaaagaaagaaaaagagaggaagatgagagccaggatgccctgctgaccagcagcatcaactgtatggccagcttcgtctctgggttcgccatcttctccatccttggttacatggcccatgaacacaaggtcaacattgaggatgtggccacagaaggtgccttcttgatcccgtacacactgttccttatcatcgcggggatgcccctgttctacatggagctggctctgggacagtacaaccgggagggggctgccaccgtttggaaaatctgcccattcttcaaagaggccccaactatggtgaaagtgggtgaatttggtagtggagtccagtgcagagcagtgatggtgggagcagagacaatcacagagagactggtctatggcatcacgccagagaacgagcaccacctggtggctcagagggacatcagacagttccagttgcaacactggctggccatctga

SEQ ID NO: 138460 - DNA, 2499 bp, Homo sapiens
atgaggtgccagaacgcctggtggattatgcaacattccagtggcagcgagcgtctgtccagcgttttattgcactttcggcgaacgaatctggctgatagcaacgacagaatccagtatcatagcttacgttttttcgacgaggacggtgcccagtggctggtgatccttggcgacgtgttgaatcacggcccgcgtaatgctttaccggacggttacgcgccacgcaaagtcgctgaacggcttaatgaagtggcacataaggttatcgctgtgcgcggcaatctgcgacagcgagtggatcaaatgctgctgatttcccgggcaatcaatcggttagtggcgagcaactggaatcggcgctcggcacaaatgcggtgtccgatctcgggcaaaaacttggcgtggataccagtacagcttccagtttactggcagaacaattgccgaagattattgatgcgctctcaccgcaagcatgggtcaggaaccaatctacctggggaactcatggctattaaactcattgctatcgatatggatggcacccttctgctgcccgatcacaccatttcacccgccgttaaaaatgcgattgccgcagctcgcgcccgtggcgtgaatgtcgtgctaacgacgggtcgcccgtatgcaggtgtgcacaactacctgaaagagctgcatatggaacagccgggcgactactgcattacttataacggcgcgctgggtacagaaaggccgctgatgctatgacgactatcgttcctgaaaaactctctcgcgaagtcggttctcatttccacgccctggaccgcaccactgctgtacaccgccaacccgtgatatcagctactactacggtgcatgaattccttcgttgccaccaattcccgctggtggtctgcgacggaggaagaatgaccccaagagccatgttcttattcagtagtgctcacatactgatgcctctgaactatcacaactctcatattaatacattgttcccggtggcgggtacgctgatggttgaaccgactgaatctgaaagcaaagtggaactggatcgctttatcgacgcgatgctggctatccgcgcagaaattgaccaggtgaaagccggtgtctggccgctggaagataacccgctggtgaacgcgccgcacattcagagcgaactggtcgccgagtgggcgcatccgtacagccgtgaagttgcggtattcccggcagcacttgtgactggtggcagtcgcggcatcgggcgggcaactgcattactgttggcgcaagaagggtatacggtggcggttaattatcagcaaaacctccacgcggcgcaggaagtgatgaacttaataacgcaagccggtggcaaagcattcgtgctccaggcggatatcagcgacgaaaaccaggtcgttgcgatgtttacagcaatcgatcagcacgatgaaccgctagcagcgctggtcaataacgccgggatcttgtttacccagtgcaccgttgaaaaccttaccgcagagcgaatcaaccgagtactttccaccaacgtgacgggatattttctctgctgccgcgaggcggtaaaacgcatggcgcttaaaaatggtggcagtggcggcgctatcgtcaatgtctcttcggtggcctcacggttgggttcgccaggggaatatgttgattacgcggcatcgaaaggggcgattgatacgttaaccaccggactatcgctggaagtcgccgcgcaggggattcgcgttaactgcgtgcggccagggtttatttataccgaaatgcacgccagcggcggcgaggcttggacgcgtcgatcgcgttaagtcgaacatccccatgcagcgtggtggacaggcagaagagttcgctgtccagacgttccccgtatggcgggttgctcaacactgtgccgtacggccctttcggcagcggattggtcagttgcgcgacatctttcacctcaaaggtgatcagttcaccaatccccgcaagacgggcgttaccccacagcctccctgctcaacctatccagacccttcccctcctcctgtgccagctgcaggtcacattgatcgccctgctttggcaccgacctttacccctcctatcatgtgctctaaggccacagtcaaacccctaagtccttctccccctgggacacctgacccagcatcagtccttccttttagagagcaacgagccgccgtacatcgcctgcgcacggtagttacgcgccatctgctcgccctgcggcgcgacccattcgccaatcgccatcgtcagcaagaccagcggaatggcggttttcatcaccgacagcgccacctgcatacgggtaaaaccagaagcctgcatcaccaccagttcgctgcgctgcgccagcatcccaagaccaagcaacgccgcaagcagagccgccatcgggaagaagatctgcacatctttcggcacgctcagcaagctgatcgacaaacttga

SEQ ID NO: 138461 - DNA, 187 bp, Homo sapiens
cgaaatccgcgcattagctgcttcattcagaccgatgacgacctggcgatgagggcctcaatcgcgctcgatgcaccaattttttccagcaatcgcagggtatcttccgttagcggtcgacgatctccagtgtgcggtacggtgatgacgccttcaagccatagcgacaggcctggaacgtgttaat

SEQ ID NO: 138462 - DNA, 1449 bp, Homo sapiens
atgtatttaggtacatgcttttttgacctttcttcctcatggggaattgatgaccgtgatgacctgctgcgcacaattcaccgaatgatcgataacggtcatgccgctcggttggcagggttttatcaccgctggtttcgttattcgccatgtgaatggcgtgactatcttgctgaactaaatgagcaaggtcaggcttatgcgctatttgtcgccagcaccgccgaatgctgtggcgaagggggaatcaaagcctgggattatgtccggatgggttttttaagccgaatgggcgtacttaataactggttgagcgaagaagaaagtctatggatccagtcgcgcattcatctacgggctctacgttattatagtaactggcggcaatactttgccggttatacctttggtcggcaatattggcagtctcccgaagatgatcatctgcctttattacgcgaattcttagcgcaggaaacgactgacgtcgatattatccgccgcgcttatctggcgctgttaccgtcctttcatacagaaaccgatccgcagggttttaaacaacttcgtcatgcgtatgatgatgcgctaccgattgcgcagtcgcctgctaaatctgttttgcaaccagaagaatatgagtgggaagcgttgctggtggaaatgctcggcctgttgcatcgtattgcgatggtacaactttcgcctgctgcacttggcaacgacatggccgccatcgagctgcggatgcgtgaactggcgcgcaccataccgccgacggatattcagctttactatcagacgctgttgattggtcgcaaagaattaccgtatcgaacctgccaacttcatgcctgcacgtctgcagacacacctcttcgtaaaatcccgcgcttcagtggcaaactccatttttatgcgttttgccctaatatttattcttcttatcactctgccgcaaaatatggcggcagttgccagcccggcagcactgctcatcggctggggtattactggcgctggcatttattgctggcctttgccatgctgatcctcacgcgcattcgtcccgaacttgacggcggtatctttacctatgcccgcgaagggtttggcgagctaatcggcttttgttccgcattcagctcggaaaaagattacctgctgtataaattcaaccgtttccaggcctgtcgctatgggcttgaaggcgtcatcaccgatccgcacactggagatcgtcgaccgctaacggaagataccttgcgattgctggaaaaaatcgccccttccgcacataaaattggtgcatcgagcgcgattgaggccctgcatcgccaggtcgtcagcggtctgaatgaagcgcagctaatgcgcgatttcgtcgccgatggcggctcgctgattgggctggtgaaaaagcattgtgagatctgggccggtgactaa

SEQ ID NO: 138463 - DNA, 1006 bp, Homo sapiens
atgaggactggggcgaatatcccagtgcagatctttaatgctgtcgatcatcgtggtgtaactcagacagcgaaacagggcttcaaattgttgccagttactgacccacggcatcgggccattatcaggaaaggcggaaaaaatattcggtcgcgatcgtttgccatcgcgttcccgcggtgcggcctgggtgtgcggttacgaccacgaaaaatcaatggtggtcctcacacctaccgcgttgtgttcattttctggcggcaaagactctggtttaatgctgcatctgacagccgaactgcccgacaaatgggcaaaaaaatctgcgtttggtttatcgactgggaggcgcaattctcttgcaccattaactatgttcagtccctgcgcgagttgtacaccgatgtcatcgaagagttttactgggttgcgctcccgcttacgacgcaaaattccctttcacaataccaacccgaatggcagtgctgggaacctgatgtcgaatgggtacgtcaacctccccaagatgcgataaccgaccctgactttttctgcttttaccagccaggcatgaccttcgaacaatttgtacgtgagtttgccgaatggttttcacaaaaacgtccggcggcgatgatgatcggcatccgtgcggatgagtcctacaaccgttttgtcgccatcgccagtttaaataaacaacgttttgccgacgataaaccctggactacggccgcaccaggcggtcatagctggtacatttaccccatttacgactggaaagtggctgatatctggacctggtatgcaaatcatcaaagtctctgcaacccactgtataacctaatgtatcaggcaggcgttcctctgcgtcatatgcgaatttgcgaaccttttggcccggagcaacgacaaggattatggctctatcacgttatcgaaccggatcgctgggctgctatgtgcgcacgagtcagcggggtaaaaagtggcggcatttacgtac

SEQ ID NO: 138464 - DNA, 2793 bp, Homo sapiens
atgattgatgtcttagggccggagaaacgcagacggcgtaccacacaggaaaagatcgcaattgttcagcagagctttgaaccggggatgacggtctccctcgttgcccggcaacatggtgtagcagccagccagttatttctctggcgtaagcaataccaggaaggaagtcttactgctgtcgccgccggagaacaggttgttcctgcctctgaacttgctgccgccatgaagcagattaaagaactccagcgcctgctcggcaagaaaacgatggaaaatgaactcctcaaagaagccgttgaatatggacgggcaaaaaagtggatagcgcacgcgcccttattgcccggggatggggaacgaaccgatgactggatggatggccgccgcagtcgtcacactgatgatacggatgtgcttctccgtatacaccatgttatcggagagctgccaacgtatggttatcgtcgggtatgggcgctgcttcgcagacaggcagaacttgatggtatgcctgcgatcaatgccaaacgtgtttaccggatcatgcgccagaatgcgctgttgcttgagcgaaaacctgctgtaccgccatcgaaacgggcacatacaggcagagtggccgtgaaagaaagcaatcagcgatggccattgttatatcgcctattcgttcgccctcggacattacgttcctgtgtgcgcgttttgcgctacctgatcgaaaacaacaaaatcaacgccgaatacgttaagcattacaccaacgccagcctgctggtgcgtgatgattttgctttcgaagacggtctgttcagcggctacgacgctgaaaaacgtcaacacgtttcccgctacacgccagatgtggttgaaaacatctgtggtacgccaaaagacgcgttcctgaaagtctgcgaatacatcgcagaaaccagtgctcacgataaaactgcctcgttcctgtatgccctcgctggacgcaacactccgttggtgcccattagattgctcatcacctgcgcctctgaagtcggtatctgggattaccagcctgacgaagtggtcgaaaaaggccgcgtcgggccaggcgaactgatggttatcgacacccgcagtgggcgtattctgcactcggcagaaaccgatgacgatctgaaaagccgccatccatataaagagtggatggagaaaaacgtccgccgactggtaccgtttgaagatctgcccgatgaagaagtgggtagccgcgaactggacgacgacacgcttgccagctaccagaaacagtttaactacagcgcggaagagctggactccgtaattcgcgtactgggcgaaaacggtcaggaagcggtcggttcgatgggcgatgataccccattcgccgtgctctccagtcagccgcgcattatttacgactacttccgccagcagtttgcccaggtgactaacccgccaatcgacccgctgcgtgaagcgcatgttatgtcgctcgccaccagtatcggtcgtgaaatgaacgtcttttgcgaagcagagggccaggcgcaccgtttaagctttaaatcgccgattctgctctactccgatttcaaacagctcacgacgatgaaagaggagcactaccgcgcagatacgctggatatcacctttgacgtcactaaaaccacgctcgaagcgacagtcaaagagctgtgcgtcaaagccgaaaaaatggtacgtagcggcaccgtgctgctggtgctctccgaccggaatatcgctaaagatcgcctgccggttccagccccgatggcggttggcgcgatccagacccgtctggtcgatcaaagcctgcgttgcgatgccaacatcatcgtcgaaaccgccagcgcccgcgatccgcaccacttcgccgtgttgctgggcttcggcgcgacggctatttatccataccttgcctatgaaacgctgggccgcctggtagacacctatgccgatgccaaagattatcgtaccgtgatgctcaactaccgtaacgcatcacaaaggctgtacaaatcatgtcacaatggcatctcacatggctttacggctgtcgatcgctatgggcttgaaggcgtcatcaccgatccgcacactggagatcgtcgaccgctaacggaagataccttgcgattgctggaaaaaatcgccccttccgcacataaaattggtgcatcgagcgcgattgaggccctgcatcgccaggtcgtcagcggtctgaatgaagcgcagctaatgcgcgatttcgtcgccgatggcggctcgctgattgggctggtgaaaaagcattatttttatgctgtcgtcggagctacggggcgtcccctttatcaatctgaagtccgatccacaaaaatccctgttaaatcagcaaatatgtacttttacacgcaagctggctcatggccagatgatgctgttgaagttgatgagcaagtgtatattgagttttccggattaccgccgaaaggaaaaatccgtatcgctggagaaaatggttttcctgcatggtctgaaattccaccaccaacacatgaggaacagattgctgcagccgaactgaaaaagcagcaattgattaatcaggccaacgattatatgaacagtaaacaatgggctggtaaagcggctattggtcgtctgaaaggtgaggaactggcgcaatataatttgtggctggattatctggacgcactggagctggtcgatacttccagtgcgccagatattgaatggcctactcctccggcagttcaggccagatga

SEQ ID NO: 138465 - DNA, 1670 bp, Homo sapiens
ttagtcaccggcccagatctcactgagctttatcaccaggccaatcacttatgtcgccctcggtgacgaaaacgcgcattagctgcgcttcattcagaccgctgacgacctggcgatgcagggcctcaatcgcgctcgatgcaccaattttatgtgcggaaggggcgattttttccagcaatcgcaaggtatcttccgttagcggtcgacgatctccagtgtgcggatcggtgatgacgccttcaagcccatagcgacaggcctggaaacggttgaatttatacagcaggtaatctttttcctgatgtttaaacgggcgttccgtcagtaaccagtgggcggtagcctgaattaatcccgccatatttactgcgtggctaagggttaacggggtatccatcacccgaacctccaccgtgccaaaatgaggactggggcgaatatcccagtgcagatctttaatgctgtcgatcatcgtggtgtaactcagacagcgaaacagggcttcaaattgttgccagttactttgaggatcgcaatggcgacagctgtagctctgcgccctgaagggacggcgggctgtgtacgcgccggcatcgagcatggtcttctgtacaatcaggaacagcgtctgtggtatatcgggccgatgttccgtcacgagcgtccgcagaaagggcgttatcgtcagttccatcagttgggctgcgaagttttcggtctgcaaggtccggatatcgacgctgaactgattatgctcactgcccgctgggtggcgcgcgctgggtatttccgagcacgtaactcttgagctgaactctatcggttcgctggaagcacgcgccaattaccgcgatgcgctggtggcattccttgagcagcataaagaaaagctggacgaagactgcaaacgccgcatgtacactaacccgctgcgcgtgctggattcaaaaaatccggaagtgcaggcgcttctcaacgacgctccggcattaggtgactatctggacgaggaatctcgtgagcattttgccggtctgtgcaaactgctggagagcgcggggatcgcttacaccgtaaaccagcgtctgctaaattaccgcctttcagccaatttgatcgagaacaatttatctctttttgatggagaaggtatctatcggttttatcaccccaagccaacaaaaaacgccgagcgagagaaccgccagtgccgcaacgatctgtttttccgatgtggatttttctgcccaccatgatttaatcatttccctgagttccttactgtccatacaccactgaccggatctttttctgttttttccatcggaagccaggactgtgttaactcacagaaacgatcgatattagcttcactcttagcactcatttttaaggtcagcgacttttgcttctggctatagttcgcctccattaactgcagttcagggtgttccagcagaagtgtttgtaaatgatagagcaacggcacagcttcaggatattgctgagcgagttgctgcttaaagtaaaaacgaaaattgtgggtgcgtttgatctgcgggaaataacgttgccaggtttcttgctgttgttgctgaagttgatcttcaatcttaagcgtatgccagagcgcgatgctccggctgccaacaaaagaaagaatggcg

SEQ ID NO: 138466 - DNA, 832 bp, Homo sapiens
ggataattcgctttttaatccataaaaacctgcccaccaatgccaggtttttttttgccctgtcgtgagcgcacaccaatgcgagtatctcccttataagtctgtggttacgtcaatagagagctttgtcacaattatctgcaaagtcatacgccgttaattgctttcttttttggcgtaagcgtaagatgcttcatctggtttaaaccaaaaggattaaacaatggcggagaatcaatccaccgtagaaaatgcaaaagagaaactggatcggtggttgaaagatggcatcaccacgccgggtggaaaactcccttcagaaagagagctgggagaactgctgggcattaaacgtatgacgctgcgccaggcgttgttgaacctcgaggcagaatccaaaatcttccgtaaggatcgtaaggggtggttcgtgacccacccgcgatttaattacagtccggagctgtcggcgagctttcagcgggccgcaattgagcaagggcgagagccttttctgggggtttaccgagaaaaaccgtaccagcgatattcccgagacgctcgcgccactgattgcagtgacgccatcaactgaactctatcgcatcaccggctggggggcgctggaaggacataaagttttctatcacgaaacatatattaatcctgaagttgctccgggctttattgaacaacttgaaaaccactcattttctgcagtctgggaaaagtgctaccaaaaagagccggtagtaaaaaaattgattttcaaacccgtcagaatgccgggcgatatcagcaagtatcttggcggttctgcgggtatgccagc

SEQ ID NO: 138467 - DNA, 837 bp, Homo sapiens
cccgagcgtgcgttcggcatattcacgtgccaccgtgttgtgtttgggcagcaggagcgcctgacggatccccgccaccagcgcctcgaccgattccggttcaacgcaaaccgcaatgcccggaaaggtttcgcaaagctgccccagttctgtgtaggcttcagcagtaatcaccgcgttaccgcctactgccagaatattggtcagtttcgacggcaatacggcatctgccgcgccgcgtttttgcaccaccagatggcaatcgcccatcttcagcagtgcgggtaaagcgtcatacgattgcagcgggaaaaattgcatgttgcgcagtccacgctgctgcgcccattttttccagccgcgcttttcgcacacgggacttagcgccagaccgtctttggcgcgcataattggcacaccgacaatctcaatatcgaagcccatatcggcaaccattttgcggatcagcgccagttgctgaaaatctttttcaccgaagcaggcgatgtccggctggaccaggttgaacagcttgctgacaatagtcgaaacgccgcgaaaatgtcccggacggctggcaccttccagcatggtcgaaaggccaggaacgtcaacgtaagtgtgggtttcagtaccgttcgggtagatctcttttaccgaaggggcgaaaactaaatccactttacgtttgtttagcttctcgcagtcctcctgcaaggtccgtggataacgagccagatcttccgggcggtcgaactgcatcgggttaacgaaaatactgacgacgaccacatcggcgcgggctttggcttcgtcgaccagcttcatatgggccat

SEQ ID NO: 138468 - DNA, 3657 bp, Homo sapiens
atgtctggcaggtgtaatcgatgccggcatgatgtgcactacaatggcatcgtttctgcgccgccgagcgtaatgacagttgtgggtcatgtagatttagccgggtcgtttaacctcgggctggcaggggtgattttctctttcatgttggtcaacttgtttgactcctccggtacgctgattggcgtgaccgataaagcaggtctggcggatgagaaggggaaattcccgcgcatgaagcaggcgctgtatgtcgacagtatctcttccgtgaccggttcgtttatcggtacttcttccgttacggcttatattgagtcctcttccggcgtatcggttggcggtcgtaccggtctgacggcagtggttgttggtctgctgttcctgctggttatctttctgtcgccgctggcggggatggtgccaggctacgctgcagctggtgcgctgatttacgttggcgtgctgatgacttccagtctggcacgcgtgaactggcaggatcttactgaatctggttcggcgtttattaccgccgtgatgatgccggtcgccttctcgattaccgaaggtatcgcgctgggctttatctactactgcgtgatgagtatactcatccggttccggggatctctagagtcgtggtatcccggtcggcggctattggcattgggtttgatcacaatattcggtttggtaaatggcatgacgttattgccggaagaaaaggtgctcgacgtcccgaccgatccaacttatggcgtgctgtcgcgtcaggatctcgaccagctgcaggcaggcgcgcgcgttgacgtggtcgacgacaaacgcaacccaatggacttcgttctgtggaagatgtcgaaagagggcgaaccgagctggccgtctccccggacgctcgataacgatacgagatacggacgctttagccagttccttagtcaggtactgacctgtacgtccgcaagacagattctacaacgtgtcgacactcttcctctttatttacatgcttatgcctttcatttaaatatgcggctggaaagagtgttgcctgctgatttacttgatatcgcaagtgaaaataatctacgtggcgtcaaaatccatgttctcgatggcgagcgtttttctcttggtaatatggacgataaagaactctctgcctttggggataaagcccgccgtctgaaccttgatattcatattgaaaccagcgcctcagataaggcatctattgacgaagccgtcgccatcgcgttgaaaactggggcatcgtccgtacgtttttatccacgttatgaaggtaatttgcgcgacgtattatcgattatcgctaacgacattgcctatgtacgggaaacgtatcaggacagcggcctgacttttacgatcgagcagcatgaagatttaaaaagtcatgagctggtgtcgctggtttcccccagccccgaccttggaaaacgaggccaggcgccaagctgccatgcctgcagctcccccgtgcgcccgaacagctgcgccgtggcggcgcaggtttatatcggcagcgaatatgaacatcagtcgatcaaaaatattattcagctggttgatgccggaatgaaagtgggaatgccgaccatggccgtgactggcatatggtgcgcgatcagcgttactttctcgctcgcgactcgaatcgccgctgaaatgggggcgcaaattatcaaaacctattatgtcgaaaaaggttttgaacggattgttgccggatgtccggtacccattgttattgctggcggtaaaaaattaccggagcgcgaggcgctggaaatgtgctggcaggctatcgatcagggcgcttctggtgtggatatggggcgtaatattttccagtctgaccatccggtggcgatgatgaaagccgtattggcagtcgtgaatatgacaccttttgtggggctatcgataaactcgaggcagaactcaaaaattccgcttcctgacagagttaatagcgggtcatgcgcgcgtacccgtgggatcctctatgagtcagcggcagatcttccagcggtttgcctgacgaatggcttccaccaccgcttcaccaacaatatggtgcgcctcgcggaacgagtccttgagatcctgctgaccatcctcaaagcggtggtgatcctgctggtggttgtcacctgcggggcattcatgagctccgctaaatcccacttgttgccagcgccaccgccaaagcgccgtgaaaaacatcaaccggccttcaaagttgatgttaagctttccggcatcacaaagcggttcatgtcggctaagcggccgtgcgtcaggaatacgccgattctaaccagctgtccctcctgttcagctactgacgccttattggaaggccaggaggtttttgcaaatcttcaggaaggaatgagccaaaggtggctgttctttcccagcggtaacaggcacaagattgatcagcagcatctctttacttttgaacacgcgttcggtgagggttccggcttcatcgacttcgctctgttcgtgggcgggatgctgtttatcaagatagtgtaccagagagaacgccagccaatcagcagcctagaggttcgagacgatattgagcgccgtgcttatgaaatcgcactcgtatctctggaagtagagccagatgaacgcgaagcctatgaattattcatggaaaagcgtttcggtgacttagtagatcgtcggagagcaaaaaacggcgataacgaatacatggcatgggatatgactctcggttggatcatctggcagcaacgagctggtatccatttttcaacaatgtcacaacaagaggtccttccggtcatcattatgaccgcacattccgatctggatgctgccgtcagcgcctatcaacaaggggcgtttgattatctgcccaaaccgtttgatatcgacgaagcagtggcgctggttgagcgcgctatcagtcattaccaggaacagcagcagccgcgtaatgttcagcttaacggcccaacgaccgatatcatcggcgaagcgccagccatgcaggacgtgttccgtattatcggtcggctttcgcgttcttctattagcgtgctgattaacggcgaatccggcaccggtaaagaactggtcgctcatgccctgcatcgcccagttcgcgcgcggcaacctgtaaaaaatggcgcgccagacggggaatatcttcccgacgttccgcagcggcggcagatgaacgcggataacgttcaggcggtggaacagatcctcacggaacttaccttcctgcactcgctgttcgagattcaggttttccacggcgacattccgcgttatatggcgggtgacccgactgcgggtaaactgtctggtggcttcctgttcaaaatgtacggtctgccagctgccgcaattgctatctggcactctgctaaaccagaaaaccgcgcgaaagtgggcggtattatgatctccgcggcgctgacctcgttcctggaccggtatcaccgagccgatcgagttctccttcatgttcgttcggcggatcagttacaggctttcgatgaaacgatcctcgccagtgggatcgtgccgcgcactggctcccagggcttgaggaaatggcgattctctgcgtaa

SEQ ID NO: 138469 - DNA, 1833 bp, Homo sapiens
atgggtaacctgcacgatggccatatgaagctggtcgacgaagccaaagcccgcgccgatgtggtcgtcgtcagtattttcgttaacccgatgcagttcgaccgcccggaagatctggctcgttatccacggaccttgcaggaggactgcgagaagctaaacaaacgtaaagtggatttagttttcgccccttcggtaaaagagatctacccgaacggtactgaaacccacacttacgttgacgttcctggcctttcgacatgctggaaggtgccagccgtccgggacattttcgcggcgtttcgactattgtcagcaagctgttcaacctggtccagccggacattcgcctgcttcggtgaaaaagattttcagcaactggcgctgatccgcaaaatggttgcgatatgggcttcgatattagaatgtcgtctgtatggctacattctggatttaaatccggggattattggctacaaaatcgtgtttggcattatggcctgcttcgcattcagtggtgcggtggtttccgtaatgctggttaagcgtattagccaacacctgagtgttctcacctgtgaaatggacacagcgctgggcatgggcagggggttccctgagcaggatggaaacgtgggggtgctggagaaccggaccaaggactccaagctggagatggaggtgctggagaacctccaggagctgaaagacctgaaccagcggcaggcgcacgcagaatccaaaatcttccgtaaggatcgtaaggggtggttcgtgacccagccgcgatttaattacagtccggagctgtcggcgagctttcagcgggccgcaattgagcaagggcgagagccttcctgggggtttaccgagaaaaaccgtaccagcgatattcccgagacgctcgcgccactgattgcagtgacgccatcaactgaactctatcgcatcaccggctggggggcgctggaaggacataaagttttctatcacgaaacatatattaatcctgaagttgctccgggctttattgaacaacttgaaaaccactcattttctgcagtctgggaaaagtgctaccaaaaagagacggtagtaaaaaaattgattttcaaacccgtcagaatgccgggcgatatcagcaagtatcttggcggttctgcgggtatgccagcgatcttaattgaaaagcatcgcgccgaccagcaaggcaatattgtccaaatagatattgaatattggcgatttgaggccgtagacctcatcattaatctgtgttttatggtgacaataaataacgcaagaaagattctacaacgtgtcgacactcttcctctttatttacatgcttatgcctttcatttaaatatgcggctggaaagagtgttgcctgctgatttacttgatatcgcaagtgaaaataatctacgtggcgtcaaaatccatgttctcgatggcgagcgtttttctcttggtaatatggacgataaagaactctctgcctttggggataaagcccgccgtctgaaccttgatattcatattgaaaccagcgcctcagataaggcatctattgacgaagccgtcgccatcgcgttgaaaactggggcatcgtccgtacgtttttatccacgttatgaaagtaatttgcgcgacgtattatcgattatcgctaacgacattgcctatgtacgggaaacgtatcaggacagccgcctgacttttaacatcgagtggggcaaatcatcatgctgcagtccctatgtccacccctgggctaaactggctgctatctattatcggctgcaaccgcatatcaacgatgccttttag

SEQ ID NO: 138470 - DNA, 502 bp, Homo sapiens
atcagcttctacgctaagaaagcacgcggtctgatgagtcgtttcattattgaaaatcggctgaccaaaccagagcaactgactggttttaatagcgaaggttacttctttgatgaagattcctccagcaatggcgaactggtgtttaaacgctacgagcagcgttaagtttgcagtcaatgccggatgcggcgtgaacgccttatcctgcctacaaaagcatgcagattcaatatattgcagaattaacgtaggcctgataagacgcgccagcgtcgcatcaggcgctgaatgccggattgttacccggcatttgtcatttagcggtgatgtttgcctggaccatgaccgccgtgatgatcatgaggagctttcttatggtggcgcggcggtggcggcggtccgtgtaggtgccagcgattgcctcgccattcataatgttgtttccaccagccgtggtcgcgccagtgacctccatcccagtaatagccacgattatcac

SEQ ID NO: 138471 - DNA, 2061 bp, Homo sapiens
atggacttcgctgaaacggagctcgagttcatcaaattctggggagatatcatcaccaacaagctgaacgaggcgctcgcagcacaaggcgataatgtggtgattaatctggcgtcagatgagtattttaaatcggtgaagccgaagaaattgaatgccgagattatcaagccggtgttcctcgatgagaagaacggcaaatttaagatcatcagcttctacgctaagaaagcacgcggtctgatgagtcgtttcattattgaaaatcggctgaccaaaccagagcaactgactggttttaatagcgaaggttacttctttgatgaagattcctccagcaatggcgaactggtgtttaaacgctacgagcagcgcgctgaatgccggattgttacccggcatttgtcatttagcggtgatgtttgcctggaccatgaccgccgtgatgatcatgaggagctttcttatggtggcgcggcggtggcggcggtccttgttatcgaaccgaacaaactggcctttgacggcagcggttatctggcctgggaaggtctgatctgcatgcaggaaatcggcaaatgcaccgaagaacatcaggcgattgtgcgtaagtggctggaagagcgcaaactggatgagtttccggttgggccctttcccggggaaaaaaccaaccgggggttggttgcgaagcaggcgcccgtcgacacgcccgagaagcgcgcatcggtgatgagcgacaccgtcttgccccacgagatatgctttagcgcggagcgcgacaaaacggtgcgcctgacctttgccgacagtgcgccaggtgtcagtgacgatcagctacaaaaattgtttgaacgtttttatcgcaccgaaggttcccgcaaccgtgccagcggcggttccgggctggggctggcgatttgcctgaacattgttgaagcacataatggtcgcattattgctgcccattcgccttttggcgggcgtggtgataagccccagcacatcgtgaccgtccaccgggccgatgtagttaaagcccagctcttcaaacaacgtgccaggcactaccatgcctttaatatgttcttcggcataccagccgccatattttttatcacgcagtgcgccgttcatggctttgataccgtgatcaaccaacgagtaagcgccaggtcgacccatcgccgcagcaacggaataaaccggcgtttagccatcatttcgtcgacgatatcgccaagttgttgtaatttcggtgcgcaaacgtcacgcagcatcagctcgttgtctggtaaaccgacgaccgatgcccagactgcacggcctgccaggaatcccgatgcgcccgccgtcattgccacgcgtacggcacgcgggaacagtttttcgtcgacaccggaagagaggatcacccatggcatattgatatggtcattcagaccttgtgaagcacagagaagctctttgttgcggacctttgccataaaacggcatttcaacttttgtgaggcgctagtttcatctgcacaagaagcgggtaactatcagcgcaaactggttgctgaagatcagcaaaaaatcatcgacggcatgaaagaagcgggcgtggaagtcatcaccgatctcgaccgcaaagcctttagcgacgcactggggaatcaggttcgcgacatgtttgttaaagatgtgccgcagggagctgatctgctgaaagccgtggatgagccaggctgggcagagcgcgatatggcagaactgtggcaatgctgcatggctgtcattcgcgccctgcttactcattctggtgttagcggggaacaaattgtcggtatcggcatctccgcacagggaaagggcttgtttttgctggataaaaacgacaaaccgctcgggaatgctattttgtcctcggaccgccgggcgatggaaatcgttcgtcgctggcaggaagatggcatcccggaaaaactctacccgctgaccccgacaaaccttgtgggacccgggcatccgggggttgctgttacacctggcctgaaaagaggcacgaacccataa

SEQ ID NO: 138472 - DNA, 786 bp, Homo sapiens
atgcctgtaagcctttgcgtatgttccgtaatcccgggcgcccggccggcccggggcaataccatcacaagttacaagaagtcggcgtatgtaagtctcccaggtgatggcaaagcccacgactactgggacaacagccaagcaacaaatgtcggagacacactggcgctggcaatacccccgggtgaacaatctcccgcgccagagcatagacttatagctcgcatgtattgtaccgccgcccagccgcgagaagtttaccagccgcatgccatgccagacggttttactccagtagactttgatatcacttatgacgtggtgatacttcgaagattaaaaactcgttgcaaatgcgcatcgacggacaactggggtagtagaccagtacaacctggtcgccaggcgaagaagttagacaatgtgcccgatgtcggaaaatttcagggcacagccaccattaccgtcatcgtgggtaaaagaagacgttgcgttttgattaacgcaacgcttcggcactgttcccctgctgctccagcgcatacttatacagcgcatttttcttcacgccggaatttctgcggccagcgccgccgcttttttcagcggcagttctgcctgagcagcgccagcgtgcgcagggcatcggcgggctggttattcgaccaacggttgaacttcaccaagctctacaacttttcttcgggcaccaacccaaaattcaatctctccacgcgctactacgaggtagcacaggattccaggcgtctttcagacttccactag

SEQ ID NO: 138473 - DNA, 2915 bp, Homo sapiens
atgtattactcgcatgcgtcttgtgttgcagatcagtatgcatgtggtatgcaccgcacgccgtcccgcacgggcaggccccggatacacgcacccaggcaggcccgactcaagccgcaggtcaaggtggcaagcaagaagcgaaacgcaagggacaagatgcagccacctaatgaacagcagaagacacgagcccatgcctgcactccaagcagcagattccgcgccgtagttcgcactctgacatgcccagtcgtggccaacgtcacaaggatattcccacgttacttcagcaataccagggtcttacgtcgtagacggaaacaagccagaggcacatggtggaggttaagacatctacatctatatgtgcaacctcacaagcacacttcttactacatttatcgcctctaccgcgtcacatatgttatgtctgcgcaagttgttgatactggtatatacgagttcacaacacggaaacacgacataggaaccatagagttaccgaattcagagatcaggtatcacgggaatccagctatgagtcgacctcgtaaaacgcctacgccgcccaactcgcccgccagcgaacgcgccacaggcccaaccaccctccttcctcccatccgacaacgtcgctacgccgcccgacacacctctactatagcatacacaaattctacgagtgatatttttgaggccccatataataaggcggccccaatcatgcgctatacatccgtgtattgttccctcttttccccgtgtaaacccgtttgcccccggcagccccctttttctctcagtcccgctgttagtaaagtattaaaagtttcagaaattacaatcaaccggtaccgtccacgggcgcgtcccgtacacatacgccgcaaggccgtggcccgcgcgacagcaatagccggcagcgcggttgtcgtatgcggttaccgcctatgcccaatgcgccatgcctgtgctacatcccagctcggagacacactggcgctggcaatacccccgggtgaacaatctccgccgccagagcatagacttatagctcgcatgtattgtaccgccgcccaccggcgaggtgagaaaaccctctctacttggcgcgactgcgtgaacgcgacattaccctcacttttgccacggggcgcatgcgctggagatgcagcatattctcggggcgctatcgctggatgcgtatttgattaccggcaacggaacgcgcgtgcattctctggaaggtgaacttttacatcgtgatgatttacctgcggatgtcgcggagctggtgctgtatcagcaatgggatacccgagccagcatgcatatcttcaatgacgacggttggtttaccgggaaagagatccctgcgacggtgaaagcattggcgtataccggctttcgctatcatgataatcaatgtcaaaaaaatgccactcggcagcgtcaccaagatctgcttctgtggcgatcacgacgatcttacacgcttgcagatccagctatacgaagcattaggcgagcgtgcacatttgtgtttttccgccacggattgcctcgaagtgctgccggtgggctgcaataaaggcgctgcattgacggtgctgacccaacatttaggtttatcgttgcgcgattgcatggcctttggtgatgcgatgaacgatcgcgaaatgttagtcagcgtcggtagcggatttattatgggcaatgcgatgccgcaactgcgcgcggagctcccgcatttaccggtgattggacattgccgacatcaggctgtctctcactatttgacgcactggctggactatccacatctaccttataccccgaatacgagatccttccagcacgggcacggccgcacagtagccgccgagaaccggcagactgcgctggggcgcccggaacaaaaagacttgtccgtccagaccggagcccagttagttcagctggtcgtggctgcgcggcatacgaggcaggcctcgtcgggcgaaccaagcgctgcagagcacgtcgaagactcagttgcgggttgggtcaggcagcataagggcgttgagccggggctgcttagcggcggcagctatcgcaagtaccggcatccagccctaacgtcctccttgcgtttctacgctacgtgcgtgctcgatcacggttgccggacaagacgtactggtagtacaggtcgttgtgctactggggcacgcgcctgccgttcagaacgcctggcacttggcgcgctagcccgtcggcgtggtacacgacgagtccctaggcgtagccagcaagccgttatactaggaggtcttaggccgcaaaacaggctactcgtgaaccgaacctcggcggcacatagttggagcgcacgttacgaaccggtcgcggagtatgacaccgggggacccacaggaaaaggccccgggagaccagtgaggcgagagcatgagctccccggacacgggcatgcagattcaatatatagcagaattaacgtaggcctgataagacgcgccagcgtcgcatcaggcgctgaatgccggattgttacccggcatttgtcatttagcggtgatgtttgcctggaccatgaccgccgtgatgatcatgaggagctttcttatggtggcgcggcggtggcggcggtccgtgtaggtgccagcgattgcctcgccattcataatgttgtttccaccagccgtggtcgcgccagtgacctccatcccagtaatagccacgattatcacgatcgcctatctgtaattttactgacgggactaaccctgtgctgccatgggagcgaccagaaccagggaaagtgcgagtacgatagattgcatctttttcacaggttactccttttatcattgcccgttatgggtcgatatccggagattactcgatga

SEQ ID NO: 138474 - DNA, 420 bp, Homo sapiens
atgtccgtacccggagaacaggtggagaggaaaaatattggcgcgaccactactttttcgagctgccttatgccgggccggaaatgatcagcggtgtacgcgcttcatcgatcaggatggagtccacttcgtccaccagcgcatagtgcagtttacgctgtacacgttcttcagggctgaacgccatgttgtcgcgcaggtagtcaaagccgtattcgttgttcgtaccgtaagtgatgtcagctgcgtaagcttcgcgctttgccggtgctggcatgcccggcaggttgataccgacagtcaggccaaggaattcaaacagcggacggttggtttcggcgtcacgttgcgccaaggagtcgttgacggtaactacctgcacgcctttaccgggtagtgccgtcagggaagcaagcaacg

SEQ ID NO: 138475 - DNA, 808 bp, Homo sapiens
atattgttccccccggcatcgcattcaccagacctgaaaccgccttatgcgccgcctttgcgctttgtgcaccgggtaccagaatcaccttacggcactcctcttcacgtttttcgaaaatctcatatccccgggcggcctcttcaaacggcatatagtgggtaacaatttcttctggtttcagtaatcctttctcaattaacggtaataattctcccagccatgcgtgaacgtgggtctgtcccattttaaacgacaaccctttatcaaaggcgtcgccaaacaggaaaccgtgaataaatccagcgtagacgcccggtacgctaacaatgccgccacgcctgaccgccgcaatacactgacgcaacgctttaccgctgctgccctccagtttcaggttagtcagcaccgtttccgtggtgctgcctttcgcttcaaaaccgacggcgtctattactgcatccacgccccggtgacctgccgtttgttcaataattgactgtgccggatcgctgtcttcatcaaaattaatcgggatcgcgccgtagcggtcggcggcgaaatgcaagcggtagggatgatgatcaacaacaaaaatctgttccgcaccgagcaaccgtgcacaggcgattgtcaacaatcccacaggaccagcaccatagactgcaacgcttgaaccttgttggatctgcgcattttttgctgcctgccatgccgttggcagaatatcagaaaggaaaagcgctttatcatctgaaagcaaaggcggtactttaaacggccccacattccctttaggacgcggaca

SEQ ID NO: 138476 - DNA, 1152 bp, Homo sapiens
atgatcgagccgctacgggaattgttggttaacccgccgctggaaaactcgcgtaatgaagatcagaactggcgcgataacctggtgcgccaggtgcagcattcacagctggagctggtcgccaactttgccgatatctcgctacgcctgtcgcagattttaaaactgaaccccggcgacgtcctgccgatagaaaaacccgatcgcatcatcgcccatgttgacggcgtcccggtgctgaccagtcagtatggcaccctcaacggaacagcccaaatgagtgacatgaataatccggccgatgacaacaacggcgcaatggacgatctgtgggctgaagcgttgagcgaacaaaaatcaaccagcagcaaaagcgctgccgagacggtgttccagcaatttggcggtggtgatgtcagcggaatgcgattttactgccccgctgcgcgcaccaccggcttcggtgatccccagatgcaacggctgatcgatctgttttgccagcaaacgataagcgcttataccagtattcaatacgacgccgaaaaatcgctctggcataacgttgagaaccgtcaactggacgctcagttcttccatatgggaatgggattccgtcgccgcgttcgtatgttttctgtagatccagcaacacatctggcgcgtgaaattcactttcgcccggagttgttcaaatacaacgatgcaggtgttgatacaaaacaattagaagggcaaagcgatctcggctttgccggttttcgcgtgtttaaagcccccgaactggcgcgccgtgatgtagtatcatttctcggcgcgagttatttccgcgccgttgatgatacatatcaatacggtttgtcggcccgcggcctggcgatcgacacttacaccgacagtaaagaagagttccccgactttaccgccttctggtttgatacggtaaaaccgggggcaactacctttaccgtttatgcgttgctcgatagcgccagcattactggtgcctataagttcactatccattgtgagaaaagtcaggtgattatggatgtggaaaatcacctgtatgcgcgcaaagacattaaacagctgggggtacgagcacgattcacagttcactgcagcattgacctccctgagctcaggtga

SEQ ID NO: 138477 - DNA, 901 bp, Homo sapiens
ccgtctggtcaacgcagtgtacgctcaagtattcgttaatagactggttactcagcagccgctgggtggtaaggcacagttcggtggtcagcgtttcggggagatggaagtgtgggcgctggaagcatacggcgcagcatacaccctgcaggaaatgctcaccgttaagtctgatgacgtgaacggtcgtaccaagatcctgatcacctggaaatttgttagaaataacaaaacggccatcaacatcgaatacatgaaagccagcatccgggccagggtggagcacccatttcgcatcatcaagcgacagttcggcttcgtgaaagccagatacaaggggttgctgaaaaacgataaccaactggcgatgttattcacgctggccaacctgtttcgggcggaccaaatgatacagtcaaagttcagccaggaatctgcagctgtcctgatgagggtgatgatgttggtgaagggtttggaggaggctggcttctcagaaagtaaagagcccacgcgaaaaacggtgcagggtaatgtgatgttgcatcaacgcggttatgccaaaatgttcatgattttcaaagaagatgaacttatcggcgttatctcgtttaatcgtattgaaccactgaataaaaccgctgaaataggctactggctggacgaatctcatcagggacaggggatcatttctcaggcgctgcaggcattgattcatcattacgcccagtctggtgaacttagacgcttcgtgatcaaatgtcgggtggacaatccgcaaagcaaccaggtcgctttgcgcaatggttttatccttgaaggttgcctgaaacaggctgagttcctgaatgatgcctatgatgatgtgaacttatacgcgcgtattatcgattcacaataa

SEQ ID NO: 138478 - DNA, 1461 bp, Homo sapiens
atgttcgatccagaaaccttgcggactttcattgcggttgctgaaacaggaagtttttcaaaagcggcagaacgattatgtaaaaccacggcgacgatcagttatcgcattaaacttctggaagagaataccggagtagcgctgtttttccgtacgactcgcagcgtgacgttgacagcggttggcgagcatctactttcccaggccagagactggctgagctggctggaaagtatgccagagcgagctgcaacagtttggatgtttgtcccaacgccgctttctgttgccagtgggttacaacgcattggtcgcgccggacatcaggttggcggtgtatctaaagggctgtttttcccccgtacccggcgtgatttagtcgattccgcagtcattgtagagtgtatgttcgcaggcaggctggaaaacctgacaccaccgcataatcctctcgacgtccttgcgcagcaaaccgttgccgccgcggcgatggatgcattacaggtagacgaatggtactcccgcgtacgccgtgccgcaccgtggaaagatctgccaagacgtgtttttgacgccacgctggatatgctttccgggcgctatccctctggcgatttttctgcttttcgccccaaactggtctggaacagggagaccgggatattgaccgcccgacctgcggcattcgcggcagattctgatattgccgacgggcaaacccagcgttttgacttctccattctacagtcaatggcgcacgacttatcgcaaacagcgtggcgtgtattcaatacgacgccgaaaaatcgctctggcataacgttgaagaaccgtcaactggacgctcagttcttccatatgggaatgggatttcgtcgccgcgttcgtatgttttctgtagatccagcaacacatctggcgcgtgaaattcactttcgcccggagttgttcaaatacaacgatgcaggtgttgatacaaaacaattagaagggcaaagcgatctcggctttgccggttttcgcgtgtttaaagcccccgaactggcgcgccgtgatgtagtatcatttctcggcgcgagttatttccgcgccgttgatgatacatatcaatacggtttgtcggcccgtggcctggcgatcgacacttacaccgacagtaaagaagagttccccgactttaccgccttctggtttgatacggtaaaaccgggggcaactacctttaccgtttatgcgttgctcgatagcgccagcattactggtgcctataagttcactatccattgtgagaaaagtcaggtgattatggatgtggaaaatcacctgtatgcgcgcaaagacattaaacagctgggcattgcgccgatgaccagtatgttcatgccgcgaaaaaacgcatcccggttatcgaagcgctgttacgacataagggaaagagatggacgggaagaaagaaagtag

SEQ ID NO: 138479 - DNA, 1097 bp, Homo sapiens
tcacgagaaacgatacgcacaccggaggcggcgcgcactggcggcgctgtcgagataagccagcggcaaaccgtttacctcacgcgaaagcaccggaaagtcggcccgcactttgtcgacggaaaaaatcatcttgcacctcctggcagccgttgaccgattcgggccagcacctgcttgtttaagcccctcatcacgcagtgcttccgtcagttcggcagcgaaggcgtaaatgatcatctgctgggcatcctgctgattgatcccgcgcgagcgcagatagaatatctgttcatcatcaatacgccccaccgtcgcgccgtggctgcatttcacatcatctgcatagatttccagctgcggtttcgtatccacttccgccagtttgcccatcagcagattgttgttggtcatctgaccatccgttttgatggcgtgctgcgcgacgttgatcaaaccgttaaataccgcgcggcctttgtcgctgacgatagttttgtgcaactgtcggctgttacaaaaacctttattgtgttccagccaggtacgggtatcacacacctcgtttttcaccggcatcgccaggcgcaatagccctttaaagtaccattttcgcgccgtctgcgaaatggcatccacacgcattgttgatgatttaagggctaaattcggaaaatcaaccagcgttaactttcttgttctcgttgcgctatttcgcgattttcttccgcaggtggtgttaatggcccacaaattcgttgcgcaagccacgttgccaccgccaccagcgcccacgaaatcaacgtagctactaccagatcgcgtggccaatgcatcccgagcagcaggcggcttcccatgactcccgttgcccagaccagcaagatagcaatggttaacgttcgccgacgcggccacagcaaaccaacggccagcagtgcccaactggcagcaaacatcgtgtgaccggaaggaaaggcaaaccccgtctctttctgccgtttcggcaatagcgtaagcagatgacacagctgatatgtgataagctgagatttgaatcctggttaatactctgaagatcttgttgtctccatttc

SEQ ID NO: 138480 - DNA, 2026 bp, Homo sapiens
ccatttgagcaggcgttgggttgtccggttttggatgagttccagctttaccaggaagcggaagaacgcagtaaacgtcgctgtggtttgctttaaaatctgaccatccgcctttgcaaaaatttgcctgattttacaaacgaatcaggctcatcccatcgacataaaaaaatgccgatttatgcatattctctcagttcaacaattggattattaataaatattgtctagagtgagcggtcataaataagcactttcttgccgctgaaaacgaccagcgcgggaccattcacaacaccagaaggactcactttcaggtatggatcgtagacgatttattaaaggttcaatggctatggccgccgtgtgcggtaccagcggcattgcttctcttttttctcaggcggcattcgcggcagattctgatattgccgacgggcaaacccagcgttttgacttctccattctacagtcaatggcgcacgacttagcgcaaacagcgtggcgtgatgtgcacaacacaacatataactacaagcgattgatgagccagcgggatgccctgaatcagagcctggcagaagtccaggggcagattaacgtttcgttcgagtttttcccgccgcgtaccagtgaaatggagcagaccctgtggaactccatcgatcgccttagcagcctgaaaccgaagtttgtatcggtgacctatggcgcgaactccggcgagcgcgaccgtacgcacagcattattaaaggcattaaagatcgcactggtctggaagcggcaccgcatcttacttgcattgatgcgacgcccgacgagctgcgcaccattgcacgcgactactggaataacggtattcgtcatatcggggcgctgcgtggcgatctgccgccgggaagtgagatgcgctctaagattgcgcaggatatcgatcaatccgtcgatcttctctcgctttcggaagagatgcccgcaaatgaagatctcctgaatgaagattcagcggcaccggttatccgcttgatcaatgcgattttgagtgaggccatcaaagaaaccgcctctgatatccacattgaaacctatgaaaaaacaatgtcgatccgttttcgcatcgacggcgttttgcggacaattttacagccaaacaaaaaactggcggcactgcttatctcccgaattaaggtcatggctcgtcttgatatcgccgaaaaacgtattccacaggatggaagaattagtttgcgtatcgggcgacgtaacatagatgtccgcgtatccacactgccgtccatctatggtgaacgcgccgtactccgcctgctggataaaaacagcctccagctttcattgaacaacctggggatgacggcagcggataagcaggatttagaaaatctcattcagcttccgcacggtattatcctggtgacagggccgacaggctccggtaaaagcaccacgctctacgccatcctttccgcgctgaatactcccggccgcaatattctgacggtagaagatcccgtggaatatgagctggaacgcattgggcaaacgcagccttctgattccggtaaatcgttcatctttaatatgagcgtcggttacaacctcgaaggtattaagcaaccgccgatgcaacagttcatcgacaatatgatggacgcatctgaccatccgaaattcgctcaatatcgcgatacgctgaataaattactccaggatgacgcatttttagctcgccacggattgcaggaaaaacgcgaaagcttgcaagccttacccgctcgcatccccaccagtatggtgcatggcgtcaccctctccaccatgcacggctgtcctccgcatgaaatcgaagccatttgccgctacatgctggaagaaaaagggctcaacacctttgtgaaacttaacccgaccttactggggtacgcgcgtgttcgtgagatcctcgatgtctgcggtttcggttacatatgctttaaagaagagcatttgatcacgacctcaagctga

SEQ ID NO: 138481 - DNA, 3550 bp, Homo sapiens
atgcctcgctccaactattttagtgaacgttgcaaaggtgaaatattcctgaagtttgaaaatatgcagcgtacgggttcatttaaaattcgtggcgcatttaataaattaagttcactgaccgatgcggaaaaacgcaaaggcgtggtggcctgttctgcgggcaaccatgcgcaaggggtttccctctcctgcgcgatgctgggtatcgacggtaaagtggtgatgccaaaaggtgcgccaaaatccaaagtagcggcaacgtgcgactactccgcagaagtcgttctgcatggtgataacttcaacgacactatcgctaaagtgagcgaaattgtcgaaatggaagcccgtatttttatcccaccttacgatgatccgaaagtgattgctggccagggaacgattggtctggaaattatggaagatctctatgatgtcgataacgtgattgtgccaattggtggtggcggtttaattgctggtattgcggtggcaattaaatctattaacccgaccattcgtgttattggcgtacagtctgaaaacgttcacggcatggcggcttctttccactccggagaaataaccacgcaccgaactaccggcaccctggcggatggttgtgatgtctcccgcccgggtaatttaacttacgaaatcgttcgtgaattagtcgatgacatcgtgctggtcagcgaagacgaaatcagaaacagtatgattgccttaattcagcgcaataaagtcgtcaccgaaggcgcaggcgctctggcatgtgctgcattattaagcgaggccgcccggggatatgagattttcgaaaaacgtgaagaggagtgccgtaaggtgattctggtacccggtgcacaaagcgcagaggcggcgcagaaggcggtttcagatgggattaaagcaggtagtcgccagcagcttctggctggtattcgagttccagcacttcaagcgcgttgcacgaaaaagtgggagatcgccagcgggcggctacgcaagttgcgacctattgcaggtgaagaatcttcggttcgcgaatcaaatgcgttcataagcatgccagcaccggcaaagcgcgaagcttacgcagctgacatcacttacggtacgaacaacgaatacggctttgactacctgcgcgacaacatggcgttcagccctgaagaacgtgtacagcgtaaactgcactatgcgctggtggacgaagtggactccatcctgatcgatgaagcgccgcgggaccattcacaacaccagaaggactcactttcaggtatggatcgtagacgatttattaaaggttcaatggctatggccgccgtgtgcggtaccagcggcattgcttctcttttttctcaggcggcattcgcggcagattctgatattgccgacgggcaaacccagcgttttgacttctccattctacagtcaatggcgcacgacttagcgcaaacagcgtggcgtggtgcgcctcgtccgttacctgacacgctggcgacaatgacgccgcaggcttataacagtattcaatacgacgccgaaaaatcgctctggcataacgttgagaaccgtcaactggacgctcagttcttcccatatgggaatgggattccgtcgccgcgttcgtatgttttctgtagatccagcaacacatctggcgcgtgaaattcactttcgcccggagttgttcaaatacaacgatgcaggtgttgatacaaaacaattagaagggcaaagcgatctcggctttgccggttttcgcgtgtttaaagcccccgaactggcgcgccgtgatgtagtatcatttctcggcgcgagttatttccgcgccgttgatgatacatatcaatacggtttgtcggcccgcggcctggcgatcgacacttacaccgacagtaaagaagagttccccgactttaccgccttctggtttgatacggtaaaaccgggggcaactacctttaccgtttatgcgttgctcgatagcgccagcattactggtgcctataagttcactatccattgtgaaaaaaagtcaagtgattatggatgtggaaaatcacctgtatgcgcgcaaagacattaaacagctgggcattgcgccgatgaccagtatgttcagctgcggtactaatgaacgtcggatgtgcgatacaattcatccgcaaattcatgactctgatcgtctgtccatgtggcggggcaacggcgagtggatttgccgtccgctgaataatccgcaaaaattgcagttcaatgcttacaccgacaacaacccgaaagggtttggtttattgcaactggatcgtgacttctcccattatcaggacattatgggctggtataacaaacgccccaagtctgtgggtggaaccgcgtaacaagtggggtaagggcaccatcggcctgatggaaatcccaacaacgggcgaaacgctggataacattgtctgcttctggcagccagaaaaagctgtaaaagcaggtgatgagtttgcattccagtatcgtctgtactggagtgcgcaaccgcctgttcattgcccattagcgcgcgttatggcgacgcgtaccggcatgggcggtttctcggaaggttgggcgccaggtgaacactatcccgaaaaatgggcgcgtcgttttgccgtcgatttcgttggtggtgatctgaaagctgccgcgccaaaaggcattgagccggtgattacgctttccagtggggaagcgaagcaaatcgaaattctctatattgaacccatcgatggttatcgtattcagtttgactggtatccgacttcggactccactgatccggtcgatatgcggatgtatctacgttgtcaggggaacgctatccagtgaaacatggctgtatcagtatttcccgccagcgccggataaacaataccgagatttaatatcccgtctgaaaaacgaaaatcctcgctttatgtccttgttcgataaacacaataaacttgatcatgaaattgccagaaaggaaggttccgacggtcgagggtacaatgcggaagtggtccgcatgaaaaaacaaaagctacagttaaaagatgagatgctcaaaatcctgcagcaggagagcgtcaaagagcagtcgctaaactggccgcagtttgttcaaagtgaagaggacacgcgaaaaacggtgcagggtaatgtgatgttgcatcaacgcggctatgccaaaatgttcatgattttcaaagaagatgaacttatcggcgttatctcgtttaatcgtattgaaccactgaataaaaccgctgaaatatcaacttcgtgtggtgttaatggcccacaaattcgttgcgcaagccacgttgccaccgccaccagcgcccacgaaatcaacgtagctactaccagatcgcgtggccaatgcatcccgagcagcaggcggcttcccatgactcccgttgcccagaccagcaagatagcaatggttaacgttcgccgacgcggccacagcaaaccaacggccagcagtgcccaactggcagcaaacatcgtgtga

SEQ ID NO: 138482 - DNA, 2691 bp, Homo sapiens
atggaagtggtggtacgtccggtgatccgcaacagcggcgcggttctgaatgtacgggctgacaaagccgaagccaataaatgcgacctgtgcaaccatcgtgaagacggcccggcgtgtatggcggcttgcccgactcatgcgctgatttgtgtcgatcgtaataaacttgaacaactgagcgcagaaaaacgccgccgaattcccggaaatattcgtagaatacggagcgggcggtatcgccgacctgtgactgccggatgcgacgctgtcgtgtccggcagggcgggttacgcaattcatgatggcgggaataactcaatggcaaaaaacacatcttgcggtgtccaactgcgtattcgtggcaaagtgcagggcgtcggttttcgtccgtttgtctggcagctggcacagcaattaaatcttcacggcgatgtctgtaatgacggcgatggcgtagaagtccggctgcgggaagacccggaaacgtttcttgttcaattgtatcagcactgcccgccgctggcgcgtattgatagcgtcgagcgtgagccgtttatctggtcacaactgcccaccgagttcactatacgccagagcacaggcggcaccatgaatacgcaaattgttcccgatgccgctacttgcctgctgcctgccgaaatgataccccagcgaacggtaccactttttgccgctgttaatgcggtgcgtgaagagcgcctgctgggcgtgaaacgcattccccagcgtgactttggcattccgcgcttcacctatgacgaagggctggcgcagttatatggcgatccacccgcctggccaacgccaacgcgcggcgtcagtgaaatccgcctggcgctacgttttaaatcgaatgattcgctgctacgccactttaaggatacctccacgctgtatctggaaattgtggattatcccggcgaatggttgctcgacctgccgatgctggcgcaggactatttaagctggtcgcgccagatgacgggcttactcaatggtcagcgcggagaatggtcggcgaaatggcgaatgatgagcgaagggctggacccgctagcgcctgccgacgaaaaccggctggcggacattgccgccgcgtggaccgattatctccaccactgtaaagagcaggggctgcactttattcagcctgggcgctttgtcttgccgggagatatggcaggtgcgcccgcgctgcaattcttcccgtggccggatgtcgatacctggggcgagtccaaactggcgcaggccgataagcataccaatgccggaatgctgcgcgagcgctttaattattactgcgagaaggtggtgaaggggttctataagaatcattttctgcgctttgaccgccagattgtgctggtgattgcctgcaacctctcaacagtggcacaggcattaatgatatcgtctggcatgacccacttattcaagtttcccacggggcagtatttcaccggagtagggagatcgccggtgagcacttctgaggcatcgtggtacatcgccagtaaagcgatacgttcggcgttgacattaccgccaaattttcgatttttgatagctgccagcgcatgggcgaccatcgctacctgcaaactgtgttcggacacattttccgtccgcacgttgcgcatgagcggccagcggttaatgagtttcaggcgggagagatgggcaaaaaaatggctctgtttcatagtgaccttacgtatgatgacatcatcaggtcattgtggcgggataacgctgccggatgcaatctccggcagtgaaattaagattacagctgatgataaccagaaaggaaacgcgcgaacttgctcaaagacagctcgatatcatcgacacgcgaactttttcctgcaacaggaaatccaacaccattttctgatcgtcgtgaatgttaaagcgtttggcgtcgattttcgggaacatatacagcgcaccacgaggtttcacgcaggaaacgcccggaatatcgttgatcagttcccacgcgcggttacgctgctcataaagacgaccgccagggcctttggcgtgttttttcggcccgttcaacaccatccacccctgacggaagcctgcaacgcggtacgttttcgacagtccgttaaaggtaatggtcagcagacaatcacgggtttgcgctttgatttccgccagacgtgggccaaaatccgggaactgtttcggattagcttccaggctcttaacgaagttttccaggtgatcgcggcgcgacagcatattattcaggcgcgcttcaaacagggcgtcggtcaaatcgctggtatcaaaaacgaagatatccatcatcagcttcaggttttcgatagtcggctgacgataaagctgattcagtcgcttaataccttcggttggcatcggcgtaaacaaactcatgccgcccgtaccgccgcccatcagcaccagtttgccgacgcgctccggccatttaagggtgaacgccacagaactatggccccccatcgagttgcccagcaggtggattttggcgatatccagttgatccaccacgcttttcaggattcgtgcattaagatccgatcgcgaaccactattaacgaccgaatcgctcttgccccaacccggacaatccagcaggatcacccgatagtatttatagacacatga

SEQ ID NO: 138483 - DNA, 3318 bp, Homo sapiens
atggacgaactcagactggtactaatgaccatcatccacatcaaattaccgccaatacgacgcgcggacggatcgttcgggaatgatttaaccacgggggcaggttttaatgaccggaaaaccgtaccccggtacgcccgtgtgcacgtgtaccggtgccgaaaagtgatatgcatctttaccaagcgtatccccttctgcctggatgtacccgcgcatagagctctggtggtgatgaaaggcactctgtatggaatgccggttgtcgctgcggcattcgagttcgcctttatgggcggttcaatggggtctgttgtgggtgcacgtttcgtgcgtgccgttgagcaggcgctggaagataactgcccgctgatctgcttctccgcctctggtggcgcacgtatgcaggaagcactgatgtcgctgatgcagatggcgaaaacctctgcggcactggcaaaaatgcaggagcgcggcttgccgtacatctccgtgctgaccgacccgacgatgggcggtgtttctgcaagtttcgccatgctgggcgatctcaacatcgctgaaccgaaagcgttaatcggctttgccggtccgcgtgttatcgaacagaccgttcgcgaaaaactgccgcctggattccagcgcagtgaattcctgatcgagaaaggcgcgatcgacatgatcgtccgtcgtccggaaatgcgcctgaaactggcgagcattctggcgaagttgatgaatctgccagcgccgaatcctgaagcgccgcgtgaaggcgtagtggcctgggatttgcagttcaccatcggacgcgtctggcgtatcagtcagttgaatgccgccgctgtcaggatagctgtgagccaatggcaattatctttcgcccgacgctctccgggatctaccagccgcaacttaatagccaactttgcaacggatgtggagcatgtgcagccagctgtccgcctggtcgtgcaggccaaaagcgaacgaatttcagacatcagcacccaactgaacgcctttcccggctgtgaagttgctgtcagcgacgcgccgagcggtcagttgattgtggtggtggaagcagaagacagcgaaacgctgatccaaaccattgagtcagtacgcaacgtagagggcgtgctggcggtgtcgctggtttatcaccagcaggaagagcaagctaacgccgttgcggccgctgcggcggctgccggtctcagcgtgccgggcgttgcccgcgccgttgttggtcagcaggaagccatcaaatgggataaagcgccgtgccgtttctgcggtactggttgcggcgttctggtcggaacgcagcagggacgtgtggtggcctgtcagggcgacccggacgcaccggttaaccgtggcctgaactgcattaagggctatttcctgcccaaaatcatgtacggtaaagaccgtttgacgcagccgctgctgcgtatgaaaaacggtaaatatgacaaagaaggcgaatttaccccaatcacctgggatcaggccttcgatgtgatggaagagaaattcaaaaccggcctgaaagaaaaaggccggaatcgatcgcttatggtagaaacggaggcctccggctggctacctgcggcgctggatgaatgccgcctgatgcaaatgcgtcgtcaggaagtcgttgcgccggaagatgcctggcgtgatatcaccaatgcctggcaattacgcacacgccaactggcctgtctgcaactgttagccgactggcgactgcgcaaggcgcgagagcgcgatctggcggtgaactttgtcgtgcgtgaagagcatttgtggtcggtagcgcgttatatgccgggaagtttaggcgaactggacagcctgggtttatccgcgaaatccgctttccacggtaaaacgctgctagcgctggtggaaaaagcgcagacattgccggaagatgccttaccgcagccgatgcttaacctgatggacatgccgggttatcgtaaagcgtttaaagcgattaagtcgctgattactgacgtgagcgaaacgcataagatcagcgccgaatgctggctcgcgtcggcaaataaccaactgctgaactggcactggaaactgaaaccgcagaacaatttgccggagctgatttccggctggcgtggaatatccgcagtaaaatcttccgaagccggactgggcgcgctcagcgccacatccggcttcggcaaactacaaatccaacaccaggcgtttacccttcgcacgcgaacaacagatcaacatactttgctggctggcacgctcttcatcgctaaaatattgatcccgatgcaaattgctcaaagtgcagcgtatcggcggcgatgtccagacgcgcagcttcacttcttaccgcttcaattagcgcctcggggccacaggtataaacgtgtgtgccaggttcgatatccgccaataatcgcgctaattccagtcgtgttccggttgatgaatgatgcaaatggactttctcagcctgcggatgctggactagctcatcacgaaatgcgcaactttctggatttcgcgagcagtaatgtagctgccagtcgacgtcgctgtgttgcagctctgccatgtgcgacaggaaagggacgacaagccaacgagcaagccgaaaacaaatgcagcaaagatccacaaacacaccggacagacaacaaagaaaccaagacaccgccagcgaggccgacaaccaccacacaaccacacaccaaggaagaggagccactaagcacgccaacccaaaccaagcatccaccaacacacgtcactgggacgggcccacacccgacacccgccagcggccaaacggaaaaacacgaacgcaaacggccaactcaacagaaaagcaacgcgcgccaaaatagcaaagacaaacgcacacccaacaagagcaagaccacgaaaccaaacagaggatacaaccaacacccagccggagagccgactatgagcacacacgagaaggtcaaaccccaccagcagaacagaaaaatacaagcaccccccaagcgacagaagaccgaccacagacacacccacaacacacacccccaccccccacaccgagccgcctcaaccaccacgcaagccgccccaccaccgcgacgcgcgacccgctcaggcaccagcgccacagcacacaacaacaccgagccccacgggacaagacacacccaaccgggagaccacaagagagcagaagaacacgaccgcacagccgacgaaccgaccccacccgaacacactctaccctcccatacgcagctcggaccttaa

SEQ ID NO: 138484 - DNA, 2928 bp, Homo sapiens
atgtgggctgcgcagcacatcgcccacactcgcccggaaaatttcatcacctccagcggtttaggtaccatgggttttggtttaccggcggcggttggcgcacaagtcgcgcgaccgaacgataccgttgtctgtatctccggtgacggctctttcatgatgaatgtgcaagagctgggcaccgtaaaacgcaagcagttaccgttgaaaatcgtcttactcgataaccaacggttagggatggttcgacaatggcagcaactgttttttcaggaacgatacagcgaaaccacccttactgataaccccgatttcctcatgttagccagcgccttcggcatccatggccaacacatcacccggaaagaccaggttgaagcggcactcgacaccatgctgaacagtgatgggccatacctgcttcatgtctcaatcgacgaacttgagaacgtctggccgctggtgccgcctggcgccaaaaccttagaacgtgttttacgcgtggtgcgtcatcgtggtttccacgtctgctcaatgaatatggccgccgccagcgatgcacaaaatataaatatcgaattgaccgttgccagcccacgagcacaaccacatcacaacaaatccgcgcctgagcgcaaaaggaatatcagaatgaccacgaagaaagctgattacattgggttcaatggggagatggttcgctgggaagacgcgaaggtgcatgtgatgtcgcacgcgctggactatggcacttcggttttagaaggcatccgtagctacgactcgcacaaaggaccggtatttcacgccgtacatcaacccgaaaaacggccgccgaacaccgacaacgggcgctccgtgaatacggccctatattgtcatagggttacatgtccctgtaatcacttcacctgggttctctctaagaacgctccccgttggcaccttttccttgtcaaccataaccggaccgtcaaagcatggttatccaccagtaatatggctgccataacactgatgccatttgattccatcttgtcaaaatatgctttcataactagcccgaaatcaccgcaggcagcacgcacgcccctcaggacggctggaaaccacgccaagtctgttttgcatttatgtgaggtggtccaggtaacggttgttgttggaatgcttctggttaggtcaccagaacgctgtgacgtacagagtgacatcaaggggcacaagggtcacgcacggcccacagggacgcctggagttcgcgaaacgttccgagacctaaagccgacggacgaaccaatacggcacactgccgacacacagggggcccgcaaaacaggcgagacacacaacacattccgtcttggcaaagaaacaattctgttacgtaccggctggaccgcgttcgatgaagaaaagaccgaactgatcaaccagacggtgacctgtcatatcgacctgattttgcaaggcattatcgcaaaggagtttgtcagtcgatcgcacaacaaacccgtgggcatccgtctcagcagctctgcacccctcgccagcgccattgccaagccttggccactggcccgtcgttttcacacaccgtccgacaacaatccacgcacatattatccggacgctaagaccttgcggctggttacagtcaggctgcaacgacggccccgacaccagatacgaccctatacacccaaatcaagatattggcagccaggcaccttgaaaattgaattttatgatctaaatctaacctctcaggggatgtgtctctcttctggcgtcttcctcggtgtgtctcccgaggcgcttttacgacattgggcccgggttatgcccttccctatggtccgccgaggtggtaggcggttgcgccagcttcacatcctggataggcaggaacgtttccctatcatactcctgtcccgggtctcatgtgtctcagttcaaacagacactgccgtctatcttcaagctgcaatgaagctgagagccacagaaaacacctgtaccatggtttcagggaggagtctcttccctcagccgaaaacagacagctttgctggtcatctgttctccactgcgaggacgctgccactcagtgtggagagaggaaggggttctgcctatggtgcaagaaggtcggactcggcagctggtgttcagccaaaagcgaccgatttcagacatcagcacccaactgacgcgtttccgggctgtgaagttgctgtcagcgacgcgccgagcggtcagttgattgtggtggtggaagcagaagacagcgaaacgctgatccaaaccattgagtcagtacgcaacgtagagggcgtgctggcggtgtcgctggtttatcaccagcaggaagagcaagctaacgccgttgcggccgctgcggcggctgccggtctcagcgtgccgggcgttgcccgcgccgttgttggtcagcaggaagccatcaaatgggataaagcgccgtgccgtttctgcggtactggttgcggcgttctggtcggaacgcagcagggacgtgtggtggcctgtcagggcgacccggacgcaccggttaaccgtggcctgaactgcattaagggctatttcctgcccaaaatcatgtacggtaaagaccgtttgacgcagccgctgctgcgtatgaaaaacggtaaatatgacaaagaaggcgaatttaccccaatcacctgggatcaggccttcgatgtgatggaagagaaattcaaaaccgccctgaaagaaaaagggccggaatcgatcggtatgttcggttctggtcagtggactatctgggaaggttatgccgcgtccaagctgtttaaagcgggcttccgttcgaacaacatcgacccgaacgcgcgtcactgtatggcgtcgttccagcgaattgacggttccatcatttgttga

SEQ ID NO: 138485 - DNA, 3393 bp, Homo sapiens
atgggcggtgttctctttggtctgtcgatcggttcgatgagcggtattctctgctcggcgtggttagtgaaacgctttgggacacgtaatgtcatcctggtcacgatgtcctgcgcattgatcgggatgatgatattaagtctggcactctggctgacatcgcccctgctctttgccgttggtctcggcgtctttggggcaagttttggttctgcggaagtggcgataaacgttgaaggtgctgccgttgagcgagaaatgaataagacggttttgccgatgatgcacggtttttatagcctgggcacgctggcaggcgcaggtgtcgggatggcactgacggcctttggcgttccggcaacggtgcacattttattggcggcgctggtagcgcaaattgccgcctggtataaggcgcttcaggaacagatccccgactttattccccgtgcgccgcagcggcagatgattgcggacgtcgccaaaacgctggccggagaagaagggcgacatctggcgattgaagcccccaccggcgttgggaaaacgctctcttatttgattcccggcatcgccattgcccgcgaagagcaaaaaacgctggtggtgagtaccgccaacgtggcattgcaggatcagatttacagcaaagatttaccgctgctgaaaaagatcattcccgatcttaaattcactgccgcttttgggcgtgggcgctacgtttgtccgcgtaatctgacggcgctcgccagtactgaacccacgcaacaggatctgctggcgtttcttgacgacgaactgacgccgaacaatcaggaagagcaaaaacgttgtgcgaagctgaagggcgatctcgatacttataaatgggatggtctgcgcgatcatactgatatcgctatagatgacgatctctggcgtcgtttaagtaccgacaaagccagctgcctcaaccgcaattgttactactatcgtgaatgcccgttttttgtcgctcgtcgggagattcaggaagcggaagtggtggtggcaaaccatgcgctggtgatggcggcgatggaaagcgaagcggccaaaagcgaacgaatttcagacatcagcacccaactgaacgcctttcccggctgtgaagttgctgtcagcgacgcgccgacgttgattgtggtggtggaagcagaagacagcgaaacgctgatccaaaccattgagtcagtacgcaacgtagagggcgtgctggcggtgtcgctggtttatcaccagcaggaagagcaagctaacgccgttgcggccgctgcggcggctgccggtctcagcgtgccgggcgttgccgcgccgttgttggtcagcaggaagccatcaaatgggataaacgccgtccgtttctcggtactggttcggcgtctggtcgacgcacaggactgtgtgctgcaggcaccgacgacggaagaagataaatccaccaaccgcccttatacctcacgttatatcggttcactgggggcggatttccatggtaacctgctgaaaggcggtatttatctctacccaagcaccgccagccacccggacggcaaactgcgtttgctgtatgagtgcacccgatggcattcctggcggaacaagcgggcggtaaagcgagcgatggcaaagagcgtattctggatatcatcccggaaaccctgcaccagcgccgttcattctttgtcggcaacgaccatatggttgaagatgtcgaacgctttatccgtgagttcccggacgccgtccctaataccgttccaacgccaccgctcaaaagcgtaccgccaattaccactgaggcgatacatccagttccacacctacgcccgccagcgcatatccggcctgggtataaatcgagaagacaatccccgccagcgttgccagtccggtggagagcatatagatgcgaatagtggtgctgcgagtggatatccccatcagattcgccgacgtttcgttgccgctaatggcgtataccttgataccaaaccggaattgactcatctggagcctatgatagtgaaaaaactcaccttaccgaaagatttcttatggggcggcgcagttgccgctcatcaggtcgaaggcggctggaacaaaggcggaaaagggccgagcatttgtgacgttctgaccggtggcgcacacggcgtgccgcgcgaaatcaccaaagaagtcttgccaggaaaatactatccaaaccatgaagccgttgatttttatggtcactataaggaagacatcaagctatttgccgaaatgggcttcaaatgttttcgtacatccattgcctggacgcgcatttttccaaaaggcgatgaagctcagccaaacgaagaagggctgaagttctacgatgatatgttcgatgaactgctgaaatacaacatcgaaccggtgatcaccctctcccactttgaaatgccgctgcatctggtgcagcaatacggtagctggaccaaccgtaaagtggttgatttctttgtacgtttcgcggaagtggtatttgaacgctataagcacaaagtcaaatactggatgaccttcaacgaaattaacaaccagcgtaactggcgtgcaccgctgttcggttactgctgctccggcgtggtgtataccgagcatgaaaacccggaagagacgatgtatcaggtgctgcatcaccagtttgtcgccagcgccctggcggtgaaagctgcgcgtcgcattaacccggagatgaaagtcggctgtatgctggcgatgctacgtctttaccgatgtgcactaagcggctattaccggtcctatgtgttgacgattgggaccttccgggatttacatcaaaatggagtgatgcaccatatcactgctaccagccgcgttgtggtaattggtattggcgggctggggcatatcgctataaaacttctgcacgcaatgggatgcgaggtgacagcctttagttctaatccggcgaaagagcaggaagtgctggcgatgggtgccgataaagtggtgaatagccgcgatccgcaggcactgaaagcactggcggggcagtttgatctcattatcaacaccgtcaacgtcagcctcgactggcagccctattttgaggcgctgacctatggcggtaatttccatacggtcggtgcggttctcacgccgctgtctgttccggcctttacgttaattgcgggcgatcgcagcgtctctggttctgctaccggcacgccttatgagctgcgtaagctgatgcgttttgccgcccgcagcaaggttgcgccgaccaccgaactgttcccgatgtcgaaaattaacgacgccatccagcatgtgcgcgacggtaaggcgcgttaccgcgtggtgttgaaagccgatttttga

SEQ ID NO: 138486 - DNA, 2448 bp, Homo sapiens
atgggaactctcctcggtacccttacggtgctgacgctggtcgcggaggaactccccgccgaaaccgacgttgctgccgaccctgccgcttcgcccacctgtacagcggttaatcagaccattggtcgagctatcgtggctgctgatttctttatcatctttcagctctggcagaatacggttcgccagcttgttacccatttcaagccccatggccaaagtgagatgtcagatacgcccgagttgataaatcgagctcggtacctaacttacctgtattgtcggcagccggcgaaagcgattcgtgaactcagtgagcaggagttggcatggaaaaagcaggctacgcatgagtaccaggtgctggtgacacgctgtaagcagacgttacatcaagtcgagccattgcgggaaattgaacctggcaggaaacgcctggtatttgatgagaatctgcgaccgaaacaaaatccgatcccacacttattggatacttgttggcccctcaccgttgatgagcacgccaatcgatccagtatcggaaacaacaatatctcctttgttgttaaccgtgccgttgtcaccaatgttctcaacaccatgcgcaccgcctgtaacagtcaggctaccatccagatttacaatgccgatattgcccgcgattttggtacccgtggaatcttttccatcaacagtggtttttccactgttattcgcggtggcgtcgttaccgttgatctgagtgccggtgccgccattggtgatagtgctctcgccttcgttattgacgatggcctggtcgccgtcaatctggataccgatggactccggatcggtgacggtcatggtgcccttgttatccaccgttgcgctgtcgccggtgatatcaataccgtgaccgccgccgctgacatggatctagaggatcccaggatcatctcggcacgttttggtgtcccccgaacccaggtcaggacatgggttgccctctatgaaaaacatggagaaaaaggtttaattcccaaacctaaaggcgttagtgctgatccagagtgcgtattaggtcgtgaaagctgtgatcgagcagcacatgtcccttatcaggctgctgctcactttatgcttgctggtagtggttctgtagccaggtggctgaaggtctatgaagagcgcggagaagctggtttacgcgcgctcaagattggcaccaaaagaaacattgcaatatcagttgatccagaaaaagcggcatcagcattggagctgtcaaaagaccgacgcattgaggatcttgaaaggcaagttcgatttcttgaaacgcggcttatgtatctaaaaaagctgaaagccttagctcatcccacgaaaaaggctgcggagataccgcgcagtacgttttattatcatctaaaggctctcagcaagcctgacaagtatgcggacgttaaaaagcgtattagtgagatttatcacgagaatagagcccgatacggataccgtagggtaacgctgtctcttcatcgagaagggaaacagattaaccataaagctgttcagcgcctgatgggaccctctcacttaaagcagcgattaaggtcaagcgataccgctcttacagaggagagagatttcaaggctacgcggccaaacgagaagtgggttaccgatgttactgaatttgcagtcaatgggcgcaagctgtatttgtctccagtaatagatctcttcaacaacgaagttatttcttacagcctttcggaaagaccagtgatgaacatgcgaaggtcgcgccctggcgtcgggtatttttacgcgttgacgccagtttatctggcgaaccggttgcaggcgcttttgggtgtcgagcagaccatccggatggagaactttttcttaccgggtacgttgccgatgggggttaccattcttgatgaaaatggtcataccctgatttcgcttaccggaccagaaagtaaaattaagggcgatcctcgctggatgcaggaacgctcctggtttggctatacggaagggttccgggagctggtgctgaagaaaaatctgccaccctcatcgctaagcatcgtgtattcggtgccggttgataaggtgctggaacgcattcgcatgttgatccttaacgcaattttgctgaatgtgcttgccggagctgcattgtttactctcgcacggatgtacgagcgacgtattttcattccggcggaaagcgacgccctgcgactggaagaacatgagcagttcaatcgcaagattgtcgcctccgcgccagtgggtatctgcattttgcgtaccgctgatggcgtcaatattttaaaacctcaatatatagctttctctataaaatgtgggcatatttctgaaggaaagaaaaatgccaggtttcgttttaacatcctgttacgtttagttaaattcaaaggaacatga

SEQ ID NO: 138487 - DNA, 669 bp, Homo sapiens
agctcggtacccggagatctattactgtagacaaatactggttgcgcccattgactgctaattttgtaacatcggtaacccacttctcgtttggccgcgtagccttgaaatctctttggagaacattaggggcggtttgccctacctctcctctgtaagagcggtatcgcttgaccttaatcgctgctttaagtgagagggttcccatcaggcgctgaacagctttatggttaatctgtttcccttctcgatgaagagacagcgttaccctacggtatccgtatcggcctctattctcgtgataaatctcactaatacgctttttaacgtccgcatacttgtcaggcttgctgagagcctttaaatgataataaaacgtactgcgcggtatctccgcagccctgagaagctcatcaagaggataaaactgccttaactcgttgagtactttcacttttttcggggaaggagctaaggctttcagcttttttagatacataagcccgcgttcaagaaatcgaacttgcctttcaagatcctcaatggcgcggtctttggacagctccaatgctgatgccgtttttttttgatcaactgatattgcattgtttcttttggtgccattcttgagcgcgcgtaaaccagcttctccgcgctcttcatagacct

SEQ ID NO: 138488 - DNA, 3435 bp, Homo sapiens
atgtttgtcatctggagccatggaacagggttcatcatgagtcatcaacttaccttcgccgacagtgaattcagcagtaagcgccgtcagaccagaaaagagattttcttgtcccgcatggagcagattctgccatggcaaaacatggtggaagtcatcgagccgttttaccccaaggctggtaatggccggcgaccttatccgctggaaaccatgctacgcattcactgcatgcagcattggtacaacctgagcgatggcgcgatggaagatgctctgtacgaaatcgcctccatgcgtctgtttgcccggttatccctggatagcgccttgccggaccgcaccaccatcatgaatttccgccacctgctggagcagcatcaactggcccgccaattgttcaagaccatcaatcgctggctggccgaagcaggcgtcatgatgactcaaggcaccttggtcgatgccaccatcattgaggcacccagctcgaccaagaacaaagagcagcaacgcgatccggagatgcatcagaccaagaaaggcaatcagtggcactttggcatgaaggcccacattggtgtcgatgccaagagtggcctgacccacagcctggtcaccaccgcggccaacgagcatgacctcaatcagctgggtaatctgctgcatggagaggagcaatttgtctcagccgatgccggctaccaaggggcgccacagcgcgaggagctggccgaggtggatgtggactggctgatcgccgagcgccccggcaaggtaagaaccttgaaacagcatccacgcaagaacaaaacggccatcaacatcgaatacatgaaagccagcatccgggccagggtggagcacccatttcgcatcatcaagcgacagttcggcttcgtgaaagccagatacaaggggttgctgaaaaacgataaccaactggcgatgttattcacgctggccaacctgtttcgggcggaccaaatgataccccctaatatgtcaaagccaaaatacccttttgaaaagcgccttgaagtcgtgaatcactacttcacaactgatgatggttacaggatcatctcggcacgttttggtgtcccccgaacccaggtcaggacatgggttgccctctatgaaaaacatggagaaaaaggtttaattcccaaacctaaaggcgttagtgctgatccagagttgcgtattaaggtcgtgaaagctgtgatcgagcagcacatgtcccttaatcaggctgctgctcactttatgcttgctggtagtggttctgtagccaggtggctgaaggtctatgaagagcgcggagaagctggtttacgcgcgctcaagattggcaccaaaagaaacattgcaatatcagttgatccagaaaaagcggcatcagcattggagctgtcaaaagaccgacgcattgaggatcttgaaaggcaagttcgatttcttgaaacgcggcttatgtatctaaaaaagctgaaagccttagctcatcccacgaaaaaggctgcggagataccgcgcagtacgttttattatcatctaaaggctctcagcaagcctgacaagtatgcggacgttaaaaagcgtattagtgagatttatcacgagaatagaggccgatacggataccgtagggtaacgctgtctcttcatcgagaagggaaacagattaaccataaagctgttcagcgcctgatgggaaccctctcacttaaagcagcgattaaggtcaagcgataccgctcttacagaggagaggtagggcaaaccgcccctaatgttctccaaagagatttcaaggctacgcggccaaacgagaagtgggttaccgatgttactgaatttgcagtcaatgggcgcaagctgtatttgtctccagtaatagatctctttcaacaacgaagttatttcttacaggctttcgggaaagaaccagtgattgaacctgggttgagaaatatggctcgaatcaggggctttcaaaaaggctttatccccacagaaacatccgggtctggaaccctctgtgtgtacgcccacgcctacattggtgccggatcggtagaccggataaggcgttcacgccgcatccggcaagtggttaaacccgctcaaacaccgtcgcaataccctgacccagaccgatacacatcgtcgccagaccaaactgaacgtctttgcgttccatcagattcagcagcgtgtgcagagcgctacatgcacacagtgctgagcaatcgacatgacagcaggtcccgcagaaaggccccgggcgagcaaagaggcacttgcatgctgcaggatggcactggcaccagcgggataggtgcccagaagaaaaaaatgtacgccaataacggcgctatagaccgaaagctgctttttgaagcgacgttcgtcacgattgaaaaatgttgtgataccaatcagaaaggcgatgacacccacgccctgggccagccaatacgcggtcatgataaatccttagcaggggggaaggcccatccccccgggggggagtcacagacccgcaaaaagggggagggagtttcttttttccccaaaaagaccccgtttgtgggggcctacaactgttgccgacccgtaggccggataaggcgctcgcgccgcatccggcagtgtttacccgcggcgactcaaaatttctttctcataagcccgcacgctctccagccattcgctacctgctggcgtatcgtgacgttggcaatacatttcccagaccgcctgccacggcaacgatttctgctcttccagcagtgccagacgcgcagtgtaatcgcccgccgcttccagcttgcgcagctcagcggtaggttccagcaacgcacgcagcagggcttttttcatattgcgtgtaccaatgacccacgcggcaatgcggttgatagaggcatcgaagaagtcaaggccgatatgcacccggtcaaacagatcgtgacgcacaatctcactggcaattgcctgggtttcatcatccagcagcactacgtgatcgctgtcccagcgaaccggacggctgacgtgcagcagcaactgcggcacatacagcatggcggcggaaatctggtcggaatcaactcgtcgggtgaaatgccgggtccagcaaggcagctggggtccattggcacagtccagcagtccatcatcaaccacccttactggcagtgcacaggcaacaactccccatattaccgtagccgtagcaacattgtccatagggccatatgcagcaccccagccacatcgtcacaatccccacaccgcaggccagtgcacaaaaaaacagcacaacagcaacaacacacaacaactactttcgtgtacaactggtattaccaagggtggtatcatacggaaacagcctgcatttttccaccttgggacgcttcttaa

SEQ ID NO: 138489 - DNA, 2649 bp, Homo sapiens
atgcgccagaatgcgctgttgcttgagcgaaaacctgctgtaccgccatcgaaacgggcacatacaggcagagtggccgtgaaagaaagcaatcagcgatggtgctctgacgggttcgagttctgctgtgataacggagagagactgcgtgtcacgttcgcgctggactgctgtgatcgtgaggcactgcactgggcggtcactaccggcggcttcaacagtgaaacagtacaggacgtcatgctgggagcggtggaacgccgcttcggcaacgatcttccgtcgtctccagtggagtggctgacggataatggttcatgctaccgggctaatgaaacacgccagttcgcccggatgttgggacttgaaccgaagaagcacggcgacggcctgaggacgcagcggactgagcctatccagttacttaatgctaaacagatattgggtcagctggatggcggtagtgtagccgtgctgccagtgattgactccacgaatcagtaccttcttgatcgtatcggagagcttaaatcgggcgatgcttgcatggcagaataccagcaggctggccgtggtcgccggggtcggaaatggttttcgccttttggcgcaaacttatatttgtcgatgttctggcgtctggaacaaggcccggcggcggcgattggtttaagtctggttatcggtatcgtgatggcggaagtattacgcaagctgggtgcagataaagttcgtgttaaatggcctaatgacctctatctgcaggatcgcaagctggcaggcattctggtggagctgactggcaaaactggcgatgcggcgcaaatagtcattggagccgggatcaacatggcaatgcgccgtgttgaagagagtgtcgttaatcaggggtggatcacgctgcaggaagcggggatcaatctcgatcgtaatacgttggcggccatgctaatacctgagatggaaaaagagcagctgattgaaatagccaatacgataatgccgtttggcaaatacaaagggcgtcgcttaatcgacctgccggaggagtatctgctgtggtttgcccgcaaagatgagttcccggcagggaagctcgataccattaacgacggcttcgctgaacgctgtataaaccaccaacagaatggacgtctggtcagttttcgcaatccattttttattgcgcgacacccagtcaccaatccacggccgggaaagatgccccaacacaaacggcagcagcagttgcagcataattttaccgacctgctcaaggctgccccctgcaccgtgaacattcatcaccagaccaaccagcaatggaacatcgatattcaagcttatgaatcgacgtcgcctcgaggggggcaacgtagctacactccgccattaactattggcatgattttccaggatcaccatctactgatggaccgtactgtctacgataacgtggcgatcccgctgattatcgccggtgccagcggtgacgatattcgtcgccgggtgtcggcggcgctggataaagtcgggctactggacaaagcgaagaacttccctattcagctttcgggcggtgaacaacagcgtgttggcattgcccgcgcggtggtgaacaagcccgcggtactgctggcggacgaaccgactggtaacctggacgacgcgctgtcggaaggcattttacgtctgtttgaagagtttaaccgcgttggggtaaccgtattgatggcaacgcacgacatcaacctgatctcgcggcgttcctatcgcatgctcaccctgagcgatggtcacttgcatggaggctttggcgggcgtcttgatcgcttccgtaaatcggtcggcggctcaggcgacggcggtcgtaacgcaccaaaacgcgcgaaatcctcgccaaaaccggtaaatcgcaaaaccaacgttttcaacgaacaggtgcgctatgccttccacggcgcattgcaggatctgaaaagcaaaccgttcgccacgtttttaacggtgatggttatcgccatttctctgacgctgcccagcgtctgttatatggtgtacaaaaacgttaaccaggcggcgacgcagtattatccgtcaccgcaaatcactgtttatctgcaaaaaacgctggacgatgacgctgctgcgggcgacccggaccgaccttcgcttcaattaagatggcgggttataccaggattctctatcgcggttgccatttacttcctcaacgaatccctgggccgtccgctaatgatcaccggctattctgctgaatgttctttactggcttggcctgttcgttccggcttaaggaaggcacctatgaagacgtttcctctgcaaagcctgacgattattgaggcgcagcaaaagcagtttgcgctggtggatagcatttgtcgccatttccccggcagcgagtttcttactggcggtgatttaggcttaacgccagcgactgaactcaaaccgcggcgcttacccagcggtgtggaacaggtgctggctgatgcatttcacgcacaggctgcggcgctggtgcagggcgcggggactggcgcgattcgcgccgggctggcggctttgctcaaaccggggcagcgtcttctggtgcatgacgcgcctgtttacccgacgacacgg

SEQ ID NO: 138490 - DNA, 2277 bp, Homo sapiens
ttaaccagcgcttactccgacaacgtcattcggcttctccggatggcgttgtcggcagataacaccatagctatggtttattctacacagacggtatttcaagtcctggcgggaagtattgcgcaaatgttttgccatacgtggttgccgaagatagcgtccatttctgaccagcacgggtgatagcgccgctgagaagttgttgaggatcagagaacgctgcatccgctcaacccgatttgggataaccagttcatgactttgctggagcagggacgcatacaggaactggatgccgtcagtaacgaagagctttccgccattgccggaaagtcgacacatgaaatcaaaacctgggtcgccgcttttgccgctatttcgcccaatcccggagtggattgccggatttggctcgttaagcgccagaacagagaactgaatatgcaggagaagatgatgagttatcagccacaaaccgaagccgccaccagccgttttctgaatgtagaagaagcgggtaaaacgctgcgcatccattttaatgactgcggacaaggcgacgaaaccgttgtcctgctgcatggttccggcccgggtgctactggctgggcgaacttcagccgcaatatcgatccgctggtagaggcgggctatcgggtgatcctgctggattgtccgggttggggcaagagcgattcggtcgttaatagtggttcgcgatcggatcttaatgcacgaatcctgaaaagcgtggtggatcaactggatatcgccaaaatccacctgctgggcaactcgatggggggccatagttctgtggcgttcacccttaaatggccggagcgcgtcggcaaactggtgctgatgggcggcggtacgggcggcatgagttcgtgtacgccgatgccaaccgaacgtgattagcgactgaatcacggttatcgtgagccgaatatcggaaaacctgaagctggaaatcgcggtacctcctgaaattgtttgcatcagctcgtgtcgggaaagcagtttataaaattctgtccggttgcgccccgccattctcgccgcgtgggtgacgttgcctttggtgatttgcagcagcttacgcaaatagttgagttcaaactgattacgtgcctcaacaaaggttggcagcgccgtattttcaccctccagcgcctgctccaccagcgcatcactaatcaccggagatgaggtcagcgccacgcactgttcaatcacgttgaccaactggcgcacattacccggccagctcgcggtcatcaggcgtttcatcgcatcggtagagaacgcgcggacaaacggtttatgtcgctctgccgcctggcgcaacaggtgatttgccagtagcggaatgtcttctgtgcgctccgccagtgccggaattttcaggctgacaacgttgaggcggtaatagagatcttcgcggaattccccgcgcgccatcgcttttggcagatcacggtgagtggcagaaataatccgcacattgatatcaatatcgcggttactgcccagcgggcgcactttacgctcctgcaacacgcgcagcagtttgacctgtaacggcgcaggcatatcgccaatttcatcgagaaatagcgttccgccttccgccgcctggaataaaccttcgcgattgctgacagcgccagtaaacgcgccacgcgcatgaacaaacagctccgactccagcaattgctcgggccatgcgccacagttaatagcaataactggtttgctgttgcgcgggctggcgttgtggatagcctgtgcgaaaatctctttccggtgccctcggtaatcaaagctgacgctgattggccctggatccttcttgttgttggttacaatttcgatgtcgtaaacaccggtttgcttgccctgatgacgtacctgcgcagtagcagttaaggtgtctccggcaaagcctggacgcaaaaaatcaatcgtgcaggcagaagcgacggctgccagcccctggctattgcaggcgtaggcaaaggcagtatcagccagtgaaaatagctgcccgccgtggcaactttgatgaccgttaagcatttgtgcagtgacggtcatggtcactacagcaaagccttcatccattgagataatgtcgatgccaagcgctttggcgcaggcatcgttctcatacattgcatgggcattttgccaggccttatgactcataaccgctctccagaagcgcccgttggcgcagcaatgaacatgggcgatagcgttcttcgccat

SEQ ID NO: 138491 - DNA, 1467 bp, Homo sapiens
atgaagttcgcccagccagtagcacccgggccggaaccatgcagcaggacaacgggtttcgtcgccttgtccgcagtcattaaaatggatgcgcagcgttttacccgcttcttctacattcagaaaacggctggtggcggcttcgccaaatccggcaatccactccgggattgggcggtaataacgcccttcgctacgccagttgccaaacgcagaaatagcggcaaaagcggcgacccaggttttgatttcatgtgtcgactttccggcaatggcggaaagctcttcgttactgacggcatccagttcctgtatgcgtccctgctccagcaaagtcatgaactggttatcccaaatcgggttgagcggatgcagcgttctctgatcctcaacaaacttctcagcggcgctaatcacccgttgctgacgcaattcgcgctcactggcggagatttcaaggctacgcggccaaacgagaagtgggttaccgatgttactgaatttgcagtcaatgggcgcaagctgtatttgtctccagtaatagatctcttcaacaacgaagttatttcttacagcctttcggaaagaccagtgatgaacatggatcaccatctactgatggaccgtactgtctacgataacgtggcgatcccgctgattatcgccggtgccagcggtgacgatattcgtcgccgggtttcggcggcgctggataaagtcgggctactggacaaagcgaagaacttccctattcagctttcgggcgcgtgttggcattgccgcgcggtggtgaacaagcccgcggtactgctggcggacgaaccgactggtaacctggacgacgcgctgtcggaaggcattttacgtctgtttgaagagtttaaccgcgttggggtaaccgtattgatggcaacgcacgacatcaacctgatctcgcggcgttcctatcgcatgctcaccctgagcgatggtcacttgcatggaggctttggcgggcgtcttgatcgcttccgtaaatcggtcggcggctcaggcgacggcggtcgtaacgcaccaaaacgcgcgaaatcctcgccaaaaccggtaaatcgcaaaaccaacgttttcaacgaacaggtgcgctatgccttccacggcgcattgcaggatctgaaaagcaaaccgttcgccacgtttttaacggtgatggttatcgccatttctctgacgctgcccacgtcgtgttatatggtgtacaatatcgccaaaagcgaacgaatttcagacatcagcacccaactgaacgcctttcccggctgtgaagttgctgtcagcgacgcgccgagcggtcagttgattgtggtggtggaagcagaagacagcgaaacgctgatccaaaccattgagtcagtacgcaacgtagagggcgtgctggcggtgtcgctggtttatcaccagcaggaagagcaaggtgaggaaacaccatga

SEQ ID NO: 138492 - DNA, 432 bp, Homo sapiens
atggttaacatcagtcggtaccagcccctcggtcaatatactcaggatctgaaaaatcagtttctgcgtaatgccccgccgatcaataaagtgatgtatgacaataagatccatgtgctaaaaaacgcgctcgggttacataccgctgtttctcgtgtgcagggcggcaagctgaaagcaaaggtggagatccgcgtcgctaccgtgtttcgcaacgcgccggaaccgtttttgcgcatgatcgtggataacgaccatgctgcgcgcatttgcccgccttcttctccgtatttgtttttctcgccggactctaaagattgcctgcttactgttacttgtggcaggagcgaccatccttatcgccgatcgcgtaatggtcaacgccagcaaacagctgacctggagcgatgtcaacgccgttccggcgcgtaa

SEQ ID NO: 138493 - DNA, 964 bp, Homo sapiens
agtcatgtggcggacgcagcaacatattgaggagcttaatggagcatccttatttttccctgatgcttaccggcaatggctggatagcatttacgatgatgcggaaatggatgagccagaatgggtcggcaatggcatggataaatttgaaagcgccgagtgtgaaaaaaggttcaaggctcgcaaggtcctgcagtgggctgaagaatatagcttgcaggataacgatgaaaccattctttgcgtagcgcaggaaattggacgccactggcagcgtcgggcgctccagcctgtaccacctgatgagccactgtttatggcactacttttttccatgttgcgggttcccgatccattgcgggatgcgcatcagcgggacagacaattgcgtcagtctatcaaacgtctggtaaaccattttcgtgagctgggaaatgttcgtttttatgatgaacaggggttatgtgatcagctttatacccacctcgcccaggcgttaaatcgcagtttgtttgccatcggtattgataataccctgccggaagagttcgccagactgtaccccacgcctggtgcgcaccacccgcgcggcgctggccggatttgaaagtgaatacggcgtccatctttctgatgaggaaagtggtctggtcgcggtgattttcggagcccggcctaatgcaggaaaacgatctgcatgaaaaacagattattcttcttaccgggaatgatagcgagcgagaagcgcagattgagcagcagttacgcgaactaacgttactgccgctcaacattaagcatatgtcggtaaaggcatttttgcagacacggcgctccgcgtggcgcggcactgattattgcgccttataccatgccattcccgctctttccgcctccgctgatctatacggacctgacgatgccaacacatcaacaggagcagatcctctagagtcgccggcag

SEQ ID NO: 138494 - DNA, 2398 bp, Homo sapiens
atgcggaatgtgccagaactgatgagcgatatccgccaggatggtcgcttctgctctgccagtggtgcggatagtgttgtagtgcggatgctgtgcgatggcgctatacaaaaaagttgtcgagtgaccgataccaccactaatcagaatttgctgatcgcgggcaatcttacatgccgcatcgatagtcggcataaccgcattgcctgcaaggatcacgcaatcggcctgatacggcacctcaccggagaaatcatcctgcgccagccactgtccgataacatttatggcatctatagttgccggcgaaagcgtcggaaacggggtcacgcgcagcgggatacccggcagaaggctcacgggcaaacgacgcggcgggacgagaacagagtccgtctgaatgtggtgtccgccgatatcacggacatcaccacaccggacgggcgggagacgaaattttactataacgacgggaaccagctgacggcggtggtgtccccggacgggctggagagccgccgggaatatgatgaaccgggcaggctggtatcggagacatcgcgcagcggggagacagtacgctaccgctacgatgacgcgcacagtgagttaccggcgacgacaacggatgcgacgggcagcacccggcagatgacctggagccgctacgggcagttgctggcgttcaccgactgctcgggctaccagacccgttatgaatacgaccgcttcggccagatgacggcggtccaccgcgaggaaggcatcagcctttaccgccgctatgacaaccgtggccggttaacctcggtgaaagacgcacagggccgtgaaacgcggtatgaatacaacgccgcaggcgacctgactgccgttatcaccccggacggcaaccggagcgagacacagtacgatgcgtggggaaaggcggtcagcaccacgcagggcgggctgacgcgcagtatggagtcgatgctggcggaccttagaggaacagattggctgcggaagaaagcagctatgaaccactccttaaaaccctggaacacatttggcattgatcataatgctcagcacattgtatgtgccgaagacgaacaacaattactcaatgcctggcagtatgcaaccgcagaaggacaacccgttcttattctgggtgaaggaagtaatgtactttttctggaggactatcgcggcacggtgatcatcaaccggatcaaaggtatcgaaattcatgatgaacctgatgcgtggtatttacatgtaggagccggagaaaactggcatcgtctgggggcacatgcggcctattacggttttagcgccatttactggcaggcagctggctactcggcctcggcggtggggtatttgtggtcgttgggcgtgggtggcggaagtcattatctttgcgctgagtaataaacttttccgccgttgtagtgcacgcgatatgctgttgatctcggcgatttgcggcgtagtgcgctggggcattatgggagcaactacggcgttgccgtggttgatagtggtgcaaattctgcattgcggcaccttcacggtctgccacctggccgccatgcgttatattgctgctcgccagggtagcgaagtcatccgtttacaggcggtttactctgccgtcgcgatgggcggcagtatcgctatcatgaccgttttcgccggtttcctgtatcaatatatgggccacggcgtgttctgggtaatggcgctggtggcgcttccggcaatgtttttgcgcccgaaagttgttccctcatgctgattcgagcattttgcggatctgctcctgttgatgtgttgtcagcgtcaggtccgtatgatcacggtggtcttaacgtcacgacacgccaatctgcgcccgccgcctggcgggtcatacaatattttccccacgcttcaagggtaaacgggcgtgccaacatcccgcggtgggattcgcgcggccctgatcaagttgaagtgtgggcgttttgtattactgacaaagccgcctccgatgaagttaaagccgcttttgaaaacagcgccactcgtgcttttggtcctgctggttttctcgagcagatgactcggagaactggaggtgatgaaatgagtgcgcaagtttcactagagttacatcaccgcattagccagtttctctttcacgaagccagcttactggacgactggaaatttcgtgactggctggcgcagctcgacgaagagattcgttacaccatgcgcaccacagttaacgcgcaaacacgcgaccgccgcaaaggcgtccagccaccgacaacctggatttttaatgacaccaaagaccagctggagcggcgaatcgcccgctttagagctcaggagagacacaaaaacgtacccaaag

SEQ ID NO: 138495 - DNA, 3780 bp, Homo sapiens
tcatgctgattcgagcattttgcggatctgctcctgttgatgtgttgtcagcgtcaggtccgtatagatcagcggtggtgaaaagagcggtaatggcatggtataaggcgcaataatcagtgccgcgccagcggcagcgcctgtctgcaaaaatgcctttaccgacatatgcttaatgttgagcggcagtaacgttagttcgcgtaactgctgctcaatctgcgcttctcgctcgctatcattcccggtaagaagaataatctgtttttcatgcagatcgttttcctgcattagccaggcaccgaaaatcaccgcgaccagaccactttcctcatcagaaagatggacgccgtattcactttcaaatccggccagcgccgcgcgggtggtgcgcaccaggcgtgggtacagtctggcgaactcttccggcagggtattatcaataccgatggcaaacaaactgcgatttaacgccgaaaccggataccctgcccgacgatacaacgctttatcgactaacttctgatctacagccttattgtctttaaattgcgtaaagcctgctggcagtgtgtatggcattgtctgaacgttctgctgttcttctgccgatagtggtcgatgtacttcaacataacgcatcccgttaggctccacggaatatttcaccggttcgttgatcactttcccccgcgtcaccgaacacacgaccaaacgacgagcacacgacggccagtgaccaaaggcatcattcaggatcaacaccgggccgcggatttctgtgtcgtccaactgttgcagcaaatattcatccgccgcttcccacgcctgtagcgggttaacgtcatccgtcgccggaaaacgttgtagtgtcagtgaacggaaaccgttgtctaagtggctcatcggccctcctgaatgataaaatttcgacattgcccctgaaaagggtgcgtgagtataccctttttctctttttcgtgggcggttatgagcaatcttacttatcttcagggttatcccgagcagctactttcccaggtgcgaacactgattaacgaacagcgtctgggcgatgtgctggcaaaacgctatccgggaacacacgactacgccaccgataaagccctctggcaatatactcaggatctgaaaaatcagtttctgcgtaatgccccgccgatcaataaagtgatgtatgacaataagatccatgtgctaaaaaacgcgctcgggttacataccgctgtttctcgtgtgcagggcggcaagctgaaagcaaaggtggagactccgcgtcgctaccgtgtttcgcaacgcgccggaaccgtttttgcgcatgatcgtggtgcacgagctggcgcacctgaaggagaaagagcataacaaagcgttttaccagttgtgttgtcatatggaaccccagtaccaccagcttgagttcgacacccgactgtgtaaccggatccgcttgaacggtcatgatcacttccgccgccgatacgccctcttccgggtgaataccggtcggactgcctcgcccgtgatacagccctgagactttagttatcggcgtgaatggtgacgataatttctttacagagacccgcgagcgcttcgtctatagcgttatctaccacctcgaataccatgtggtgcataccggtgccgccatccgtgtcgccgatatacatacccgggcgcttacgcaccgcatccagccctttcaggactttgatactggaggagtcataagaattcgacatcaacgtttctcgctcatttatacttgggttaatccgttattttacccttttccacgcggctggcaagcagcccgcgacgctcatcatcaagctcagaggcaaaatcatctatcaggtagagacaccgccgcccgctttctggaactggccgcggacttttgcggcctgtttctgatgaccgacaaacaagcggcgctgccgtatgcatcggcctacaaacaggacgagcaagagattaaacgcttgttagttgaggcagggatggaaaccagcggcaatttcaacgaaccggcagatcatctggcgatctatctcgaattgctcagccatctgcatttttcgctgggagaggggaccgttcctgcgcgaagaatcgacagtttgcggcaaaaaacactgacggcgctgtggcaacctgtactaacgtatggtgacttaactcgtctggatcctacaacagtaacgccacagcaagtatttaatgcggtgtgtcatatgcgcaccaccaaactccctgatccaaaagtgaatggcaatgccgagtctgacggtgccgatcgtattgagtttcgggtaaccaccaacccaggtcagccaatgcagcctattgccaaagtcgcatccggtggtgaattgtcccgcatcgcactggcaatccaggtcatcacggcgcgtaaaatggaaaccccggcactgatttttgatgaagtggatgtagggattagcggtccaacagcggcagttgtcggcaaactgctgcgtcaactcggcgaatcaactcagcagccgggtagtgcgcaggaagtacaaccagctgcatggtccgcactgggcattgacgctgtagttgtcggtcaggtcactccgaatccggatggttcttacaatgttgcttatcaacttgttgacactggcggcgcaccgggtactgtacttgctcagaactcgtacaaagtgaacaagcagtggctgcgttatgctggtcataccgccagtgatgaagtgtttgaaaaactgaccggcattaaaggtgcgttccgtactcgtattgcctacgttgttcagaccaacggcggtcagttcccgtatgaactgcgcgtatctgactatgacggttacaaccagtttgtcgttcaccgttcaccgcagccgctgatgtctccggcgtggtcaccagacggttctaaactggcttatgtgaccttcgaaagcggtcgttccgcgctggttattcagacgctggcaagcgaacgcatctgttctttgccgctgttcccggatatgactaccgccgatgccgaccatcccttcagcaactcgcaggacaatgcagccatgtttgaacaacgctggactgcactggcgcttgcctcagtaatcactgtgacgttcctggatcctgcgccgtcgtcgccatcatccgcaccattttggttacagcctgctggcgctcttactggcgctgggttcggtggacgccagcccggcatttcgtcagataacggaactggtgaaatcccagtcacgcgacggcgacccggactttgcggcttattataaagagccgtcgaaaactatccctgacccgaaactcaacctggtttatatctacggcgaaagtctcgagcggacctattttgataacgaggctttcccggatctcacgcctgaactgggcgcgttgaaaaatgaaggcctggatttcagccacacgcagcagctgccgggaacagattacacgattgcgggcatggtggcttctcagtgcggcataccgctgtttgccccctttgaagaatgggcccgattcaccaccattaaaggcttcgagattgctgccagtaacgccgcacttagcggagaatttaacgatgtgttactggcgctaaaccttagtccgttggtgcattccgaccgcgatgctgagctgctggcacgcgagatgattctggcgcacgagaaatggctgccaaactttgccgactgcatcgcagagcttaaaaaagcacattaa

SEQ ID NO: 138496 - DNA, 777 bp, Homo sapiens; identical to SEQ ID NO: 135973

SEQ ID NO: 138497 - DNA, 813 bp, Homo sapiens
atggaacttaaaaaattgatggaacatatttctattatccccgattacagacaagcctggaaagtggaacataaattatcggatattctactgttgactatttgtgccgttatttctggtgcagaaggctgggaagatatagaggattttggggaaacacatcccgattttttgaagcaatatggtgattttgaaaatggtattcctgttcacgataccattgccagagttgtatcctgtatctgtcctgcgaaatttcatgagagctttattaactggatgcttgactaccattcttcagatgataaagacgtcatcgcaattgatggaaaaatacaccggcattcttatgacaagagtcgccgtaagggagcgattcatgtcattagtgcgttctcaacaatgcacagtctggtcatcggacagatcaagacggataagaaatccaatgagatcacagctatccctgaacttcttaacatgctggatattaaaggaaaaatcatcaaaaccgatgcgatgggaagccagaaagatattgcagagaagatacaaaaacagggagaggatgagaagaatatcgtcgaacgcaatgtgtccacttcaggcgtgagcatttactttgaggcttatctttataatgctaccaactgtagcagcactccatggcacctgccacccatgcacatgacctcttcccagcgccggccatccactgctgttgacgaggaagatgaagactcgccctctgagtgccacacccctgagaaggtgaagaaaccgaagaaggtgtactgctatgtgtcaccaaag

SEQ ID NO: 138498 - DNA, 1161 bp, Homo sapiens
atgaaaaacaaattaccgccatttatcgagatttaccgcgctctgattgccacaccttcaataagcgccacggaagaggcactcgatcaaagcaatgcagatttaatcactctgctggcggactggtttaaagatttgggcttcaatgtggaagtgcagcctgttccaggaactcgcaacaaattcaatatgctggcaacacgccgacatgaaggtcgctatattacatgcatgcagccgctgccaataatagcagaacaagagcaagagccagaaatgacggtcagatattatatcagttctgctgatttaaccgcagaaaagttcgccacagcaatccgaaaccactggcacgtggagaataagctgcactggcgtctggacgtggtaatgaatgaagacgactgcaaaataagaagaggaaacgccgcagaattattttcagggatacggcacatcgctattaatattttaacgaatgataaggtattcaaggcagggttaagacaaggttgggaagatatagaggattttggggaaacacatctcgattttttgaagcaatatggtgattttgaaaatggtattcctgttcacgataccattgccagagttgtatcctgtatcagtcctgcaaaatttcacgagtgctttattaactggatgcgtgactgccattcttcagatgataaagacgtcattgcaattgatggaaaaacgctccggcactcttatgacaagagtcgccgcaggggagcgattcatgtcattagtgcgttctcaacaatgcacagtctggtcatcggacagatcaagacggatgagaaatctaatgagattacagctatcccagaacttcttaacatgctggatattaaaggaaaaatcatcacaactgatgcgatgggttgccagaaagatattgcagagaagatacaaaaacagggaggtgattatttattcgcggtaaaaggaacccaggggcggctaaataaagcctttgaggaaaaatttccgctgaaagaattaaataatccagagcatgacagttacgcaatcagtgaaaagagtcacggcagagaagaaatccgtcttcatattgtttgcgatgtccctgatgaacttattgatttcacgtttgaatggaaagggctgatgtaa

SEQ ID NO: 138499 - DNA, 1095 bp, Homo sapiens
atgcacagtctggtcatcggacagatcaagacggataagaaatccaatgagatcacagctatccctgaacttcttaacatgctggatattaaaggaaaaatcatcaaaaccgatgcgatgggttgccagaaagatattgcagagaagatacaaaaacagggaggagcagtaatgaatctacaacgatttgatgacagcaccctaatccgtatctttgcccttcatgagttacatcgactgaaagaacatggcttaacgcgcggggcgcttctcgattatcacagccgctataaactcgtctttcttggcgcatcctcagccggagtcccgcaaacttggcccgtttcgtggctgatattcaccagtggcaaaatctggatgactattcaccccagtaccgccaacgcgtagttgttttgctttctcaccccgccaacgcgcgcgatcacaccaatgttttgatgcacgttcagggttattttcgcccgcatattgattccacagaacgccagcagctgcgtgcgcttatcgacagttatcgccgtggcgagcaaccacttcttgcgccgctgatgcgtatcaaacactatatggcgctttatcctgacgcctggctttcagggcagcgttatttcgaactttggccgcgtgtgattaacttgcgccattcaggagttttatgactacccatctggtctggtttcgccaggatttacgtctgcacgataatctcgcacttgtgcgcctgccgcaattcgtctgcacgcgtgctggcgttgtatatcgctacaccacgccagtgggcgacgcataacatgtcgccgcgtcaggctgaacttatcaatgctcaactgaatgggctacaaatagcgcttgcggaaaaaggtattcctttattgttccgtgaagtggatgactttgtcgccagtgtcgaaatagttaaacaggtgtgcgcggaaaacagcgttacccacctgttttataactatcagtatgaagtgaatgagcgggcgcgggatgtggaagttgaaagacgctgcgtaacgtggtgtgtgaaggatttgatgacaggcgtgatcctctagagtcgcctgc

SEQ ID NO: 138500 - DNA, 1452 bp, Homo sapiens
  misc_feature (1)...(1452): n = a,t,c or g
atgacggcctcagaacgtcacgccagcacagagaatgatattcgcatacggagaacattctccgctgcgaattaccgcctgactttctgcggtttgttgtttgaattgttcatgcgtggtgtaacgaatttcaatggtatttccctggcgattttgcagctgaccggtaacccgatgctgacagtggcgctgaccaaagccgatcgcgtggacgaagcgcgtgttgatgaggttgaacgccaggtaaaggaggttctgcgggaatacggttttgctgaggcaaaactgtttatcaccgcagcaaccgaaggtcggggaatggatgccctgcgcgagcatctgcttcagttgccggaacgcgagcacgccagccaacatagtttccgcctcgcgattgaccgcgcatttaccgtaaaaggtgccgggctggtcgtcaccggaccgcaggaagcagatcgactgttcaatatgaaattcgtcggcttcgcgcagtccggtatcgcactttttttcgaagtcggtttaattcttctggtacctattttattcgctattgcccgtgaagcaaaaatatcaccgatgtttatgtgtgtgccgatgctttctggtttgctggtcgcacacggttttttgccgccgcaccccggcccgactgttatcgccagggaatatggcgctgatgtaggattggtactgatatacggtatcattgtcggcattccaacctttattctttgcggcccggtattgaataaattctgccagcgcattattccggacgcctttaaaaaagaggggaatatagcctgtctcggcgcgacccgccgattcagcgaaagcgaaatgccaggctttgggatcagttttctcacggcaatgctgccggtgatcctgatggcggttgtcaccatcatccagatgactcatgccaaaagtgccgcggattcaggcttattttacaacgtgatactgttcttaggtaattcaacgatcgccatgctgatttcactgctattcgcgatctataccatgggcctggggcgcgggaaaacaatccctgacctgatggattcttgcggaaaagctatcgcgggtattgccggtctgctgctgatnatcggtggtggtggtgcattcaagcaagttctcatcgactctggcgttggtcagtatatttcccacccctggtttcgggtatggatatttaacccgatcctgatggcctggggcgtggccgcattcctgcgtatttgtctgggttcagccaccgtcgcggcgatctctaccgccggtctggtcatcccattgttggcagtacatcccaataccaacctggccttgattacgctggctaccggtgccggatcctgtatttgttctcacgttaacgatgccagtttctggatgattaaagattacacgcaggtcgtagcggctggctgctgtatggtc

SEQ ID NO: 138501 - DNA, 3660 bp, Homo sapiens
atggcccaatggaagtctgtatctgggagctggcacgctggcctcacctgcaacacactcacctgcgtgtactgggtgcatgtggcgttgcgagcacactctcctgccgcgtggctgtaccgctgcccctctgcaaaccacaggctgaccacttcaacaaaggacgccaagcccgcgggcagcagctgcatgttccagcccacttgcaggggatggaacctgacctgcgttctgattcgcggcagccagacgctgcctgcgtggtgtgaaaactgggcgcaagaagtcgatgcccggttgacgaaagaagcgcagagcgcgctgcgtccggtgatcaacctgacgggaaccgtgctgcataccaaccttgggcgagctttacaggcggaagccgcggtggaagccgttgcgcaggctatgcgttcgccagtgaccctcgagtatgatctggacgacgccggacgcggacatcgcgatcgggcgctggcgcagctgctgtgccgtattacgggggcggaagatgcctgtatcgtcaataacaatgcggcggcggtgttattgatgttggcggccactgccagcggaaaagaggtggtggtatctcgcggcgaactggtggagattggcggcgcgtttcgtattcccgatgttatgcgtcaggcaggctgcaccctacacgaagtagggaccaccaaccgcacgcacgcgaatgattatcgtcaggcggtgaatgaaaataccgcactgttgatgaaagtacataccagtaactacagcattcaggggttcaccaaagcgatagatgaagcggaactggtggcgctcggcaaagagctggatgttcccgtagtgactgatttaggcagtggctcgctggtcgatcttagccagtacggtttgccgaaagagccaatgccgcaggagttgattgcggcgggcgtcagtctgataattgaaaataggaaaacgactatgttggcacaactgaccatcagcaactttgctatcgttcgtgagcttgagattgattttcatagcggcatgaccgtaataactggcgagaccggcgcgggtaaatctattgcaatagatgccctcggtctttgtctcggtggtcgcgctgaagccgacatggtgcgtaccggcgctgctcgcgctgacctgtgcgcccgtttttctctgaaagatacgccagcggctctgcgctggctggaagaaaaccagcttgaagacgggcatgaatgtttgcttcgtcgcgtgatcagcagcgatggtcgctcccgtggtttcatcaacggtacagctgttcctctgtcacaactgcgcgaaacatctacgactaccggtgccaggcgagtcatacgtgcgatacgacgcataaacagcagcgatgccagcacgatccccacgctgatggcaataaccatatcaaacaacacggtcagcgacatgcacagcagcatgacgatgatgtcatctttcggcgcatacttgcttagtggtctaatgtccacgagaatcagaacgctcatcaccacgatctacaacggagatttgcggatgattcgccagaggaagttgtgcaaaacggctatcgccaggacttatggcaatgacgacacactgggcgcgcttcgacgcgtcaggcaccagacgataaaaagtttcgcccggcctgggcatgctgaattcattacgcgcacgctcttcgagcgcctcctggccgccattgagaacgtcaatttcggcaaaaagttgaacgggtcgcgctttaaaattcgcaaggatgaaaatcctgtgattgaatttaaaaacgtctccaagcactttggcccaacccaggtgctgcacaatatcgatttgaacattgcccagggcgaagtcgtggtgattatcgggccgtccggttccggtaaatcgaccctgctgcgctgcatcaacaaactggaagaaatcacctccggcgatctgattgtcgatggcctgaaggttaacgatccgaaagttgacgagcgcctgattcgccaggaagcaggtatggtgttccagcagttttacctcttcccgcatctgacagcgctggaaaacgtcatgtttggcccgctacgcgtgcgtggcgcgaacaaagaagaggcggaaaaactggcacgtgagctgctggcgaaagtcggtctggcagaacgtgcacatcactacccttccgaactttctggtggtcaacagcagcgtgtggcgattgcccgcacgctggcggtgaaacacaaaatgatgctgtttgatgaaacgactttcgattttgacccggaacttgtccatgaagtgctgaaggttatacacgaatttgctgaaaaagggattaccaatgctcaacgctttgccaagttccagcgtacaggccagcgcgccaaaatcttatgcaagttactcaatctctctgccttcatttcttccgctgtaaactgggacagtgataaccccttgtgggtgatgtctgaggagctggtgaggtgcagcctgcagtgtgtgcacagccggttccgggaggaggagtgctcgtgcgtctgtgacatctggtacggtggagcccagagtgccagccattttaaacttgtaagaaaaccgaaaatccttcatctgcacctgaaaggtaaagagaaagaaagtcagaagttttgtggcaacttgtgggtggggttacagaggaaaggcggggtgctggcccaaatcaagagccagaaagtgcaggacatcctcgccttctatctgggccgcctggagaccaccaacgaggtgattgacagtgacttcgagaccaggaacttctggatcggtagggagcacatgggggctgccagcgctgggaagaggggccagaaaggcagctggcagcagactccagggtctgagtgggccaaccttgactaccccggcccagggctcacctacaagaccgccaaggactccttccgctgggccacaggggagcaccaggccttcaccagttttgcctttgggcagcctgacaaccacgggtgccagagagttgtgggcacagctggtgtgggccggtggtgggatgtagggcaccatggacttttacagactgagggacatactctggatgagaatagtttaccctatcaaagaaaactactttattttgagcagattaaagaatgtgctgatgaaccggttggaaaaggttacatggtttcctgcttggtggatcaccgaggcaacatcactgagtatcagtgtcaccagtacattaccaagatgacggccatcatttttagtgattaccgtttaatctgtggcttcatggatgactgcaaaaatgacatcaacattctgaaatgtggcagtattcggcttggagaaaagacacaagctggtgagggcagagtgtataagtgcctctttaaccataaatttgaagaatccatgagtgaaaaggatgcacattcacaaggtgaggtggtatcatgcttggagaaaggcctggtgaaagaagcagaagaaagagaacccaagattcaagtttctgaactctgcaagaaagccattctccgggtggctgagctgtcatcggatgactttcacttagaccggcatttatattttgcttgccgagatgatcgggagcgtttttgtgaaaat

SEQ ID NO: 138502 - DNA, 1533 bp, Homo sapiens
atgacagacttaatccaacgccctcgtcgcctgcgcaaatctcctgcgctgcgcgctatgtttgaagagacaacacttagccttaacgacctggtgttgccgatctttgttgaagaagaaattgacgactacaaagccgttgaagccatgccaggcgtgatgcgcattccagagatacatctggcacgcgagattgaacgcatcgccaacgccggtattcgttccgtgatgacttttggcatctctcaccataccgatgaaaccggcagcgatgcctggcgggaagatggactggtggcgcgtatgtcgcgcatctgcaagcagaccgtgccagagatgatcgttatgtcagacacctgcttctgtgaatacacttctcacggtcactgcggtgtgctgtgcgagcatggcgtcgacaacgacgcgactctggaaaatttaggcaagcaagccgtggttgcagctgctgcaggtgcagacttcatcgctccttccgccgcgatggacgggcaggtacaggcgattcgtcaggcgctggacgctgcgggatttaacgatacggcgattatgtcgtattcgaccaggttcgctcctcttttatggccgtttcgtgaagtgccggagcgcttacaggcgacgcaaatgtatagatgcccaatgaacgtcgtaagcgattgtgattatgctctcttaatttgcaagggcgtcgtcaagagaactttggacgtcgcgtccgccacggttaatctgctctttttccgcatcacccgcgatgttaagcgcgatacgctgcccggcattggcggtttctgttggctggttttgcgcatgagcgcacgtacacgcatcggtttatttacaccagtcagccagagtgaatcgcctaccttcacttccccgcttaacgccgtaccggtgacgaccagcccggcaccttttacgaacctcctttacctggcgttcaacctcatcaacacgcgcttcgtgcatatcttgcatgcggcgtcgtccagtagtcagattgcccttattgcgacggtggcgtttggtgcgttgggcgtgccgattctggtcgccggtcaggtaacgggaatcgatccgttccacattggcgcaatggcgggacgtcagttaccgttcctgtcggttcttgtgccgttctggctggtagcaatgatggacggctggaaaggggtgaaagagacgtggccagcggcgctggttgctgggggaagcttcgctgtcactcagttctttacctctaactatattggtccggaactgccggatattacttcggcgctggtgagtatcgtctcactcgctttattccttaaagtctggcggccgaaaaataccgaaacggcaatcagcatgggacaatccgcaggtgcgatggtggtaaataagccatcttctggcggtcccgtgccttcagaatatagtctggcggccgcgggagcaaatataattaccctaaagccctgcgcttccagcgggcgaccgcaaatcgccatcccgaagcttgggtga

SEQ ID NO: 138503 - DNA, 1893 bp, Homo sapiens
atgggtcacggtatgggtatcccgtcctgctccatctacaccaaagaactgatcaccgatttcggcgtgaagaaaattatccgcgtgggttcctgtggcgcagttctgccgcacgtaaaactgcgcgacgtcgttatcggtatgggtgcctgcaccgattccaaagttaaccgcatccgttttaaagaccatgactttgccgctatcgctgacttcgacatggtgcgtaacgcagtagatgcagctaaagcactgggtattgatgctcgcgtgggtaacctgttctccgctgacctgttctactctccggacggcgaaatgttcgacgtgatggaaaaatacggcattctcggcgtggaaatggaagcggctggtatctacggcgtcgctgcagaatttggcgcgaaagccctgaccatctgcaccgtatctgaccacatccgcactcacgagcagaccactgccgctgagcgtcagactaccttcaacgacatgatcaaaatcgcactggaatccgttctgctgggcgataaagaagaagatcgggtgattcgctttggtaaagcacgggcaacgcgatatgcactgctgcgtccttatcgcggaattgagcgtattcccgtctggcgggtggacgataccggaaaggcgcataaattcgccgacatccggttgtgctggccgcagggaagttgtctggatgttgcgaaagcgcgagaagtgattcgtggcagccaaccgctgcctgcgtggtgtgaaaactgggcgcaagaagtcgatgcccggttgacgaaagaagcgcagagcgcgctgcgtccggtgatcaacctgacgggaaccgtgctgcataccaaccttgggcgagctttacaggcggaagccgcggtggaagccgttgcgcaggctatgcgttcgccagtgaccctcgagtatgatctggacgacgccggacgcggacatcgcgatcgggcgctggcgcagctgctgtgccgtattacgggggcggaagatgcctgtatcgtcaataacaatgcggcggcggtgttattgatgttggcggccactgccagcggaaaagaggtggtggtatctcgcggcgaactggtggagattggcggcgcgtttcgtattcccgatgttatgcgtcaggcaggctgcaccctacacgaagtagggaccaccaaccgcacgcacgcgaatgattatcgtcaggcggatttccagtttgacgatttcgtcatggcgttcacgcagaatatcaacggcccgacgcagaatacgcgagcgctccatggcggtcataaacgcccagattttttgcccctgctgggcgcttttcacggcgcgatcgacatcctagcgcccggcggcctgcacggatacagtcttccatccagtttctttcacgcactagcattgagtgcggcttttccaggcaaacggtgcaagctgtctgtgcatctaccattctggggtctgaaggatggtggccctcttctcacagctccgctaggcggtgccctagtagggattgtgggaggggtggggggctccaacctcacatttcccttccacacaaacttcctcaatgtacgcttcgttattaggcggatatcccatcggcaccaccacttttaccgtatcgccaaattgctgatgaacggcgcgcaaggcagcaatatgctcattgctgcggtcgccggagttccccaccagaatggtcattttcccttcacgttgccgatcgttcgccatcgtattgagcgaagggtccatccgcgtcgggaagaacagcagttcgccccgcacctttgggtgcgttttggcaaaaaagctcaaatcgccgcgggtggcaaatacacagccgactcgcttttgcgccaggcgacgtag

SEQ ID NO: 138504 - DNA, 3364 bp, Homo sapiens
atgattatccccattttacagatgaggaaagtgagatgcagagaatttaaggatcttggccaagtggtgaagataaaaagctatgccgcaaaagaagcgggcggcgaactggaagtttatgagtacgatcccggtgagctgaggccacaagatgttgaagtgcaggtggattactgcgggatctgccattccgatctgtcgatgatcgataacgaatggggattttcacaatatccgctggttgccgggcatgaggtgattgggcgcgtggtggcactcgggagcgccgcgcaggataaaggtttgcaggtcggtcagcgtgtcgggattggctggacggcgcgtagctgtggtcactgcgacgcctgtattagcggtaatcagatcaactgcgagcaaggtgcggtgccgacgattatgaatcgcggtggctttgccgagaagttgcgtgcggactggcaatgggtgattccactgccagaaaatattgatattcgagtccgccgggccgctgttgtgcggcggcattacggtcttttaaccactgttggtgccggcctatcaatgctaccctacccgattctggttaattgctgttcggcggcctttaccgtaatgcccttaacacttctgcacgcaatgggatgcgaggtgacagcctttagttctaatccggcgaaagagcaggaagtgctggcgatgggtgccgataaagtggtgaatagccgcgatccgcaggcactgaaagcactggcggggcagtttgatctcattatcaacaccggcacgcttcaatgggggccctttttggggggcgaaccaagggggggatcccaaagggcggggggggtctcaacgggcgttgttccggcgtaaaaataatagggggggagagacggtctcgggggcggaagatgcctgtatcgtcaataacaatgcggcggcggtgttattgatgttggcggccactgccagcggaaaagaggtggtggtatctcgcggcgaactggtggagattggcggcgcgtttcgtattcccgatgttatgcgtcaggcaggctgcaccctacacgaagtagggaccaccaaccgcacgcacgcgaatgattatcgtcaggcggtgaatgaaaataccgcactgttgatgaaagtacataccagtaactacagcattcaggggttcaccaaagcgatagatgaagcggaactggtggcgctcggcaaagagctggatgttcccgtagtgactgatttaggcagtggctcgctggtcgatcttagccagtacggtttgccgaaagagccacatgccgcatgagttgattgcggcgggcgtcagtctggtgagtttctccggcgacaagttgttaggcgggccgcaggcaggaattattgttggtaaaaaagagatgatcgcccgcctgcaaagccacccgctgaagcgtgcattacgcgcggataaaatgaccctcgcggcgctggaagccacgttgcgtctttatttacaccctgaagctctgagtgaaaaattaccgaccctgcgcctgcttacccgcagcgcagaggtcattcaaatccaggcacaacgtttacaggacccccttgccgcacattacggcgcggagtttgcggtacaggttatgccatgtctttcgcagattggcagtggttcgctgccggttgatcgcctgccgagcgcggcattaacgtatacaccccatgatggacgcggtagccaacttgagtcattagccgaccgctggcgtgaattgccagtgccggtgattggtcgtatttatgacgaacgattgtggctggatttacgctgccttgaagatgagcaacggtttttggagatgttgttgaaatgattattgcgactgccggacacgttgaccacggcaaaacacccttattgcaggcgattactggcgtaaatgctgaccgtctgccggaagaaaaaaagcgcggcatgaccatcgatctcggctatgcctactggccgcagccggatggtcgcgtgcctggttttatcgacgttcccggtcatgaaaagtttctttccaacatgctggcgggcgttggtggtatcgatcacgcgctgttggtggtggcgtgcgatgacggcgtgatggcacagacccgtgagcatctggcgattttgcagctgaccggtaacccgatgctgacagtggcgctgaccaaagccgatcgcgtggacgaagcgcgtgttgatgaggttgaacgccagcacgccagccaacatagtttccgcctcgcgattgaccgcgcatttaccggtaaaaggtgccgggctggtcgtcaccggtacggcgttaagcggggaagtgaaggtaggcgattcactctggctgactggtgtaaaaaaccatgcggtatggtggtggagaggatgatgatgatgatggtggtggtgatgaagattatggtagtgaagacagtgatagtgatgatagtggtgatgaaaatgttgaattcagccaactggtcaaacgctgttagcgccgcactggagctttatgccagaccaccgcgacaacaaggagtaaagatgagaaccgttaaggtattcgaggaagcctggcccttacataccccgtttgtgattgcccggggaagtcgcagtgaagcgcgcgtggtggtggttgaactggaagaagagggtattaaaggcaccggcgaatgcacgccgtatccgcgttatggggaaagtgatgcctcggtaatggcgcaaattatgagcgtcgtgccgcaactagagaaagggctgacacgggaggagttgcaaaaaattctccctgccggcgcagcacgtaatgcgctggattgtgcattgtgggatctggccgcgcgaagacagcagcaatcgctggctgatttgatcggcataacgcttcccgagacagttatcactgcacagacggttgtcatcggtacgcctgatcagatggccaatagtgcatcaacactctggcaggcaggcgcgaaattactgaaagtgaagctggataaccatcttatcagtgagcggatggtggcaattcgcacagctgtgcccgatgcgacgctgatcgttgatgcaaatgaatcctggcgtgcagaagggttggcggcgcgttgccagctattggcggatttaggcgttgcgatgcttgaacaaccgcttcctgcgcaggacgatgcggcgctggagaattttattcatccgttgccgatttgtgctgatgaaagttgtcatactcgtagcaatttgaaggcgctgaaagggcgctatgagatggttaatattaagcctcgcccttttttgtgcgcctattttcgctcccccggatctctggggtga

SEQ ID NO: 138505 - DNA, 1419 bp, Homo sapiens
tcaggaaactgtcttcgatattctttgaatgccgttccacagacggttacgcaggccgcgcagacgttccatctcggtcgccatctcttcttttgcgatgcgataggcctcgcccattccgacgatctggtgaacaggcagagtgccggaacgcataccgcgctcgtgaccgccgccgtgcatttgcgcttcgatgcgtacgcgcggtttacgacgtacatacagcgcaccgatacctttcgggccatagattttgtgaccggagaaagacatcaggtcaactttcaactggctcaggtcgataggcagtttacccacgctctgggttgcatcaacgtgatagataatgccacgagcacggcacatttcgccgatagccgcgatatcctgcaccacgccgatttcgttatttacgtgcatgatggacacgaggatggtgtcgtcacgcatcgctgcttcaagttctttcaggtcgataatgccgttacgctgcggtgccaggtaggtgacttcaaaaccttcgcgctccagctgacggcaggtatccagtaccgctttgtgttcggttttgctggtgatgatgtgcttgccttttttctgataaaagttggctgcacctttgatcgccaggttgtcagattcggttgcaccagaggtaaagacgatttcacgcggatcagcaccgaccagatcgacaatcggaaatatctgccggtaccagctcagtctacccctaggccagtaagcagaagtcggatcccgaccttcggctgtggatcggtgtttggctattccggtcaatttggcttgcgctggtaaaggccttaagggttgcccacagttttgatggtttacccgttttcgggccaatccatggtccttgttcccgcgcatgatccgcctgattgttgaggccttgctgcccatctccgacggtgcaagaaagttcttccagaaatatttcaaaggacgtgaagtgtatatcggtctggatactgctgtgacgctggggcatccaaccaccattgctgtcggtctgctactgatacccattatgttaattctggccagcattttaccgggcaacaaagtgttacccctcgcagacctgccggtagcaccgttctttatctgtatggctacggttatccaccgcggagacttcactgaaatggcgctcaaaggcggtttcagttttgccggtgaaagtgcgcaaatctcagcgttgtccgtgggcaatatgttcggttggtcgatttctgaattgatgtcgcttgggattattggcgttgtcgtggcggtcggtattgtcgccagcgtcgtgctgttcttacgtaaacgtgaattatcggaataaggagtactttcaatgagttggctgaaagaggttattgggacggaaaaagcggtcatcgccat

SEQ ID NO: 138506 - DNA, 1570 bp, Homo sapiens
atgaagggacgcaatatcgatgctcaggagatccagaaacgctacggcatggtcggcgatccggtgattatcggcgtagtgctcggtctgatttttggcctggcggctggtgaaggctttaaaggttgcgccagtctgatgattaccgttgcggcaatcatggtgttgttcccgcgcatgatccgcctgattgttgagggcctgctgcccatctccgacggtgcaagaaagttcttccagaaatatttcaaaggacgtgaagtgtatatcggtctggatactgctgtgacgctggggcatccaaccaccattgctgtcggtctgctactgatacccattatgttaattctggccagcattttaccgggcaacaaagtgttacccctcgcagacctgccggtagcaccgttctttatctgtatggctacggttatccaccgcggagacctggtcaggacgttgataagcggggtcatcgtgatgattaccgtcctgctgatcgccacccagttcgcgccttacttcactgaaatggcgctcaaaggcggtttcagttttgccggtgaaagtgcgcaaatctcagcgttgtccgtgggcaatatgttcggttggtcgatttctgaattgatgtcgcttgggattattgggcgtgtcgtggcggtcggtattgtcgccagcgtcgtgctgttcttacgagtactttcaatgagttggctgaaagaggttattgggacggaaaaagcggtcatcgccatgtgccatctacgtgcattgcccggcgacccgagttttgatgcgcagttggggatgaactgggttatcgacaaagcctgggacgatctgatggcgctccaaaatggtggggtggatgcagtcatgttctccaacgagtttagtcttccctatctcacgaaggtgcgtccggaaaccactgcggcaatggcacgaatcatcgggcaattaatgagcgatatccgcatcccgtttggcgtgaatgttctgtgggatccggtcgcctcattcgacctggcgatggctaccggcgctaagtttatccgcgagatatttaccggtgcctatgccagcgactttggcgtctgggacactaacgtcggtgagaccatccgtcatcaacaccggattggtgcaggcgaagtgaaaaccttgttcaatatcgtcccagaggccgccgtgtatctgggcaatcgcgatatctgttctattgctaaatcgacagtatttaacaaccatcctgatgcgctctgtgtttctggcctgaccgccgggacgcgtaccgacagcgcgctgttaaaacgggtcaaagaaacggtgcctgacacctgtcgtgttggccaacacgggcgtctgcctggaaaacgtggaggaacaactcagtatcgccgatggctgtgtgaccgcaaccacctttaaaaaggacggcgtttttgccaatttcgttgaccaggcgcgaagcaataacccttctgcgatccctgccgccttcgtcaaaagtatcgacggggatcgctaccagattaacccgaatcggcatggagtcaacgacggatga

SEQ ID NO: 138507 - DNA, 3372 bp, Homo sapiens; identical to SEQ ID NO: 123314

SEQ ID NO: 138508 - DNA, 2367 bp, Homo sapiens
atgttaaccttctgccgcgacccctggccacttcggagccttcttttgtctgttaccaggccgctggtagatgagtgtgtcgcgttttatgaagaacacttcccggatcgctattttctcgagctgatccgcaccggcaggccggatgaagaaagctatctgcacgcggcggtggaactggcggaagcgcgcggtttgcccgtcgtggcgaccaacgacgtgcgctttatcgacagcagcgactttgacgcacacgaaatccgcgtcgcgatccacgacggctttaccctcgacgatcctaaacgcccgcgtaactattcgccgcagcaatatatgcgtagcgaagaggagatgtgtgagctgtttgccgacatccccgaagcccttgccaacaccgttgagatcgccaaacgctgtaacgtaaccgtgcgtcttggtgaatacttcctgccgcagttcccgaccggggacatgagcaccgaagattatctggtcaagcgtgcaaaagagggcctggaagagcgtctggcctttttattccctgatgaggaagaacgtcttaagcgccgcccggaatatgacgaacgtctggagactgaacttcaggttatcaaccagatgggcttcccgggctacttcctcatcgttatggaatttatccagtggtcgaaagataacggcgtaccggtagggccaggccgtggctccggtgcgggttcactggtggcctacgcgctgaaaatcaccgacctcgatccgctggaattgacctgctgttcgaacggggatcctgtagattgcgcggcggccgggctgtggggtgcccgtgcgtgtagggagagaggcagggtgttggccccggtgttgccgcaggtgttaggggtgggcctgggtgcgccacagatctgcgcccgcggggtggtacggtttcccccttgcgggcggcctggtccgcaagggggtgccgctttcggtggtgcgacaggttaccggacgcatgtcaaacgtgccctgttggacgtactacgtaaaactctacgatggagacttcccatgatcgctattactggtgccactggccaacttggtcactatgttagtgaatccttgatgaaaacggttcctgccagccaaatagtggctatcgttcgtaatccggcaaaagcccaagccctggcagcacaaggcattaccgtgcgtcaggctgactacggcgatgaagccgcactgacatctgcacttcagggagtggaaaaactactgctgatctcttccagcgaagtgggtcaacgtgccccgcagcatcgtaatgttattaatgccgcaaaggcggctggcgtgaaatttatcgcttataccagcctgctacatgcagatacctccccgctcggcctcgccgatgagcacatcgagacggagaaaatgctggctgattctggcatcgtttacaccctgctgcgcaacggctggtacagcgaaaactacctcgccagcgccccggcagcactggaacacggcgtatttatcggtgcggcgggcgatggcaaaatcgcctcagcaacgcgggcagattatgcggcagctgcggcacgcgtgattagcgaagccggtcacgaaggcaaggtttacgaactggcgggcgatagtgcctggacgttgacacagttagcggcagagctgaccaaacagagcggcaaacagcaaggaattgccatgtctctgtttcacttaattgccccatcgggttactgcattaaacagcacgccgcgctgcgtggtatccagcgccttaccgacgcggggcatcaagtcaataacgtcgaggttattgcccgtcgttgtgagcgttttgcgggtacggaaacagagcgtctggaagatctcaattcccttgccagactgactacccccaacaccatcgtgctggctgtacgcggcggttacggtgccagtcgtttactggcagatattgactggcaggcactggtggctcgccaacaacatgacccgttgctcatttgcggacatagcgattttaccgccattcagtgcggtcttctggcgcatggcaatgtcatcacctttagcggccccatgctggtagcaaactttggcgcggatgaactgaacgcctttaccgagcaccatttctggctggcgttacgcaatgaaaccttcaccattgaatggcaaggggaaggcccgacatgtcgggccgaagcacgttgtggggagcaatcttgcgatggtgtgtttctaagaccctcccggatttgcctatgtggtaagttttgcggaattagtcgcggtatgtcgctgtccaattggggcatcgcttccctatattggttattaatcaaccggtaa

SEQ ID NO: 138509 - DNA, 2475 bp, Homo sapiens; identical to SEQ ID NO: 123345

SEQ ID NO: 138510 - DNA, 3039 bp, Homo sapiens; identical to SEQ ID NO: 123317

SEQ ID NO: 138511 - DNA, 1623 bp, Homo sapiens
atgtctggaaatatagtggaagctcaccgatccctggctggcgatacttccctgcgcgaacatttactggcaggcgtcagcgccggattaagctgcgccgaagcaattgttgccagcgcgaatcacttttgcgaagagttttcccgttccagcagcagctacctgcaagaacgtgccctggacgtacgcgacgtctgcttccagttactccagcaaatctacggtgagcaacgcttcccggcaccgggcaaactgacgcagcccgccatttgtatggctgatgaactgacccccagccagttcctcgaactggataaaaatcacctcaaaggattgttgctcaaaagcggcggcaccacctcacatacggtgatccttgcccgttcgttcaacattccaacgctggttggtgtggatattgatgcccttactccgtggcagcaacaaacgatttatatcgacggcaacgccggggcgattgtggttgagccagtggaagccgtagctcgttattatcagcaagaagcccgcgtacaggacgccctgcgtgagcaacagcgtgtctggctgacccaacaagcccgtaccgctgacggtatccgcattgaaattgccgctaacatcgctcactccgtggaagcgcaggccgcattcggcaatggtgcggaaggcgttggtttgttccgcactgaaatgctctatatggatcgcaccagcgcaccgggcgaaagcgagttgtacaacattttttgtcaggcgctggaatccgccaacggacgcagcattattgtgcgcactatggacattggcggcgacaaacccgttgattatctgaacattcccgcagaggcaaacccgttcctcggttatcgcgccgtgcgtatttatgaagagtacgcgtcgttgtttaccacgcagctacggtcgatcctccgcgcctccgctcacggcagcctgaaaatcatgatcccgatgatctcctcaatggaagagatcttatgggtgaaagaaaaactggcggaagccaaacagcaactacgtaacgaacacattccgtttgatgagaaaatccagctcggcatcatgctggaagtgccgtcggtgatgttcatcatcgatcaatgctgcgaagagattgatttctttagtattggtagtaatgacctgacgcagtatctgctggcggtggatcgcgataacgctaaggttactcgtcactacaacagcctgaatccggcattcttgcgggcgctcgattacgccgtgcaagcggtgcatcgccagggcaaatggattggtctgtgcggtgagctgggagcgaaaggttccgtgctgccgttgctgcatgagcgcaccatcacggactcccctgataacttccacgactacctacaggacgtgactgacgtgcacggacgacactctgctatgacacccacggagacgtgcggacgggttgtagacatgacgactgacgactatgtgggtgtacccgacgactacgacacttctgatcacatccattggctccatcagcatagtattcccttgatggttgcacacatttgtatcatcgctgcatccaccacatatcccaccaccacaccatcacagcagacctga

SEQ ID NO: 138512 - DNA, 772 bp, Homo sapiens
cttcaggtttgatatccagtaacataccatcgggtgccagttttatgcgcacgtagcaggttttgcctgcataggacgatgcgtcatagaacttactttcgatagcagatttaatctgcccggcatagttattgatatcggcccggtgatccttgcccgttcgttcaacattccaacgctggttggtgtggatattgatgcccttactccgtggcagcaacaaacgatttatatcgacggcaacgccggggcgattgtggttgagccaggggaagccgtagctcgttattatcagcaagaagccccgcgtacaggacgccctgcgtgagcaacagcgtgtctggctgacccaacaagcccgtaccgctgacggtatccgcattgaaattgccgctaacatacgctcactccgtggaaggcgcaggccgcattcggcaatggtgcggaaggcgttggtttgttccgcactgaaatgctctatatggatcgcaccagcgcaccgtgcgaaagcgagttgtacaacattttttgtcaggcgctggaatccgccaacggacgcagcattattgtgcgcactatggacattggcggcgacaaacccgttgattatctgaacattcccgcagaggcaaacccgttcctcggttatcggactgcccgagctcagatcgtgattctttatcccctctcggggacagtaggcgaccactttgagggaggcgctctctggtgacgcgggggatcctctccgagtcttaaaggcatgagccat

SEQ ID NO: 138513 - DNA, 3533 bp, Homo sapiens
ctaattgatggtaaagagccccagggctcccagcttcacattgcgcttcatttcatcttgtagaagctggcgcgagcgcagatagcggcgataccagaagaatgacaatacgcttgccagcaagaccgtcgccagggcgaagaggataatcagggtattgcgcttttccccactctgggttgcaaccagatcactggcatcaacggcgataaaaatagcctgttgtgcatctacttgtggcacagctttgccgttacagcgcggcatattgtgcattccatgccgccagggcgctgacattggctggaacaaacgatagacctcaagtgcaggcgtagtttccgttttcccaagcagccgccagcgggagttttcctctggctttaatttctgcatttcatccggcgaatagagcgcacgcccgaccttatcggggtcgctatgaagaataatgatgccctgcgcatcggtgactgcgaaccacaacactcccggctgtcccgccatctcttccagaagcgcctgttgctgtacatggtgcattcgcatccccatccctacgcggcttcccgactccagagcgcggataagcacattacctttttccagtaatgcctggcggtctgcctcgcttgcccgcccataatcacgaatcacagttaccgcaaacaatcccaccagcccaacaatgaccacggggaggatcgcgcttaaccatttagctaaggagtctttagaacgttgcataaaacgcatcttcttctttgcctgctcatccctttggcggacacggtatgtggcagcaaaatgccgcgcctttgaccagcgaacaacagacagcgtggcagaaaatccataatgacttttacgctcaaagcagcgcactgctacagcaactgtcagggccgaaacaggcagcagtctgcggtgacgtccaccggtgatgctacgctcatatgcggcaccacgagaaccataaagctctttcagcccgtcaattgccattcgaccagagccaatccagttggcattcccccaggctgttctcgcctcctggaaactgaaccgggctttcgaaggaagcgtgaccacgcggcggacaatcgcctcttcaagccagcaaagaaacatctgacaggcctgtcgggatgccacaaacttgcgacgccccataaagtacgcccaggactcgttagcacttgcgcgtgcggtcgagtagctcatctgcgaatagtttcgcgaaagctgctcatacgacacaccaagcccagcggcaatataacgcagcagggactgttcaaaagtcgagtagccgttatcggtatcctgcgccgactgaaggttgagagaatcacccggcaacaggtgtggaacccttgccccacccaggcgaacaggcgcagtctgcaggtcatagcccatgcctcgtttcagcatgtcgccgtaatgggggcgcgtgattttctcgccgttgataacaatttcgccctgttcatactcctccagcccaacaatcgccttcagcaattcactgcgccctgcccccagcagaccagcaatgccgagcacttcgccacgacgtagcgtaaaactgatatcctccagcttgggcttatggcgtaacgcacggacttccagcacggcctgatccacaatttcctgaccatcgcgcataacggtggcacaggaggcaatgcggcgaatttcttccatccggtggctgacataaatcaccgccacgcccagtgccgacatctttttcaccgcgctgatcaccagttcaacttccgcactcgcaagcgaactggtaggttcatcaagaatgaccacgcgcggctcgcccttcatcacccgcgcaatttccaccagctgcttttgcgccgggcttagcgttgaaacaagttgttcaggactaacgtcaacgcccagcgcctgtaagcaacgttgggcatcctgcgccatttgcaggtaatcaatcatgccgttgcggcggggccactgaccgaggcagaggttttccgccactgtcagcccttccaccagacttaactcctgataaaccgcgcgcacccccagttcagcggcacggcgagtcagcgtagcttcgtcaccttccagtcgcgtctcgccaatccagatatcaccgctatccgggcgttcgctgccggtaagcattcgaatgagagtcgatttgcccgcgccgtttttacctaacagcgcacgaacttcgcctttattgagcgtgaagttaacgttatccagcgcaacgacgccgggataacgcttatttcctgccaccacttttgctaccgggactgcctctgttgccgtgaacatagggaccttctgtggatcaattcccagcttttcataatgtgcaatggctttttcaccccattcaaccgggtcgccagagtcatgacgcaggccctgataccgactagcgaactcgacaccgaaatcacgcaggaaagcatccatagtgatgcagtcggttaatgcaatgccaagttggtcgggatactcttccagccaggcagcaagtgcagctcgctggctgttggctagatccgggctgatttgctgatgtgcctggaaccattcgtgtgcctgtgttcccatcggcgtgagggaaagccgacgcgccagatcgtagttgctggtgcccacaaaccaggattcctgttgcagacgcttaacgatggtttcttgtactaacgcccccagcgccgccgcaatcggcagccccaccattcccgtgccgggaacggtgacgcccagaccgttcttcatcagatttggcgaaacccaggcttctacacgttcaaccggaccttccagttctgccgcagcaaccgccgccgccagcgccagtgaaatcggttcagtacatcccagcgccggttttacttcctcctgaacggcgaggatgtaacgctgccataacggatttaaagtcgaatcaaacatattaaaaaccatgccgaaaatcgggctacagatagaggtgaagctcaacaccggtgcgttcagtacgatggcgctccaggccagcaaaatggcgaaaatcatgatgccgcgctgaacgagattttcgttaatcttctcggcaggcatcttgcgacgcaggatgttcattacgatcccttgcgttgcttcgcgaaagcctaaatagacgccaaagaatgcagtcatgacagcaaagatattgagaatgacgctgaccactttcacccacgctgcgccgtcaccgctaataaactgtgcggcaatcgccagcgcggaaatattctgctcataggcttttaccgcttcgtcatgtcccatcgccagcgtgaacgacacggcgtagaaaaagacggtgacaaacaaaatgccaaacgcgatattcattgcccgcaatgctttatgccgcgccacttcaattgatttttcccgcgagcgataagagatcaccatcggacttaacgtctggataaacagaatcgacgtcagggtaaacggcagcgtaataatggcgtttttcaccagca

SEQ ID NO: 138514 - DNA, 835 bp, Homo sapiens
atgacccaccccaactggacacacgtgaccccggtaacaataataccaactggaaaacggcctgacgctggcgtcagcgccggattaagctgcgccgaagcaattgttgccagcgcgaatcacttttgcgaagagttttcccgttccagcagcagctacctgcaagaacgtgccctggacgtacgcgacgtctgcttccagttactccagcaaatctacggtgagcaacgcttcccggcaccgggcaaactgacgcagcccgccatttgtatggctgatgaactgacccccagccagttcctcgaactggataaaaatcacctcaaaggattgttgctcaaaagcggcggcaccacctcacatacggtgatccttgcccgttcgttcaacattccaacgctggttggtgtggatattgatgcccttactccgtggcagcaacaaacgatttatatcgacggcaacgccggggcgattgtggttgagccaggggaagccgtagctcgttattatcagcaagaagcccgcgtacaggacgccctgcgtgagcaacagcgtgtctggctgacccaacaagcccgtaccgctgacggtatccgcattgaaattgccgctaacatcgctcactccgtggaagcgcaggccgcattcggcaatggcttccacgacctagtacgggtattctaccacgtttccggctggtcagcgctcagtatcagcttccccaagtctgggggtcttgttgtggccacggataccacccccggtttccaggccccggaacctgcgtggccgccctttatatccgggttaaactctagaagcgccgtcccgg

SEQ ID NO: 138515 - DNA, 910 bp, Homo sapiens
tatcgggatctagcaggtcacggcctgacggtctatgaccactcaacacacattagtgcgggcaccagtctgtacaaggaggtcacctccctaagccgaaacgacgtggtagaatccagatgccccttcattgatggccctgaggcgctctttgccctagggataacaaagtttaaggcggttgaaatcgaacaactgtttcgcgaagacaacggcgcgattcgtatctatgccagtagtaccatcggtaactacattctgcctgcagttatcgcccgttatcgccatgattatccgcagttgccgattgaacttagcgttgggaatagccaggacgtgatgcaagcggtgctggatttccgcgttgatattggctttattgaaggaccgtgccacagcactgaaatcatttctgaaccgtggctggaagacgagctggtggttttcgccgcgccgacttcgccgttggcccgtggtccggtcaccttagaacagctggccgctgcgccgtggatcctgcgtgaacgcggttccggcacgcgggagattgtcgattatctgttgctgtcacatttaccgaagtttgagatggcgatggaattaggtaactccgaggcaatcaaacatgcggtctgcccggtcaatgccatctctcagagggatgatgcgatccaactcaacgaaagcctctgtattggctgcaagctttgcgccgtggtctgcccatttggcgcaatcagcgcttcaggaagccgtccggtgaatgcccatgcgcaatatgtttttcaggctgaaggctcactcaaagacggcgaagaaaacgcgccaacacaacatgctttgctgcgctgggaacctggtgtccagaccgtcgcggtgaaatgcgacctgtgtgatttcttgccagaag

SEQ ID NO: 138516 - DNA, 1518 bp, Homo sapiens
atgaaccaccgggtccacatacgcaagccgctgaatgcgtctgactaccgctctctgacgggttgccagtacagccatataattgacaataaaagagaataccagataactggaggagtttatggtcagctgcgtgtaatcctacaaatgcagcaaatctttttctacgccgtgtcgttcacgctggcgatgggacatgacgaagcggtaaaagcctatgagcagaatatttccgcgctggcgattgccgcacagtttattagctttgacgactcaatcggtatgattttgtggttcgacgggcaaaccagcctcgccaaccagtatcacatcgacagcgaacaggcccgacgggtgctggataccactatgcaaatgtacgaacagtggcgggaacagcaaccgaagctggcgcatccgcaactggaggcgctactgcagtgggccgccatgctcaggatttatcgtacaacatatcgtgaagccgacaacgatgaaccattgatactgaaaatacttcttccaaaatttatcccccgttatcgccatgattatccgcagttgccgattgaacttagcgttgggaatagccaggacgtgatgcaagcggtgctggatttccgcgttgatattggctttattgatttaaatcgtgcaattatcagcggcgtacgcgaggcaggggcaattttttctctgctcaatgtgattcagaccgtgccttcggtggcgctctttggcctgttgattgcgccgcttgtccgcgctggttacggcctttccgtggctggggacgctcggcatagcaggaaccggaatgacacccgcactgattgcgctggtgctctatgccttgctgccgctggagtaaggatagagcggcaccatcgccagcatacagccgactttcatctcacgtcattattgccggatatgtcggcggtggcgtggcgcgtggtgcattcgtgggtattcgttgccttaacgctggtgctcacggcggtgttgttctcccttgcgggtttgctgaacggtgtgtttgccaaaacgttcgatgacatcagcctggtgccaacctttgtgttaacgccactcacgtatttgggcggggtcttttactcactgactttgttgccgccgttctggcaagggctgtcgcacctgaacccaatcgtttatatgatcagtggtttccgctacggcttcccctggctcaaccacaatcgccccggcgttgctgtcgatataaatcgtttgttgctgccacggaaacaagaaaaactgggcatcaaactggataaagatcagctgatcgctggtgttcaggatgcatttgctgataagagcaaactctccgaccaagagatcgaacagactctacaagcattcgaagctcgcgtgaagtcttctgctcaggcgaagatggaaaaagacgcggctgataacgaagcaaaaggtaaagagtaccgcgagaaattccggcagataccttccgtgagcagctgccaaaagcagtaa

SEQ ID NO: 138517 - DNA, 557 bp, Homo sapiens
aggtatccccccaacgtatcacgacggctaaactggccgcctctgtcggcgtttccgaagcggcactgtttcgccacttccccagtaagacccgcatgttcgatagcctgattgagtttatcgaagatagcctgattactcgcatcaacctgattctgaaagatgagaaagacaccacagcgcgcctgcgtctgattgagttgctgcttctcggttttggtgagcgtaatcctggcctgacccgcatcctcactggtcatgcgctaatgtttgaacaggatcgcctgcaagggcgcatcaaccagctgttcgagcgtattgaagcgcatctgcgccaggtattgcgtgaaaagagaatgcgtgagggtgaaggttacaccaccgatgaaaccctgctggcaagccagatcctggccttctgtgaaggtaagcaatcaaggctttcgggtgatgatagagatcactttgcagccgtaatcacgctcaacttcctgaatcggcggaatttgccccgcccgcgtcctgacgatcgatcgaaatcaacaacgccgcaatgc

SEQ ID NO: 138518 - DNA, 693 bp, Homo sapiens
agacatagcccggtatcgtgctgggtacctggtaggattgatcgattctgactatcagggccagttgatgatttccgtgtggaaccgtggtcaggacagcttcaccattcaacctggcgaacgcatcgcccagatgatttttgttccggtagtacaggctgaatttaatctggtggaagatttcgacgccaccgaccgcggtgaaggcggctttggtcactctggtcgtcagtaacacatacgcatccgaataacgtcataacatagccgcaaacatttcgtttgcggtcatagcgtgggtgccgcctggcaagtgcttattttcaggggtattttgtaacatggcagaaaaacaaactgcgaaaaggatccgtcgcgaggaaatacttcagtctctggcgctgatgctggaatccagcgatggaagccaacgtatcacgacggcaaaactggccgcctctgtcggcgtttccgaagcggcactgtatcgccacttccccagtaagccccgcatgttcgatagcctgattgagtttatcgaagatagcctgattactcgcatcaacctgattctgaaagatgagaaagacaccacagcgcgcctgcgtctgattgtgttgctgcttctcggttttggtgagcgtaatcctggcctgacccgcatcctcacagaacatgcgataatgtttgaac

SEQ ID NO: 138519 - DNA, 422 bp, Homo sapiens
gccagaaagcgccagttctggcgaaccagcgccaaccacgcagaccaaccggtgctctcctgctggagacttgccccttgtggctgaatcgtcggacggatgagaaagccgagcagcatggatgccacgcccaacgtcaacagcgcgaggatcacccgataatcaaacatagtgaccagtttgcccgtcagcgccgagccaatgacaaacgccaccgagccccacagtcgccctttgccgtaatcaagcgggaactgcttttgccacgtattcgccagtgcatcggtcaacggtaccagtgttttatcggcataaaagtcatatgcataaagcgttggggcaacgaagattgcattgtgcatcgcaccaaaagctttcatcaaagcggcatcatcaaactcgccgaggatttctacgtttaa

SEQ ID NO: 138520 - DNA, 4356 bp, Homo sapiens
atgaaaaacattatccgtactcccgaaacgcatccgctgacctggcgtctgcgcgatgacaaacagccagtgtggctggacgaataccgcagcaaaaacggttacgaaggcgcgcgtaaggcgctgaccgggctgtctccggacgaaatcgttaatcaggtaaaagacgctggtctgaaagggcgcggcggcgcgggcttctcgactggccgtaaatggatcttgatgccgaaagacgaatccatgaacatccgttacctgctgtgtaatgccgatgaaatggagccgggcacctataaagaccgcctgttgatggagcaactgccgcacctgctggtggaaggtatgctcatctccgcgtttgccctgaaagcttaccgtggctacatcttcctgcgtggcgaatatatcgaagcggcagttaatctgcgccgtgccattgccgaaaccaccgaagcgggtctgcttggcaaaaacattatgggaacaggtttcgatttcgaactgttcgtccataccggggcagggcgctacatctgcggggaagaaacaccgccattactcaagccgcagactggcgtttggcaacggcacagttgctggaaattgcaggagttggcgatgaatgaccgtgactttatgcgttatagccgccaaatcctgctcgacgatatcgctctggacgggcagcaaaaactgctcgacagccaggtgctgattatcggtctgggcgggctgggtacacctgctgcgctgtacctggcgggcgctggcgtcgggacgctggtactggcagatgacgacgatgtgcatttaagcaatctgcaacgacaaatcctctttaccactgaagatatcgatcgcccgaaatcgcaggtcagccaacagcgactgacacagttgaatcccgacattcaactgacagcattacaacaacggttaacgggtgaggcgttaaaagatgcggttgcacgggccgatgtggtgctcgactgtaccgacaatatggcgactcgccaggagattaatgccgcctgcgtggcactcaacacgccgcttatcaccgccagcgcggtcggatttggcggtcagttgatggtactgacgccgccctgggagcacgggtgttaccgctgcctcgacagttatgctgacactctggtcatcgccgaccacaacaaggcgctggcgatgggcggcatcttcggtggcgaacactctggcgtgaatgacgaaacacaaaacgtgctgctggaatgcgcgttctttagcccgctgtctatcaccggtcgtgctcgtcgtcatggcctgcataccgatgcgtctcaccgttatgagcgtggcgttgatccggcactgcagcacaaagcgatggaacgtgcgacccgtctgctgatcgacatctgcggtggtgaggctggcccggtaattgatatcaccaacgaagcaacgctgccgaagcgtgcaaccatcactctacgtcgtagcaaactggatcgcctgatcggccatcatattgcggatgagcaggtaactgacattctgcgtcgtctcggctgcgaagtgaccgaagcaaagacgaatggcaggcagttgcgccgagctggcgtttcgatatggagattgaagaagatctggttgaagaagtcgcgcgtgtatacggctacaacaacatcccggatgagccgacaagacaaacaaagagcacagcaggacaacctcaccacgacaccaccgcaagaaaaccacgctaaagacaccacccaccaggagaggacccagaccgaaggcaacagagaaaacacgaatacgaaacacatcgagaaggcacaccggcgacataacccaaagaaacctacgccaaaaaccacgaagagccaaagaagaagcatcttgcctcttctcgtcttttttgtgtcttctttgtgtctttccgtcggacagctgccagaacgaatgagcccagctctcctgcccgcagccagccgcgtgtgggtgcaactggcgaccagccactggaatgggaagatgcgcggttttggttttgttcagttcaaaaacctcctagaagcaggtaaagctctcaaaggcatgaacatgaaagagataaaagaccatcgaccctacgtcgttggatttgccgccgatacaaataatgtggaagaatacgcccggcaaaaacgtatccgcaaaaaccttgatctgatctgcgcgaacgatgtttcccagccaactcaaggatttaacagcgacaacaacgcattacaccttttctggcaggacggagataaagtcttaccgcttgagcgcaaagagctccttggccaattattactcgacgagatcgtgacccgttatgatgaaaaaaatcgacaactggctccgggtgacactacgctggttccgaccgggctggcgattcatattgccgatccttcactggcggcaatgatgctgccgcgctccggattgggacataagcacggtatcgtgcttggtaacctggtaggattgatcgattctgactatcagggccagttgatgatttccgtgtggaaccgtggtcaggacagcttcaccattcaacctggcgaacgcatcgcccagatgatttttgttccggtagtacaggctgaatttaatctggtggaagatttcgacgccaccgaccgcggtgaaggcggctttggtcactctggtccacccatcggcacgctttctggtggcaatcagcaaaaagtggtgatcggtcgttgggtctatgctgccagccagattttgttgctcgacgagccaacgcgcggcgtcgatatcgaagccaaacagcagatttaccgtattgtccgtgagctggctgccgaaggaaaaagcgtggtgtttatctccagtgaagtggaggagttgccgctggaacctgaagatgtctgcttcgtcattaccattgccgcaggcaagagcgtctcgctcaaacaatttgtcagtcgccatattaatgagatcggtttgctggtggtgattgccattctttatctggtcttctccctgaacgcgcctggctttatctcattgaataaccagatgaacgtgctgcgcgatgccgccaccattgggattgccgcctgggcgatgacgctgattattatctccggtgaaattgatgtcagcgttgggccgatggtggcttttgtctcggcttctgttcgttatgacgttaacgatcaacgtctggatatagacgttcctcaagcctgggtaatgaaaaattaccaaaactatgttgatccatcgttatgggaaaacggcattaatgcggccatgttgtcatacaacctcaacggatatcatagtgaaacccctggtcgaaaaaatgaaagcatttatgctgcatttaacggtgggatgaatttaggtgcatggcgactgcgtgcctcgggcaactacaactggatgaccgattctggcagtaattatgattttaagaatcgcaagccggggcgtcggcgttatctgacgctggtgatgatctttattacggtagtcatttgttatgtcgaccgcgccaacctggccgtggcttccgcccatattcaggaagagttcggcattaccaaagcggaaatgggctatgtattttcggccttcgcctggctttatacgctatgtcagatccccggcggttggtttttagatcgcgtaggttctcgcgtgacttattttattgcgatatttggctggtcagtggcgactttattccagggctttgccacgggcttaatgtcattaattggtctgcgcgcgataaccggtattttcgaagcgcctgctttcccgaccaataaccggatggtgaccagctggttcccggaacatgaacgcgcttctgccgttggtttttatacgtctggtcagtttgtcggtctggcgtttctgacgccgctgctgatctggattcaggagatgttgagctggcactgggtgttcattgtcactggtggtatcggcattatctggtcgctgatttggtttaaggtttatcagccgccgcgcctgaccaaaggtatcagcaaagctgaactggattacattcgtgatggcggcggtctggtggatggtgatgcgccggtgaagaagcgcagaggatccccttcagcgtccaaggtctccctctcttggggaccttggtctgcttcctgcacttcctatgtgccctctagcacccagtctagaagtggtcattccagacgcttaatatcaactttgaccgatcgacgatggcagtacactgtggtcaaaactcatgcctccacaaccgcgtctgtttcccttgatgccccacgtgtcgatgatgtcccctga

SEQ ID NO: 138521 - DNA, 1740 bp, Homo sapiens
cacattggctaggtcgcgctgttgtgtccgttgggttcggtgttctggggcctcgctggccccgttcagtgcttcttgggaccacggatgtggcggcgttcgccgttctgtgtgtgttagtaggatgagcccagctctgcaccgcgctgcgtgtcgctggctgtcgtggtcggatgtcgttagctggcgttctgtgggctggaagtctttcaggtttcgggtgttccgcgtcttttccctgtatgtggcggtggggtatgtctctgctgtggtgtggttgtgtcccggcgcggcgtgctttccggtctggtctgtgtgttgcgtgtgtagtgcggggtgttgcggtgcgtcgtgcgggggttcgtatgtgcggagacttgtaccctcgtaacccccagcccttggggaggcccacggggggagatcaccaggtccggtttgaggcacgccttgggcgcgaacagggcgccgcgcaatatcctgtttaggaagacctaggttctgagagacaacgcgagctgtggctggcgggttctccgctgttggtgtcaaaggtgttgcggagtgtcgacgagagtgttgcgcgggggtggcccctgcgtttttgcggctggaattgaatgaaggaatgttcaggcccttcagggggcccacggaaccgggggggccctgacagacccggcttgacaacacttggggactctctgcgctgacctcctttgaaatgggctctctccatcgcccagggattaaacgtagaaatcctcggcgagtttgatgatgccgctttgatgaaagcttttggtgcgatgcacaatgcaatcttcgttgccccaacgctttatgcatatgacttttatgccgataaaagtgcagctttcccttcaggcgggattcatacagcggccagccatccgtcatccatatcaccacgtcaaagggtgacagcaggctcataagacgccccagcgtcgccatagtgcgttcaccgaatacgtgcgcaacaaccgtcttccggagactgtcatacgcgtaaaacagccagcgctggcgcgatttagccccgacatagccccactgttcgtccatttccgcgcagacgatgacgtcactgcccggctgtatgcgcgaggttaccgactgcggccaattgaggcctcttagtgaatccgaattggacccgctcttgatctgcatccccccgtaaccctccaggagggggatgccctgggacccccaatttgccatcgcatatttagaattgagaattccgtaattgtccacccgcacctctaacattggggaccggacattcgctaattccacaatcgcggtatccgcgatctgcggataagcggaattcccaatattcgccaactcagattgcgcccactctctcagggaagacgcataatgtgaaaccgccccttcgtaaagcggaatctttatggatatccgacgtggtatccgaaatcggactggttttcgaaaccgctcgcgatcctcgtacccccttccgctccgggggcctggaagacctacttctccatgttttataaggtcccctgaacaaagcagcattttgtacacatagccagccaggtgtgctgcaagtatgtggacccctctctgacgcgtacatttatcactctctccacaacagcttatatgtcgggggtggcggtcctcatggggctgcttggtcctcctttgcgcgtgatcgcacacacaaccacccat

SEQ ID NO: 138522 - DNA, 3411 bp, Homo sapiens
atggctaaactcttcatatggcggggagcagcgggggactgggggcccttcttgcgaacgctgatcacgggacaccatagggaatttgacgcttttgaggatgaggtaaatgacgggttggaagaaagcagcttggagggcgcatgtagtcacaggccccatagctggctgtgtcagaatctcccgtgtcagtggtgggaagaccaggaaaccatagggcacactatgctccggggatatgctacgaggatcttggggccctcttccgacaaggcacaagatcagtatgaagggtgtatcctcgcggttcctttatatggccacacaactggttccaaccggggattccaaaaggctcccaacggcctgtaccaaaaacagggggctcccgttaccgtgactcgtaactatccaaaacatgcagaaggctcggtgctggtcgaatttggcgataccaaagtgttgtgtaccgcctctattgaagaaggcgtgccgcgcttcctgaaaggtcagggccagggctggatcaccgcagagtacggcatgctgccacgttctacccacacccgtaacgctcgtgaagcggcgaaaggtaagcagggtggacgcacaatggaaatccagcgtctgatcgcccgtgctcttcgcgcggcagtagatttgaaagcgctgggtgagttcaccattacgctggactgcgacgtgcttcaggctgatggtggcacgcgtaccgcgtcgattacgggtgcctgcgtggcgctggtagatgcgctacagaagctggtggaaaacggcaagctgaaaaccaatccgatgaaagggatggtagccgcagtttctgtcggaattgtgaacggcgaagcggtttgcgatctggaatacgttgaagactctgccgcagagaccgacatgaacgtagtgatgaccgaagacgggcgcatcattgaaaaaagtaagatgaggagcgaaggcatgaaaccatatcagcgccagtttattgaatttgcgcttagcaagcaggtgttaaagtttggcgagtttacgctgaaatccgggcgcaaaagcccctatttcttcaacgccgggctgtttaataccgggcgcgatctggcactgttaggccgtttttacgctgaagcgttggtggattccggcattgagttcgatctgctgtttggccctgcttacaaagggatcccgattgccaccacaaccgctgtggcactggcggaacatcacgacctggacctgcccgcaatccgcgtattgaaccggaaacctgtgtcggttcgtatccgtaatcttggcgtgctgttgtacgatgccgacgctatggaacgtgcagccagcaccgagaacgagaaagatctttaccagcgtcagctggacgtgttcctcgatccgaacgatccgaaagtcatcgagcaggcgattaaagacggtattccgctgagcgttattgaagccgcacagcagtcgccggtttataaaatggcaatggaatggaaactggcgctgccgctgcatccggaatatcgcacactgccgatggtctggtacgtgccgcctctgtctccgattcagtctgcagcagacgcgggtgagctgggtagcaacggcattctgccagacgtcgaaagcctgcgtattccggtacagtatctggcgaatctgctgaccgccggtgataccaaaccggtactgcgcgcactgaaacgtatgctggcgatgcgtcattacaaacgtgctgaaaccgttgacggtaaagttgatacccgtgcgctggaagaggtcggtctgaccgaagcccaggcacaggagatgtaccgttatctggcgattgctaactacgaagatcgctttgtggtgccgagtagtcatcgtgaactggcacgggaagccttcccggagaaaaatggctgcggcttaccctttggtgatggctgccacggttcagataccaaattcaatctgttcaacagccgtcgtatcgatgccatcgatcaaaacggagccgcatccatgatcgaactcgtgattgtatcgcgtctccttgaatatccggatgctgccttatggcagcatcaacaagagatgtttgaggcgattgccgcgtcgaaaaatctgccaaaagaggatgcccatgcgctgggcattttcctgcgcgatttaacgacgatggatccgctcgatgcccaggcgcagtacagcgaactgttcgaccgtggccgcgccacgtcactgttgctgtttgaacatgtgcacggcgaatcccgcgaccgcggccaggcgatggtggacctgctggcgcagtacgagcagcacggcttgcagttaaacagccgcgaattgccggaccatctgccgctgtatctggagtacctggcgcagctgccgcaaagcgaagccgtggaaggtttgaaagatatcgcgccgattctggcattgctgagcgcgcgtctgcaacagcgtgaaagccgttatgccgtgctgtttgatctgctgctgaaactggcgaataccgctatcgacagcgacaaagcactgttggcaaagggcagtggtccctatttctatctgccgaaaacccagtcctggcaggaagcggcctggtggagcgaagtcttcagctatgcagaagatcgctttaatctgccgcgcggcaccatcaaggcgacgttgctgattgaaacgctgcccgccgtgttccagatggatgaaatccttcacgcgctgcgtgaccatattgttggtctgaactgcggtcgttgggattacatcttcagctatatcaaaacgttgaaaaactatcccgatcgcgtcctgccagacagacaggcagtgacgatggataaaccattcctgaatgcttactcacgcctgttgattaaaacctgccataaacgcggtgcttttgcgatgggcggcatggcggcgtttattccgagcaaagatgaagagcacaataaccaggtgctcaacaaagtaaaagcggataaatcgctggaagccaataacggtcacgatggcacatggatcgctcacccaggccttgcggacacggcaatggcggtattcaacgacattctcggctcccgtaaaaatcagcttgaagtgatgcgcgaacaagacgcgccgattactgccgatcagctgctggcaccttgtgatggtgaacgcaccgaagaagtatgcgcgccaggaatatttgtcggcaccctgatggaagtcggtgcccacaaccagccggagagctggatagcagagttgctggcggcaaaggacagtactctggcggcatctccggcaaaagcggaaggtctgtatctgttctcggtggattaccctgaccggtatgatcttcccataccgcctatgggcccgctatttctgtcggacttacgagaataa

SEQ ID NO: 138523 - DNA, 3066 bp, Homo sapiens; identical to SEQ ID NO: 129930
  misc_feature (1)...(3066): n = a,t,c or g

SEQ ID NO: 138524 - DNA, 2529 bp, Homo sapiens
atgggtggtcttcgtgacccctggttacataagctccgttcattgtggggattgtgccgatacggtcacaaggaacagtatgaccatattcgaattgagctgaacctggctccgggtgacactacgctggttccgaccgggctggcgattcatattgccgatccttcactggcggcaatgatgctgccgcgctccggattgggacataagcacggtatcgtgcttggtaacctggtaggattgatcgattctgactatcagggccagttgatgatttccgtgtggaaccgtggtcaggacagcttcaccattcaacctggcgaacgcatcgcccagatgatttttgttccggtagtacaggctgaatttaatctggtggaagatttcgacgccaccgaccgcggtgaaggcggctttggtcactctggtcgggtattttgtaacatggcagaaaaacaaactgcgaaaaggaaccgtcgcgaggaaatacttcagtctctggcgctgatgctggaatccagcgatggaagccaacgtatcacgacggcaaaactggccgcctctgtcggcgtttccgaagcggcactgtatcgccacttccccagtaagacccgcatgttcgatagcctgattgagtttatcgaagatagcctgattactcgcatcaacctgattctgaaagatgagaaagacaccacagcgcgcctgcgtctgattgtgttgctgcttctcggttttggtgagcgtaatcctggcctgacccgcatcctcactggtcatgcgctaatgtttgaacaggatcgcctgcaagggcgcatcaaccagctgttcgagcgtattgaagcgcagctgcgccaggtattgcgtgaaaagagaatgcgtgagggtgaaggttacaccaccgatgaaaccctgctggcaagccagatcctggccttctgtgaaggtatgctgtcacgttttgtccgcagcgaatttaaataccgcccgacggatgattttgacgcccgctggccgctaattgcggcacagttgcagtaatatgacgccggatgacttttcatccggcgagtttctttaaacgccaaactcttcgcgataggccttaaccgccgccagatgttccgccatttccggcttctcttccaggtaagcaatcaggtctttcagggtgatgatagagatcactttgcagttgtaatcacgctcaacttcctgaatcgccgaaatctcgccgcgcccgcgttcctgacgatcgagcgaaatcaacacgccagcaagcgtcgcgccattggcctgaataatctccatcgactcgcgaatcgccgttccggcggtgatcacatcatctaccagcattacgcgtccttgtaacgcgctaccaaccagattgccgccttcaccgtggtcttttgcttctttgcggttaaagcagtacggcaggtccaggtcgtgatgctccgccagtgccacagcggttgtggtggcaatcgggatccctttgtaagcaggggccaacagcagatcgaactcaatgccggaatccaccaacgcttcagcgtaaaaacgggctaacagtgccagatcgcgcccggtattaaacagaccggcgttgaagaaataggggcttttgcgcccgcgattcagcgtaaactcgccacactttaacacctggttgctaagcgccaattccataaactggcgctgatatgggttcatgccttcgctcctcatcttacttttgtgattaaacccgatgggcaggtactcaggagcgtcgttagtcagccggagaatggcctctaccactttacctggccactcgatagcaatgcggcaaccggtatgtggcatattcgcgctaacacgggcgataatcagtatcggatgtgggatttccacgtcgaagattttatgccagagcgcatggcgctgaatctggttttgaattcggcgatatagctgccgaaaatctttcccgcacgctggatgaagttcagttgacgctggatgataaagggcgcggcgaagtttcgctggactaaaaagcgcagaataatccgtattgcagattcgctgtaccgccgggtgctgaatcatccgctcagcaaaaatagcatggtactcttccatcacattctcgacgcgaccaatttctacgacagttttatcggcataaaagtcatatgcataaagcgttggggcaacgaagattgcattgtgcatcgcaccaaaagctttcatcaaagcggcatcatcaaactcgccgaggatttctacgtttaatccctgggagttaaaccagttaagcaatttgcgccctaacattgaacgtcgcccaggaatcaaaagtcgccgttcttccagacaagccgggaacggtttttctggtggtggatttgtacaccagaaactcacgccacattcgccaattctcacggagaacaggccttcctgctgcgtagagtctatcggacagtcagaaatgatcatatccagtttatgctgacttaattgctccagcagcat

SEQ ID NO: 138525 - DNA, 518 bp, Homo sapiens
gagcgtatcaacatccgccaccacgcgattgagcaattcgccctgacgatagcgcgccagtccggcaggggagaggggcagcaatttgctgaaggtgtaaatgcgcagatgctgcaacacgcggaaagtcgcgtcgtgacttaccagacgttcaaaatagcgcccggcagtacgggtgattgctgcgccacgcacgcccgcagcgggtagcatatagttgaagctgtacagtccggcaacccccgcaaccgctgaggccgagaggaaccagccggaaagtgtcaacagaccgatactggcgagcagcgtcacaattgccagcacaataccaagacttaacatccatttatgacgtttatacagtgccagatagggtagcaaagcgcgcatttaaatctcctcctgacgatgggccagtaatgtggcgaatgggccaccagccacacttaattccgcgtaacgtccttgctcaataatccggccatcctgcataacccaaatgacatcccagtcagcaa

SEQ ID NO: 138526 - DNA, 1150 bp, Homo sapiens
atggcagaagatcgcagcacggtaacagcggcaaccggcatgaccgtgacgcctgccagcacctcggtggtgaaagggcagagcaccacgctgaccgtggccttccagccggagggcgtaaccgacaagagctttcgtgcggtgtctgcggataaaacaaaagccaccgtgtcgcgacagtatcagccgtatcccattcaggggagcggttttgaactgaatggcaaaggcaccagtacgcgccccacgctgacggtttctaacctgtcggtatggtcccgggatggcggaagatatgcagagtctggtcggcggaacggtgacccgctctggatagctaagcgtagtagtgaacaacaacggcgagcgttggcaaaggagttgtctgtgcaggtgggtattcgtccggagtatctcgaccgcctgcttcatgcgttctccggcgggcagcggcaacgtatcgccattgccagagcactctcttcgcagcctgacgtgattgtgcttgatgagccaacctctgcgctggatatctccgttcaggcgcagatcctcaatttactggtaacgctacaggaaaatcacgggctgacctatgtgctgatttcacacaatgtctcggtgatacgtcatatgagcgatcgggtggcggtgatgtatctcgggcagattgtagaactgggcgacgcgcagcaggaaatcgcccaggcattacgccgcacgccagcgccgatggtttatatcggcaatctggggcgtgagttgagtttacctgcggctaatttgaagctggaaagcaagctggcaattatggagcagtatgttggtaaaaaggtcattgatgcggtcatcgtcgggccaaaagtggatgtctcggcggtgaaagagcggattgtgatccaggaggtactggaggccagcgatattccgtatcgtcatgaccgccagttgttacataacgcgctggaaaaggcgttacaggctttaggaggcttggaagtcattcagttgtaccggagggattcaaaccttgtaccgggccaacttttaaaaacgtcggaaatggggaaaacccggctgtacgccgcagattctcgtttgattgcggccaaaggttcaccgattcagccaacgctggattcactgaaag

SEQ ID NO: 138527 - DNA, 2927 bp, Homo sapiens
atgtgtaaaacgattccaagtaactcagaccttcgagaagtgcggggctgctttttcatgttggaggtaaaacctgcagatgaccaagaccccattgatgctctctcggagatctggacagctgtccctccactacagaaacctcacagaacacagaaagcccatgatgaagacttccttctggatgctttgtctgaggacttctctggtccacaaatgcttcatctcttggagaaaggagacagatacgacatcgagttcggtacccatttcttcccacttccaggtgctgctttacagccgacaaatatttatcaaatgacatcgtgtaacatccttgaaggcagagcccagaagccagccgcctttgccgcctttccaacctcgatggtcaacggttttagaagccggccacctctgccgcctttccaacctcgatggtcaacggttttagaagtgacatattacctgctgtcggaatccgaggcaatctcctttctccctccaaagcggattggcactgcacagaaaaagaagctgctgagatcagctgttgggatgggaactcaaaacgtcataaaacagcctacacagggcttaagggtcagggagggacacgggaccagaagctctgcatgccaagtgaggacgtccctgtccccgggtatcagcacaagacttaagaagaagtttgtaagtcgtttctacagccttcctgacaattctttgaactgccaaaatattttcataattcccacaaataaggcatctgaccactccacaacaaagaaggcgctgcatctttatcgcagcaacttcaaaccgtcacacggctggaaaaaccatacgcgatggtgggtacagagctcgattcgtagtgttttcgattttgaaaagttcaggaatattctcttccacattccagatccatttagtgtaccattggaacttcaaactcaaaatacagtcatgggttgcttaatgggatacatccttagacatgcgtctttggatgactttatagttgtgggaaatcggtgtactcacacaaacctaaatgatgttgatgcctttggcggtttggactgtgtcgtagtgggatccgacgcccccaatgttgcacacacgccgttgggttcaaactatacacactttacacgcctggcgtactacaaaatagtatcttacgcgcagcgcaacgcaggcttgtttcgccttttagtaatcggtttaatcatttgccgcgttattgcctcgcacaccggtagtgttttgcgttctagtctacttcttttattttcggtggcaaagtggtcggcgccgcggattggtcccgttcacaatctatcacgcatcgtggccgttctagcggtgtacgccgtcaacgtatcctccataataccccgtgctagcctcaccctaagccgggcttccgttgtgcgccgacccggccgtgtatggttggcgctacacaacagccgcgttggccttttggctctggctggcaggccgtctggtcttaatcaggccggcgtttgttatcgaatcgcgggtggggtgaggtattcctataaaatacgcgtacgcgttcggatttttccgccatcagtaccccatacagcttgtccacgtgttttaccgttttccgcttgctgcgcggcggggcccggttctggtggcgtctttcggtcaatgtcccatagcccacaaaatctataccaaaatcctccccctctgctccggccagtgctttttctctcgcttctgtgtcccgctcttgctaccacccgttgccgtgtactctaccccgggctctacctatatttgcatcgaattcaactggatagcggttttgtgctgggcgtttttctgaaaggaggatcaagtaaaggggggaatggtgtgtcccaagaaattgttgtgccaaggtacgcggtagcggggcggggtggtggggggtatatcgcaagcatctgtcacaagcgttatcgggtattccgcttcgtgtcaaccaacgcccgcaatcatgcaacttcatcttgtaacgcagcatccagacgcctgcagccagatcggaatagaccaaatcctggttggcataggccaccaatccacgcctttactacgccaggtctcgttagcgtaagcttcctgggttatccctgcagcacaccaacatgtttacctttcagtgaatccagcgttggtgaatcggtgaacctttggccgcaatcaaacgagaatctgcggcgtacacttgtcggagaaggcaatctcctgctgacgtttatcggtaatggaaagcacgaaataatagcgtcgatttttttcgctttcagtgaggggatcagcgctcaaagtcactggcaacccaggtacatttcacctgcatccgtttgcacactcgttaccgagatcgatatcaaagccaacaaaatcacctttagcatcttcgatgagaacgctggggcttggttgccgccgttttgtaaggccgtagtccccgggtgggtgtataaacccaacttggggcatgaaattgcatgtgttgaccactggttgatgcccaacaggttgatcgaaaacctgtgtgatatcatgttaccaatatgggttttgaccaagtttaatgactgttgtgctggttgtgtaccatgttgtgtgataattgttgatgatgccttgcatggtgcaccgaaaaggatgtgctgctgcatcacacgaggaatgaggctgctgaaattgagtgtgcatgcggcaaccagaagcacgctgcagcaagcatcccacggccattgtgcctggagtgcaccagggtggctggacacctctgggatggatggtgataggctgtggtggaccctgcatgaagtcctgagagacctatgcaccagccatggaaacatcgtggaaagtgcacgcatgag

SEQ ID NO: 138528 - DNA, 672 bp, Homo sapiens
atggtgctcggcaaacagcattcgccagcgtcgttagtcagtagcgtaccgccatccagagaggctttgcgcccgacaaccacagcgcggtatccaccacatgcagataatcatccagaacgtgaaataaagatcgtgtggcccgacgctattgctacgatgtttatcattcttagcgaggctgcggtggcgagttgcgtttttaactcaccggctttcgcgcgcgtaggcgaccaggctccttgtaacgtccagcagacgctgccgccagcaccgatggccagcaacgaatcaagacgctgtttcagttctgccacttcgatttccaggcttcgacgcgggcctgtaaatcaccgtcaaccgcgttcgacatatccgcaccgccggctgatcttcaacctcaccactgaaaagatgcatgtagcggtttcgcgtttacccggttcgcgggccagacgcaccacaaaaggaccatctcgcgatttgccagttgttccagcgtcgactccacttccgccatatcgcgaattcatacattcgcgcggcgcggctgcgcagttcacctggcgtctggcaccacgcaataacaacgtggtgattaacgccacttccgctgcgctcagttcagatcgccaaattctgaattacaaaaacgttgctcatatttggtga

SEQ ID NO: 138529 - DNA, 2496 bp, Homo sapiens; identical to SEQ ID NO: 138407

SEQ ID NO: 138530 - DNA, 3554 bp, Homo sapiens
atggccagaaaacgcaaatcaagaaataacagtaaaattggtcacggagcgattagtcgcattggtagaccgaataatccttttgaaccgtgccgcaatcgctacgcacaaaaatacttaacgttggcgctaatgggcggtgccgcttttttcgtattgaaaggttgtagcgatagtagcgatgtcgataacgacggcgacggaacgttttacgcgacagtgcaggattgtattgatgacggtaataatgccgacatttgcgcgcgtggctggaacaacgccaaaacggcattttatgccgatgttccgaagaatatgactcagcagaactgtcagtctaagtacgaaaattgctactacgacaatgttgaacagagttggatcccggtcgtttctggatttttgttaagccgggttattcgtaaagatcgcgatgagccgtttgtttataacagcggcggttcctcttttgcttcgcgcccagtctgggtaccgagctcgattgtaatcatgtcatacggtttagcctcgtatgtgatcgccgtggccttcctggaacgcgatcgcattcaggcagcgcttgatgagtggcatcgcagcaatccggggccggtaaaagataaagcggcctataaatcgttcctgcgtgaactgggctacctggtgccgcaaccggagcgcgtgacggtggaaaccacgggcattgacagcgaaatcaccagccaggcggggccgcagctggtggttccggcaatgaacgcccgctacgcgctgaacgcggcgaacgctcgctggggctcactcgacatcatcccgcaggaaggggcgatggtcagcggctacgatccgcaacgcggtgagcaggttatcgcctgggttcggcgtttcctcgatgaatctctaccgctggaaaacggcagctatcaggatgtggtggcgtttaaggtggttgataaacaattacgcatccagttgaaaaatggtaaagaaaccacgttacgtactccagcacagtttgtcggttaccgtggcgatgccgctgcgccgacctgcattttgctgaaaaataacggcctgcatattgagctgcaaatcgatgccaatgggcggattggcaaagacgatccggcgcacatcaacgatgttatcgtcgaagctgctatcagtaccattctcgactgcgaagattcggtcgcggcggttgatgcggaagataaaatcctgctgtaccgcaacctgctgggcctgatgcaggggactctgcaagagaaaatggagaaaaacggtcggcaaatcgtgcgtaaactgaatgacgatcgtcattacaccgccgccgatggctctgaaatttctctgcacggacgctcgctgctgtttatccgcaacgtgggtcatttgatgaccattcctgtgatttgggacagcgaaggcaatgaaatcccggaaggcattcttgatggcgtcatgactggcgcgattgccctctatgatttaaaagtgcagaaaaactcgcgcactggcagcgtctatattgtgaaaccgaaaatgcacggtccgcaggaagtggcgttcgccaacaaactgtttacccgcattgagacaatgctcgggatccgggatctctttctgttccagccattgcccaaacagcattgtcttcccgcggacctcgggagcaattgcggtaacctgagcaatatgttccgactccattgccagaatcagatcgtaatttcgtgccatctcagcagtgagcttacgtccggcatgtccttcaagagatacgccatgattagcggcaacatctgccgctgtcgcatctgcagggtgttttaccagaccatgaacacctgccgatttgacttttacgcccggcagacgtttacgcagcaagcgctcgccaatgggcgaacggcaaatgttgccggtcatgcaccccggaaatcgtcggtaccagcagagaaatcacacggttccaacgagccagcggcgcggaatattggtaatcggctgctgacccgatttgctgacttcggcggttgacgtacgctttttgcgagccggaacgccgcgacgctgacatcgacttgcgggctttcaatgactgcggagacgtggtaatcaccgtgatatttttggcggtcattaatccttcggcgataagcattgtcgtacttccgctgtcgagaataacgcattcgcctgaatttcgcagtgaagccctgaagcttgctgaacgcatcggtgttactgccgcagcccgtgaactcagcctgtatgaatcacaactctacaactggcgcagtaaacagcaaaatcagcagacgtcttctgaacgtgaactggagatgtctaccgagattgcacgccgcgacatacttcgcgaagcgcctgaaatgaagtatgtctttattgaaaaacatcaggctgagttcagcatcaaagcaatgtgccgcgtgctccgggtggcccgcagcggctggtatacgtggtgtcagcggcggacaaggataagcacgcgtcagcagttccgccaacactgcgacagcgttgtcctcgcggcttttacccggtcaaaacagcgttacggtgccccacgcctgacggatgaactgcgtgctcagggttacccctttaacgtaaaaaccgtggcggcaagcctgcgccgtcagggactgagggcaaaggcctcccggaagttcagcccggtcagctaccgcgcacacggcctgcctgtgtcagaaaatctgttggagcaggatttttacgccagtggcccgaaccagaagtgggcaggagacatcacgtacttacgtacagatgaaggctggctgtatctggcagtggccccttctttggaaaagtttgaaagctcctgggatttagcacgggccttccagccaacaggcaaaagccacccgtataccgggaacccccgggaaggcccgacaaaggccaggaaggttacaaaaggttgggaagaccgacactttctgttatttttccgcgctgatatcaatggtaatcggatctttgtcgccgccttgttgaatggtgagtttactgtcgctggtggcgatcgccgttttcgtatcgtctctggtggtgcgcgtggtcagggtttgcgcctgcgccagatgggtgacgctgatggtgtatttcccggcgatggcgttacccgcagtggtggcactgaactgcgcgcgaaggatgacgcagcgggtcagtcgattgctaaccgtttcacctctaacattaaaggcctgactcaggcggcccgtaacgccaacgacggtatctccgttgcgcagaccaccgaaggcgcgctgtccgaaatcaacaacaacttacagcgtgtgcgtgaactgacggtacaggccactaccggtaaaacagaagcagaggcgggtggcaagtgcagatccaaatgtgcttctatagtattgtacaaggctttattcaattcggataagtgttccagcgcagttcattcacgtcgttcatctatcgatttagttcatggtcgtaggcaatcacgatggctgtccttatag

SEQ ID NO: 138531 - DNA, 698 bp, Homo sapiens
ctttatgcctgccgccgactctagaggatcaggcttatggcgaggctcttatacccctccgcaacacccttaccgcggtacacgtcaaataagtttacgccaactacctgatttacgccaactttcttacattcggataaaatatccgctgcgggaacgttttctgcgaccaccaccgcgatgtcacgacggttcgccgggaagcgagaaatctcgcgcgcctgaggcaccacgcggtctgcgagcttgttccactccagttcgaacaccagagtgcgaccgttaagatccagtttacgttccagttcaggatgaacaaccccaacaaaaccaatacgttcacctttcagataaatcgctgcggattgccccggatgcagtgccggattcgcttctgcacggaactcaacctcattcagtttaccggtcaggtcgagaacggattcaagatcgcctttcaaatcatagaaatcaacggtctcttttgccaggttccagtgctcttcgtaacggttaccgcaaatcacaccggctaacatcagatcctgacgaatgcccaacggtgcctgagtatctggtacgaaacgcagaccgctttcgaaaatgcgcacacggttctgctgacggttctggttgtacaccacggttgccagcaggccagtccacagagaaagacgcattgctgacatttcaacaga

SEQ ID NO: 138532 - DNA, 3496 bp, Homo sapiens
tcagtcgttctgtctcttgctctcgtctgccgtcgatctgccggtgtgttgccggcagttgttaccaggatagtgtagtgatggagctaagcaaggacatctgcactgtttcacctcattccgagcggtcaaacttccgtggtccgtttcccgagttgacggtcgaccagcgataaaagctgggtcgccgtccttcagaaaatttgaaggaactccgggccaagccacggtcacaggagttccccagcggtagcccggtaccgaacacacggattcaccagcggcaacaggccgggacaaccacatgttccgtttctcattcacagtcagtgcctgaccgtaactttgctcggaataccgcccatcatgtagtgacaggttgggataacggaatcggctcatcacagccgcgaccttcacggatttcgatcatgatggaacgcgcaaccacgtcacggcccgccaggtctttggcgttcggcgcataacgctccataaaacgttcgccatgtttgttcagcagataaccgccttcaccacggcaaccttcggtgaccagtacgcccgcaccggcaatgccggtcgggtggaactgccacatttccatatcgccggcacggatagccatgccgacaccgtcgccggtgttaatgtggcgttggtggtggactgataaatacgccctgctccgccagtcgccagcacgtagcgcgggctttgaaataaaccacttcaccggtttcgatgcacagtgggtacaacccaccaccgcgccatcctggtttttcaccagatccagcgcaaccactcggagaaaatggtggtgtggtttttcaggttctgctgataaaggtgtgcaacagtgcgtgaccggtacggtcagctgctgccgcagtgcgtgtttagatagcgcttccacgctgttagaatgagtggcaggggacacggcagcccaatgccagttagaagatttgctgactgggatgtcatttgggttatgcaggatggccggattattgacaaggacgttacgcggaattaagtgtggcaaggccaccagaaggtcacccacagcgtcgttaatccggacgcccagcagataaccactcaggcgtgaacgctttacggcgcacaagcccgatctcggttgaaaggtcgcaacgcgtctttctctggggacggccctgctggcaaccgtggtgtacaccagaaccgtcagcagaaccgtgtgcgcattttcgaaagcggtctgaccggtaaactgaatgaggttgagttccgtgcagaagcgaatccgcactgcatccggggcaatccgcagcgatttatcgcccgcggcgttaatcgcatccatgatggtcagaggaatatggtaatcggctgctgacccgatttgctgacttcgccggtgacgtacgcttttgcgatcggaacgccgcgacgctgacatcgacttgcgggctttcaagacaatactcaaaaaatgattgatgaccttacggcgtttcctcacgaaaattaaatatgcatttgtcggcagcaaccccgccttaaaaaagtgcgctttgttcatgcggatgcggcgtgaacgccttatccggcctacaaagtaatgcacatattcaaggaaatgtaggcctgataagcgtagcgcatcaggcaattttgctttatcatcactcaaaagtagcccattgacaaaaaatcggcgatactggaaggtatcgccaacacatttattgcttagtaaacggccgaagatttcgctaaatgcgtacttcggtgcctgttctttagtcaggccggtgctggcggcagcgtctgactggacgttacaaggagcctggtcgcctacgcgcgcgaaagccctgccaatttgtgaaagctggcgcattccttatgccgattcgttatccagccttgccgccagttgcgatgcggtttttgtgcattccagcaccgccagccactttgacgtggtcagtacgttactcaatgcgggggtacatatctgtgtcgataaaccgctggcagaaaatctgcgcgatgctgaacggctggtggaaggatatgcgcgaatggcgtgaggagcgcgggcagggcgtagtgcataaaccgattcctggttggcagagtacgcttgagcaacgtgggtttgtcggctgtgcgcggcacttcattgaatgtgtgcaaaaccagacagttccgcaaaccgccggcgaacaggccgtgctggcgcaacgtatcgttgacaagatctgctcctcttttaatgtggtgcgcgtcgctccactcggcgaccccattcaatcgaaacccgtcgtgtgagcatgctcgacattgccgagaagcaaaatattcgtattgaaattgatctctgtcggcgcgtctgggctgtccggtgatcccgctggtttcaacccgggtcgcggtattgaagcgctcaagctggcgattgatcgctataaaggccgtgaagcgtcgcagcatctggatgccgccctcgcccgtctgcgtaatgagtggacgatccggcgctgcacattgccgatgcgcgttaccagtgcattgcgccatctgtgatgtggtaagcaacaccctgacggcagaacccagccgttcaccactgcggtagataaaatcgtgctcaaccgtttcctcggtctgccgttttcctctttgtgatgtacctgatgttcctgctgggctttgaaagtatacagtgggctgggtaactgcggtcagtttgcgcccccgaatcacatcggcgctgatcagcaactgcgggccgtgacagatggcaaacaccggtttgccatcagcttcctccggcgttgttgcattggatgaggcgaatttcccacaatcgggataattacctcatggtctattaagcctggtgcatgagccgtggagcgcaggcagacaatttgggcgatcgtagcaaacatgggatgaacgcaaacgctttttgcgccgctgttccgtgttgttaccaggtactggaaatccactgatgcgagaacgtgccgcgggtaccggctcacttcagcggacatatctaggtacagctcccagcgacgtatagtcaccgtagacattaaagtcgaatactttttcgccatctgtcgtaggtgccgtcctgacgcagctcgccaaggccagcaggttgcttgaggaatccttcgctggcagcaacttcatcttgtaacgcagcatccagacgtcctgcagccagatcggaatagaccaaatcctggttggcataggccaccacatccacgcctttactacgcaggtctttcagtgaatccagcgttggctgaatcggtgaacctttggcgcaatcaaacgagaatctgcggcgtacagcttgtcggagaaggcaatccctgctgacgtttatcggtaatggaaagcgacgaaataatagcgtcgattttttcgctttcagtgaggggatcagcgcgtcaaagtcactggcaacccggtacat

SEQ ID NO: 138533 - DNA, 1581 bp, Homo sapiens
ttacacagctcggtttaactgatacaggtacgctaccggttgcacccggagacagacacctttaaccagcagcaggttgcgctcagcgtcaacgcgtactacgtcaaggctctgaacggttacacgttcgttacccatctgacctgccattttcttgcctttgaacactttgcccggagtctggttctgaccgatagaacccggaacgcggtgagacaaggagttaccgtgagtagcgtcctgtgtacggaagttccagcgcttaacggtacctgcgaaacctttacctttagaggtgccagttacgtcaactttattaacgtcagcaaacagttcaacgctaatgctctgacctacagtgaactcttcgccttcagccaggcggaattcccacagaccacggccagcttctacgccagctgtagcgaagtggccagcttcaggcttggtcacacggttagcttttttagcaccggtggtcacctgaatagcacggtagccatcgttagccaggtctttaacctgagtaacgcggtttgcttcaacttcgattacggttactgggatagagacgccgtcttccaggctgatctgcacgtctacaccggcagccagatccagacgcatcagagcatcaacggttttctcggttggctcaacgatgtcaaccagacgcaagtgagtacggatttcgtactgatcgcgcgcgtctttgttgacgtgcggggagatcagaacagtgaagcgctctttgcgtgtcggcagcgggatcggaccacggacctgcgcaccagtgcgcttggcagtctcgacgatttccgcggttgcttgatcgatcagacgatgatcaaacgctttcaggcggatacggattctttggttgattgatgggagagtgtaaccgttcttacgtaaacgggatcgctctagagtcgacaatttgtcgtaacgttcgcgttcactttttaacaatcggttcaggtttcgtaccagactggtcagttctcgcgttgtggctggattgagcaattcgcggttatgttcttccagttcgcggacttcttttgccagggcttcgatggggcgtaaactccaccaggcggcgacccacagcagcgggatcactaacagcagattggctgagagcacatagataaaccagctccagaccatataggaactttttagctccaccggaatggtatccaccaccacaatggttaattttggcatccgcgatgttgccgggtagacgtttactgccaccgagtgggtcatctccgcgtcgtcatcatcttcccgcacttcctgcaactgttgctgtatcgaatgatctccactcagcaagaggctggtatcgttaacatccgcttcaatttcatgaaaaccattcgatttcagccagtcaggctggatcatcttcatcagccagggcacgtcacgttgcgcccataaaagctgcccgttctcatcataaattagcgtcatggtggggctttgcttgtcgatattttcgggtaactcgacatgcaacttaagaatatagggaattatcggggttcgaagcttcttgtgactcat

SEQ ID NO: 138534 - DNA, 1704 bp, Homo sapiens
  misc_feature (1)...(1704): n = a,t,c or g
atggacttcggcgaagctctcgtgactcacatagttccacctggcagacacaggacgactgacgccaccacatatgcccgcatccttcgcgtactgtgcatgacgcgtatacacttgacgcactctccatacggttcactgagctgctctatccggcatcgaactaatgtggaagtcagtattgctactcctagttcagttagacctggctctacaattagagcccgccagtcctcatgcaggagtttacgccgggcgtctctccttacacattatggtagtcagcagttacgtgcgatctctcatcctgatcataatcgtgttcggacccctgacggagtcgtcgtcacgatttacctccgtggtgtcctaatggatccgagtcttataacatactgcgctaggcacacctcaagacaatatccatcttatgcaactcgcaaccgactgctcatttataagggagtttcccgagttcggagccaccatcaaacacgattttcgccttgtggcccaaaccagcgtggcccgattgctgcaactctctcagggccaggcggtgaagggcaatcagctgttgcccgtctcactggtttctgtgcgctggctgccgtgctggctatctacgcccgtgaaaatggcgcaggcacgatgtttgagcctgaagctgcctacgatgaagataccagcatcatgaatgatgaagaggcatcggcagacaacgaaaccgttatgnnnnnnnnnnatatcgatgctgccgtggcgttgggtaataccattaacgaattggataaatattacacccaggaaaattataaagacgatgcgtttgcgaaagggaaaacgctgcaccagacattcttaaaaaatctggaagcctttgaacctgtagccgaatcttatcatgcggcgattcaggaaattaatgataagcgtcagcttgcggaactgaaaaatattgaagaaagagaagggaaaacattccactactactctctggcagtcatgatttcagcgaaacaaattaataacctgatatcgcaagataagtttgatgcagaagcggcaatgaagaaagtgtctgaactggaaacgctagtggcgcaggccaaagaagcggataaaggcggcatgaatttctcgtttattaattcggcaggccacgtgagtgaacgctacgcgtccctcaggggtagcgcacgcggcatacgctattatccgttccttgcgcgccacgctcgccgtcttcggcgtctgcaggtctctccgagaacctccgttgacgctcgcggcaagaaaccagactatcgctccagtgttcaggcagatgccatcaccatgactcatacgtgtatatggccacttgaggctcgcgtccactctcgtctcaatattacactcctgatcagatacaccacaatcgcccccaatacacataccgccgctccccgtacgttggccgattcccttaatgcagccggtacaaaacatgtggccgactgtcaagcgggacgtgagagccacgcatattcatctcttcactcccacgggacactcgcagtcgcaattcttgctacaatgctctcaacagcgggccctgatgatccatcagctcctccctgtcacactgtgaggaagaaccaccacactcaccccaactacgcaatacgcctctatatcgtaacggtggccaacttccaatag

SEQ ID NO: 138535 - DNA, 1944 bp, Homo sapiens
atgcatccacgttttcaaaccgcttttgcccaacttgcggataacttgcaatctgcactggaacctattctggcagacaagtacttccccgctttgttgaccggggagcaagtctcatcgctgaagagcgcaacggggctggacgaagacgcgctggcattcgcactacttccgctggcggcggcctgtgcgcgtacgccattgtcgaattttaatgttggcgcaattgcgcgcggtgcgagtcgaagatcggcgaaaaacattccacgcgcggtacgtcaggtgttctggcgaatcctgttgttctatgtgttcgcgatcctgattatcagcctgattattccgtacaccgatccgagcctgctgcgtaacgatgttaaagacatcagcgttagtccgttcaccctggtgttccagcacgcgggtctgctctctgcggcggcggtgatgaacgcagttattctgacggcggtgctgtcagcgggtaactccggtatgtatgcgtctactcgtatgctgtacaccctggcgtgtgacggtaaagcgccgcgcattttcgctaaactgtcgcgtggtggcgtgccgcgtaatgcgctgtatgcgacgacggtgattgccggtctgtgcttcctgacctccatgtttggcaaccagacggtatacctgtggctgctgaacacctccgggatgacgggttttatcgcctggctggggattgccattagccactatcgcttccgtcgcggttacgtattgcagggacacgacattaacgatctgccgtaccgttcaggtttcttcccactggggccgatcttcgcattcattctgtgtctgattatcactttgggccagaactacgaagcgttcctgaaagatactattgactggggcggcgtagcgggcacgtatattgcatccggtggagagccagcggttaacagtcacgccttcggcgttttgcgcaatgtagttagcatcgcggtcttctttcatcagtttggcgatgcgatcaaacgcctcttcccaactgatttgctgccatttatcagaacctggcgcacggtattccggaaacttcagacggctttcggagtggatgaaatccaccaggccagcgcctttcggacaaagtgcaccgcggttgaccgggtgatccggatcgccttcgatatggatagattagatttcttttcttggcggtccgggtatatatctaggatccccctgatcggtttgtattttgcctgtgcgctggagcggcatcaaaacgaacgccagccgatcattttgctctcggaccagaacgcgattgccactattaatcagctcgccattgagcgcgatgttttaaattgtcgggtaattattgcccgtagcttaagcgaacttgttgccattcgcgaagagattgagccgttattgatcattaacaacagccattatttactggatgacgcggtaaataattacatcaccgtaaaaaatatcattacggctgccggtatcgaacaaataaaacattttctggcgacggcatttattcgccaacagccggagcgttttttctctgcccccggaagttttcattattcgaatgtacgcggtgaaagctggcaacatattacccggcaaatttgtgcgcaattagtcgcacaacaccatattaccgccgatgaagcacaacgcatcatcgcccgcgaaggcgaaggtgaaaacctgattgttaatcgcctcgccatcccacattgctggagcgaacaggagcgacgttttcgtggattttttattaccctcgcccaaccagttgaggtgaataacgaagtcattaaccatgtcttgatcgcctgcgccgccgccgatgcgcgtcatgagctaaaaatatttagctatctggcaagcatattgtgtcagcatccggcggagattattgccgtgttgtga

SEQ ID NO: 138536 - DNA, 1605 bp, Homo sapiens
atgaggggaaaggcgattaataccatgacacgggccgtgaaaccgcgcaggtttgcaatcaggcccatcatctacgccagcgttcttagcgctggcgtattgttgtgcgccttttccgcccacgcggatgagcgtgaccaactcaaatctattcaggctgacatcgccgcaaaagagcgcgcggtacgccaaaagcaacaacaacgcgcaagcctgctcgcacaattgaaacattgtcgccgctgttggcaattctggcgtttgcgccaaagctggcgatttgcaccaggtcaccattactggcgacatgacaccgttcacccaatgtacaaacgcgtactcgcattccggtattcgcaatccgactgctatctccagcgctgcttatccgcgaagaattaccggttacaactggggcctaccggtgaagagcgtactgtttatggcatctacggcattagtgaatccaacctcgctgagtgtgaaaaaggcgtaaaaagtgctgtggcgttaacgcctgcgctgcaaccaattgatggcgtggcggtgagttatatcgatgctgccgtggcgttgggtaataccattaacgaaatggataaatattacacccaggaaaattataaagacgatgcgtttgcgaaagggaaaacgctgcaccagacattcttaaaaaatctggaagcctttgaacctgtagccgaatcttatcatgcggcgattcaggaaattaatgataagcgtcagcttgcggaactgaaaaatattgaagaaagagaagggaaaacattccactactactctctggcagtcatgatttcagcgaaacaaattaataacctgatatcgcaagataagtttgatgcagaagcggcaatgaagaaagtgtctgaactggaaacgctagtggcgcaggccaaagaagcggataaaggcggcatgaatttctcgtttattaattcggcaggccagtatcaactcgaggctaaaaaatacgttcgccgcatcagagataaagtcccgtactctgactgggataaagagcaacttcaggacgcaaactcaagctggatggtcgaagactctttcccgagagcattacgcgagtacaacgaaatgctcatgacgcgcatcggcggcggcgcaggcgatcaagacatggttaatgacttcagttattcacctcaactggttggtcgaggctggtttaacgatcaggtcgctaccggttgcacccgggacagcacctttaaccagcagcaggttgcgctcagcgtcaacgcgtactacgttgttaatcgctttggcaaaattgactggaaacccatgtatgccgaagcggataaattgctggctaaacctaacatgcgctttaaaagcgacaagctggtgggcgatctttccatcggtgaccagcaaatggttgaaatcgccaaagtgctgagctatgagtcgaaagtcatcattatggatgaaccgaccgatgcgctgaccgatacagaagctgaatccctgttccgcgtcatccgcgagatgaaatcgcaagcgccgcggtattgtctatatctcccaccgcatgaaaataatcttcgagatttgcgatga

SEQ ID NO: 138537 - DNA, 1263 bp, Homo sapiens; identical to SEQ ID NO: 121202

SEQ ID NO: 138538 - DNA, 894 bp, Homo sapiens; identical to SEQ ID NO: 121203

SEQ ID NO: 138539 - DNA, 1071 bp, Homo sapiens
atgttgtacactgcgacccggggtacggctgtgcgggcccaccgaggtacagcccgccgcctagacgcaccctggtgctgcggcccctgcacacttgccgctatacccgtatacacccaatttggtaagctgacaacgccggcacttcgcctacccgctggccctgcaccttttgccgcacaccgcgcaattgacgttgtatacgacaccgtgcagcccgggggcgccgctgacgtgacgggcgttccaaccctgctggttgcccgtaccgatgctgatgcggcggatctgatcacctccgattgcgacccgtatgacagcgaatttattaccggcgagcgtaccagtgaaggcttcttccgtactcatgcgggcattgagcaagcgatcagccgtggcctggcgtatgcgccatatgctgacctggtctggtgtgaaacctccacgccggatctggaactggcgcgtcgctttgcacaagctatccacgcgaaatatccgggcaaactgctggcttataactgctcgccgtcgttcaactggcagaaaaacctcgacgacaaaactattgccagcttccagcagcagctgtcggatatgggctacaagttccagttcatcaccctggcaggtatccacagcatgtggttcaacatgtttgacctggcaaacgcctatgcccagcgcgagggtatgaagcactacgttgagaaagtgcagcagccggaatttgccgccgcgaaagatggctataccttcgtatctcaccagcaggaaaatcgcagttctaagcaacaacaaccgttgctgactgtaggccggataaggcgttcacgccgcatccggcaatcggtgccccggaccggcatcggttgcgcatcacgaaggtttaacacggctaaaccgtgggccgatgcggtgatctctaatcgtccgtttgcgggtaataccggcagcgtagatgataacgacgaaatacagcgcaatctgaatgacactaactacaaccgcatgtgggaatacaataaccgcggcgtgggtagtaaagtggttgcagaggcgaagaagtaa

SEQ ID NO: 138540 - DNA, 1088 bp, Homo sapiens
aagaagaagaagaagaagaagaagaggaagaagaagaggaagaagaagaggaagaagaggaagaggaggaagaggaggaagaggaggaagaggaggaagaggaagaagaagaagaagaagaagaagaggaagaagaagaagaagaagaggaagaagaagaagaaaagatgttatggctggtcctgggccgcgcggggccacctcagccgcggagggcgcgcaggctgctcttcgccttcacgctctcgctctcctgcacttacctgtgttacagcttcctgtgctgctgcgacgacctgggtcggagccgcctcctcggcgcgcctcgctgcctccgcggccccagcgcgggcggccagaaacttctccagaagtcccgcccctgtgatccctccgggccgacgcccagcgagcccagcgctcccagcgcgcccgccgccgccgtgcccgcccctcgcctctccggttccaaccactccggctcacccaagctgggtaccaagcggttgccccaagccctcattgtgggcgtgaagaaggggggcacccgggccgtgctggagtttatccgagtgcacccggacgtgcgggccttgggcacggaaccccacttctttgacaggaactacggccgcgggctggattggtacagtcttgtgaatggcacccccaaaggttgtacagtatacaacctggttgcaataacccgttgttcacgtgatgcaaagaatagggactcagtcatcaagaattcctccaaagacagtgatgggctcggaggcaagctgggctttcccaggatgggaaaatattcatccagagaaggtaccgcctatacgcccctcgactctagaggatccaccgtagtagggcccagatacaccgacaaggacactccccccgctctcgcacatctcgccaaatggacacacacagcccggaatcggacaccgagcgcacgcacgccctggactgggacacgcgctgtagacgggatgggtggaggagccgagcgatacagcaagaaggtagccacccgcaatccggaagagagcccttaccagaacccgaccatgctggcaccctga

SEQ ID NO: 138541 - DNA, 1236 bp, Homo sapiens; identical to SEQ ID NO: 122991

SEQ ID NO: 138542 - DNA, 849 bp, Homo sapiens
atggaagatttgaatgttgtcgatagcataaacggcgcgggaagctggctggtagctaaccaggcgctgctgctaagttatgcagtaaacatcgtggcggcactcgcgatcatcatcgttggtttgattatcgcgcggatgatttccaacgcggtgaatcgcctgatgatctcccgtaaaatcgatgccactgttgctgattttctttctgcattagtccgttacggtattatcgcctttacgctaatcgctgcactgggacgcgtggtgatccgtgatagcgccatcaacgaaggttttaacacggctaaaccgtgggccgatgcggtgatctctaatcgtccgtttgcgggtaataccggcagcgtagatgataacgacgaaatacagcgcaatctgaatgacactaactacaaccgcatgtgggaatacaataaccgcggcgtgggtagtaaagtggttgcagaggcgaagaagtcggataagatgcgcaacatcgcatccgacaataagtgccggatgctgcgaaaatgccttatctggcctacagattcgatgcgattctctgatgaccaaagggggttacgatctggttacggcatccggcgatgctcgctgcgtttgattatgggtaaacgcgtgcagccgattaataccgcattgattcccaactggaaaacgctcgatccgcgcgtggttaaaggcgactggtttaatgttggcggcaaagtttacggcacaccttaccaaagggggccgaacctgctgatgtacaacactaaaaccttcccgacgccgccggatagctggcaagtggtttttgttgagcaaaatctgccggacggatag

SEQ ID NO: 138543 - DNA, 1548 bp, Homo sapiens; identical to SEQ ID NO: 122992

SEQ ID NO: 138544 - DNA, 1468 bp, Homo sapiens; identical to SEQ ID NO: 122994

SEQ ID NO: 138545 - DNA, 2469 bp, Homo sapiens; identical to SEQ ID NO: 122987

SEQ ID NO: 138546 - DNA, 1917 bp, Homo sapiens; identical to SEQ ID NO: 121205

SEQ ID NO: 138547 - DNA, 1179 bp, Homo sapiens; identical to SEQ ID NO: 122997

SEQ ID NO: 138548 - DNA, 2294 bp, Homo sapiens; identical to SEQ ID NO: 123003

SEQ ID NO: 138549 - DNA, 4128 bp, Homo sapiens
ctgactactcatcgggaaaacatggcgctgacgaatggtttctgccatcacatagcgggtcagtggcacaattaaatgatgttcttccgcgataggaataaacacatccggtgaaatccagccctgacgcggattgttccagcgcagcaaaatctctacaccaatacattgctggctgcgcgcattaagcaaaggctgacagaacaattcgaactcatgttgcgccaggcccagattgatttcgcgggaaaagctcattcgctcactgaagcgcaggccaacaccacccaggtttcagcggagcgcgaccgtctgtttaaaaattatcaacgttacttgaaaggcagccaggcggcggtgaatccgttctcggaacgtgacatcgacgatgcgcggcaaaatttcctcgcgcaggatgcgctggcgcagatccagagccagctggatagcctggttaacggcgagcaatcgcagattgtgagcctgaaagcacagctcgcggaagcaaaatataaccttgagcagacgatagtgcgtgcgccgagcaatggttatgtgacccaggtactgattcgtccgggtacctatgccgcgtcgctgccgctacgtccggtgatggtgtttatacccgatcagaaacgacaaatcgtggcgcagttccgtcagaactccttgctgcgactggctcctggcgacgatgcggaagtggtgtttaatgctctgccaggtaaggtattcagcggtaagctggcagccattagtccagccgttcccggcggagcttatcagtcgaccggcaccttacagacgttaaacacagcgccgggttcagatggcgttatcgcgaccattgaactggatgagcacactgatttgagcgctttaccagacggtatttacgcccagaacccaaaaaatctgaaaattgttgaactgaaagccccgcaactgccgcgttctctggacgacgcgcaaatcgctctggcagttatcaataccacctatgccagccagattggcctgactccggcgaaagacggtatctttgttgaagataaagagtccccgtacgtaaacctgatcgtgacgcgtgaagataacaaagacgccgagaacgtgaagaaattcgtccaggcttatcagtctgacgaaatcccctgtcgaacccgttcaaagcactgcaccccagccgaaagcggagcctgcaaaaccgaaagcgccgcgcgccacgccggtccgaatttataccaatgcagaagaattagatcggcaaaccgttccgcgatctcggtgaagggctggcgaaccccctgtataccggacagcctgcccgccgtggaatggctgacctacggcagcggttacctggcaggcatgaaactcggcgacacaccgctggtggagtacacccgcgaccgcctgcaccgggaaacgctgcgcagcttcggccgttatgaactcaccaccgcttatacccctgccgggcagttacagagccagcacctgaacagcctgctgtctgaccgcgattacacctggaacgacaacggcgaactcatccgcatcagcagcccgcgccagacccggagttacagctacagcaccaccggcaggctgaccggcgttcacaccaccgcagcgaatctggatatccgcatcccgtatgccacagacccggcaggtaaccgcctgcccgacccggagctgcacccggacagcaccctcagcatgtggccggataaccgtatcgcccgtgacgacaactatctttaccggtaatgccggtcccggcagggtgacagagaaaaacgaccctcatcccgaaagggggttatccgcacggatgatgagcgcacccaccggtaccattacgacagtcagcaccggctggtgcactacacgcggacacaatatgcagagccgctggtcgaaagtcgctatctttacgacccgctgggccgcagggtggcaaaacgggtatggcggcgtgaacgggacctgacgggctggatgtcgctgtcacggaaaccgcaagtgacctggtacggctgggacggcgaccgcctgaccacgatacagaacgacagaacccgcatccagacgatttatcagccggggagcttcacgccactcatcagggttgaaaccgccaccgcagtcatggaccgcatcctcaaagatcatcaaatcgtggtcgacattccccacggagaagcgtggctgcgcgatgatgaagagcgtccgatgattttgattgcgggcggcaccgggttctcttatgcccgctcgattttgctgacagcgttggcgcgtaacccaaaccgtgatatcaccatttactggggcgggcgtgaagagcagcatctgtatgatctctgcgagcttgaggcgctttcgttgaagcatcctggtctgcaagtggtgccggtggttgaacaaccggaagcgggctggcgtgggcgtactggcaccgtgttaacggcggtattgcaggatcacggtacgctggcagagcatgatatctatattgccggacgttttgagatggcgaaaattgcccgcgatctgttttgcagtgagcgtaatgcgcgggaagatcgcctgtttggcgatgcgtttgcatttattgcacatcctccattctttggccagaaccactctgttgttggtggttgcagtgttgaatactgggtggttgcagtgtgggaaggaatactgggtggttgcagtgttgaaattggaagttggactggtggcaccacctcgaggcccgggtctcgatttaaccttgtgttcccgttctaccaaaaagtcgattccccccctttgttccctcgcaagggaaaagacagctgcctgctgtatgcaaccaaatctaatcccaaaagcttggttctgccctgccctggtcgcacataacatcttttcttcttcttcttcctcttcttcttcttcttcttcctcttcttcttcttcttcttcttcttcctcttcctcctcttcctcctcttcctcctcttcctcctcttcctcttcttcctcttcttcttcctcttcttcttcctcttcttcttcttcttcttcttcttctttttttttttttgacagggtcttattcttcgcctctgcaaccactttactacccacgccgcggttattgtattcccacatgcggttgtagttagtgtcattcagattgcgctgtatttcgtcgttatcatctacgctgccggtattacccgcaaacggacgattagagatcaccgcatcggcccacggtttagccgtgttaaaaccttcgttgatggcgctatcacggatcaccacctgaccgttggtattggcatcaacatccagcgagcggcccagttgcgccacaccatcaccgaaagcattgaaacggctgtttacggcgaggaaaccgtagtaaatgttggacagcgtagccggtgcaaacacatacgcttcttgctgagtacgtgagttcaccacgcggaattcggtgttatcgaacaccactgcgccgcgaccagaaacgatattcacattcccttcaatgtagctgttggtcaccagcgtacgcggctgacgattcgtttccagacggttctgcacaccgctgttggtgacaaagaaggtgttctgacgaccgagaatgttaacgttgttaatctgtacctggtcaccatcagtacgcagtgccaccgccggatggttacctgcatctacgctatcgcccagcgtgttgtcttgtggtgtgtgggtctctggtgtgtcgggttggcaggtgctgtgtgtctggtgttgtcgggggtagttgtcggtggctggtaccttgttgtcgttgatggttacttgtctctgctgcgtcgggtgtttcatagagttgtctatattcggaattgtaagactgacgtctctggggatatcatttttcccaccggtcattatgtgcatatcgtgatacgccattcttgtcggcaatgtgataactggaaatggtccagcttgtgagtggttaagacaaatattaaggtaaccattgttgtgtataaccaacacagaggaaactgaaatcgaatgataagttaataaaagaaagttgatgtcaggtcgattattggtcat

SEQ ID NO: 138550 - DNA, 2049 bp, Homo sapiens
tcagcgactacccgcaatttgttgccaacccagccagccttcacgtccggcaatatttccgcgaacaacttgtccgagcggcaacgtctctgataacagttcgcttaaagggcaaaatgtcacgccttcctgagctgcgcgtttgaggagatccacaaaattatgctgataagcgcagccttcaacttctgcatgaatggtataaaccggcgtgcctttatctcgcaggatgcggttgagtaaccaaccgttaaaatcttctgctttcacatcccgaccaatcacttcatcccaggtgggtaaggtcaccggaatttgcgcagtgccagggtttcctgattcgagcaatggacggaacggcatggccccacgacaatcgctgttgtagcgcaaatggaacgcttcttttgcttcgatcaccttctggtcggcacgccagcccgcagcggcagaacaggttaccggttgaccgataatctcttccagagtgcgaagaccgcgtgcaatatcgtcgatcattgtttgccgatcccagttaccgctacgggcttgccaggcatggtgatcccaggcgtgcaggccgacttcgtgatgtttagccgcttcacgaatgatatcggcattggcatgaccaatctctttactgatagcgtcggtgttgccgcaggtctggcatggagcctgcaacgcgatgacatcatcatgtatcgccagacaggtgagttgaaatacggccttaattatccggatgcgaaagggagatttgtcagcggtgatgagttcgcaaactggcttaatcaacatcgtcaggaggggattattactctcgtgctttcggttgaccgcgatgaagatatcaacagtctcgccattccgcccgcagatgccatcgatcgtcaggagcgtctggtgctgattcagtatcgtcccaaatgatctggctaacattagtctttgccagcttgctgcccttatttccttaatcctgaaataaaggtttttcaggtacgtcagcagcccaaataccaggctacccagcacacctatggctgcccactgtgagggagtgactttatctagcagctgtaaaaaccagtacccggcactacctgctgaggtgccataggcgacacccgttgttaacttatccatggatttcataaccccacctgttaaataatcgtcggctgatggcgtaaggccaatccctaaccccatcatactggcgaccgctgaggcgatattttgtttatcgtttacggcctgaataactgcccgtcgtttaatatgtaattctttatttaacgcctgataaaacggattatcgccgcgataattaaacagggtttcattttcccccaggtgctgatgaataatgtcgtgccactgtagccaggcgataaggtgaaaattcacagcggtcatttgcaaggttggggacagccaacgccgacaacgactcatctctatatgaagatgttgaccaaccgtaataccttgatcgtcaaactgaaccttatcaccatgccggaacagatcatcaaagtgagtgagtgccaaccgacaactgtttggcgcattgtcgtactcttcacaaagcagcgtcagcaactgctggcgagccgggagtgcgatatttaccgctctggcaaagacctgttcaacctgtccttgcccccgctgcgccagaaaatccgcatccgcagttagcgcccacacacaccgtctttcaccaagttgcccaaccgcaatctgcgcgttctgtgactcaatggcatcagtgacatctttagccgtcatctggaaactgttgagtttcgccgggtccagccagatacgcatgggatattgcgaaccataggcatcgatatccccgacgccattcacgcggcttaacgggtcctgaatattactggcaacataatcagcaatatcctggttatccatcggaccatcggtagagacgaaggcaatggtcagaatgttggtatcgccggttttacgcaccgtcacgccctgattttgcaccgcctgcggtaactttcgcat

SEQ ID NO: 138551 - DNA, 1317 bp, Homo sapiens
tcaccggcattcagtaccggtacattgccggaaaacttcctgcggatgacgcatcactatcgcatcgacgtaagtgctgataaccgaaatggtatcggccagcgtttcgccctttttacccagtgatgtattggcgctgtcggagaagcccaccacgctggcccccaggcggtgcatagatgtttcgaaagagaggcgggtacgggtagaggcttcgaagaaacagctggcaatgactttgtgcttcaacagctctggttgcgggtttgctttcagtttcgccgctgtcgccagcaccagattaaggtcatcgcgactaaggtcgtttatggaaatgatatgttttggttggcagaaatccagcgtctggcggagcgggagccgattgccgcggtgcgtgatctgatccatggcatggattatgaatcctggctgtacgaaacatcgcccagcccgaaagccgccgaaatgcgcatgaagaacgtcaaccaactgtttagcaatacagaagctggagaaaatccgccccagcaggtcgtctgaagtaaattccccggtgatttcgcttaagttctgctgtgccagacgcaactcttccgccagcagttcacctgcccaggctcccaacagttgcgctttgccctgttgtagatgttccgctgcctgttccagcgcctgtaggtggcgacgacgcgccaggaagccgccttccatgttggtgtcaaagcccatgctctgtttgagatggttacgcagcacgtccacgccttcaccagtccttgccgagagacgaattaacgcgtgaccgttcacttcactcattcccagcgtttcgccggtgatatcggctttattgcgcaccacggtgatcggcagtttcgctggcagacgggcaataaattccggccagatctctgccggatccacggcgtctgttgtggtgccatcgaccataaacagcacgcggtcggcctgttcaatttcctgccacgcgcgctcgataccaatacgttctacttcgtcactggcttcacgtagcccggcgtatcgatgatatgcagcggggtaccgaaaatcgatgctatactgtatgcgtgatgggggatttggttctcgagaccagccatccatataactttcgcctaaccccaaagagccttcttgcagaacgcgtttaaaaaaatcggggtttttcacacgaatatccgccggggcagaaccgttaatggctataccggcacggctaagtaattcgttggcgatacggtaccagttgtcatccggtacactgacttcttctatacacgatgaactcat

SEQ ID NO: 138552 - DNA, 1020 bp, Homo sapiens
tcagcatcgaaacgttccgtattcctgcagagttaattcagcacgatatcgattttgttgccgctcacggcgtgaaatttgagtatggctgctcacccgatttaaccattgagcagttaaaaaatcagggcttccactatgttctgattgccaccggcactgataaaaatagcggtgtgaaatctccgctttatgagcccaggctggcattgccgtcagataacgttttgcacgcttatgtgcttcctccgggccgactttttgccaggaatcaaggaagctggctaaacctgataccgcttcttcccagggtttgagattgccgttgctgtcgcccgcttgtaaatgcccactaaacgcctgaaccagcgctgatgacgggcggtgcagggggcggatcaggctgacggtgaacggaaccgcaatactgaaccgccgcaccactaaaccgcttgccgcataatctagtgcggtgagcgggttaaccaccgaaatacctacccccgcccgtaccattgcgcagactgacgcggcgctgtgggtttctacgatcatgcgtcgtttaacctgatgttcagtaaatagctgatccagcaactggcgatagctgtcagtacgggaaaggctgatgtagttctcaccctgaaaatcatccggcgttaataccttttttaccgccagcggatgacccggaggtaacacacacacttcatctaaagagagtaattcggtacgttctgttcccgcaggcgtatggagcgtttcagtgagtcctaaatcatgacgcttgggccgagagccactcttcaagtagtatggggatttgccatcgccagtgggatctggaaggtgtgcagttccatccagaaagtatttttcgatgaagtgatcctgccgatttatgctccggcagagtttattccggtaaaaggtcagggcagccgaatctgggatcagcaaggcaaggagtatgtcgatttcgcgggtggcattgcagttacggcgttgggccattgccat

SEQ ID NO: 138553 - DNA, 1248 bp, Homo sapiens
atgattactgcgccagttgaggccctgggttttgaactggttggcatcgaatttattcgcggtcgcacatccacactgcgcatctatattgatagtgaagatggcatcaatgttgatgattgtgctgatgtgagccaccaggtaagtgctgtgctggatgttgaagatcccatcaccgttgcttataacctggaagtctcctcaccgggtctcgatcgcccactgttcacggctgaacactacgcccgttttgtcggagaagaggtgactctggttctccgtatggcggtacaaaaccgtcgtaaatggcagggcgttatcaaagcggtagacggtgaaatgatcacagttaccgtcgaagaaattttggctgtagttgaagccgtatccaatgaaaaggcgctacctcgcgagaagattttcgaagcattggaaagcgcgctggcgacagcaacaaagaaaaaatatgaacaagagatcgacgtccgcgtacagatcgatcgcaaaagcggtgattttgacactttccgtcgctggttagttgttgatgaagtcacccagccgaccaaggaaatcaccctgaagacgcacgcagttctctctcgcgcctttgacggcaaactgcccatttcttattccggtggtgccagtcagctgactatccgcgatatttttgatacaggtattcgccctattactatggcaaccgacctgctgaaacctggcggctatctgcgcttaagtgcctgcatgcgcgagctggaaggctccgacgcctggggacttgaccatgttgacgtcgaacgactgaacagactggcagcagatgcgttaaccatggaatacacccagaaacactggaagccagaagagcgtattgaagtggcagaagacctgccgctgaccgactgctacgttgccccctgtgttactgcctgcgctatcaagcaagatattccggaatacatccgtctgcttggcgaacaccgctatgccgacgcgctggaactcatctaccaacgcaacgctctgcccgccattaccggtcatatttgcgatcaccagtgccaatacaactgtacccgcctggattacgacagtgcgctgaatatccgcgaactgaaaaaagtcgcgctggaaaaaggttgggatgaatataagcaacgctggcacaaaccagccggttctggttcacgccatccggttgccgtgacttggtgcagtccggcggtctgcagcagtacttaa

SEQ ID NO: 138554 - DNA, 1293 bp, Homo sapiens
tcaggaagctttttccagatcgtgttggtagcagacaaacagcaaccccatatccagttgcccggagttggtgacgcccagtgaataactgtagccacgacgcagcatcaggctggactcactctccgccgtgcggggattcgccagccggatatggctgtccagcgcgatcaccttcccttccgggtcgctggcgtaatcaggcacatcatgctcatgctgcattcccagcggcgcaccggtttgcttatcacggccaaaaatcgtctgctgttctttcagcggcgttctgtcccaaaattccactcgaaactgaatcaagcgtactgcctgatagctgccaccgattgtccacgcaggctcctgctgatctgccgttacccacaccactttttgcatcaacttatcattctggctatcgggattggcagtgccgtctttgaaccccaccaaattatcggcgtctctcgctgctgccctcgccacctcggcgtcgagcgtgtactctttctgtttctgaatgattttattgaacaagtcataattagatgccatgtagtgtgccagtccgccccagccgcagccaatatccagtacgcgcatccctggttttaactgcaatttttcacaaatcattttgagcttcgcctgctgggcagattccagattatcggcatctttccagtaagcgcaggaatattgcatgaagggatcaagcatgcggctgaacaagtcattacccaaatcgtaatgctctttgccgactatccaggcacgttttttactctgcagattgaagagacgagcgccggcaatacgcagcgtgtctttgaaatgatgggggagttggttctcgagacctgcgcgtaagactttgctaaaaaacatatccagtcggtcacattcccaccagccatccatataactttcgcctaaccccaaagagccttcttgcagaacgcgtttaaaaaaatcggggtttttcacacgaatatccgccggggcagaaccgttaatggctataccggcacggctaagtaattcgttggcgtgcggtgcgcgtgattccgcggcgaaagaagttttgttgtggttccggtttgtgttgctgttgaagcagacattgctgaactggacgacgaagaacgtgacgagtttatggcggacgttgggttcacccgttggggtgaaagaagtgcgtgcatggaccattccggttggagcaaccgcgccgcaggcagcgggcaaaatccatactgattttgaaaaaggctttatccgtgcacaaaccat

SEQ ID NO: 138555 - DNA, 4224 bp, Homo sapiens
ctagacaacagagtgagaccttgtcaacgcactgacatccgcatggttcaaagactgatgatcggccagcggtacacatttttccggttgtacgccacacatcttcagcgtggcaaaaaagcgcggcggatgcccaatccccgccatcgccactacatgttcaagctgagcaacgtcacaacgcgtaccggtacgtaaattcaccgcctgacccggcagcagatgcatggggatttcaccgctgcgagggacaccgccgttgacgattaccgcatcaaccgactttaagcgccccgctcgctcacgcattggccccgccggcaaccaccagccattgccaaagcgacgcacaccatcaataacgacaatttccacatcacgcgccagacggtaatgctgtaaaccgtcgtcggttacgatgatctgcacatcagggctgttgcgccagaatggcaccatatccccgcgatacgaccccacgcgaataccgcgctgttgccactgttccacagccagacacgacggggttttccgttgcgccatcagtaatgcaacagagataataaagacagtcaggcaggtcatataataaatggaagtggtcggtatgccttcatacttgtcccgaacggtcttttgataagacgccgcagaaaacagtcctaataccagtacggcaaaataatatcctttttcatttaactgcatctctgcattccatagccccggctgcatgctgaggtgacttagaggatcccccgcgttgaagacgctaccctggttctgagcgttggcgacgaagttgaagctaaattcaccggcgttgatcgtaaaaaccgcgcaatcagcctgtctgttcgtgcgaaagacgaagccaggcaatcgcacattcccgccaagacggttgaagatgcagtaaaagagatgctggagcatatggcctcgactcttgcgcacggcgagcgtatcgaaatccgcggtctcggcagtttctctttgcacggacgtaatccgaagactggcgataaagtacaactggacaggcaaaataccgtttcccttcaccttttttacaaacccttgcgctttcgccgttggcttcggatctttcaatgccgcaagtgccgtcttaatcgagaacagtgccagaaccaccacgaccaccataaagaagatggttaacccggcatccagacggttgttgaacaccagttgcgccagctgtgactcagtatactgcgacggaatattgccgctgtcgatcattgcctggaacttattagcaatggccaggaagccgactttcgcatccgggctaaacgctttctgccagcctgcggtcagggtacaaatcagcagccaggccgttggtaccagcgccacccaggcgtaacgttgacgtttcatcttgaacaacaccacggcacagagcatcagcgccatccctgccagcatctggttggcaataccaaacagcggccacagagtgttaatgccgcccagcggatcgaccacgccctgatggaggaagtagccccacgccagtacgcacagcgctgttgccagcaggttagcaggcagtgaatcggtccgcttcaggccaggagacaccacgcccagcagatccgaccgcacgggaaatgatcgactgttcacccacttcgctggcaatcggttaacgttccggtgtatgctaaagcccaggtataacacataagtgtatgttgcattgctgacgatgccgaccgggcagctatccagacacaccaggcaacccgttttcttctcttctgctgccgttaaattaccgccaaagcgcatgtccagtttcttgccattactgtcaacaatcacttcatcgaaggaatacgcttttgccgccccttgccagttgaccgaaatatccagtttgctgcctgtgacatgagtcgtttctttattatccatcgtcatgttttcgcccggcgtaccacctgcctctttcagggcttcataaaatgctttcggggtcgcataacccataaacagcgatttatgtccgttggagccatctttaaacacaataccgtgacgagtgtcgtcggtgaggaaacgaccattaatttgcaccagcatggttaccgtatggttattggcatcgacacgcagcggttggctgttcgaaagtccgtcgtattccacttttgccgccgcattctcttgttgatcgcagccgctaagcccagcaacagccagtaaacagagtgcagccagtccttttttccatgacactgaataatgttgcaacatcgttctatccttcattttttgggtgagtaagtgggctgcggcgcgaagcagacagatccacatgtttgtgtcgggcgtagagtttagcgagctggacgagaataaacagcgccaggccgccagacagagttgtaaaataaagcgcagcgtaatgccttcattggcgagatcgttggcatcacggtataaataacaatacgggtagggtcccgcaaccagttcaatgccgctcaggtcgccctgaacgccgcttttctgccgtcgattatgctttccggctttatttttcagatcgacagtatgcccgcggtgatccgcgcggtgacgtacattattcccgctcgttatttcgtcagcaccctgcaaagcctgttcctcgccgggaatattccagtggtgctggtggtaaacgtgctgtttttgatcgcttcggcggtgatgtttatcggcctgacgtggccacgtttttggcgcgccagagccttttcctgtgtcgttgtgtaaagccccagggattcgcccaccttctggaccaaagggggtcccgggggttcccgggggaaagctctccggctggttgtgggcaccgacttccatcaggctgccgacaatattcctgaccatatgatgtacaaaagcattcgctttaatatctaccaccacataaggaccgtgacgcgtgacattaatatgcataacgttgcgccacggggttcgggactggcactgcaccgcacggaacgaggtgaaatcattctcgcccagcaagcattgcgcagcccgatgcatccgttcagcgtccagcggttcgtaaaaatgggttacccctttactcagtaccgccgggcgcagccgatgattgtagatgatgtagcgataacggcgagccgtggcgctaaatcgggcatgaaaatcatcaggtacagttttaacccaacgcacagcgatgtcaccaggtaaattcgcatttacgcccaaggtccacgccgcgtctttgcgcagcgcggttgtttcgaaatgcacaacctgcccggtaccgtgtacccctgcgtcagtacgcccggcgcagaagacggtgatgggttcgttcgccacctgggagagcgccttttccagcttctcctgcacactgcggacttcgttctgccgttgccagccgtaatacttactggcggcgtactcaatgcccagcgcaattttattaaccggcggttgttgccatatgtagaaagtagcgcggactaataagagagctccaacatcgggggagtcaattcctcgttgtttctttcttcctcttttttttctttcgctttctgctaacacggacgagcaccaagggggaatttctccccccccgggtcgaggcgtattttgctggcttagcgtctgacgcgcctgtagccaggtcaccagatggttaaacagtttcgctggaattaactcgccatctttcaccccggaaagttccagcatcgattgccagatctgtttgctgggttcccccgttgccgccgcaagtttggtcaccagctgttttagcgcattgtgctccgccggtaataaaggacggtcggtcgcctcgcgctgctgtggttgcggaataaccatcttcccttcctgcaacagggtgagaatggtttttaattgctccggtgagagctgattcagcggcgtctgaccaaagttatgacggatataatccgtgaccgcctgacgattattccccagacgtaaatactcccctaattgcgctaaaagctggcgggcagaatggcttttttgcgcggccagcagacgttgcgccagattatgctcagcggcagggaagtgacgcgaaagcagcggtgaatctcccgacagaccaatatcgtgcctgatacccgcccacagttctgctctttgctgttgcgtcagtgaggtcactttcgtcat

SEQ ID NO: 138556 - DNA, 1770 bp, Homo sapiens
atggacgttaaaatgctcgatttctttcgtcatatggggaccgcgacattaatcagcgtgaccgttttgctgattgccagcctgtttattcgccatgcctggtgtcgttatctttgcccatatggcgcgctgatgggcgtggtttcgctattgtcgccgtttaagattcgtcgcaatgccgaaagttgtatcgactgtggcaaatgcgcaaaaaattgcccatcacggatcccggtcgataaattaattcaggtacgaacagtggaatgtaccggctgtatgacttgcgtagagtcatgtccggtagcctcaacattgaccttttcactgcaaaaacctgcggcaaataaaaaagcctttgcgttgtctggctggttaatgacgctactggttctggggattatgtttgcggtgattggttacgcaatgtatgcgggagtatggcaaagcccgcaacaagcggaacatcacctcgcacggggtgatgttcacaacgtcattgaacggcgctcaacagattatcgctcgctgaccgatcccgccgttattcaggccatgcattacattcgtaatcacgcctgtaaagggattaaagtggatcaggtactggatgcggtcgggatctcgcgctccaatcttgagaagcgttttaaagaagaggtgggtgaaaccatccatgccatgattcatgccgacgcgctggaactcatctaccaacgcaacgctctgcccgccattaccggtcatatttgcgatcaccagtgccaatacaactgtacccgcctggattacgacagtgcgctgaatatccgcgaactgaaaaaagtcgcgctggaaaaaggttgggatgaatataagcaacgctggcacaaaccagccggttctggttcacgccatccggttgccgtgattggtgcagtcgttaagggcgtgcccttcatcatccgatctggagtcaaaatgtcctcacgtaaagagcttgccaatgctattcgtgcgctgagcatggacgcagtacagaaagccaaatccggtcacccgggtgcccctatgggtatggctgacattgccgaagtcctgtggcgtgatttcctgaaacacaacccgcagaatccgtcctgggctgaccgtgaccgcttcgtgctgtccaacggccacggctccatgctgatctacagcctgctgcacctcaccggttacgatctgccgatggaagaactgaaaaacttccgtcagctgcactctaaaactccgggtcacccggaagtgggttacaccgctggtgtggaaaccaccaccggtccgctgggtcagggtattgccaacgcagtcggtatggcgattgcagaaaaaacgctggcggcgcagtttaaccgtccgggccacgacattgtcgaccactacacctacgccttcatgggcgacggctgcatgatggaaggcattccacgaagttgctctctggcggtcacgttcggtaccgagctgattatcgcgaggcttcgtactaccgcaaacaagtttttgccttttattcacaagaagggtcccggttacattccacggattggagttccaatgcacctgcttggcggaactttgcccgatgccctgaaacgctgcctgaatgaagaagttgatagcatcctggcggaagatggcgaaatggacatgcattgtgattactgcggtaaccactatctgttcaatgcgatggatattgctgaaatccgcaacaacgcgtctccggcagatccgcaagttcattaa

SEQ ID NO: 138557 - DNA, 1275 bp, Homo sapiens
tcaaaccccaccgccattggcggacgcccccggcggccctaccaggcagaggatcggtcccttgattttgttgacacggctttgaaccgcaagatactcaaggattcgatctttcacgcgctccagaccataatggtcggtatcaaggatttcctgcgcctgacgcaggtcttttttgaccttgctacgcgcattccacggcacctgtaccatccagtcgatataaccacgcactacggtcgcttctgccgacatcggagacatcattttcagcttctgcaactctgcttccgctttctcttttgcctctttcggcatcttcgccgcgtcgattttgcgcttcagggcttcgttttcgtccggcgcgtcgtccatttcaccgagttctttctgaatagctttcatttgctcgttcagatagtactcacgctgggatttctccatctgctttttaacgcggttgcgaatgcgtttctcaacctgcagcagatcgatttccgattccatcattgccatcagatattccagacgttcgttaacgtcggacatctccagaacagacaccgcaaaataggtatcgtaatttttcggtccgacgtgctcgaacatccccacagaaacaatacgatcaaactggtcgttcaggtcacgataatcttgcagcaaaatggtgacatccaggccttcacagcgttcctgagccattttttgctgttcggcagaaatggtgacgcccaccacgcttacgtcataattagatgccatgtagtgtgccagtccgccccagccgcagccaatatccagtacgcgcatccctggttttaactgcaatttttcacaaatcattttgagcttcgcctgctgggcagattccagattatcggcatctttccagtaagcgcaggaatattgcatgaagggatcaagcatgcggctgaacaagtcattacccaaatcgtaatgctctttgccgactatccaggcacgttttttactctgcagattgaagagacgagcgccggcaatacgcagcgtgtctttgaaatgatgggggagttggttctcgagaccagactcaggagcccagctggcttcacccagtggatcccacaccagggctgcaggtggagctgcctgccagtcccgcgcggtacgctcgcactcctcagcccttgggtggtcgatgggactgggcgccgtggagcagggggtggcactcctcagggaggctcgagctgcacaggagcccatggagggggtgggaggctcaggcat

SEQ ID NO: 138558 - DNA, 2055 bp, Homo sapiens
atgctcgccgtcaatgaagcgatggcttatatgtcgcaaaaagtgcagggcggggaattggggcttaatgatgtcctcgccacaaatatggtactgaccattcgtcaacgactttttgccgaggcggaagccaaagaattagcggttcgcgattttgcctgcacatttctgggactgatttcatcgcctgacggcaccttgattatgcagattggcgatggcggcgtggtggtagatttgggtcacggtctgcaattgcctctcacgccgatggcgggtgaatatgccaacatgacgcacttcattaccgacgaagatgccgtttccagactggaaactttcaccagcactgggcgtgcgcacaaagttgcagcatttacggatggtatccagcgactggcgttaaatatgctggataattctcctcatgtgcctttctttaccccgtttttcaatggactggcggcagcaacgcaggaacaactcgatttattacctgaattgttaaagcagtttttgtccagcccggcggtaaacgagcgtacggatgatgataaaacgttggcactggcgctgtgggcagaggtcattgctgattacgccaataaacatgccgttagaataagtgacatccgtaagccagaaatgctcggttcttccgtgatcggttatcggggctttgactgcgaaagtatcggcatcttttttattcataacctcgatgaatttatcggtttctttccgcgcatgtttaatcgcggtgtccgccgggtaatctgggtgttaaacatcgacagcaaaggtcagtttaacaacgtaccaccggagctgaacgatatgtgccgcatcatcagccatgtccaccagcatcatcattatctgctgggccgcgtggagctacacccggcaaaagtgcaggaaggcgttgatatcgccatcgaaaacgatgtgattgtcgctatcggcgatgccctgacgcaacgctaccccgacgccagcttcaaagagatgcatggccggattgtgatgccagggattgtctgctcgcacaaccatttttactcggggctttcccgcggaattatggcaaacatcgccccttgcccggatttcatctcaacgctgaaaaatctctggtggcggctcgatcgcgcccttgatgaagagtcgctctattacagcggactgatttgttccctggaagcgattaagagcggatgtacatcggttatcgatcaccatgcctctccggcgtatatcggcgggtcgctctccacattgcgcgacgcatttttaaaagttggcctgcgcgcgatgacctgttttgaaactactgaccgtaacaacggcatcaaagagttgcaggaaggtgtagaagaaaacatccgtttcgcccgtttgattgatgaggcgaagaaagcgacaagcgagccgtatctggtggaagcacatatcggtgctcacgcgccgtttaccgtgccggatgccggtctggagatgctgcgtgaagccgtgaaagccacaggccgtggtttgcatattcacgctgcggaagacctttacgacgtttcctacagtcaccactggtacggcaaagacctgctggcacgactggcgcaattcgatctcatcgacagcaaaacgctggtcgctcatgggctgtacttgtcgaaagatgacatcaccctactcaatcagcgcgatgcgttcctggtgcataacgcccgttcaaacatgaacaaccatgtcggctacaaccatcaccttagcgacatccgcaatctggcgttgggaacggacggcattggttcggacatgtttgaagagatgaaatttgccttctttaaacatcgcgatgcgggtggtccgctgtggcctgacagttttgccaaagccctgactaacggtaacgaactgatgagccgcaactttggcgcgaaatttgggcttctggaagccggttacaaagctgatttaaccatttgcgattacaactcgccgacgccgctgctggcagacaatatcgccgggcatatcgctttcggtatgggctaa

SEQ ID NO: 138559 - DNA, 1615 bp, Homo sapiens
atgaacgcgcggcaacaagttgcggcgttacgcgtcccaggcgtagaaaaagcaacgatcgtttaccgtcgttcactacaagagatgcccgcatggcgcgaagagtatgaagaagcgttgcacgacggcttccgtttcctgaataatccggaacgtttcgatgctgatggcaccttaaccttgcgcgttatgtcgcttggcgaaccggatgagaaaggtcgtcgtcgtccggttgaaaccaatgaaacagtaacactgcttgtagacagcctgatcaccgccattggtgaacagcaggatactgaagccctgaatgcgatgggcgtgccgctggacaaaaacggctggccagacgtcgaccataatggcgaaactcgtctgactgacgtctttatgatcggcgacgtacagcgcggaccatcctccattgtcgctgctgtcggaaccgcgcgtcgggcgaccgatgccatccttagtcgggaaaatatccgttcccaccagaacgataaatactggaacaacgtcaatccagcggaaatctatcaacgtaaaggcgatatctctatcacgctggtgaacagtgacgatcgtgacgcgtttgtcgcccaggaagccgctcgctgcctcgaatgtaactacgtttgcagcaagtgtgttggatgtctgcccgaaccgggccaacgtctccattgcggtcccaggcttccagaaccgtttccagacgctgcaccctcgaagctttactgtaacgaatgcggcaactgcgctcagttctgtccgtggaacggtaaaccgtacaaagacaaaatcaccgtcttcagcctggcgcaagactttgataacagcagcaacccaggcttccttgtggaagattgccggtgggtcccgcacaggggtctctaccaccgtctgtatcgggagccgacctggcgctcggaatggccacggagacacatatgcccggagggttcgacattccctgaaaggcactgtgatcatctctcagcgaacaacagtcgaaataagctgttaccgctacaaaagccggggtttatcaattgacggcaaccctcgaaaatggcgattcgatgcaacaaacagtgacctatgtgccgaacatgtgaaggcgaacttcacgctgagcgatggcggtaaagtgattactgatgctgaaggcaaagcgaaagtcacgctgaaaggtacaaaagcaggcgctcatactgttacagcatcgatgactggcggtaagagtgagcagttggtggtgaactttattgcggatacgctcactgcgcaggttaatcttaacgttaccgaggacaattttatcgctaataacgtcgggatgaccaggctgcaggcaacagtgactgatggaaacggcaacccgttagccaatgaggcggtgacattcacgctaccggcagatgtgagcgcaagctttactctcggacaaggcggttccgccattactgatatcaacggcaaggctgaagttacactgagcggtacaaaatccggcacctaccccgtgacagttagcgtgaacaattatggtgtcagtgatacgaaacagcacgaccgagggcgcaaccatgacggcaagcgtcactga

SEQ ID NO: 138560 - DNA, 2680 bp, Homo sapiens
  misc_feature (1)...(2680): n = a,t,c or g
atgtgcgaactcgatattttacacgactctctttaccaattctgccccgaattacacttaaaacgactcaacagcttaacgttggcttgccacgcattacttgactgtaaaactctcactcttaccgaacttggccgtaacctgccaaccaaagcgagaacaaaacataacatcaaacgaatcgaccgattgttaggtaatcgtcacctccacaaagagcgactcgctgtataccgttggcatgctagctttatctgttcgggcaatacgatgcccattgtacttgttgactggtctgatattcgtgagcaaaaacgacttatggtattgcgagcttcagtcgcactacacggtcgttctgttactctttatgagaaagcgttcccgctttcagagcaatgttcaaagaaagctcatgaccaatttctagccgaccttgcgagcattctaccgagtaacaccacaccgctcattgtcagtgatgctggctttaaagtgccatggtataaatccgttgagaagctgggttggtactggttaagtcgaccgggcggtgaatccatacagatatttcataatcctcgagtgctggtggaaccggaaccaaaaagcatgcgtaatctgccatccggagtcgttcctgccgttcgccagccgctggcggaagacaaaacattgctgccgttttttagtaacgaacgggtgattcgtgctgctggcggcgttggcgcattgtccgactggctattacgtcatgttacatcctgccagtggcctaatggcgattaccatcacactgaaacagtcattcaccgttatggtccggcccaaatggttttggtttggccattgaaccaaccaattgcttgccaagacatggaaatcactggagctgcttgctcaccaaaatctgacagcatgggtgattgacgtcatccgtcacgcaataagcggtacgcaggagcgggaattatctttggctgaattatcctggtgggcggtctgcaatcaggtggtggatgcactacctgaggctgtatcgcgtcgttcgctgggattaccagcggaaaaaatctgctcggtgtaccgcgaaagcgacatcgtaccgggagagcagaccgccaccagcatattgaaacaacgcacaaaaaatcttgcaccgttgccttacgcccaccagcaacaaaaatcaccacaggaaaagacggtggtaagcatcaccgttgatccagagtctccggaatctttcatgaagctgcctaaacgtcgccgctgggttaaggagaaatacacacgttgggttaagacacagcnctggagaacgagcatgaaccttgaagccttaccaaaatattactccccaaaatctccaaaattgagcgatgacgctccagcgacaggcaccggttgtttaacaattacggatgtaatggcagcgcaggggatggtgcagtcgaaagcaccacttgggttggccttatttctggcaaaagttggtgttcaggaccctcagtttgcgattgaaggcctgctaaattacgcgatggcactggataacccgacattgaacaaattgagtgaagaaatccggttacagattattccttacctcgtgagttttgcctttgctgattactccaggtctgcggcagtaaggctcgctgtgagcgtgggtgcggtgcgtgggggggggtgggggggagggaggtcggcgtgtgggttgctgaggagtcgctggttcttgttgtgggtttggtgcagtgtgtgtggtgttgggccttatgaaaaaaacattcgtcgaaggagttggaaggagaaatggcagatgccgctgcggggctcgctgcgggcccccctgcggctcggcgcttcccgcgccggtcgcttgtgcccgcgcgtgtcagtcgtattcgcggcgggggcttggcccttcatcgctcactgcgcctctgctcgccgttcgcgcgggctgcgtcggcttcggcccgctggcgatgctcgtgacggtataaacgacgcgccagcgatgaaagctgccgccatcgggattgcaatgggtagcggcacagacgtggcgctggaaaccgccgacgcagcattaacccataaccacctgcgcggcctggtgcaaatgattgaactggcacgcgccactcacgccaatatccgccagaacatcactattgcgctggggctgaaagggatcttcctcgtcaccacgctggatgaccgggttgtggctggcagtgctggcagatacgggggcgacggtgctggtgacagcgaatgcgttaagattgttgcgcaggagataaggcaaaccgatcgcaacattgagcgcgatcggtcccctcgcccctctggggagagggttagggtgaggggaaaaggcggcatcgaagccaatcagcccctatcaaccgcctttacgaatcaaataacgataaggcagtccatccgtctctttagcaaccagttcgtgttccataaaggtacaaaacccaggaatatcgcgggtagtggccggatcgtcggcgataatcagcaacgtttcgccaggctgcatattgcgcacggttttgcgcaccatcatcaccggttccgggcagcgcaggccaagcgcgtcgagtgtgtggtcagggctggaaaagagatcggtcattttcttctcatcacttaa

SEQ ID NO: 138561 - DNA, 5243 bp, Homo sapiens
atgggcagtaataccaactggcggttaggcagcgacacatttaacgcgccagaactgtcctctttggtattacgctcattaaaagaagatgccgaagaatttctgcaacgtccgattaaagatgtggtgatctccgttccggcttatttcagcgatgaacaacgcaagcatacccgtttagcagcggagttagccgggttaaatgcggtaggtgatgcttcgggtacgccgcatctttctgttggctgcgtgcgtaatgactacggtatgccggagcaagtccagttctggtcggtggccgataacgttcgctttggcggcgcgctgatggcagtaaaaatcgccgagaaactgcaacaaccgccagtttataaaattgcgctgggcattgagtacgacggcagtaagtattacggctggcaacggcagaacgaagtccgcagtgtgcaggagaagctggaaaaggcgctctcccaggtggcgaacgaacccatcaccgtcttctgcgccgggcgtactgacgcaggggtacacggtaccgggcaggttgtgcatttcgaaacaaccgcgctgcgcaaagacgcggcgtggaccttgggcgtaaatgcgaatttacctggtgacatcgctgtgcgttgggttaaaactgtacctgatgattttcatgcccgatttagcgccacggctcgccgttatcgctacatcatctacaatcatcggctgcgcccggcggtgcatttgttgcaaattattcgcgaagcggtgctgaatgcgatgaagcacgccaacgccagcgaaatcgccgtcagttgcgtcaccgcgccggacggcaatcacacggtttatatccgtgataacgggattggtatcggtgaaccgaaagaacccgaaggtcattatggtctgaatatcatgcgcgaacgcgcggaacggctaggtgggacgctgactttttcacaaccttccggcggcggcacgttaacgctggaaaacaccgtgacccaggttatcgagcaaaatatgaccggcctcgataatctcatgtatatgtcatctcagagcagtggcaccggtcaggcatctgtcactttaagttttaaagcaggcaccgatccggacgaagccgtgcagcaagtacaaaaccagctgcaatcagccatgcgaaagttaccgcaggcggatattgctgattatgttgccagtaatattcaggacccgttaagccgcgtgaatggcgtcggggatatcgatgcctatggttcgcaatattccatgcgatctgctgacccgcgaactacagttccagtgcgtgatggagaaactatgagttcatcgtgtatagaagaagtcagtgtaccggatgacaactggtaccgtatcgccaacgaattacttagccgtgccggtatagccattaacggttctgccccggcggatattcgtgtgaaaaaccccgatttttttaaacgcgttctgcaagaaggctctttggggttaggcgaaagttatatggatggctggtgggaatgtgaccgactggatatgttttttagcaaagtcttacgcgcaggtctcgagaaccaactcccccatcatttcaaagacacgctgcgtattgccggcgctcgtctcttcaatctgcagagtaaaaaacgtgcctggatagtcggcaaagagcattacgatttgggtaatgacttgttcagccgcatgcttgatcccttcatgcaatattcctgcgcttactggaaagatgccgataatctggaatctgcccagcaggcgaagctcaaaatgatttgtgaaaaattgcagttaaaaccagggatgcgcgtactggatattggctgcggctggggcggactggcacactacatggcatctaattatgacgtaagcgtggtgggcgtcaccatttctgccgaacagcaaaaaatggctcaggaacgctgtgaaggcctggatgtcaccattttgctgcaagattatcgtgacctgaacgaccagtttgatcgtattgtttctgtggggatgttcgagcacgtcggaccgaaaaattacgatacctattttgcggtggtggatcgtaatttgaaaccggaaggcatattcctgctccatactatcggttcgaaaaaaaccgatctgaatgttgatccctggattaataaatatatttttccgaacggttgcctgccctctgtacgccagatgctcattaccgcgagccgtgccaatacaactgtacccgcctggattacgacagtgcgctgaatatccgcgaactgaaaaaagtcgcgctggaaaaaggttgggatgaatataagcaacgctggcacaaaccagccggttctggttcacgccatccggttgccgtgattggtgcaggtccggcgggtctggcagcaggttacttccttgccagagcgggccatccggttacgctgtttgaacgcgaagccaatgcgggcggcgtggtgaaaaatatcgttcctcagttccgtattcctgcagagttaattcagcacgatatcgattttgttgccgctcacggcgtgaaatttgagtatggctgctcacccgatttaaccattgagcagttaaaaaatcagggcttccactatgttctgattgccaccggcactgataaaaatagcggtgtgaaactggcgggcgacaaccaaaatgtctggaaatcactccccttcctgcgtgaatacaacaagggtacagcgctcaagctgggcaaacatgtggtcgttgtcggggcgggtaacaccgcaatggactgcgctcgtgcggcgttacgcgttccaggcgtagaaaaagcaacgatcgtttaccgtcgttcactacaagagatgcccgcatggcgcgaagagtatgaagaagcgttgcacgacggcgtagagttccgtttcctgaataatccggaacgtttcgatgctgatggcaccttaaccttgcgcgttatgtcgcttggcgaaccggatgagaaaggtcgtcgtcgtccggttgaaaccaatgaaacagtaacactgcttgtagacagcctgatcaccgccattggtgaacagcaggatactgaagccctgaatgcgatgggcgtgccgctggacaaaaacggctggccagacgtcgaccataatggcgaaactcgtctgactgacgtctttatgatcggcgacgtacagcgcggaccatcctccattgtcgctgctgtcggaaccgcgcgtcgggcgaccgatgccatccttagtcgggaaaatatccgttcccaccagaacgataaatactggaacaacgtcaatccagcggaaatctatcaacgtaaagcggatatctttatcacgctggtgaacaatgacgatcgtgacgcgtttgtcgcccaggaagccgctcgctgcctcgaatgtaactacgtttgcagcaagtgtgtgatgtctgcccgaaccgcgccaacgtctccattgcgtccccagctttccagaaccgtttccagacgctgcacctcgacgcttactgtaacgaatgcgcaaactgcgctcagttctgtccgtggaaccctggcgcaagactttgataacagcagcaacccaggcttccttgtggaagattgccgggtacgagtacgtctgaataaccaaagctgggtgttaaacatcgacagcaaaggtcagtttaacaacgtaccaccggagctgaacgatatgtgccgcatcatcagccatgtccaccagcatcatcattatctgctgggccgcgtggagctacacccggcaaaagtgcaggaaggcgttgatatcgccatcgaaaacgatgtgattgtcgctatcggcgatgccctgacgcaacgctaccccgacgccagcttcaaagagatgcatggccggattgtgatgccagggattgtctgctcgcacaaccatttttactcggggctttcccgcggaattatggcaaacatcgccccttgcccggatttcatctcaacgctgaaaaatctctgtaacgaacgggtgattcgtgctgctggcggcgttggcgcattgtccgactggctattacgtcatgttacatcctgccagtggcctaatggcgattaccatcacactgaaacagtcattcaccgttatggtaccggcgcaatggtgttgtgctggcactgcgacaaccaactgcgtgaccagacatcggaatcactggagctgcttgctcaacaaaatctgacagcatgggtgattgacgtcatccgtcacgcaataagcggtacgcaggagcgggaattatctttggctgaattatcctggtgggcggtctgcaatcaggtggtggatgcactacctgaggctgtatcgcgtcgttcgctgggattaccagcggaaaaaatctgctcggtgtaccgcgaaagcgacatcgtaccgggagagcagaccgccaccagcatattgaaacaacgcacaaaaaatcttgcaccgttgccttacgcccaccagcaacaaaaatcaccacaggaaaagacggtggtaagcatcaccgttgatccagagtctccggaatctttcatgaagctgcctaaacgtcgccgctgggttaaggagacatacacacgttgggttaagacacagccaaagcatcacaacgagctgcatacggatacagtggcatttgaagataagtatggctcccaactggagctgatatttcgttttatcgatcgcgcgctggcaattggcgtactggcaacgagcatgaaccttgaagccttaccaaaatattactccccaaaatctccaaaattgagcgatgacgctccagcgacaggcaccggttgtttaacaattacggatgtaatggcagcgcaggggatggtgcagtcgaaagcaccacttgggttggccttatttctggcaaaagttggtgttcaggaccctcagtttgcgattgaaggcctgctaaattacgcgatggcactggataacccgacattgaacaaattgagtgaagaaatccggttacagattattccttacctcgtgagttttgcctttgctgattactccaggtctgcggcaagtaaggctcgctgtgagcattgttcaggtacgggattttataatgtattgcgcgaagtggtgaaacactacagacgcggggaatctgtaatcaaggaagaatgggtgaaggaactatgtcagcattgccatggtaaggcgaagccagacagcgtgcagagggtgtaa

SEQ ID NO: 138562 - DNA, 1059 bp, Homo sapiens
tcaactattctccatcgccgtctgcgttttggtatcgggtttggcgacggctttcgcgacaatagccgcgagaataaccagcgccagtacaaccagcattgcactacgtaatccataatgttcgccgagatagcccagcagcggcggcccgacgaggaaagccagataaccggtcgttgctaccacactgacgcgggttggtgcatcggggccggtatcgctggcggcagaaatggtcagcgggaagcccagcgaggcacccagtccccagagtacaacagacaccccagcgacccacgcgctatcgacaaaaataatcagcccaatacccaacgcccccattagtgcactggcccgaaccacggcaacgcgactgtaacggtcgatgaaccaaccgccggtgaagcgtccaaccgtcatccccagggtaaaaccggcataaatcagcgagccggaagtagggccgatcatccttggtccatgagcacatcgatggtcgcaagtaccgtggcacatgccatggtgtttcgaacaatagagccgttcctcaaaacagcccatggggacaaatcggagaacacccttcttgtgatgatgtgagttgataaaatgcccttcttgtgatgatgtgagttgataaaatgcctgtgtgatgagacgaagtgagtgaatgacataggcatttgatatgagtggaaacttccagaaatgattcataagatttaatttgcatgttgctctaagtagtgtgatgtaatcttgttccaccccactctgtcctgaagggcgaattctgcagatatccatcacactggcggccgctcgagcatgcattgctccctgggcacatctaatgccttggtgcttctgggccttttctccagtggtgatggcctgctcataacagggcaaaggaagctcctccgagatgccagccatatcttcatagttatcctgtagccctcgccatgcggcatccccagtacgcggatataactcttcaaaggcggttaagccttgctctactgccaggcagccgttttcaaaaagagtacgcat

SEQ ID NO: 138563 - DNA, 1716 bp, Homo sapiens
atgaaggacgaagcagagacacgagggagcggtagcgacgtcgaaggaagcttgtctgagtgggatgtcgttgagtggagtgatgatcaagctgtattcacctttgtttatgacacgatacaactcaccatcacctttgaagagtcagttgggctgctggacggccagaaacaccattatcaggatgagttcgcggctatcccgctggtgccgaaagcgggcgatcgtgatgagcctgatatgatgccagccgccacccaggcgttactaacgcatccgccgaaaggcgcagcgaaagaggtgcgggcaggtcataccgcagcaccgtcgctcgatccggccactattgcagccaataacaccgagtttgaaccggaacgtgcaccggtcgccccaccgaagctgaaaccggtggagccgcctaaaccaaaggttgaagcaccacctgcgccgaagccagaaccgaagccggtcgtggaagaaaaagctgcaccgacgggtaaagcctatgttgtgcaactgggtgcgctgaaaaatgccgataaagtgaatgagattgtcgagtatgcgtttgcgggattgctacgtggcaccaagaccgaagtggtgaagtgtatctccaatgatcttgaagtgcccgccagtgcggagattgtgctggaagggtatatcgaacaaggcgaaactgcgccggaagggccgtatggcgaccacaccggttactataatgaagtcgatagtttcccggtatttaccgtgacgcatattacccagcgtgaagatgcgatttaccattccacctataccgggcgtccgccagatgagcccgcggtgctgggtgtcgcactgaacgaagtgtttgtgccgattctgcaaaaacagttcccggaaattgtcgatttttacctgccgccggaaggctgctcttatcgcctggcggtagtgacaatcaaaaaacagtacgccggacacgcgaagcgcgtcatgatgggcgtctggtcgttcttacgccagtttatgtacactaaatttgtgatcgtttgcgatgatgacgttaacgcacgcgactggaacgatgtgatttgggcgattaccacccgtatggacccggcgcgggatactgttctgaagccaatccactgccgtaaagtacgagcaccaggcatggcagcattcaccatgacctgcatgaagagcgcttgggcgttgagtgaactttgggatgaacacattgctttctgctcccattcatacccagatgcacaagaaggaggtcagaagggttctatttcggttggccaaaaaggtccctttatcaccggtcgtgtgacgggtaattcgcccaatgtaaatatcccttttcagccgattgagcgtcaaaatgtaggtatttccataagcgtttttcctgttgcaatgactgcgggtaatattgttctggatattacaagcaagccggatagtttgagttcttctgctcaggcaagtgatgttattactaatcaaagaagtattgctacaacggttaatttgcgtgatggacagactcttttactcggtggcctcactgattataaaaacacttctcagaattctggcgtaccgttcctgtctaaaatccctttaatcggcctcctgtttagctcccgctctgattctaacgaggaaagcacgttatacgtgctcgtcaaagcaaccatagtacgcgccctgtag

SEQ ID NO: 138564 - DNA, 654 bp, Homo sapiens
atggacgccatgaaatataacgatttacgcgacttcttgacgctgcttgaacagcagggtgagctaaaacgtatcacgctcccggtggatccgcatctggaaatcactgaaattgctgaccgcactttgcgtgccggtgggcctgcgctgttgttcgaaaaccctaaaggctactcaatgccggtgctgtgcaacctgttcggtacgccaaagcgcgtggcgatgggcatggggcaggaagatgtttcggcgctgcgtgaagttggtaaattattggcgtttctgaaagagccggagccgccaaaaggtttccgcgacctgtttgataaactgccgcagtttaagcaagtattgaacatgccgacaaagcggctgcgtggtgcgccctgccaacaaaaaatcgtctctggcgatgacgtcgatctcaatcgcattcccattatgacctgctggccggaagatgccgcgccgctgattacctgggggctgacagtgacgcgcggcccacatagagagcggcagaatgtgggccagtttagagaacatcttcaggctcgaaagtgtgacttacccgggatcacacacaggctggcagtgaagaatccaggggtacgtagccagggttcgtacgagggggtaatcaaggcggattaa

SEQ ID NO: 138565 - DNA, 1707 bp, Homo sapiens
atccggttttgagcaagacaccactcacagcaaaggccatagacgccgcacagccgcaggacaagccctataaactcaccgattcactgacgccggggctgtttttgctggtgcatcccaacggttcgaaatactggcgattcaggtattggctgaataaacgagagtttttgcaggccattggagtttacccgctaatcacactcaaagaagcacgcaggcgcgccacggagagcagatcccttattgccaatggaattaacccagtggaacaagcccgcaaggaaaaagccattgatgcgctcaacatggcggcaggatttaagaaggtggcggaagactggtttgctaccagggttggagggtggtcggaatcctatgcaaaacaggtcagatcggcactagaaaaagacgtctatccggtacttggcaagcggtcgattgtcgatataaccgcccgtgacgtgctggcattactccagaagaaagaacgtaccgcaccggagcaggcccgcaacgtacgccggcgcatcggtgagatcttcaagtttgccgttatcaccgaactggggtggctggttggcgcgcgccgcgttccctcaccacattacgattgccgcccggatgacgaaacacccaccctgctggtggtgcacaatattagcctgccgccaggcgagtttggcggtccgtggatcgacgcattattcactggaactattgatccgcaggcacatcctttctttgctgagatcgcccatttgcgcgtctccgctcactgtttgattcgccgtgatggtgaaatagtccagtatgttcctttcgataaacgtgcatggcatgcgggagtctctcagtatcaggggcgcgaacgctgcaatgatttttctattgggattgagcttgaaggcacccgatacgctggcgtataccgatgcgcagtatcaacagcttgcggcggttacgcgggcactgattgattgctatccggatatcgctaaaaacatgacgggccattgtgatattgcgccggatcggaaaaccgatcccggtcctgcatttgattgggcacggtttcgtgtgctgggagtattgttcaacgttcccacgctactggtgtggctgctgattggtttgctgtgtattggcgcaggcagagttgccgtgaaagaaagcaatcagcgatggtgctctgacgggttcgagttctgctgtgataacggagagagactgcgtgtcacgttcgcgctggactgctgtgatcgtgaggcactgcactgggcggtcactaccggcggcttcaacagtgaaacagtacaggacgtcatgctgggagcggtggaacgccgcttcggcaacgatcttccgtcgtctccagtggagtggctgacggataatggttcatgctaccgggctaatgaaacacgccagttcgcccggatgttgggacttgaaccgaagaacacggcggtgcggagtccggagagtaacggaatagcagagagcttcgtgaaaacgataaagcgtgactacatcagtatcatgcccaaaccagacgggttaacggcagcaaagaaccttgcagaggcgttcgagcattataacgaatggcatccgcatagtgcgctgggttatcgctcgccacgggaatatctgcggcagcgggcttgtaatgggttaagtgataacagatgtctggaaatatag

SEQ ID NO: 138566 - DNA, 2389 bp, Homo sapiens
atgccatgcacgtttatcgaaaggaacatactggactatttcaccatcacggcgaatcaaacacatcccatcttgcgcattgccgtcgccggttatgccatgccagcgccagagttgcttactcgccatgcggcatccccagtacgcggattaactcttcaaaggtggttaagccttgctctacggccaggcagccgttttcaaaaagcgtacgcatacccgcctgtcgtgcgccgtacgaccataaaaaccgtggtagcaatgtacacaaccgggtgcctgccagtggggcagcggcgatggccatacattgtctggaatgtggatgggctccccttgctgccggcgacaatgtgggcaaagtttgcgtaccagacgctgggctattaccagcggagacaacaccaggtgacccagttgcgccgcctgaacatcaaaccggttatcctggcagctgacggctctgagccagatctttctcagcaagccctgactgaaaaaggcgtgctgttcaactctggcgagttcaacggtcttgaccatgaagcggccttcaacgccatcgccgataaactgactgcgatgggcgttggcgagcgtaaagtgaactaccgcctgcgcgactggggtgtttcccgtcagcgttactggggcgcgccgattccgatggtgacgctggaagacggtaccgtaatgccgaccccggacgaccagctgccggtgatcctgccggaagatgtggtaatggacggcattaccagcccgattaaagcagatccggagtgggcgaaaactaccgttaacggttatgccagccctgcgtgaaaccgacactttcgacacctttatggagtcctcctggtactatgcgcgctacacttgcccgcagtacaaagaaggtatgctggattccgaagcggctaactactggctgccggtggatatctacattggtggtattgaacacgccattatgcacctgctctactttcgcttcttccacaaactgatgcgtgatgcaagcatgactaaccctagctcggtaccccgtgccggtgggcctgcgctgttgttcgaaaaccctaaaggctactcaatgccggtgctgtgcaacctgttcggtacgccaaagcgcgtggcgatgggcatggggcaggaagatgtttcggcgctgcgtgaagttggtaaattattggcgtttctgaaagagccggagccgccaaaaggtttccgcgacctgtttgataaactgccgcagtttaagcaagtattgaacatgccgacaaagcggctgcgtggtgcgccctgccaacaaaaaatcgtctctggcgatgacgtcgatctcaatcgcattcccattatgacctgctggccggaagatgccgcgccgctgattacctgggggctgacagtgacgcgcggcccacataaagagcggcagaatctgggcatttatcgccagcagctgattggtaaaaacaaactgattatgcgctggctgtcgcatcgcggcggcggcgctggattatcaggagtggtgtgcggcgcatccgggcgaacgttttcccggtttctgtggccctgggtgccgtccccgccacgattctcggggcagtcactcccgttccggaatacgctttcagagtatgcgtttgccggattgctacgtggcaccaagaccgaagtggtgaagtgtatctccaatgatcttgaagtgcccgccagtgcggagattgtgctggaagggtatatcgaacaaggcgaaactgcgccggaagggccgtatggcgaccacaccggttactataatgaagtcgatagtttcccggtatttaccgtgacgcatattacccagcgtgaagatgcgatttaccattccacctataccgggcgtccgccagatgagcccgcggtgctgggtgtcgcactgaacgaagtgtttgtgccgattctgcaaaaacagttcccggaaattgtcgatttttacctgccgccggaaggctgctcttatcgcctggcggtagtgacaatcaaaaaacagtacgccggacacgcgaagcgcgtcatgatgggcgtctggtcgttcttacgccagtttatgtacactaaatttgtgatcgtttgcgatgatgacgttaacgcacgcgactggaacgatgtgatttgggcgattaccacccgtatggacccggcgcgggatactgttctggtagaaaatacgcctattgattatctggattttgcctcgcctgtctccgggctgggttcaaaaatggggctggatgccacgaataaatggccgggggaaacccagcgtgaatggggacgtcccatcaaaaaagatccagatgttgtcgcgcatattgacgccatctggatttttccataa

SEQ ID NO: 138567 - DNA, 924 bp, Homo sapiens
atgcaggcactgatgctgttgcaggaatctatcggcaaagaacgtcgtccgctctcctgggtggttggcgatcagggcgtttatcgcgccaatatgcaatcagagcgcgaacgcaagcgcgcttactgcgccgacagtcaccacggaccatttgcaatggtgaacaatatgaccgacttaaccgcgcaagaacccgcctggcagacccgcgatcatcttgatgatccggtgattggcgaactgcgcaaccgttttgggccggatgcctttactgttcaggcgactcgcaccggggttcccgttgtgtggatcaagcgtgaacaattactggaagttggcgatttcttaaagaaactgccgaacccttacgtcatgctgtttgacttacacggcatggacgaacgtctgcgcacacaccgcgaagggttacctgccgcggatttttccgttttctaccatctgatttctatcgatcgtaaccgcgacatcatgctgaaggtggcgctggcagaaaacgacctgcacgtaccgaccttcaccaaactgttcccgaacgctaactggtatgagcgtgaaacctgggatctgtttggcattactttcgacggtcacccgaacctgcgacgcatcatgatgccgcaaacctggaaaggtcacccgctgcgtaaagattatccggcgcgcgctaccgaattctcgccgtttgagctgaccaaagccaaacaggatctggagatggaagccctgaccttcaaaccggaagagtgggggatgaagcgcggcaccgaaaacgaggacttcatgttcctcaacctcggtccgaaccacccgtcggcgcacggggctttccgtatcgttttgcaactcgatggcgatgagattgtggcctgcgtgccactcatcgattctcgacagtacgcatga

SEQ ID NO: 138568 - DNA, 878 bp, Homo sapiens
cgtcaccctgaccggctcaatgttggcgattgatgctccggtgatcgccagcggcgcgaccacgccgaataaccgcgtcgcggatgaccagggctttttacgccagtggagcaaggtggcgaaagaacgcaaactgcaacggttttatatcggcgaaccgagcgccgaagccgttgccgcgcaaatgccggatctgattttaattagcgcaaccggcggggattcggcgctggcactgtatgatcagctttccaccatcgccccgacattaatcatcaattacgacgacaaaagctggcagtcgctgttaacgcaacttggcgaaattaccgggcatgagaaacaagcggcagagcggattgcgcagtttgataagcaactggcggcggcgaaagagcaaatcaaattaccgccgcagccgggcgtggttacccgcatttatacctccggcctgcgtggtccactggcggaagagatctcccgtggtctgctggcagaaccggtgcagatccactctcacggcggtcgtgtgcatctggtacagagcggcgaactgaatattgacgtggctttcatcggcgtcccgtcctgtgatgaattcggtaatgccaacggctacaccggtaaagcctgctgcggctccctcggctatgcaatagttgatgccgacaacgcaaaacaggtcgtgatgcttaccgaagaactgctgccttatccgcataatccggcaagcattgagcaagatcaggttgatttgatcgtcaaagttgaccgcgttggcgatgctgcaaaaatcggcgctggcgcgacccgtatgaccactaacccgcgcgaactgcttattgcccgtagcgctgcggatgtgattgtcaactctg

SEQ ID NO: 138569 - DNA, 738 bp, Homo sapiens; identical to SEQ ID NO: 127865

SEQ ID NO: 138570 - DNA, 1995 bp, Homo sapiens
atggtaatagacatgatcttgttcagcttcacgaggaagactacgcgcaaaacgatcaggaaagatctgataaaaaatctgatccgcagcccattgtgggccgatatccggtacatcgacggcaaactgctccagtcgtgccggcggcattcggctgaagccctgcggtgtaaaccaacgctggcgatcgtgccacagcagtttgaaactgtaactgccgccgggacgaataaaacagaaaccgaggttaatgatcgcgccgccgcccatgatgacaacatagcttggcagagcgacatacagtggatcgacgccaagtgcggcagcggcttcatgcatcggttttgcggcgttcatcgcaaaggacatcccggcagagaaaatgccgcacatcaccgccagcaccagcccttttttcagattgaactcttcggctttaatgcccatcttgcgctctttcaactgcccggcgcgagttacaatccctacgccaatcagcgccaccagaacgccgagcaacgtcatgcgtccgccttcggtgctaatcaacacatcgaaattgccgttgataattggcgtcatcagcgtaccgacaatcaactcagtgacattctggcatggcagcccaaacagaccataaaggccccaggaggtacggaaacgcccggtgactgcactggcgaaagattccagttcatcacgaggcaaatccagtaccggaataatttcttcgtagatagctttttcaacgaatgcgcagggtccgccactttcttctgcggttcctgtgcggtgattcgtcgtaagccgctggatgaaattggcggcattgctgtcgaaaccgtgactgaagatgcgcatacttctctgcggttgcaccgtcgtggctatacctccgcgtatatgcgtattccacagacgcaggggctggcgaccgaaagtctgtcggcgcatatcggtcagcgtattcgctgggcgcgcgggatggtacaaatcttccgtctcgataacccgctcaccggtaaagggctgaagtttgctcagcggctatgttacgtcaacgccatgttccacttcttgtcgggcattccacggctgatcttcctgactgcgccgctggcgttcctgctgcttcatgcctacatcatctatgcgccagcgttgatgatcgccctattcgtgctgccgcatatgatccatgccagcctgaccaactccaagatccagggcaaatatcgccactctttctggagtgaaatctacgaaacggtgctggcgtggtatatcgcaccaccgacgctggtggcgctgattaacccgcggggatcctctaggagcacaataaatcccgtccctaggccaaacagcaaatatcccgtgaacatgttgtttgtgcctggtgccaatgccgcgatggtcagcaactccttcatctacccggctgatgccctgatgtttgacctcgaagactccgtagcattgcgtgaaaaagacaccgcccgccgcatggtttaccacgcgctgcaacatccgctgtatcgcgatattgaaaccattgtgcgtgtcaacgcgctggattccgaatggggtgttaacgacctggaagccgtcgttcgcggtggtgcggacgttgtgcgtctgccgaaaaccgataccgctcaggatgttctggatattgaaaaagagatcctgcgtatcgaaaaagcctgtggtcgtgaacccggcagcaccggcctgctggcggcgattgaatctccgctggggattacccgcgcagtggaaatcgctcacgcttccgagcgtttgatcggtatcgccctcggtgcagaagactatgtgcgcaacctgcgtacagaacgctccccggaaggaactgaactgctgttcgcacgctgttccattttgcaggccgcgcgctctgcgggtattcaggcgttcgataccgtctattccgacgctaacaacgaagccggatttctgcaggggatcctctag

SEQ ID NO: 138571 - DNA, 2370 bp, Homo sapiens
ctaagcgcgggccaccgtaatagtggtattacggggaatcactttctccaccaggccgcccatcgtttcgaggcccagcgacagtgggatcacatcaagcaacagcatttggctgtctggcttgttacccaccagaatatccgcttgaatcgccgcgccaatagcgacgactttatccgggtcgatggaagtcagcggtggacgaccgaaaaattcgcctacccgttcacgcaccagcggcacgcgagtagaaccgcccaccatcaccacttccagcacttcatcagcttctacacccgcgtctttcagcgcgcgacgacaagccagtaaggttcgttttaccagtggcgcgatcagttcattgaattgttcacggctgatttcgccctgccagcccgcaacgttaacggtcacggagtccgcatcgctcagcgcgattttggctgcaatggcggcatccagcagttcacgctgaacgcggttatcgctacgatcaggaatgcccgcctgctcgcgaatgtaatccgccagcagatggtcgaaatcatcgccgccgagcgcggaatcaccgccggttgccagcacttcaaacacgccgcgacttaagcgcagaatggaaatatcaaacgtcccgccaccgaggtcataaacggcgatcacgccttcctgaccggaatccagcccgtatgcgatagccgcagcggtcggttcgttaagtaagcgcaggacgtgaaggcccgccagacgcgccgcgtcgtctattccgacgctaacaacgaagccggatttctgcaagaagccgcccacatcaaacagctgggctttgacggcaaatcgctgatcaacccgcgtcagattgatctgctgcacaacctctacgcaccgacccagaaagaagtggatcacgcccgccgcgtcgtagaagccgctgaagccgccgctcgcgaaggcctcggcgtggtttccagcgatcatcgggatagcatccaccagacccataacgataaagaactgagtacgcagcagaggaatcagatcaggttgacgcgctgcgccttccaggaatttacccccgaggatgccgataccgatcgcagcaccgattgccgccagacccatcatcacagcggcagccatgtacagcagatccatattcaggttttccatgacagtcctggcccatcggcatgtcgtcatcgccccggcattctcctcgggcacgtgtccagcccaacttggtgaagccttgtggacagttgtgtcctggtagtccagagtggaaaagtagatatcgatgaagggtaagctagtgcccaaatcatccgagaccattgggtcagtgtggctcaaggtcttcttaaagttctccaccagctcactgaaacttgtgcagtcagcatttttccgcgccacttcaggtacgctcataattagcttgtcggttttttgcagcatactcgccgcctctgctgcggaaatccccggcagcgtcgatggcatatacaacaagtcgccttcattgatctgcggtaaaaattccccgccaactttattgagcggccagagaaccgtcagcaccgaaagcgccgccaccagcagcgtggttttcggccagtgcagtactttcagcaacagcggatgataaacacgaatcaaaaagcgattgagcgggttactgctttccggcggaattttgccacggatccagtagcccatcaggatcgggatcactacgatcgccagcagcgccgcacccgccatcgcatacgttttggtgaacgccaacgggccaaacagacgcccttcctgcccttccagggtgaagatcgggataaacgacaacgtgataatcagcagactgataaatagcgccggccccacttcaacagacgcatcggtgatcacctgccagcgcgttttattatccagcgtggcgtcaggatgctggtgctgccactcttccagccgtttatgcgcattctcgatcatgacgatagcagcatcgaccatcgccccgacggcaatcgcaatgccacccaacgacataatattggcatttgtacagggccaacaacgaacatgggcgcaacaagatggtacacttcctggctcgaacgcacacttccgtgtggctctggccaagaaaggcgtctggaagtagccgagcaccagcacaatccacgcgtacgtttcagcgaagagcagaataagcccgcacaccaggctgaccggatcgtcccagttcagcgtagaggtgtaacgccaccagatataacggcaagaaacggtcagcgacagcacaatcaacattagcgccgagaagcgccccggcatccgccgtacgatcagcgctaccccccacagcagcat

SEQ ID NO: 138572 - DNA, 1954 bp, Homo sapiens
cggcagcttaatggtgtgcagctcgcgtttcgggaatcctttcacaccgttacgcgtgttacggaacagcacgcggctggtgccgtggcgatccatcagcatcgaaaccagctcctgacgggcgctctgggcatcttcgctgtcgctgtttgctgcctgcaacagcggctcgatatcctgctcgccgatcatctcgccgagcatgttcagttcgtcattgctcagtttgttacctgccagcagcatggcaacggcgtccgcaaccggacgataatttttctgctcttcaacgaactgcgcaaaatcgtggaaacggttcgggtccagcagacgcagacgggcgaagtggcttttcatccccagctgttccggggtcgcgttgtttatgggcctgatttgaacgccaggcgcggcaacggggttatcaactgctcgactctagaggatccccaatttggcctgatcctgttcgtttatactatcgggattcaggtagggccgggcttctttgcctcattgcgcgtctccggattacgcctcaacctgtttgctgttctgatcgtcatcatcggtggtctggttaccgccatcctgcataaactgtttgatattccactgccggtagtgctggggattttctccggtgcggttaccaatacgccagcgctgggggcagggcagcagattttgcgcgacctgggtacaccaatggaaatggtcgatcagatggggatgagttacgcgatggcgtatccattcggcatttgcgggattttgttcaccatgtggatgttgcgggttattttccgcgtcaatgtcgagacagaagctcagcagcacgagtcttcacgcaccaatggcggcgcgctgatcaagactatcaatattcgcgttgagaaccctaacctgcatgatttagccattaaagatgtaccgattctcaacggcgacaaaattatctgctcgcgtctgaaacgcgaagaaaccctaaaagttccttcgccagataccattatccaactgggcgatttgctgcatctcgactctagaggatccccactcgatacgcaggatatcgacctgcaaatcaatagcagcgttgagaaacagtttggcgatgcaattcgcaccaccattctggacgttctcgcccgctacaacgtgcgcggcgtacagctgaatgtcgatgacaaaggcgcactggactgcattttacgtgcacgactggaagccctgctggcacgcgccagcggattgccaatgatttccgcttcgctgcaacaacgtaaaactcgcacccgccgcagcatgttgtttgtgcctggtgccaatgccgcgatggtcaacaactccttcatctacccggctgatgccctgatgtttgacctcgaagactccgtagcattgcgtgaaaaagacaccgcccgccgcatggtttaccacgcgctgcaacatccgctgtatcgcgatattgaaaccattgtgcgtgtcaacgcgctggattccgaatggggtgttaacgacctggaagccgtcgttcgcggtggtgcggacgttgtgcgtttgacgaaaaccgataccgctcaggatgttctggatattgaaaaaagagatcctgcgtatcgaaaaagcctgtggtcgtgaacccggcagcaccggcctgctggcggcgattgaatctccgctggggattacccgcgcagtggaaatcgctcacgcttccgagcgtttgatcggtatcgccctcggtgcagaagactatgtgcgcaacctgcgtacagaacgctccccggaaggaactgaactgctgtccgcacgctgtcccatttggcaggccgcgcgctctgcgggtattcaggcgttcgataccgtctattccgacgctaacaacgaagccggatttctgcagaagccgcccacatcatacagctgggctttgacggcaaatcgctga

SEQ ID NO: 138573 - DNA, 6231 bp, Homo sapiens; identical to SEQ ID NO: 127867

SEQ ID NO: 138574 - DNA, 3525 bp, Homo sapiens
  misc_feature (1)...(3525): n = a,t,c or g
atggcagccgattatgaaaatcagctcgacgagttttccctcgatgcgcccattgtcgcacatgaaaactatcaatgggctaactacgttcgtggcgtggtgaaacatctgcaactgcgtaacaacagcttcggcggcgtggacatggtgatcagcggcaatgtgccgcagggtgccgggttaagttcttccgcttcactggaagtcgcggtcggaaccgtattgcagcagctttatcatctgccgctggacggcgcacaaatcgcgcttaacggtcaggaagcagaaaaccagtttgtaggctgtaactgcgggatcatggatcagctaatttccgcgctcggcaagaaagatcatgccttgctgatcgattgccgctcactggggaccaaagcagtttccatgcccaaaggtgtggctgtcgtcatcatcaacagtaacttcaaacgtaccctggttggcagcgaatacaacacccgtcgtgaacaatgcgaaaaccaggtatccccccaacgtatcacgacggctaaactggccgcctctgtcggcgtttccgaagcggcactgtttcgccacttccccagtaagacccgcatgttcgatagcctgattgagtttatcgaagatagcctgattactcgcatcaacctgattctgaaagatgagaaagacaccacagcgcgcctgcgtctgattgagttgctgcttctcggttttggtgagcgtaatcctggcctgacccgcatcctcactggtcatgcgctaatgtttgaacaggatcgcctgcaagggcgcatcaaccagctgttcgagcgtattgaagcgcatctgcgccaggtattgcgtgaaaagagaatgcgtgagggtgaaggttacaccaccgatgaaaccctgctggcaagccagatcctggccttctgtgaaggtaagcaatcaaggctttcgggtgatgatagagatcactttgcagccgtaatcacgctcaacttcctgaatcggcggaatttgccccgcccgcgtcctgacgatcgatcgaaatcaacaacgccgcaatgcaatgttgtaggtctctttgacatgcgcttcgaggcgatccagttcttcggcaacgtcaattcgttgtgccagcagaaccagatcctgctccagacggatgttttccagttgcacctgagcatcttccagcttcgcgaccagacgctcacgctgccattgcaggatttccggcatatgggagcggactttgaccacttcggcgacgctgctcgatcaatgctttcagtgcctgaccttcgggttccgcgcgacaataaagtgttcagcgtaccattcaacgccgcgagaatttcaacggcaatggcgttaaagatcctgctccttggcttgcaggtcgactctagaggatccccctgtgaattcaatcggctgtggttcaccggtcagcagacgcgcacgttcgcgcatcctctcaatggaaaccactttaatgcccgcttcctgcagacgttctgccagttccggacgtgccgggttaactgcgataccgtggtctgtgaccagaatatcgacactggagcctggggtgatgcaggtcagtacgttatccaccagagtcggaatacgaccgcgtaccagcggcgcgacgatgatggaaagcgcagaggcaatcgcggtatcgcagtgaccaccggaagcaccacgcagtacgccgtcagagccggtcagcacgttaacgttgaactgggtgtcaatttccagcgcgctcagtaccaccacgtcgagacgatcaaccgatgcgcctttcgaaccccagttagcgtactggttggcgctgatttcgatgtgattggggttacgggccagcgattgcgcagcatggctgtcaaagctctgcacatccagcagtttgcggatcagacctttttcgtgcaggtcaaccatcgtcgcggtaataccgccaagggcgaagtcggcgcgaatatcgcggctacgcattttgtcttccaggaaacgggttaccgccagcgatgcgccgccggtgccggtttgcatggagataccttctttggagtagccagagttgacaatcacatncgcagcgctacgggcaataagcaggtcgcgccgggtaatggtcatacgggtcgcgccagcgccgattttttgagcatcggccacgcgggcaactttgacgaacaaaacaacctgatcttgctcaatgcttgccggattatgcggtttaagcgacagatcttcggctttgagctcggtaccccgctggtccctgcagacacgctgcattatttgcagaacctgcttgagcactcccgccaggacgcggcagctcgcacccttgagtctggggatgtgatgatacgcatcgccccactcgatacgcaggatatcgacctgcaaatcaatagcagcgttgagaaacagtttggcgatgcaattcgcaccaccattctggacgttctcgcccgctacaacgtgcgcggcgtacagctgaatgtcgatgacaaaggcgcactggactgcattttacgtgcacgactggaagccctgctggcacgcgccagcggtatcccggctctgccatgggaggattgccaatgatttccgcttcgctgcaacaacgtaaaactcgcacccgccgcagcatgttgtttgtgcctggtgccaatgccgcgatggtcagcaactccttcatctacccggctgatgccctgatgtttgacctcgaagactccgtagcattgcgtgaaaaagacaccgcccgccgcatggtttaccacgcgctgcaacatccgctgtatcgcgatattgaaaccattgtgcgtgtcaacgcgctggattccgaatggggtgttaacgacctggaagccgtcgttcgcggtggtgcggacgttgtgcgtctgccgaaaaccgataccgctcaagatgttctggatattgaaaaagaagacctgcgtatcgaaaaagcctgtggtcgtgaacccggcagcaccggcctgctggcggcgattgaatctccgctggnggatacccgcgcagtggaaatcgctcacgccttcgagcgtttgatcggtatcgccagcagtacgtatacgaccgcgtaccaccggagcgacgatgatggaatgcgcataggcactgggggactcgcagggaccaccggatgcaccacacaattccccgccggagccggtcagcacgttaacgttgaactgggttgtaatttgcagcgcgctcagtaccaccacgtcgagacgatcaaccgatgcgcctttcgaaccccagttagcgtactggttggcgctgatttcgatgtgattgggggtacgggccagcgattgcgcagcatggctgtcaaagctctgcacatccaacaggtggcggatcaaacctttttcgtgcaggtcaaccattgtcgcggggattccggctatggcgaaatcagaccgaatatcgcggctacgcatttttgtcttcaggaaacgggttaccgccagcgatgcgccgccg

SEQ ID NO: 138575 - DNA, 2684 bp, Homo sapiens
  misc_feature (1)...(2684): n = a,t,c or g
atggctattaattcaccactgaatattgctgcgcaacccggcaaaacccgtctgcgaaaatcactgaaattgtggcaggtggtgatgatgggtctggcctatctcacgccgatgaccgtatttgatacttttggtattgtctccggcattagcgacggtcacgttccggcgtcctatttgctggcgctggcgggtgtgctgtttaccgctatcagctacggcaaactggttcgccagtttccggaggccggttcggcctatacctacgcgcaaaagtcgattaacccgcacgtcggatttatggtcggctggtcatcgctgctggattgtctcttagccgtcgtgattatcgctgcaatttatgttggtttttcgctggctggctttcatgtctatatcggcatgttgtttgtgcctggtgccaatgccgcgatggtcagcaactccttcatctacccggctgatgccctgatgtttgacctcgaagactccgtagcattgcgtgaaaaagacaccgcccgccgcatggtttaccacgcgctgcaacatccgctgtatcgcgatattgaaaccattgtgcgtgtcaacgcgctggattccgaatggggtgttaacgacctggaagccgtcgttcgcggtggtgcggacgttgtgcgtctgccgaaaaccgataccgctcaggatgttctggatattgaaaaagagatcctgcgtatcgaaaaagcctgtggtcgtgaacccggcagcaccggcctgctggcggcgattgaatctccgctggggattacccgcgcagtggaaatcgctcacgcttccgagcgtttgatcggtatcgccctcggtgcagaagactatgtgcgcaacctgcgtacagaacgctccccggaaggaactgaactgctgttcgcacgctgttccattttgcaggccgcgcgctctgcgggtattcaggcgttcgataccgtctattccgacgctaacaacgaagccggatttctgcaagaagccgcccacatcaaacagctgggctttgacggcaaatcgctgatcaacccgcgtcagattgatctgctgcacaacctctacgcaccgacccagaaagaagtggatcacgcccgccgcgtcgtagaagccgctgaagccgccgctcgcgaagggcctcggcgtggtttccctgaacggcaagatggtggacggtccggttatcgatcgcgcccgtctggtgctctcccgtgcagaactttccggcatccgcgaagaataaggcaatcaaaatgacgcagaaaattgaacaatctcaacgacaagaacgggtagcggcctggaatcgtcgcgctgaatgcgatcttgccgctttccagaactcgccaaagcaaacctaccaggctgaaaaagcgcgcgatcgcaaactgtgcgccaacctggaagaagcgattcgtcgctctggtttacaggacggcatgacggtttccttccatcacgctttccgtggcggtgacctgaccgtcaatatggtgatggacgtcatcgcgaagatgggctttaaaaacctgaccctggcgtccagctccctgagtgattgccatgcgccgctggtagaacacattcgccagggcgtggttacccgcatttatacctccggcctgcgtggtccactggcggaagagatctcccgtgcttactgcgccgacagtcaccacggaccatttgcaatggtgaacaatatgaccgacttaaccgcgcaagaacccgcctggcagacccgcgatcatcttgatgatccggtgattggcgaactgcgcaaccgttttgggccggatgcctttactgttcaggcgactcgcaccggggttcccgttgtgtggatcaagcgtgaacaattactggaagttggcgatttcttaaagaaactgccgaaaccttacgtcatgctgtttgacttacacggcatggacgaacgtctgcgcacacaccgcgaagggttacctgccgcggatttttccgttttctaccatctgatttctatcgatcgtaaccgcgacatcatgctgaaggtggcgctggcagaaaacgacctgcacgtaccgaccttcaccaaactgttcccgaacgctaactggtatgagcgtgaaacctgggatctgtttggcattactttcgacggtcacccgaacctgcgatggatcccctnccctaaaaagatcccccacgcccaccaccagaaccacgaccagaatcaaccagacccagtgcttcaaatgctggtcgagattgtgcaaccacggcgcaatcacctgaccaccagcgtaaccaatagtggtaaaaatcaacgcccaggcaaatgcgccgagaatattcagcggcagaaagattttcggcggcagctggctggcaccaatcagcgtcgggccaatcacccgaaagccatacataaagcgcgtaccaatgacaaacagatacggatggcgttggataagtttctgcgcccgctcaattttatcctgatgtttcgagaaacggcgtaacagcttgccgccaaaccgccgcccgcacagatagagcacctggtcgccaatcatgccgccaagcgccacagaaagtaccaccagcgggaactttaatagcccctgatgcgccgcaacgcctcccagcaaagtcacggtttcaccttccgccaggctacc

SEQ ID NO: 138576 - DNA, 436 bp, Homo sapiens
agcaactgctgatctggtccgccagcgcctttatcccaaagtgctgctggtaccgttaatcatgacttacgctgcacgaaatatccccagaacatcccggaaaaagcgttattcggcatttacggtcagcgttcatcgctggaagctgctggaagtacatcattatttgtactgttggtgtcgcttttggtctgttcgtaccgtgctggtatacgccaacgccgccagcgttatgccgcaggcagaatggcgatattctggagcgaggttcttaagcaatcgtccttgcttgacccacattaatgctgttggcctttgtgtttttgctaattggctttggtaccaaaccgggctatttcccatgcacgcctggctgccggatgctcacagtgaacgccgagtccggtcagcgccctgctctccgccgtattgctga

SEQ ID NO: 138577 - DNA, 3243 bp, Homo sapiens
atggagcgcgatgagcgagttacacggcgacgcacgttatctggtttatggcggcatcctgtttgccgcgtgggggaaatcggcccagctaccgatgcaagcgtggctaccggacgcaatggaagcgccaacaccgatcagcgcctatctccacgccgcatcgatggtgaaagtgggcgtttacatttttgcccgcgctattatcgacggcggcaatatcccgcatgtgattggcggcgttggcatggtcatggcactggtcaccattctttatggctttctgatgtatttgccacagcaggatatgaagcggtgctagcctggtcgaccatcactcaacttggctggatgttcttcggcttgtcgctctccatcttcggctcgcggctggcgctggagggcagcatcgcctacatcgtcaaccacgcgttcgctaaaagcctgtttttccttgtagcaggtgcgctgagttacagctgcggcacgcgcttgttgccgcgtctgcgtggcgtattgcacaccctgccgttgccaggcgtgggtttctgcgtggcagcgctggcgattaccggcgtgccgccgttcaacggcttcttcagtaaattcccgctgtttgctgccggttttgcgttgtcagtggagtactggatcctgctgcccgccatgattcttctgatgattgaatcggtcgccagtttcgcctggtttattcgctggtttggtcgcgttgtgcctggcaaaccgagcgaggccgtcgccgatgccgcaccgctgccaggatcaatgcgcctggtgttgattgtactgattgtgatgtcgctgatttccagcgtaatcgccgcgacctggttgcacgtcaaaagctatcgccgatttgcccgcctgggtgaagataccgcaaaagccctggcagctggcgctgatgtcgtgcattttgacgtcatggataaccactatgttcccaatctgacgactgggccaatggtgctgaaatccttgcgtaactatggcattaccgcccctatcgacgtacacctgatggtgaaacccgtcgatcgcattgtgcctgatttcgctgccgctggtgccagcatcattacctttcatccagaagcctccgagcatgttgaccgcacgctgcaactgattaaagaaaatggctgtaaagcgggtctggtatttaacccggcgacacctctgagctatctggattacgtgatggataagctggatgtgatcctgctgatgtccgtcaaccctggtttcggcggtcagtctttcattcctcaaacactggataaactgcgcgaagtacgtcgccgtatcgacgagtctggctttgacattcgactagaagtggacggtggcgtgaaggtgaacaacattggcgaaatcgctgcggcgggcgcggatatgttcgtcgccggttcggcaatcttcgaccagccagactacaaaaaagtcattgatgaaatgcgcagtgaactggcaaagtttgaagatattcgcggcgtcgcttttgatcttgatggtacgctggtcgacagtgctcctggtcttgctgctgcggtagatatggcgctgtatgcgctggagttgcccgtcgcaggtgaagaacgcgttattacctggattggtaacggcgcagatgttctgatggagcgcgcattgacctgggcgcgtcaggaacgtgcgactcagcgtaaaacaatgggtaaaccgcccgttgatgacgacattccggcagaagaacaggtacgtattctgcgtaaactgttcgatcgctactatggcgaggttgccgaagaggggacgtttttgttcccgcacgttgccgatacgttgggcgcgttgcaggctaaaggcctgccgctaggcctggtcaccaacaaaccgacgccgttcgtcgcgccgctgctcgaagccttagatatcgccaaatacttcagcgtggtgattggtggtgatgatgtgcaaaacaaaaaaccgcatccggacccgctgttactggtggctgagcggatgggaattgccccacaacagatgctgtttgtcggcgactcacgcaatgatattcaggcggcaaaagcggcaggcctcgacgcccaggccagacgcaaaaatgccgggtattactattatctccggctcgcaaaacggcaaatgcgcgccggggttgctgaagccttacgtgatgatttattagcagcaaaactgaacgttaagctggtgaacgcgggcgactataaattcaaacaaatcgccagcgaaaaactgctcatcgtagtgacgtcaacgcaaggggaaggggaaccgccggaagaagccgtcgcgctgcataagttcctgttctccaaaaaagcgccaaagctggaaaacaccgcgtttgccgtgtttagcctcggcgatagctcttatgaatttttctgccagtccgggaaagatttcgacagcaagctggcggaactgggtggtgaacgcctgctcgaccgtgtcgatgccgatgttgaataccaggctgctgccagcgagtggcgcgcccgcgtggttgatgcgcttaaatcgcgtgcgcctgtcgcggcaccttcgcaatccgtcgctactggcgcggtaaatgaaatccacaccagcccgtacagcaaagacgcgccgctggtggcgtggcgcttaccgaacgtggaaggccgcgcccgtgccggtggtgcctccagcttcctcgctgaccgcgtggaagaagagggcgaagtccgcgtatttatcgaacataacgataacttccgcctgccagccaatccagaaaccccggtgattatgattggcccaggcaccggtattgcgccgttccgcgcctttatgcagcaacgcgccgccgacgaagcgccaggtaaaaactggctgttctttggtaatccgcactttacggaagacttcctgtaccaggtggagtggcagcgctacgtcaaagatggcgtgctgacacgtatcgatcttgcctggtcgcgcgatcaaaaagaaaaagtttacgtacaagacaaactgcgcgaacagggcgcggagctgtggcgctggatcaatgatggtgcccacatttatgtctgcggcgacgctaatcgcatggcgaaagacgttgagcaggcacttctggaagtgattgccgaatttggtggcatggacaccgaagcggcggatgaatttttaagtgagctgcgcgtagagcgccgttatcagcgagatgtctactaa

SEQ ID NO: 138578 - DNA, 2124 bp, Homo sapiens
gcttcattccagcgctccaatagtcatgacaaagtaaggagaatagttgcagaggagggtcgtacagcaagaaacctaatagcttggagtgttccactagaaagcaaagatgatgatgacggaaccgtttgcgctagccgcattgaccgagttacacgccgacgcacgttatcttggtttaggcggccatcttgtttgccgcgtggggaaattcgggccagcctaccaatgcaagcgtggctaccgaacgcaatggaagcgccaacacggatcagcgcctatctccacgcggcatcgatggtgaaagtgggcgtttacatttttgcccgcgctattatcgacggcggcaatatcccgcatgtgattggcggcgttggcatggtcatggcactggtcaccattctttatggctttctgatgtatttgccacagcaggatatgaagcggttgctagcctggtcgaccatcactcaacttggctggatgttcttcggcttgtcgctctccatcttcggctcgcggctggcgctggagggcagcatcgcctacatcgtcaaccacgcgttcgctaaaagcctgtttttccttgtagcaggtgcgctgagttacagctgcggcacgcgcttgttgccgcgtctgcgtggcgtattgcacaccctgccgttgccaggcgtgggtttctgcgtggcagcgctggcgattaccggcgtgccgccgttcaacggcttcttcagtaaattcccgctgtttgctgccggttttgcgttgtcagtggagtactggatcctgctgcccgccatgattcttctgatgattgaatcggtcgccagtttcgcctggtttattcgctggtttggtcgcgttgtgcctggcaaaccgagcgaggccgtcgccgatgccgcaccgctgccaggatcaatgcgcctggtgttgattgtactgaatgtagatgtcgctgatttccagcgtaatcgccgcgacctggttgcacgtcaaaagctatcgcctgtcatgcggattttacgcctgccagtcactggtgctggtgtctatttccccactctctcgtgcctgttcgccgcagagcaactgctgatctggtccgccagcgcctttatcaccaaagtgctgctggtaccgttaatcatgacttacgctgcacgaaatattccccagaacatcccggaaaaagcgttattcggtccggcaatgatggcactgctcgcggcgttaattgtcctgctttgcgcatttgtcgttcagcccgtgaagctaccgatggctaccgggctgaaaccggcgctggcggtagcgttaggtcattttctgcttggcctgctgtgcattgtcagccagcgcaatatcctgcggcaaatttttggttactgcctgatggaaaacggctcccatctggtgctggcgcttcttgcctggcgagcaccggaactggtggaaataggtatcgctaccgacgccatcttcgccgtcattgtgatggtgttactggcaagaaaaatatggcgtacccacggcacgctggacctcacgccgctgcttttttcgctgctctgttttgcctgccggaaacggagactttctgcgactcgcacggtgaccgtattacatagcttagggatcacactgctgctgattctggcactctgggtggtccaaactgccgctgatgcaggagaaatattcgctgcgggactgtggcttcatattgatggtctgggcggtttgttcctcgccattcttggtgtgattggctttctcaccggtatttactcgattggctacatgcgtcatgaagtggcacacggcgagctttcacccgttacgctgtgcgattactacggtttcttccatctgtttttgttcaccatgctgctggttgttaccagcaataacctgattgtgatgtgggcggcgatcgaagccaccaccttaagctcggcgtttctggtaggcatttacggtcagcgttcatcgctggaagctgcatggaagtacatcattatttgtactgttcgtgtcgcttttggtctgttcggtaccgtgctggtatacgccaacgccgccagcgttatgccgcaggcagaaatggcgatattctggagcgag

SEQ ID NO: 138579 - DNA, 1698 bp, Homo sapiens
cgctggcgattacccggcgtgccgccgttcaacggcttcttcagtaaattcccgctgtttgctcccggttttgcgttgtcagtggagtactggatcctgctgcccgccatgattcttctgatgattgaatcggtcgccagtttcgcctggtttattcgctggtttggtcgcgttgtgcctggcaaaccgagcgaggccgtcgccgatgccgcaccgctgccaggatcaatgcgcctggtgttgattgtactgattgtgatgtcgctgatttccagcgtaatcgccgcgacctggttgcacgtcaaaagctatcgcctgtcatgcggattttacgcctgccagtcactggtgctggtgtctattttcgccactctctcgtgcctgttcgccgcagagcaactgctgatctggtccgccagcgcctttatcaccaaagtgctgctggtaccgttaatcatgacttacgctgcacgaaatattccccagaacagtcccggaaaaagcgttattcggtccggcaatgatggcactgctcgcggcgttaattgtcctgctttgcgcatttgtcgttcagcccgtgaagctaccgatggctaccgggctgaaaccggcgctggcggtctcgctaccgacgccatcttcgccgtcattgtgatggtgttactggcaagacacactctggcgtacccacggcacgctggacgtgaacaacttgcacgcgctgaagggcataatgagctgcagttattcctcgtgatgttcgctttactcctgctcacgccgatgcttatctcgttgctcctgttttggctggcggaaccggagaccatacatagcaatacgcagcactctgggtggtccaaagtgccaatcttcaagagaaaattcactgcggcctgtggcctaattgatgccctgaacagttgtcctcacatcctgtgtccaggacatcaaccggcttacccgatggtcaacgtcagaaggccccggcagaacacgacgggggccaacaaggaccaacgtaaaacacagagtggagcacgcaccaaagaagtgggcacaacccctaaccgattgacgaaggccgactggaaacgacctataaggacaaaggagcggatcaagatacagagaggggtaactcagatcgtggccgccctctcgcccttttcgcgtatcgaaatagagaggagaaggaaaggagagcacgaaaagaaactgctgcaagctagcagctggacgtcacatgtggcaacatcatcgttccaccatcaacaccacgtcagcaccagcagcaccatatcatgcagcacacacgtcaccgataaggtgcatcgctggggccaattccatcgtcccatcagcacattggcacacactgttcgtgtttggcatggcaagcccggtattgagcacacaccaactcgtattcggcgtcagcacatcttgccccagtttcttctggctgttgttttgaaactcaggtgccgcaacggtgtgcagccaactgccagcccgcctagtgcctacactgtaaagggttgtgagggtcagggcctgcagaaacctagaaatgcactgaggcacaacccggaccccaaggcgacggcatccctgagcacggcgcccctccaagatgccgaccccgagggccccactgttcacacccgcgacacgacgaccatagctgcaagctag

SEQ ID NO: 138580 - DNA, 3944 bp, Homo sapiens; identical to SEQ ID NO: 131827
  misc_feature (1)...(3944): n = a,t,c or g

SEQ ID NO: 138581 - DNA, 1281 bp, Homo sapiens; identical to SEQ ID NO: 131822

SEQ ID NO: 138582 - DNA, 175 bp, Homo sapiens
ccgattcgccactttacggcaaagcccattcgtgggtcaccaccatcatggtcattccttcgttcgccagttccaccatacgtccagtactcgttgatcatctccggatccagcgccgatgtcggttcatcacgctcaccaatggtgaggcggtacggaagaaatcggccagcac

SEQ ID NO: 138583 - DNA, 247 bp, Homo sapiens
aaccgacatcggcgctggatccggagatgatcaacgagtactggacgtatggtggaactggcgaacgaaggaatgaccatgatggtggtgacccacgaatgggctttgccgtaaagtggcgaatcggcaggcggcgcggtaaaaccgttaagcgtgagttgattatcgcggacaatgtgcacggcgaaagcggtctcgacgcccggcattaccggaaccgacattcgcaccgcaaaactgtacggcg

SEQ ID NO: 138584 - DNA, 551 bp, Homo sapiens
gtgctgaccgactgctcaaccgaagtgaaaaaaggcgaagtggtggtggtttgcgggccgtctggttccggcaaatcaacgctgattaaaaccgtcaacggcctcaaaccggtgcagcaaggtgaaatcaccgtcgatggtatcgtggttaacgacaagaaaaccgatctggcaaagctgcgttcccgcgtcgggatgatacccttgaagtcaaagctatcattaaaaggtgtccgatttacttacttgggggggaaacctgggaaacttgcggtgccggtaccactcggttatgtagtgatggcgcaggatctacagcttgcggggtgtgaatacagcttttccgcgataaaaattgcagcaggcggtcagtttcttcccgtgattggcgccattctgaacataaccgataatgtcatatatgaccaggagattgagttcacattcggtcgcctatccttttgcggattgcctcgttggcccaaaggggaagtagagcgaatctgggcctgcggttatcgcgaggaagtccctgttattgcggtaaacaa

SEQ ID NO: 138585 - DNA, 766 bp, Homo sapiens
cgatgctgtttgacgaaccgacatctgcgctgtatccggagatgatcaactaagtactggacgtgatggtggaactggcgaacgaaggaatgaccatgatggtggtgacccacgaaatgggctttgcccgtaaagaggcgaatcgggtgatctttatggacgagggtaaaattgtcgaatactcgccgaaagacgctttcttcgatgatccgaaatcggaccgcgcaaaagacttcctcgcgaaaatcctgcattaatcactctggcgcgcatacccaattgcgcgccatctcacgctttatcgtttcgcccctcgtatctgttacatcctggcgttacccttgtcgcaaagaagcacacctcaaggagcaacaatggcactgccaattctgttagattgcgacccaagtcatgacgacgctatcgcaatagttctcgccctcgcctcaccagagcttgatgtcaaagcaattacgtcttccgccggaaaccacacaccacaaaaaaccttacgcaatgttctgcgtatgctgaccttgcttaatcgcaccgatattccggtagcaggcgggcgcggtaaaaccgttaatgcgtgagttgattatcgcggacaatgtgcacggcgaaagcggtctcgacggcccggcattaccggaaccgacattcgcaccgcaaaactgtaccgcggtagagctgatggcgaaaacgctgcgtgaaagtgcggaacctgtcaccattgtgtctaccggaccgcaaacctacgttg

SEQ ID NO: 138586 - DNA, 979 bp, Homo sapiens
gggcgagtttgaggtgaaggaagacatgaaactgacatctaaagggcgctatgccgtgaccgcaatgcttgacggtgcgctcaactctgaagcgggcccgcatttcgagctgttccctcatctgtcgattatcgaaaacctgaccctggcgcaggtgaaagtgcttaaacgcgataaagcgccggctcgtgaaaaagccctgaaactgctggagcgtgtcgggctttctgctcacgccaataagtttccggcgcagctttccggcggtcagcagcagcgtgtggcaatcgctcgcgcgttgtgtatggatcctattgcgatgctgtttgacgaaccgacatcggcgctggatccggagatgatcaacgaagtactggacgtgatggtggaactggcgaacgaaggaatgaccatgatggtggtgacccacgaaatgggctttgcccgtaaagtggcgaatcgggtgatctttatggacgaggaacaccaacaggagcacaatgcacggcaatctgtagatgcgaccaggcatgagacgcttcgcagtgagtatatcgccctgtgctctaaagacttcctcgaaaaaccgagtgaagggtcgatcgtggtcaatggccagacgatcaatctggtgcgcgacaaagacggtcaactcaaagtcgccgataaaaatcaactgcgcttactgcgcacacgcctgacgatggtattccagcacttcaatctctggagccatatgacggtgctggaaaacgtcatggaagcgccgattcaggtgttgggcctgagcaagcaggaagcgcgcgagcgggcggtgaagtatctggcaaaagtcgggatagacgaacgtgcgcaggggaaatatccggtgcatctttccggcggtcagcaacagcgtgtttctatcgcgcgggcgctggcgatggaaccggaagttttactgtttgatgaacctacctcggcgctcgatcctgaactg

SEQ ID NO: 138587 - DNA, 4119 bp, Homo sapiens
atgacgctggttcagtctctgctcaatggcaacaaaatcctctgttgtggtaatggaacttccgctgccaatgcacagcatttttgctgccagcatgatcaaccgtttcgaaacggagcggccagcttacctgccattgcactaaatactgataatgttgtcttaacggcgattgccaacgatcgcttacatgatgaagtgtatgcaaaacaggtgcgggcgctgggtcatgcgggagatgtattgttagccatttccacccgtggcaacagccgcgatattgttaaagcagttgaagccgccgttacgcgtgatatgaccattgtggcattgaccggctatgacggcggcgaacttgcaggtttgttagggccacaggatgtggagatccgcattccttcgcatcgtagtgctcgcattcaggaaatgcatatgctgacgagtagggtgaagaatcatggaggcagttttggaatagcgtttgcaatctttgaagcaccttgtgtctgtcactttccagcactgggaactcaggggcttaattggacttacagttccatgtggctggggaagcctcacaaacatgatggaaggcaaggaccttcgcggttgattttcgctttaatgttacgcggagcaggagacgcccataccgaccgggcaggatgcgccgtgacgtggcaggcgaatcacgcggatgtcgtgagcgaagtatttaccaccaaactgcgcacccagaccaagattttgcgcttcgatcagcaattctttttccagttccacatcgcggaacgcctgaccgtgctcattcccttccgttggcagttcatcatagtatttcgcggaaggacgaagcgagcggaagtattatggtattacgtgcccctgtatcacgttattatagctgatcgaatctgcagccaaaaagaagaagaaggaggcaggaagagaaggaagagaggaggaggaggaggaggaggaggaggaggaggaggaggaagaagaggaggagagaagaagcaagcaagaggagaaaaacagggctgctttccctgtgatgcggccggctgggtcacctacctgcatcagattctgtacggagaaaatatcgtcaagttccgcttcagtcaacagaccgcgttccagaacgacttcacgtacactcttaccggtttcggcacagattttacccacgatgtcaccgttgtggtgaccgatgaacgggttcagattatggattactacgattccagtctggaaaccgccatcgatcatgataattaccttgagtttcaacaggttttatctgacatcggcgaggcgctggaagcgcgctttgtgctggaagataagctgattctgctgaccaatgcggtactgccgctgcgtctggaaaatgacgagttaattgtcggcagtgaagatggtattgacccggtttcgctggcggccctgacgcgtaaagtcggacgcaaagtgcgttacgtcattgttctgcggggacaaattgtcacagggttacgtcactggtatgcacgccgacgcggtcacgatccgcgggcaatgttgtacaatgcggttcagcatcagtggctcacggaacagcaggccggtgaaatctggcggcaatatgtgccgcatcagttcctgttcgccgaaatactgaccacgctcggtcatattaatcgttcagcaattaacgtgtgttattgcgccatgaacgcagttctctgccgctcggcaagttttggtcaccgaaggcgttatcagccaggaaacgttggatcgcgtcctgacaattcaacgcgaattacaagtttcgatgcaatcactattactcaaagcaggttgcgcaactggagtccgaaaatgaaggagaataaccttaatcgcgtcatcggatggtctggtttactgctgacgtctttattggagtaccagcgcactcgcagacaatattcggaccagcgcagaagagctggggctgagcgattatcccattttgttatttatccccgtctcgataaagcgctgaaggcacagaaaaataacgacgaagcaaccgccatccgcgaatttgaatatatacaccagcaggtgccggataatattccgctgactttataccttgcggaagcctatcgccattttggtcatgatgaccgggcgcggctgttgcttgaggatcaactgaaacgtcacccaggagatgcccgacttgagcgcagtctggcggctattccggttgaagtgaaaagcgttacgacagttgaagaactgcttgcccagcaaaagcgtgcgatgctgcgccgaccctgcgttgtcgcaagcgcaactgaacgatgcgacgtttgctgcatcgccggaaggaaaaacgctgcgaaccgatctgctgcaacgggcatctacctgaaacaatggtatggcacttcggtttttgaaggcatccgttgctacgactcgcacaaaggaccggttgtattccgccatcgtgagcatatgcagcgtctgcatgactccgccaaaatctatcgcttcccggtttcgcagagcattgatgagctgatggaagcttgtcgtgacgtgatccgcaaaaacaatctcaccagcgcctatatccgtccgctgatcttcgtcggtgatgttggccgggcagctccctggtatcttccgtgttcttcatgctgctgccggaacaggtttacgtttacgctggcagaaatcgcgattcagtccgctgattccgctgcggccttcggtatcgaaccgcgcgttgctatgctctcctactccaccggtacttctggtgcaggtagcgacgtagaaaaagttcgcgaagcaactcgtctggcgcaggaaaaacgtcctgacctgatgatcgacggtccgctgcagtacgacgctgcgcagaaaaaagcatcagacagtggttttattcagcagcaaaccaaagataatcagacacgcgacggtgagccagattggcgcaggcagaccgaaccagttggcgtaaccaagggcaaagaagctttcatcttcgataccgaccgtttaccgtctgaaatgatgtacgccagacctcgaacaatctctgaaagcggccggattcccggaaaaacaaatttatcagttaaacattggctgatcgtcggtatgaacgacagcaccgtgctgggcggcgtacgcgcgacggaaggtcagggctttaaagcggccgatatcatcggcattggcattaacggtgtggatgcggtgagcgaactgtctaaagcacaggcaaccggcttctacggttccctgctgccaagcccggacgtacatggctataaatccagcgaaatgctttacaactgggtagcaaaagacgttgaaccgccaaaatttaccgaagttaccgacgtggtactgatcacgcgtgacaactttaaagaagaactgggagaaaaaaggtttaggcgggggcgagtgatatacgttgaccacgcgactgatcgtcgcgtcgatttttcaccttcgtgtctgggattaacgctcacggaagatggaattcttactcaaggaaatgagcaagtttatattccacagaaagagttaggtgtattaatagtattacttgaatccgctggtcatgttgtactgaaagatatgatcatcgaatcagtatggaaaaatattattgttagtgacgagtccctgacaagatgtatctattctttgcgctgcatttttgaaaaaattggctatgatcgttgcatagaaacaatctaccggaaaggttatcgtttcagcgggcaggttttcaaaactaaaattaatgaagataatacttcagactattccatagctatattccctttcactacttcattgaatacactggatccattaatacttaatcaggaattagtgcaaatcatttcaaataaaaaaatcgatggtctctatacctatccgatggctgcgacaaattttggtaatgatcacatatctcaaaattcattcttgagcagattcaagccagattatttcgttacaggaagaataaaccagaataatgcagtgaacactttatacattgagttgatcgacgctaaaaaaactttttcctcatcgcagtaa

SEQ ID NO: 138588 - DNA, 1594 bp, Homo sapiens
atgcttatcgccgaaggattaatgaccgccaaaaatatcacggtgattaccaacagtctcccggcagcgtttgccctttccgaaaataaagacattactctggtcgtctgtggtggcacggtccgccataaaacgcgctcgatgcatggttccattgccgagcgttcattacaggatattaatgccgatttaatgtttgtcggtgctgatggtattgatgcggttaatggtattacgacctttaatgaaggttattctattagcggtgcgatggtcacagccgctaataaagtgattgccgttctcgattcatcgaaatttaaccgtcgcggttttaatcaggtactaccaatcgaaaaaattgacattattattaccgatgatgctgtgtcagaggtggataaactggcattgcagaagacgcgggatacctcactggtgtatgtcttatccctggccgatttcttccgtaccgcctcaaccattggtgagcgtgatggtacgcaggttgagatgatcctgtttgccggatttgtttatctcgttattagtcttagcgcgtcgttgttggtgctgaccgactgctcaaccgaagtgaaaaaaggcgaagtggtggtggtttgcggcccgtctggttccggcaaatcaacgctgattaaaaccgtcaacggcctcgaaccggtgcagcaaggtgaaatcaccgtcgatggtatcgtggttaacgacaagaaaaccgatctggcaaagctgcgttcccgcgtcgggatggtattccagcatttcgagctgttccctcatctgtcgattatcgaaaacctgaccctggcgcaggtgaaagtgcttaaacgcgataaagcgccggctcgtgaaaaagccctgaaactgctggaacggggtcgggcttttttgctcacgccaataagttttccggcgcagctttccggcggtcagcagcagcgtgtggcaatcgctcgcgcgttgtgtatggatcctattgcgatgctgtttgacgaaccgacatcggcgctggatccggagatgatcaacgaagtactggacgtgatggtggaactggcgaacgaaggaatgaccatgatggtggtgacccacgaaatgggctttgcccgtaaagtggcgaatcggaagcacacaacaaggagcacaattgcactgcaatcgctggctacatgtacgtaagcatctgctcgtggcttactacaatctggttggcattaagcctggcaaagaatcgtacatgaggctaaacgaaaaagcccttgatgatttttgtcagagcctggtcgattacttgtctgccggacatttcagtatttatgagcgcattcttcataagctggaaggcaacgggcaactcgcgcgcgccgcgaagatttggccgcaactcgaagccaatactcaacagattatggattactacgattccagtctggaaaccgccatcgatcatgataattaccttgagtttcaacaggttttatctgacatcggcgaggcgctggaagcggcatttgtgctggaagataagctgattctgctggtgcttgacgccgcccgcgtcaaacatcctgcttga

SEQ ID NO: 138589 - DNA, 1251 bp, Homo sapiens
tcagcttgcgaaagcggcgcgcaaatccgccagtggattatcgacactcccttccagcctgagctgaaaacgccatccgcgaagcctatgcacagctttccgccgatgacgaaacgcctcttttgcggtgcgctcctccgccaccgcagaagatatgccggaccttcttttgccggtcagcaggaaaccttcctcaacgttcagggttttgagccgttctcgtggcagtgaaacatgtatttgcttctctcgcatcatctgggtgatgttctccattgataccgaatccggctttgaccaggtggtgtttacacttccgcatggggccttggtgagatggtcgtgcagggtgcggttaaccggatgagttttacgtgcataaaccgacaatgaccgacccggactgggaaccgatatgaagaaagcatctgccatcgtcacaaacgtggcggtcgtcctgtcagggcgatatcgccgtgaacgggcatccggggaatgggcagcgctttcatttctgaggccacatacgctgaccgtgttcgtcataccccatatacagtgggatgatccccagatgtcgcgaccaatcaggtaggcatctttttcgctgtcgtacagtgcaaaggaaacatgccctgcaagtcgtcgagaaattccggccctttttcccaagtgatcggtaccgatatggtgctccaggcgattacgcgcaatcttttggcggtcaaattgacgacgttgtaaaggcaatacagacaccctcgaaatttcgacgtttcctgcgcgtatcatttgattagattcgactacccattttgcattcgggtaaatcaccacttcggcgaatgcccaacctgatgaggcgtcacagtcacacggcccgtcactatcctgccctgggaacacgggggccgcagcccacggacaggcaggaacggcccgcagtggcctctgggcaatgacttgaacaggggaaaggcgggaaacgctcggcgcgaagggctctgggcctcgtattcggagggcgaggcctgtgctcccaatgatgtaaaccgcgtgcaggccagatacttcccagagccacagccccgcaccatcccagggtccagctggagaactaaggctgaggccccaatcgctgcccctggatggtgtggagaaaggattgccctcttgatggcagtgagaaggaagggtcagcaaaaggaccaagaacaaatggtccaggtcatagtgcttcccagccttcat

SEQ ID NO: 138590 - DNA, 2387 bp, Homo sapiens
  misc_feature (1)...(2387): n = a,t,c or g
atggtcatgagccagaaaaccctgtttacaaagtctgctctcgcagtcgcagtggcacgtatctccacccaggcctggtcggcaggctttcagttaaacgaattttcttcctctggcctgggccgggcttattcaggggaaggcgcaattgccgatgatgcaggtaacgtcagccgtaaccccgcattgattactatgtttgaccgcccgacattttctgcgggtgcggtttatattgacccggatgtaaatatcagcggaacgtctccatctggtcgtagcctgaaagccgataacatcgcgcctacggcatgggttccgaacatgcactttgttgcaccgattaacgaccaatttggttggggcgcttctattacctctaactatggtctggctacagagtttaacgatacttatgcaggcggctctgtcgggggtacaaccgaccttgaaaccatgaacctgaacttaagcggtgcgtatcgcttaaataatgcatggagctttggtcttggcttcaacgccgtctacgctcgcgcgaaaattgaacgtttcgcaggcgatctggggcagttggttgctggccaaattatgcaatctcctgctggccaaactcagcaagggcaagcattggcagctaccgccaacggtattgacagtaataccaaaatcgctcatctgaacggtaaccagtggggctttggctggaacgccggaatcctgtatgaactggataaaaataaccgctatgcactgacctaccgttctgaagtgaaaattgacttcaaagatgttttaaatatgaatattgaacttcgtcatctgcgttactttgttgctgttgcggaagagctgcatttcgggcgcgccgctgcccgcctgaatatttcgcaaccgccgctaagtcagcagattcaggcgctggagcaacaaattggtgcccgactgctggcacgaaccaatcgcagtgtattgctgacggcagcaggaaaacagtttcttgcagatagtcggcaaatcctgtctatggtggatgacgctgccgctcgcgctgaaaggctgcatcagggtgaagcgggggagttgcgcattggttttacttcgtcggctccttttattcgggcggtgtccgatacgttatcgctgtttcgccgtgattatcctgatgtccatttacaaacccgcgaaatgaacactcgcgagcaaatcgctccgctcattgaaggaacgctggatatgggattgctgcgtaacacagcgttaccggagtcgcttgaacacgcagtcatcgtccatgaaccgcttatggcgatgatcccgcacgatcatcccctggcaaataacccgaatgtaacgctggctgaactggcgaaagaaccctttgtcttttttgatccgcacgtcgggacagggctgtatgacgatattctcgggctgatgcgacgttaccatttgacgcccgtcatcactcaggancctacagattatttcggagcgcgaaaatatagggagtatgcggtggttgctgaaaaccagcctgggcacattgatcaaataaagcagaccaacgcgggcgcggtttatcgcctgattgatcagcttggtccagtctcgcgtatcgatctttcccgtctggcgcaactggctcctgccagtatcactaaaattgtccgtgagatgctcgaagcacacctggtgcaagagctggaaatcaaagaagcggggaaccgtggccgtccggcggtggggctggtggttgaaactgaagcctggcactatctttctctgcgcattagtcgcggggagattttccttgctctgcgcgatctgagcagcaaactggtggtggaagagtcgcaggaactggcgttaaaagatgacttgccattgctggatcgtattatttcccatatcgatcagttttttatccgccaccagaaaaaacttgagcgtctaacttcgattgccataaccttgccgggaattattgatacggaaaatggtattgtacatcgcatgccgttctacgaggatgtaaaagagatgccgctcggcgaggcgctggagcagcataccggcgttccggtttatattcagcatgatatcagcgcatggacgatggcagaagccttgtttggtgcttcacgcggggcgcgcgatgtgattcaagtggttatcgatcacaaacgtggggcgggcgtcattaccgatggtcatctgctacacgcaggcagcagtagtctcgtggaaataggccacacacaggtcgacccgtatgggaaacgctgttattgcgggaatcacggctgcctcgaaaccatcgccagcgtggacagtattcttgagctggcacagctgcgtcttaatcaatccatgagctcgatgtt

SEQ ID NO: 138591 - DNA, 1563 bp, Homo sapiens
atgatgtacaagccgactcaggaagtgacggatggctgtggtttctccatcggtcaccagcagcagtttgcatcatggattgcctataaagtcgcgccgttcctcggcaaaaaagaggagagcgttgaagacctcaaattgattatgggtggcgctatggggctgggtaactggacgcctgcggctgaatttaatatttacgttgacccggaagcggcagaaattgtcttccagtcagggatcccggtggtgatggccggtctggatgttactcaatgcgcaggtttcgtgacggcttactggaacccgccgacgctcaatggcgtactgatgaaacttagcgttgggcaatatctggcaaaagataaaggcgcaacgatcgacgtcgccaaacgctttgacagcggcgtggcggtaggggtatgggcggcaatcagtaacgtatctaaagatgactacggcgaaggcggctttagtaaaggtttttatatctcgattccattcgacttgatgaccattggacctaaccgcaaccgcgcggtggtttcgtggacaccattgacgcgtgatggtggacaaatgctgtcacgcaaataccagctctatccaatgacggcagagcgagaagtaccgaatttatcgaccagtaacaaggatgtcattgaactacctgacaatcagtatgacctggacaaaatggtcaatatctatcccgtcacgccaggattgattgatcagttgcgcgccaaaccgattatgtcgcaggctaacccggagctggagcagcaaatcgcaaactatgaatatcgtatcgggattggtgatgacggtctgatcacccggactaacaccccgagcaaccgtagcggtggtcgacatgatatggtaaaagataaagcggcctataaatctttcctgcgtgaactgggctacctggtgccgcaaccggagcgcgtgacgaagatatcgagtatgttgagtcgatcaaaaacgctgccggagtcattgccgctcggcattcgccagcggctttcgctggcggtggcggtgattcatcgcccggagatgttaatcctcgatgagcctacttctggtgtcgatccggaagcggcagggcagagcaacgaagccgaagcgccgcccgtggtacacgacaccacccacgcgccgcgtcagggatttagcctgcgccgtctgtttagctacagccgccgcgaagcgctggaactgcgacgcgatccagtacgttcgacgctggcgctgatgggaacggtgatcctgatgctgataatgggttacggcatcagtatggatgtggaaaacctgcgctttgcggtgctcgaccgcgaccagaccgtcagtagccaggcgtggacactcaacctctccggttcccgttactttatcgaacagccgccgctcaccagttatgacgagcttgatcgtcggatgcgtgcgggcgatatcacggtggcgattgagatcccgcccaatttcgggcgcgatatcgcgcgtgtacgactggactgtcatcgtcagtgcggtacgtactgctatcggtag

SEQ ID NO: 138592 - DNA, 2445 bp, Homo sapiens
ttattgcggctcaagattagcgactgccgaagcgccgatgcggaacatttccgggtcaggtttatcgaccatgattttgaccggaaaacgctgggcaacgcggacccagttaatagaacgagacactttcggcaggccgcccagcaccaggccgccgtcatccggtagcacgccgtagccaatcgaatccactttaccctcgaaggttttgccgctgtcactcatcaggcgaatcgttgcgggtgtacctgagcgaatatttttcagatcggtttcgcggaagttggcgatcacataccagtgacgagtgtcgattagggtaaaaatagggcgcatggcagaagcaaattgcccgacggaggttttgagggaaatgacccggccatcaaacggcgcgcgaacggtcgccatttccagatgcagtttggtcagggcaatatccgcttcgaccgccgcacgctgggcaactaatgcatccacgccgctgacggcgctggcggctgactgcgcctgtaacaatacggcattaagatccgcttctgcggcgcgctgcgccgttcttgcacggtcaacatcttccgatgagacaaaaccttctttcagtaatggctcggtgcggcgtaatgtatctgtggcctgtttcgcggcggcacgggctttttctaccgtggcattaaccgagtcggcaccaaactgttgcgcgtcggggatcgtctgaatcacatcgcgcgccccgcgtgaggcaccaaacaaggcctctgccatcgtccatgcgctgatatcatgctgaatataaaccggaacgccggtatgctgctccagcgcctcgccgagcggcatctcttttacatcctcgtagaacggcatgcgatgtacaataccattttccgtatcaataattcccggcaaggttatggcaatcgaagttagacgctcaagttttttctggtggcggataaaaaactgatcgatatgggaaataatacgatccagcaatggcaagtcatcttttaacgccagttcctgcgactcttccaccaccagtttgctgctcagatcgcgcagagcaaggaaaatctccccgcgactaatgcgcagagaaagatagtgccaggcttcagtttcaaccaccagccccaccgccggacggccacggttccccgcttctttgatttccagctcttgcaccaggtgtgcttcgagcatctcacggacaattttagtgatactggcaggagccagttgcgccagacgggaaagatcgatacgcgagactggaccaagctgatcaatcaggcgataaaccgcgcccgcgttggtctgctttatttgatcaatgtgcccaggctggttttcagcaaccaccgcatactcccgtgtaaccggtaatattatgcggattgcacgtttacatattgagttccgagcacctgaagtacaagggaagttatcacgaagtggacgaactgcgcttttggttggtctaccgttcaggtgtacaggggcgtttgttctatggacctcgcaggtatctgatgccgttccgagtcgcgtcaacgtctccataccctgacaatgccccccatttaagcgctttatctcggccaatttggaccatactaaatatggatttgtaagagtattgtcggacatctcgcgggatattttgcctgcatattggccatgataccgcttagccaatatgttcttgtgcgtcgcggcgcccttgtccccccccgagctctgcgtgtaaccgtcttccgcgttccccgctggccccgggtagctttttaccccggggagggtctctggcacctgtatcgctttggtctgcacggacttcccgggacgtgtgggaaccctgtcagatagcggggggaaccagagcgggtagcaaggtccacttcctgggtaagtaaagtagttcagtccctcgtcgaccggcactgttattgcaagcaacttcctttccgtagcattgggatttccccaggattcgtcaaaagcaataatcgggccaaccaaggcacccccggggtccttgccaaggttacgtttaaagaccggtttgccagttgacacgctcgggcttggatgcttacattcatggaatgcaagaccatgcatccgttcagggtttgtcgaatcgagagtgacggttgcacttttgaaggccacggacaggataaaggagcgtgcagcagacaagacacgggcggcggcacaaccgcccataccgtcgttacgcatttcggtggcacggcgttgcgccggcaaaatcgacctgccagataagatagcggtcagccagctgctggaatctgggttaacgacgtcagtaacgcaatgatgtgttccccagctcagcaaataaaccacctgaacaacaggtaacgctgaggatccccgacttgcgataatgtgcggaaccataaatgtaggcat

SEQ ID NO: 138593 - DNA, 2162 bp, Homo sapiens
atgaatgatgtagacagggttgggggcaaaaatgcctccctgggtgaaatgattactaatctttccggaatgggtgtttccgttccgaatggtttcgccacaaccgccgacgcgtttaaccagtttctggaccaaagcggcgtaaaccagcgcatttatgaactgctggataaaacggatattgacgatgttactcagcttgcgaaagcgggcgcgcaaatccgccagtggattatcgacactcccttccagcctgagctggaaaacgccatccgcgaagcctatgcacagctttccgccgatgacgaaaacgcctcttttgcggtgcgctcctccgccaccgcagaagatatgccggacgcttcttttgccgcatgtacccttgttcctggtcagaatttatcgaccagtaacaaggatgtcattgaactacctgacaatcagtatgacctggacaaaatggtcaatatctatcccgtcacgccaggattgattgatcagttgcgcgccaaaccgattatgtcgcaggctaacccggagctggagcagcaaatcgcaaactatgaatatcgtatcgggattggtgatgtgttgatggttacggtctgggatcacccggaactaaccacccccgcagggcaataccgtagcgccagtgataccggcaactgggttaacgccgatggtgcgattttctacccctatattggtcgcctgaaagtggccgggaaaacacttacccaggtacgcaacgagattacagcgcgtctcgattcagtcattgaaagcccgcaagtcgatgtcagcgtcgcggcgttccggctcgcaaaaagcgtacgtcaaccgccgaagtcagcaaatcgggtcagcagccgattaccaatattcctctgaccatcatggatgcgattaacgccgcgggcggtctgaccgcagatgcagactggcgcaacgtggtgctcacccagaatggcgtaaagaccaaagtgaacctctatgcgctgatgcagcgtggcgacctgcgccagaacaaactgctgcacccgggcgatattttatttattccgcgcaacgatgatctgaaagtcttcgtgatgggtgaagtgggtaaacagagcacgctgaaaatggaccgcagcggtatgaccctggcggaagcgctgggtaacgctgagggtatgaatcaggatgtcgctgatgcgacggggatttttgttattcgtgcaacgcaaaacaagcagaatggcaaaatcgccaatatttatcagctgaatgcgaaggacgcatcggcaatgatactcggaacggaattccagcttgaaccttacgacattgtttatgtcactaccgcgccgctggctcgttggaaccgtgtgatttctctgctgaaaaaacttgagcgtctaacttcgattgccataaccttgccgggaattattgatacggaaaatggtattgtacatcgcatgccgttctacgaggatgtaaaagagatgccgctcggcgaggcgctggaacagcataccggcgttccgggcgaggcaaaaggccttgttggtgcccccccgggggcgcgcgatgtgattcaggtggtatcgatccccaacgtggggcgggcggtcattccgaatggtcatctgctaccgcaaggcagcagtagtctcgtggaaatagcccacacacagggcggaccccttatggggaaacgctgttattgcgggaatcacggctgcctcgaaaccatcgccagcgtggacagtattcttgagctggcacagctgcgtcttaatcaatccatgagctcgatgttacatggacaaccgttaaccgtggactcattgtgtcaggcggcattgcgcggcgatctactggcaaaagacatcattaccggggtgggcgcgcatgtcgggcgcattcttgccatcatggtgaatttatttaacccacaaaaaatactgattggctcaccgttaagtaaagcggcagatatcctcttcccggtcatctcagacagcatccgtcagcaggcccttcctgcgtatagtcagcacatcagcgttgagagtactcagttttctaaccagggcacgatggcaggcgctgcactggtaaaagacgcgatgtataacggttctttgttgattcgtctgttgcagggttaa

SEQ ID NO: 138594 - DNA, 1389 bp, Homo sapiens
atggctggcaatcgccgctttatgtgcacgccgaaaacgcacgggttatcaatatcacaacatggcacattcccggaacacgctgggtgcaaaattcgttgcgctggcagatctggcagagttcgacctgcggaactgctggccccttataccggtgatatcgccgctgaaggaatcagcaaagccatgcgcggaggcgcaaagttcctgcatcacggcattaagcgccagcaacgttatgtggcggaagccattactgaagagtggcgtatggcacccggtccgcttgaagtggcctggtttgcgggcgtcatctatcatctgtattactatcgtgcgcgcttcttttgcgccgcgcaaccccttgtatctggctttcacgaagccgaactgtcgcttgatgatgcgaaatgggtgctccaccctggcccggatgctggctttcatgtattcgatgttgatggccgttttgttcttgcgtggatgctgtttcaaggttcttaccttgccggggcgctcggcgatcagccagtccacatccacctcggccagctcctcgcgctgtggcgccccttgcagattacccagctgattgaggtcatgctcgttggccgcggtggtgaccaggctgtgggtcaggccactcttggcatcgacaccaatgggggcctttatgccaaagggccactgattgcctttcttggtctgatgcatctccggatcgcgttgctgctttttgttcttgggcgaactgggtgcgcttatgatggtggccgtccgcagcttgctgagaaactgtacagcgaactgcgtgcacaaggtatcgaagtgctgctggatgaccgcaaagagcgtccgggcgtgatgtttgctgatatggaactgatcggtattccgcacactattgtgctgggcgaccgtaacctcgacaacgacgatatcgaatataaatatcgtcgcaacggcgagaaacagttaattaagactggtgacatcgtcgaatatctgaacgctgcgcttttgattgctgtgacagtgttgaccagcatggaagccagcgacctggtcgatcttggcatgacactgtcacctgcagattatgcagaacgtctggcggcactgacgcaaaaatgtggccttgatggtgtggtgtgttctgctcaggaagctgtgcgctttaaacaggtattcggtcaggagttcaaactggttacgccgggcattcgtccgcaggggagtgaagctggtgaccagcgccgcattatgacgccagaacaggcgttgtcggctggtgttgattatatggtgattggtcgcccggtaacgcaatcggtagatccagcgcagacgctgaaagcgatcaacgcctctttacagcggagtgcatga

SEQ ID NO: 138595 - DNA, 576 bp, Homo sapiens
atggctggcaatcgccgctttatgtgcacgccgaaaacgcacgggttatcaatatcacaacatggcacattcccggaacacgctgggtgcaaaattcgttgcgctggcagatctggcagagttcgacctgcggaactgctggccccttataccggtgatatcgccgctgaaggaatcagcaaagccatgcgcggaggcgcaaagttcctgcatcacggcattaagcgccagcaacgttatgtggcggaagccattactgaagagtggcgtatggcacccggtccgcttgaagtggcctggtttgcgggcgtcatctatcatctgtattactatcgtgcgcgcttcttttgcgccgcgcaaccccttgtatctggctttcacgaagccgaactgtcgcttgatgatgcgaaatgggtgctccaccctggcccggatgctggctttcatgtattcgatgttgatggccgttttgttcttgcgtggatgctgtttcaaggttcttaccttgccggggcgctcggcgatcagccagtccacatccacctcggccagctcctcgcgctgtggcgccccttg

SEQ ID NO: 138596 - DNA, 4707 bp, Homo sapiens
  misc_feature (1)...(4707): n = a,t,c or g
atggcgcgaacactggcgcacgagcttatcgactttggtgaaatcaaacgcggtttgttaggcatcaaaggcaccgagatgagtgccgatatcgccaaagccttcaaccttgacgtgcagcgtggcgcgtttgtcagcgaagtgttgccaggttctggctcggcaaaagcgggcgtcaaagcgggcgatattattaccagcctcaacggcaaaccgctgaatagctttgctgagttgcgctctcgtatcgcgaccaccgagccgggcacgaaagtgaagcttggcctgctgcgtaacggcaaaccactggaagtagaagtgacgctcgataccagcacctcttcgtcggccagcgctgaaatgatcacgccagcgctggaaggtgcaacgttgagcgatggtcagctaaaagatggcggcaaaggtattaaaatcgatgaagttgtcaaaggaagcccagctgctcaggctggcttgcaaaaagacgatgtgatcattggcgtcaaccgcgatcgggtgaactcgattgctgaaatgcgtaaagtgctggcggcaaaaccggccatcatcgccctgcaaatttttccggtggatcatagaggtgcgatcggagggcagaccactgacattcccccagatcccagcggcattaaccacgacaggtgcatgaagggcctgagtttcgccggtgagatggttacgtacacgaacaccgcacaccgtcgcgccttcacgaatcagccccgtgacttcatgagcgtggcctggttgggtaaaggtattgccattctgccctcggttggtgaagtgcgttctccggttgcgggtcgaattgcttcgttgttcgccacattacacgccattggcattgagtcagatgatggtgtggagatcctgattcatgtcggtatcgacaccgtaaaactggacggccaaatcttttccgctcacgtcaacggcgaagccgggctgaagcgggtggtgaaaaaggaacacgcggacggcagcgtcacgcagagtcagtttgacgccgtgggcaggctcagggcacagacggcatccgcaggcaggacaacagagtacagcccggatgtgagcgatgtacgcatcaattgcttcgtcagtgaacacgccaccggctttcaggaactcgcggtccagatccagttcgttcagtgcttcttccagagagcctgcaacctgtgggatctctttcgcttcttctggcggcaggtcatacaggtttttgtccatggcttcgccgggaccaacttcgtgcagatgctggcgatcttcttgatcccaacggcgctgtgctttgcctttggcgtggtgatgtgggcagaagttcagggtaatcctcatctgctggcactgggcacggacagcagcatcaatatggaaggtaaagagagccgtttcggcgtgctggtcagtagcctgtttgcggtcgtgacgacggcggcttcctgtggcgcggtgattgtgaagagttacaaaaccagcaatatctcccggttgatacagatggccattgacatcaggttgaataatgtcagcaggcccggagacacaatcggcactgatacaaggaatcccccacgacaaggcttcaatccctttttattctttgccacgggttccgtcggtgagattatgccgcgtgaacatgaagattattcctgggaatactcggaaatttgttcacagcaatacgccggtacgatttccaagtggtgcgaaaagctttcttgcgtcacccggaaaaccccgcaaggcattcgtgggcaggatgaatttgttcgcgtgagttgggatgaggcgctggatcttattcaccaacaacataaacgcattcgtgaggcttatggtccggcatcgatttttgctggttcggtgacgaagcagcgacagacctccgtggaacgcctggtacagcaatttgctgatgcaggtatccggaagtctgctgacgactctgtgtctgcacaagagaaacagactttgattgaccacctgaatcagaaaaattcaggcccggacaaattgacgctgcaacgtaaaacacgcagcacccttaacattcctggtaccggtggaaaaagcaaatcggtacaaatcgaagtccgcaagaaacgcacctttgtgaaacgcgatccgcaagaggctgaacgccttgcagcggaagagcaagcgcagcggcttattgtcgtgttcggttttgcgatgatcccgcactcgaatttcatcgatataaccgccttcccgcaagcctccgtctttttccgcgatgtcttgcttaccattccattttgcttcttttctgcagtatttattcaggtacttaacccaatgaatattgcctatcgtaaacgggaagcggataaagtactggcaacccggctcgcgctgcgtacccaccgaattagttatatcacgctcatcgcggtgatcctgttttttgccttttcgtttaccttctcaattagccacgaagaagccgtttctgcctttgaacaaaatatctcagcactggcgctggccgcgcaggtgatccctgggcatatcattcatatcacctctacggtgcttaatatctttgccgtactgaccgcattctttggcatttatctcggtttccacgaggccattaaaggcattattctcaatctgttaagccgaattattgataccaagaaaattaactcacgcgtgctgactctggcgatctgcgcttttatcgtcattacgttgacgatttgggtttcgtttcgtgtatcggtgctgggtgaaattgacgttaacgaaatggcgcagatcaaatccgctctggttttgctgcatccgataatcagcaaggatcatcagcggatcgctgttcggcacggcatcggcaaaggttttttggtccggaaaaagtcccagcaataccagcaactggatgatgaatatctacaagctcgctatattgatgtggacgatcttctgcatcgcaccctggtccacctgacccaaacgaaagaagaactcccgcagtttaactcgccaactattctactggcggagaacatttatccttccacagtactgcaactggatccggcggttgtaaaaggtatctgccttagcgccggaagtccggtatcccacagcgccctaatcgcccgtgaactggggattggctggatttgccagcagggtgagaaactgtatgcgatacaaccagaagaaacgctaacgctggacgttaaaacgcaacgtttcaaccgtcaggcaacttcacgaagaactggcgcgtattcgccgtcaggctggagctatgacaacggcgaagattacgccgatgtccgttgtgtcgctgcgccggtgtttaacgccaataacgagcttaccgctgcgatctcggtggtcggtacccgcttacaaatcaatgaagaataccgtgattatctggcgggcaaggccattgcctgcgccagggatatttcacgtctcctcataacaatggagaacatcgtgaccgaaacgaccgatcgcgaactgaccaccgttatgtctaacagcttcggcttcggcggcaccaacgccacgctggtcggagtagaccgccagcgtcgcatccgacgttacgcgccaatgcgctccggcactaacgcaaacaggaacctgatggttccctttttcacatcattgacaatcgccgccagttccaggcaaacttcccgctttgtcgatttccttctgaaaagacggagaaattatgagccagaaattaaaagtcgtcactattggtggcgggacagctataccccggagttactggaaggatttattaagcgttatcacgaattgccggtcagcgaattatggctggtggatgtcgaaggtggtaaaccgaaactggatattattttcgatctctgccaacggatgattgataacgctggcgtcccgatgaagctttataaaacgctggatcgccgcgaacgattgaaagatgctgatttcgttactacccaactgcgcgttggccaattaccggcgcgtgaactggatgaacgtattccattaagtcatggttatcttggcgccgtccagttatcgtcgattggtcgtcgatgcaactgccgtaactggcagtcgtttcttggttgcatcgantgtctttggttcgtggctgaaacgaaaaatggtgaggcggcgattgtgatcggcacccgctccgcgctgtttacgccgtttaaaaatctcggcgtgattgtcattgatgaagagcacgacagctcctacaagcagcaggaaggctggcgctatcatgcccgcgacctggcggtgtatcgtgcgcacagcgagcaaatcccgattattcttggctccgcaacgcccgcgctggaaacgttatgcaacgtccagcagaaaaaataccgcctgctgcgcctgacccgtcgggcagggaatgcgcgtccggcaattcaacatgtgctggatttaaaaggtcagaaggtgcaggcaggtctggctccggcgttaatcactcgtatgcgccagcatttacaggctgataaccaggtcattctctttcttaaccgccgtggctttgcgcctgcactgctgtgcacgactgtggctggattgccgaatgcccacgttgcgatcactactacacgctgcatcaggcgcagcaccatctggctgccaccactgtga

SEQ ID NO: 138597 - DNA, 1419 bp, Homo sapiens
ttactcaaacaaattactatgcagtttttgcaccacctgctcggcatcttcgccgggcaccaggaagcacaggttatggctggatgcgccataacaaatcatgcgaatgttgaacggttccagtacgccgaatacctctttgccaacgccgcaggcttttgacaggtcattgccaatcaacgcgaccagcgccagaccttcttccacctccacccgacacagtgcggaaagctccatcagcagagattgcgtcagcaacgtatcgccagtggaggttgaaccggtggtatcaagggttaatgccacgctcacccggctgatttgactgcctgccatgaggccgactctagaggatcccccagtcacgccgtggccgctgtagccctgcatgtaatagatgttggtatcttggcgaccaaactgcggcatacgcgacagggtcagctgtaagttgcccgtccagcggtaatcaattttcacgcccttcagctgcgggaaggttttcagcagtttcggcaccacaaggcgctcaacgtcatccgggtcgcgcgcgccgtagaccacgccgccgccgtacagcaggcggttgtcggcggtaagacggtagtaatcaagcagatagttacagtcttccacacagtagtttttcgggatcagcgaacgggctaaatcttccgacagccgttcggtggtgatcacctgcgtgccgcacggcatgctgcgtttcgccagttccggctctactttatcgcccagatacgcattcccggcgacaatcacatacttcgccgtcacctgacctttggcagttcgcacaacggctggcgtggtgtttcgggggagcgaacgcagccaaggcagaggcggcttgaaggatgaagtgtatataaagaatgtcgccagaaataaacgggcatacggcccggggatctctgcgccctgacgttcacaaactgcatatatgccgaagagctggcactgctggaaactctcgacaccggcaaaccgattcgtcacagtctgcgtgatgatattcccggcgcggcgcgcgccattcgctggtacgccgaagcgatcgacaaagtgtatggcgaagtggcgaccaccagtagccatgagctggcgatgatcgtgcgtgaaccggtcggcgtgattgccgccatcgtgccgtggaacttcccgctgttgctgacttgctggaaactcggcccggcgcgcgaaggtctgcagcttcactcctgaagccagtgagaccacgagcccatgctggtcactctttgggtccacactgcctttatgagctgtaacactcaccgcgaaggtctgcagcttcactcctgaagccagtgagaccacgagcccactgggaggaatgaacaactccagaaacgccgccttaagagctgtaacactcaccat

SEQ ID NO: 138598 - DNA, 915 bp, Homo sapiens
gttctgacgcagctgcaggccaagcaggaactggaggcgttgattgccgctggccgccgtgaacatgtgttttgcgcctgcgtgatgcatgggcacgggaagcatattttgaagcaacaaacaccgctgtggctggcacaacatccgcatgtgatggcctttcatcaggcaccaaaagagtatggcggtgatgcggcgttgttggtgttgattgaagtcgaagagtggctgccgccggagttgccctgaggagttgagcgcgttgcgccaggtacgggtaatggcaggggcgaatgcccctgccatatgtttgaggccgaacaaatcgatagataattcatcgctgtctttcagcatcagaacatcgcgaataaacatcttcatgccgatcggaatattacacacgccgataaagcgtttaaatccggtatgacgataaacggcttcagtgaccattcccgccgggttagtgaagttaatcacccatgcattcggacaaagttcttcgacatcttttacgatgtcaaaaatcaccggaatggtacgcagacctttaaacaaaccgcccgcgccgttggtttcctgaccaagataaccatgacttaatggaatacgttcatccagttcacgcgccggtaattggccaacgcgcagttgggtagtaacgaaatcagcatctttcaatgcttcgcggcgatccagcgttttataaagcttcatcgggacgccagcgttatcaatcatccgttggcagagatcgaaaataatatccagtttcggtttaccaccttcgacatccaccagccataattcgctgaccggcaattcgtgataacgcttaataaatccttccagtaactccggggtatagctgctcccgccaccaatagtgacgacttttaatttctggctcat

SEQ ID NO: 138599 - DNA, 1836 bp, Homo sapiens
atgaaaccgatatctttatctgcgatagcagggagtttttccaccactttgctaaagcctcggttcatatttagcccgtggtcagcatcgccaatttcgcgatccagtccggtaagatactcgctctcggtgctgaaaatatcgccacaacgagtgatcgtcgagcgcaacggcaaaaagctgtatgtaaagcgcatgacgcatcatctgtttcattccgtacgttatccgttcggccgaccaacgattgtccgtgaggttgcggtaattaaagaactggaacgggccggtgtcatcgtgccgaagatcgtttttggtgaagcggtgaaaattgagggtgaatggcgagcgttgctggtgactgaagatatggcggggttcatcagcattgctgactggtatgcccagcatgcagtatcgccttattctgacgaagtacggcaagccatgttgaaagcagtggcgctggcgtttaagaaaatgcatagcattaatcgtcagcatggctgttgttatgttcgccatatctatgtgaaaacagaaggtaatgcagaagctggttttcttgacctggagaaaagtcgtcgccgcttgcgtcgcgataaagcgattaatcatgacttccgccagctggaaaaatatctggagccaatccccaaagcggactgggagcagaccaacctcgcccactggtgcgatccgaaattcgacagcgtattgcgtaaggcgctctcttcgcagcagctggcggcgcgtattgaagcctatgacgaagcgcagagtattctggcgcaggaattgcccattttgccgctggcgtcgtcattgcgtttgcaggcctatcggtacgatatcaaaggtctggtacttagcccgtttggtaacgcctcctttgctggggtgtatcgcgagaaacaggatgagagtaatttatttgatggcagcgcagagaaaacgtcaggtctggttgtgattggcgatggcaataccgttaatatgaatggtggacttgaactgattggagagaaaaacgcgcttgcagatgggtcgcaggttacttccttgcgcacaggatatagttataccagcgttattgtcgttagtggtgagtcgtcggtatatctgaatggagatacgacaatcagcggagaattccctctggggtttgccggggttattcgggtacaggataaagctttgctggaaattggcagtgcgcacatctgttatcacttaacccattacaagcccgctgccgcagatattcccgtggcgagcgataacccagcgacacccggtttgaaatcaggcggttaccactgtggtatccatgacaaattatcaatgcgaaatgtttggacccaattcgactgtgaaaacgaagtgagacgaaggcaaagtccggtcatcaacccgaacagtatgccgcggctgggtattgaagttgtcgatgtgcgtatcaagcagatcaacctgccgaccgaagtgtctgaagcgatctacaaccgtatgcgcgccgagcgtgaagcggtagcgcgtcgtcaccgttcacaaggtcaggaagaagcggaaaaactgcgcgcgactgccgactatgaagtgaccagaacgctggcagaagctgagcgtcagggccgcatcatgcgtggtgaaggcgatgccgaagcagccaaactgtttgctgatgcattcagtaaagatccggacttctacgcattcatccgtagcctgcgtgcttatgagaacagcttctctggcaatcaggacgtgatggtcatgagcccggatagcgatttcttccgctacatgaagacgccgacttccgcaacgcgttaa

SEQ ID NO: 138600 - DNA, 1050 bp, Homo sapiens
atgattgatgtcttagggccggagaaacgcagacggcgtaccacacaggaaaagatcgcaattgttcagcagagctttgaaccggggatgacggtctccctcgttgcccggcaacatggtgtagcagccagccagttatttctctggcgtaagcaataccaggaaggaagtcttactgctgtcgccgccggagaacaggttgttcctgcctctgaacttgctgccgccatgaagcagattaaagaactccagcgcctgctcggcaagaaaacgatggaaaatgaactcctcaaagaagccgttgaatatggacgggcaaaaaagtggatagcgcacgcgcccttattgcccggggatggggaacgaaccgatgactggatggatggccgccgcagtcgtcacactgatgatacggatgtgcttctccgtatacaccatgttatcggagagctgccaacgtatggttatcgtcgggtatgggcgctgcttcgcagacaggcagaacttgatggtatgcctgcgatcaatgccaaacgtgtttaccggatcatgcgccagaatgcgctgttgcttgagcgaaaacctgctgtaccgccatcgaaacgggcacatacaggcagagtggccgtgaaagaaagcaatcagcgatgtgaaacagtacaggacgtcatgctgggagcggtggaacgccgcttcggcaacgatcttccgtcgtctccagtggagtggctgacggataatggttcatgctaccgggctaatgaaacacgccagttcgcccggatgttgggacttgaaccgaagaacacggcggtgcggagtccggagagtaacggaatagcagagagcttcgtgaaaacgataaagcgtgactacatcagtatcatgcccaaaccagacgggttaacggcagcaaagaaccttgcagaggcgttcgagcattataacgaatggcatccgcatagtgcgctgggttatcgctcgccacgggaatatctgcggcagcgggcttgtaatgggttaagtgataacagatgtctggaaatatag

SEQ ID NO: 138601 - DNA, 1881 bp, Homo sapiens
ctatatttccagacatctgttatcacttaacccattacaagcccgctgccgcagatattcccgtggcgagcgataacccagcgcactatgcggatgccattcgttataatgctcgaacgcctctgcaaggttctttgctgccgttaacccgtctggtttgggcatgatactgatgtagtcacgctttatcgttttcacgaagctctctgctattccgttactctccggactccgcaccgccgtgttcttcggttcaagtcccaacatccgggcgaactggcgtgtttcattagcccggtagcatgaaccattatccgtcagccactccactggagacgacggaagatcgttgccgaagcggcgttccaccgctcccagcatgacgtcctgtactgtttcactgttgaagccgccggtagtgaccgcccagtgcagtgcctcacgatcacagcagtccagcgcgaacgtgacacgcagtctctctccgttatcacagcagaactcgaacccgtcagagcaccatcgctgattgctttctttcacgggcactctgggcgttatctcttcgaaacggacgattttgccgtcgcgcattccctgataaagcggggcagggaccagcgcttccgttgacggaccatgattgataagcagggcgtagttccagccatacttgatttgatcttcggtggtagatgccccgccctggatggttaacccggcatcgccgctaatagcggttgccagtaattcagaaagaagagattttgcggtacccggttcccccaccaacatcaaaccgcggccggtagcaagagtgactaacatacgttcgacagcggaggggctaatcaccactttacggctgatattttgcgcttcgtcgccaaggataaaagcacgggccgcaggcaaacttaactgccaaccgggcgggcaaggtgcgttatcattttgttttaattttgccagttcatcggcgtataacacagcagcaggcggacgctgcaaatgattattcagacggcgcactttaggcaagcgtgtaatatccagccgcgcttcggtaataaaggccagcgtcccttctgaacccgtcagaatgcgcgtcaggtcgaactcggtcatctcatcgttaaagacatgacgcagatcgtaaccggtaagaaagcggttaagtttggggaagttgtcgataattaactggcgttgctgacggcaacgttgataaaccgtgttataaattcgcccgattgtggtattggatttacccagcgtttccgccaattcgacgggtaaaggttgcgtatcgagaatatcgccccccaacaacaccgcgcgtacgccaagtacgtgatctgacgttttgccatagaccagcgatccctgaccggatgcatcggtattgatcatcccaccgagcgttgcccggttgctggtcgaaagttccggcgcaaaaaagtagccgaacggtttcaggtactgattgagttgatcttttatcaccccgggctcaacgcgcacccagccctcttcagggttaatttcgatgatgcggttcatatggcgggacatatcaacaataatcccctggttgagcgcctgaccgttagtgccggtgccgccgccgcggggggtaaagatcagcgatgaatagcgttcctgcgcggcaagacgggcgatcagcgccacatctgcggttgaacgcggaaataccaccgcatcggggagaagttggtaaatactgttgtcggtcgacattgtcagacgatcggcataacttgtcgccgtatcgccggtaaaaccttgttgctccagctctggcaaaaaattaagcaccagttgaacgacgccgggtgcctgggaaatctgtggaatcat

SEQ ID NO: 138602 - DNA, 648 bp, Homo sapiens
atgagtcgtcgcgcaggtacgccaacagcaaaaaaagtgacgcagttagtgaacgtggaagagcacgttgaagggttccgccaggtcagagaggcgcatcggcgcgagcttattgatgattacgttgagctgatttctgacttgatcagggaagtgggggaagctcgtcagttttggggctctactggctggacgagggcagtggcacgatcatacggggagcgcgccaagcagctccggcgcttctccatcgccaccctaaggggttttggcgtgggcaagcgcggcatcgaggaacgcatccaggaggaggcgggcttcctcatcgacgccctccggggcacgcacggtctgttggagtttgctggaggtccactccagaccctgttttcctgcgtatcaccagtggaggctgcagaacagcagatattggcacctgatccttcctgtggaagcttcatggggctccgcatcagtgagcgctatggccccgtgttcaccattcacctggggccccggcgggtcgtggtgctgtgcggacatgatgccgtcaaggaggctctggtggaccaggctgaggagttcagcgggcgaggcgagcagatcttactcaccattatgctagactggactccctcaccctcgtaa

SEQ ID NO: 138603 - DNA, 1377 bp, Homo sapiens
tcacttgatctccttgttgatggcctccagctgctcctgaagcatgatggccagcgtctgcacgtcagcctgcccactgggggacagcagctcggccccaaacatcccctctgcctcctcctcatcggagccgtccagttccccagggaatgggggtggtatggagcccgcaggggcagaccgctcccaatccaggtctgattgccgatggccgcgacatgggaacggtggtattccctgatgcaccagtgaaaattttccttgacgcctcctcggaagaacgtgcgcatcgccgcatgccatggcgatggccgtcttccccgtgcccggctggccagcaataaggactgcccgaccggcaatcttcccttcccggatcatctccagcaccacgccagccgcccgccgtgccgccagctgacccaccatgccttgcgaagccagacgggttaacggcagcaaagaaccttgcagaggcgttcgagcattataacgaatggcatccgcatagtgcgctgggttatcgctcgccacgggaatatctgcggcagcgggcttgtaatgggttaagtgataacagatgtctggaaatataggggcaaatccataaacgccaacagccatagcgtcatttccggtaaagacggccttccaacgcaggcgcgccggagttttatccagcgggccggtaatacaggcgatacgggtatgacctttatcgatcagatattgcgttgctaagtctccgcccagcaacgagttatcctgaataagatcgcagttctgaatagaaagctcagtgccgcggatctctagagtccgcataggccgcttcgcagcaaacatacggtaaagttggcaggaagggagaccctggtaccttgggctcctccataaatcagtagcgggattcagtttctgagccttggcattgtcatcggtcagatcggcaagtgtgatggtattcatcgcggtaaactgcgtcgacatagccatccctgtaacatcaatggcataaggaacggtacacagccggtccccagacgggttgcaatattgccggcgaatgcggcctgaaaagcgtctgaagcggcaaataccccggtggcggacctgcaggcatgccgtgctaagttctgcctgtctgcgaagcagcgccccatacccgacgataaccatacgttgccagctctccgataacatggtgtatacggagaagcacatccgtatcatcagtgtgacgatccccatccccgggcaataagggccgtgcgctatccacttttttgcccgtccatattcaacggcttctttgaggagttcattttccatcgttttcttgccgagcaggcgctggagttctttaatctgcttcat

SEQ ID NO: 138604 - DNA, 1064 bp, Homo sapiens; identical to SEQ ID NO: 124519

SEQ ID NO: 138605 - DNA, 888 bp, Homo sapiens
atgccgggaccccttagaagcgaacgacgccgacagctaccgtttattctggcagtaatccatccgtatgcatcccgatcaggataccctgaaagccatgatgcaggatgccggattcgaaagtgtcgactactacaatctgacggcagggtattgcgcgtggaggtaaaaggcttttcgacgtcattgattctggtgttcagcgaacgccaggttgatgtactgggcgaatgggcaggcgatgctgactgcaccgttatcgcctacgccagtgtgttgccgaaacttcgcgatcgccagcagcttaccgcactgattcgcagtggtgcccacagcccagttggctctgctgactaccgttctccgtcgggggctggacttgtgtacttccagcgggctgtgtttttggaagctcccagcaactgcaaagggacacgtgtgagggccagggaggcctcgccctcagaacgggtgtgtgctgcccgcaggtacttctgtcagctgattgacgccctggagtacctgaatagccagggcattgtgcacaaggacatcaagccggggaacctgctgctcaccaccggtggcaccctcaaaatctccgacctgggcgtggccgaggcactgcacccgttcgcggcggacgacacctgccggaccagccagggctccccggctttccagccgcccgagattgccaacggcctggacaccttctccggcttcaaggtggacatctggtcggctggggtcacccttcgcttcgcgcgtattactactggaggtactcgcaaggaagaacacaagcacaagccttgcatcgacgacccgcaacaagcgcagctcgtggtagacacgttcgcatcagcgcaagctatcagcatctaa

SEQ ID NO: 138606 - DNA, 2286 bp, Homo sapiens
atggatactcgcgtgttgcaggaacagcgactggaagccatcgcgcaaatcaaagaggcacaaagcgccgttgctgccgcgcaggctttgctggagcaacgacaaagcgaaactcgtgccgcacagtcgctggttaatcaacgccaggcagaactggactccgtagcaaaacgtcatacgcgttcccgttcactggcccaacgaggggctatttctgcgcaacagctggatgacgatcgcgccgccgctgagagcgcccgagctgcgctggaatcggcgaaagtcagcgaactgaaagccccgcgtgacggacgcgtgcagtatcgggttgccaagcaggcgaagtgctggtttccttatgtctacatggtcggtatggaagaagggtttttgccgcaccagagcagcatcgatgaagataatatcgatgaggagcggcggctggcctatgtcggcattacccgcgcccagaaggaattgacctttacgctgtgtaaagaacgccgtcagtacggcgaactgttatctcaaaagaaccgcttacacccaacctggctggctcctgatgaatggaaaggtaccgccgacgagaagcagttacagcttctgaccgcacatccggcacaccgtttacacagtcagcttaactatgcggaactgcgtaaaaaatatgcgatcgccgatcgtgaaccaatcactattcacaccgaagatgctgcacgctttggtattgcgaatggcgatctggtgcgtgtctggaacaaacgtggtcagattttgacaggcgcggtggtgactgacgggatcaaaaaaggcgtggtatgcgtgcatgaaggtgcatggccagatctggaaaatggcttgtgtaaaaacggcagtgcgaacgtgttaacggcggatatccccagctcgcagctggcaaatgcctgtgccggtaactcagcgttggtgtatatcgaaaaatatacgggcaatgatgcgcttgaagcgttactgcgtgaacatcagcactggcgaaacgatgaaccccagccgcatcaatttaatagtacccaaccgttctttatggacaccatggaaccactggagtggttgcactggctggatcgcgacgagaaagtagtgttcatgcaaacgtgcgtgacagaaaggccacttttctcgttatcccacgaagcctggcagcgtgagcttgactttgccagtggcgaattacgccgcaatgttgtctggcgtaccagcaacggctcaggttacaccatcgccagccgtcgctttgtttcggcagaccaactgccgctcattgcgctggaaatcactattacgccactggacgccgacgctgataattcccgaatctactttgccttcactcgagacattaagttcaccgtcgccagcatcaccgatatagatatagcggaaagcttcgcccgttccgaggaaattccaatgccctttatcggtcacgttgacgacaccgcccgcgtgaatagtcggggccaagctccatgcctgcaagtcgcctctagaggaccccaggccaacgcccataatgcgggctgttgcccggcatccaacgccattcatggccatatcaatgattttctggtgcgtaccgggttgagaagcggttacgctccattgaaagatgctgatttcgttactacccaactgcgcgttggccaattaccggcgcgtgaactggatgaacgtattccattaagtcatggttatcttggtcaggaaaccaacggcgcgggcggtttgtttaaaggtctgcgtaccattccggtgatttttgacatcgtaaaagatgtcgaagaactttgtccgaatgcatgggtgattaacttcactaacccggcgggaatggtcactgaagccgtttatcgtcataccggatttaaacgctttatcggcgtgtgtaatattccgatcggcatgaagatgtttattcgcgatgttctgatgctgaaagacagcgatgatttatctatcgatttgttcggcctcaaccatatggtgttcattaaggatgtgctgataaatggcaagtcgcgctttgccgaattgcttgatggtgtggcgtcagggcagttaaaagcgtcctctgtaaaaaatattttcgatctgccatttagtgagggcttaattcgttcgttgaatctgctgccatgttcttatctgctgtattacttcaagcagaaagagatgcgctttttgatgcggtataagaaggcacacggatcccgccctggaaggagagcattgacgcgatattga

SEQ ID NO: 138607 - DNA, 1662 bp, Homo sapiens
atgaaaattaatcgtattgttaatgagggatttatgaaaacgatgctggcagcttatttaccaggaaattcgaccgtcgatctgcgggaagttgcggtgccgacgccggggattaaccaggtactgatcaaaatgaaatcctccgggatttgcggaagcgatgtccactatatctatcatcaacaccgtgccacagcggcggcacccgataaaccgttataccagggctttatcaacggtcatgaaccgtgcgggcagattgtggcgatggggcaaggctgccgccattttaaagagggcgaccgcgtgctggtgtatcacatttctggctgtggtttttgcccgaactgccgtcgcggttttcctatttcttgtactggcgaaggaaaagcggcttacggctggcagcgtgacggcggtcatgccgaatacttgctggcggaagacaaagatctgatcctcctgccggatgcgctgagctacgaagatggtgcgtttatcagttgcggcgttggtacagcgtatgaaggaattttgcgcggcgaagtttccggcagtgataacgtgctggtggtcggtctgggcgcagtcggcatgatggcgatgatgctggcgaaaggtcgcggtgcaaaacggatcatcggcgttgatatgctgccggaacgtcctggcgatggcaaaacatttggccacggtcacttttcccaacacgaacccgatgaacttggaatgatatggccccccgccagttcgtccccactattgattccggatgtgccttctccgtataccccatgtttatcggaaagctgccaacgtatggttatcgtcgggtatgggcgttgcttcgcagacaggcagaacttgatgggtatgcctgcgatcaatgccaaacgtgtttaccggatcatgcgccagaatgcgctgttgcttgagcgaaaacctgctgtaccgccatcgaaacgggcacatacaggcagagtggccgtgaaagaaagcaatcagcgatggtgctctgacgggttcgagttctgctgtgataacggagagagactgcgtgtcacgttcgcgctggactgctgtgatcgtgaggcactgcactgggcggtcactaccggcggcttcaacagtgaaacagtacaggacgtcatgctgggagcggtggaacgccgcttcggcaacgatcttccgtcgtctccagtggagtggctgacggataatggttcatgctaccgggctaatgaaacacgccagttcgcccggatgttgggacttgaaccgaagaacacggcggtgcggagtccggagagtaacggaatagcagagagcttcgtgaaaacgataaagcgtgactacatcagtatcatgcccaaaccagacgggttaacggcagcaaagaaccttgcagaggcgttcgagcattataacgaatggcatccgcatagtgcgctgggttatcgctcgccacgggaatatctgcggcacgggcttgtttccttcataagctccttacaaaagttcatcaatgattttgctttcgaagacggtctgttcagcggctacgacgctgaaaaacgtcaatacgaaaaatcgtcctggaactatcagctcgatgaaaacggctatgcgaaacgcgatgaaacactgactcatccgcgctgt

SEQ ID NO: 138608 - DNA, 2265 bp, Homo sapiens
atgggctgggaagtgacttcagcggtgacgctgatcttcctcgcgctaatctttttaccgcgctatctgaagcgcggcattgccaccatccccgattttctggaggaacgttatgataaaacgacgcgtattatcatcgacttctgcttcctaattgccaccggcgtctgctttctgccgattgttctctactccggcgcgttggcgctcaacagcctgtttcacgtcggggaatcgctacagatttctcacggtgcggctatctggctactggtaattttgcttggtctggcgggaattttgtatgcggtgatcggcggactgcgcgcaatggcagtggcggactccatcaacggtattgggctggttatcggcgggttgatggttttcggtgatttcacctgcgttgctgcaagcggggtaaatgccatcagggcggccgccagaaacagtgacctgaacatgttattctccttcacgctcgaagccgtcagcggcctgttaacgcaatattacggggaggcatacatgatatatgcgcaagcgttgatgatcgccctattcgtgctgccgcatatgatccatgccagcctgaccaactccaagatccagggcaaatatcgccactctttctggagtgaaatctacgaaacggtgggcgtctgcggtaaggcatcctggcgcttacttcttatggcccgccaacctgagatgctcaccgtggtcgtcagtatggatttctccgacggtggtttggggatcaagatcaacggtcaggcgcagattctggaagggcagaaagtgaatctgttgcttaaacgcggtcagcaggaatacgtcttcccgacccaggtggcgcgcgtgatgggtaatgaagttgggctgaaattaatgccgctcaccacccagcaacatatcgattttgtgcagtgtacgtttgcccgtgcggatacatgggcgctctggcaggacagctacccggaagataagccgctggaaagtctgctggatattctgaagctcggcttccgtggctaccgccatctggcggagtttgcgccttcttcggtgaagggcatattccgggctacgcttgccatcgtccctggcgacccggatcgtgtggaaaagatcgccgcgctgatggataagccggttaagctggcatctcaccgcgaattcactacctggcgtgcagagctggatggtaaacctgttatcgtctgctctaccggtatcggcggcccgtctacctctattgctgttgaagagctggcacagctgggcattcgcaccttcctgcgtatcggtacaacgggcgctattcagccgcatattaatgtgggtgatgtcctggttaccacggcgtctgtccgtctggatggcgcgagcctgcacttcgcaccgctggaattcccggctgtcgctgatttcgaatgtacgactgcgctggttgaagctgcgaaatccattggcgcgacaactcacgttggcgtgacagcttcttctgataccttctacccagaccatggtgcaagtcaggctctactgtcgcgcctcaactggagccgcgagcagcgtctggcgctggtcaatgcgattgttgaaaccggcgtgcgcgtgccgtccatgtgcctttctgctcatcgtcgtttcccgctgggcagtgaagatgacgcggtgcgggcgcaggggctggagattatgcgtaaagctatccagttcgcccaggatgtcggtattcgcgtgatccagctggcgggctatgacgtttactatcaggaagccaataacgaaacgcgtcgtcgtttccgtgacggcctgaaagagagcgttgagatggcaagccgcgcgcaggtgacgctggcgatggagatcatggattatccgttgatgagctccatcagcaaggcgctgggatacgcgcactatctcaacaatccgtggttccagctctacccggatatcggcaacctgtcggcgtgggacaacgatgtgcagatggagttgcaggccggaatcgggcatatcgtcgcggtacatgtgaaagacaccaaacctggcgtcttcaaaaacgtgccgtttggcgaaggtgtagtggatttcgaacgttgtttcgaaacgctcaaacagagtggctattgcgggccgtacctgattgagatgtggagcgaaacggcggaagacccggcggcagaagtggcgaaagcgcgtgattgggtgaaagcgcgcatggcgaaagcgggcatggtggaggcggcataa

SEQ ID NO: 138609 - DNA, 1540 bp, Homo sapiens
gagagcgcgaatgaccgaagctgatttgcagattggtatggtggctggtcaggacatcaacggtattgacctgctgcccacagataatttgcgtcagtcgttggcggtcctcatgcgtaagcatattgagataggtatgcgccagttcgttacttaaaatattgacgccatcagcggtacgcaaaatgcagatacccactggcgcggaggcgacaatcttgcgattgaactgctcatgttcttccagtcgcagggcgtcgctttccgccggaatgaaaatacgtcgctcgtacatccgtgcgagagtaaacaatgcagctccggcaagcacattcagcaaaattgcgttaaggatcaacatgcgaatgcgttccagcaccttatcaaccggcaccgaatacacgatgcttagcgatgagggtggcagatttttcttcagcaccagctcccggaacccttccgtatagccaaaccaggagcgttcctgcatccagcgaggatcgcccttaattttactttctggtccggtaagcgaaatcagggtatgaccattttcatcaagaatggtaacccccatcggcaacgtacccggtaagaaaaagttctccatccggatggtctgctcgacacccaaaagcgccagacgggttaacggcagcaaagaaccttgcagaggcgttcgagcattataacgaatggcatccgcatagtgcgctgggttatcgctcgccacgggaatatctgcggcagcgggcttgtaatgggttaagtgataacagatgtcagtcccgtagcgtccctgctccagcaaagtcatgaactggttatcccaaatcggtgtgagcggatgcagcgttctctgatcctcaacaaacttctcagcggcgctaatcacccgttgctgacgcaattcgcgctcactggcgggtaaatctttcccgctccccaacagacggtcgcgcatatgggcatcggctttcgccagttcgggcaccggcggctgatgggaaagcccaccggaacccaggaacagcacgcgtttattgagagtgctggtgaaacgtccaatggcttcacccaacatgcgggtacgctggaaaccgggcagcggcgtggcgacaccgttgatgaacacaggcagaactggcaccttatccagcccaccgagcaggaactccagcggctgggcgaacccgtggtccacctgcatacagtaagaaacggcaagatcgatcccgctcttcatgacggcatgcgcacaggcctccgccagctccacaggcacgggcagctctcctgccgcactgccgaaatcaccaattgccgtcgctccaacgcctaaacagaacggtggcatcacgtcatagaaaaagccgttgtagtgatctggcgcaaacagcaccaccagttcaggggagaatgccgcaatacgctcgcgggcgctggcaatcacgccattgacctcatcgagcacctcttgcgccgggtcgacataccccaccagcggcgagtgggaaagacagtgaagataagcgtgcat

SEQ ID NO: 138610 - DNA, 2607 bp, Homo sapiens; identical to SEQ ID NO: 124532

SEQ ID NO: 138611 - DNA, 1337 bp, Homo sapiens
atgaaaaaaagacatctgcttagcttactggcgctgggcattagcacagcttgctacggcgaaacatatcctgcgcccattggtccgtcgcagtcggatttcggtggcgtaggattattacaaacgcccaccgcgcgtatggcacgggaaggggagttgagtctgaactatcgcgataacgatcagtaccgttattactcagcttcagtgcaactcttcccgtggctggaaacaacgctgcgctacaccgacgtgcgcacccggcagtacagcagcgtcgaagcgttctctggcgatcaaacgtataaagataaagccttcgatctcaaactgcgtttgtgggaagagagttactggctgccgcaagtggcggttggtgcgcgggatatcggcggtacggggctgtttgatgcggaatatcttgttgccagcaaagcctgggggccgttcgattttacgctcggcctgggctgggggtatttgggcaccagcggtaatgtggaaaatccgctctgtacagccagtgaggaatattgctatcggcacaacgcattgatgaaatcgcgtttgctaagcggcagagatggcaacttttggtgcaaaagtactgcatccggcaacgttgctacccgcagtacgcagcgatatcccggtctttgtcggctccagcaaagacccacgcgcaggtggtacgctggtgtgcaataaaactgaaaatccgccgctgttccgcgctctggcgcttcgtcgcaatcagactctgctcactttgcacagcctgaatatgctgcattctcgcggtttcctcgcggaagttttcggcatcctcgcgcggcataatatttcggtagacttaatcaccacgtcagaagtgagcgtggcattaacccttgataccaccggttcaacctccactggcgatacgttgctgacgcaatctctgctgatggagctttccgcactgtgtcgggtggaggtggaagaaggtctggcgctggtcgcgttgattggcaatgacctgtcaaaagcctgcggcgttggcaaagaggtattcggcgtactggaaccgttcaacattcgcatgatttgttatggcgcatccagccataacctgtgcttcctggtgcccggcgaagatgccgagcaggatggcactggcaccagcgggataggtgcccagaagaaaaaaatgtacgccaataacggcgctatagaccgaaagctgctttttgaagcgacgttcgtcacgattgaaaaatgttgtgataccaatcagaaaggcgatgacacccacgccctgggccagccaatacgcggtcatgataaatccttagcag

SEQ ID NO: 138612 - DNA, 1413 bp, Homo sapiens
atgattgatgtcttagggccggagaaacgcagacggcgtaccacacaggaaaagatcgcaattgttcagcagagctttgaaccggggatgacggtctccctcgttgcccggcaacatggtgtagcagccagccagttatttctctggcgtaagcaataccaggaaggaagtcttactgctgtcgccgccggagaacaggttgttcctgcctctgaacttgctgccgccatgaagcagattaaagaactccagcgcctgctcggcaagaaaacgatggaaaatgaactcctcaaagaagccgttgaatatggacgggcaaaaaagtggatagcgcacgcgcccttattgcccggggatggggatcgtcacactgatgatacggatgtgcttctccgtatacaccatgttatcggagagctgccaacgtatggttatcgtcgggtatgggcgctgcttcccagacaggcagaacttgatggtatgcctgcgatcaatgccaatacgtgtttaccggatcatgcgccagaatgcgctgttgcttgagcgaaaacctgctgtaccgccatcgaaacgggcacatacaggcagagtggccgtgaatgaaagcaatcagcgatggtgctctgacgggttcgagttctgctgtgataacggacagatcactgcgtgtcacgttcgcgctggactgctgtgatcgtgaggcactgcactgggcggtcactaccggcggcttcaacagtgaaacagtacaggacgtcatgctgggatcggtggaacgccgcttcggcaacgatcttccgtcgtctccagtggagtggctgacggataatggttcatgctaccgggctaatgaaacacgccagttcgcccggatgttgggacttgaaccgaagaacacggcggtgcggagtccggagagtaacggaatagcagagagcttcgtgaaaacgataaagcgtgactacatcagtatcatgcccaaaccagacgggttaacggcagcaaagaaccttgcagaggcgttcgagcattataacgaatggcatccgcctagtgcgctgggttatcgatcgccacgggaatatctggggcagcgggcttgtactgggcatgccatcggtagcggaccatcttcagcgtttttcggcgcaccggtacgcagggtttcacgcacatcggtcacagcaaaagcatgtccacgcggcttgttgtaatcgcgcgagaagggataccccgcccacaggatcaccagccgtggatcttccgccagggcgtcaacacgctctgactgttccgaggtggctttccaggagagatattgatcgggatgctgcggggcaaaggtttcattcttcgcttccacagttacaggttttgcgggagcagccgtttgttcagcgtgaacagaagtga

SEQ ID NO: 138613 - DNA, 1978 bp, Homo sapiens
atgccgatgcaaccgcagattggcggcagttactgctatgtgcgctcgccagtgaatcatatctacctgctgctgggagagctaaatacggtcgccgaacttgccatcgtgaccaacgccccggaaaatatgcagcgtcgcggggcaatgtatttgcaacgcgaattgaaagataaagtcgcgatgatgaatcgactacagcaggcgctggaacacaaccatttttccctgatggcccagccgattaccggtatgcgtggtgatgtttaccatgaaattcttctgcgcatgaaaggtgagaatgatgaactgatcagccccgatagcttcttgccggtcgcgcacgaatttggtttatcgtcgagtatcgacatgtgggtcattgacatacgctgcaatttatggctgaaaacagagcgaagatgcccgctcaccgttttgctactaatctgtctccaaccctcatgcacaagtaagcacagccgatctggagattttcttgactcccttaggcaagccgctgccgttcagcgaagttactggatcgaaagtaaagcggataaagaaaaggtgggcgattacgtttttggcctgaaggcgcagggacgatataacggtgaaccgctcacgggtacgggaaaaataggcggctatgctggcgctgcgtggcgaagggacgccgtttccggtacaggctgatttccgctctggtaacacccgtgttgcttttgatggcgtcgtgaatgacccaatgaagatgggcggtgtcgatttacggcttaaattttctggcgattcactgggtgatctctatgaactgacgggcgttctgctgcccgataccccgccgtttgaaacggatggtcggctggtagcgaaaatcgacactgaaaaatcgtcggtctttgattatcgcggttttaatgggcgaattggtgatagcgatatccacggttctctggtctacaccaccggaaagccacgaccaaaactggaaggtgatgtcgagtcgcggcaattgcggctggcggacctgggaccgtcatctggcgttgattccgggaaaggggcaaaaaagtctaaacggatccccgccagcggcgcagttgccgcactggtggtcgcactgctgattagcggtggtatcctgacctgggccggatttaacgatccgcaggagatcaacggcaccttaagcgccgatgccacacctgctgaagctatctcccccgtagccgatcaggactggcctgcctatggtcgtaatcaggaaggtcaacgcttttcgccgctgaaacaaattaacgccgataacgtccataatctgaaagaagcctgggtgttccgtactggcgatgtgaagcagccgaacgatccgggtgaaatcaccaatgaagtgacgccgattaaagtgggcgacaccctttacctgtgtaccgctcaccagcgcctgtttgcgcttgatgccgccagcggcaaagagaaatggcattacgatcctgagctgaaaaccaacgagtctttccagcacgtaacctgccgtggtgtctcttatcatgaagccaaagcagaaaccgcttcgccggaagtgatggcggattgcccgcgtcgtatcattcttccggtcaatgatggtcgactgattgggattaacgctgaaaacggcaaactgatccccacgctggattcggtagtgcgtgccaaaaaggtttttggtgaaaaccatatcaccattatctcgcaagaatttcataatcaacgcgccatctggctggcaaaacagtacggcatcgacgctatcggttttaacgcgccagacctcaatatgaagcacggtttttatactcaactgcgggagaaactcgctcgtgtcagcgccgtgattgacgccaaaatcctccatcgccagccgaaatatctcgggccttcggtcatgattgggccgtttagtgagcatggctgtccggcgcagaaataa

SEQ ID NO: 138614 - DNA, 575 bp, Homo sapiens
gtcatagggacagaaatctcaggtcccccaaacaacctgcgtagcaagacatggaccccatgtctgccaaacttcctgtttcagagatgtgaaccttctattccccaaagctcctccttcacaggaccccaactcctccatgcctgccacttccccttatctggggcaccccagttccctctccagcccctgtgtactttcaccaatcccctaacctgcctcatcacacacaacttcctcctccctaccagggcaccgaagtgttccctatgctgggctccgtgctgagagaccccagcttcttctccaaccctcaggacttcaatccccagcatttcctggatgacaaggggcagtttaagaagagtgatgcttttgtgcccttttccatcggaaagcggaactgtttcggagaaggcctggccagaatggagctctttctcttcttcaccaccgtcatgcagaacttccgcctcaagtcctcccagtcacctaaggacattgacgtgtcccccaaacacgtggtctttgccacgatcccacgaaactacaccatgagcttcctgccccgctga

SEQ ID NO: 138615 - DNA, 2174 bp, Homo sapiens
atagctattgacctcttcaaactcttggaagttgtcattaagagagggtaccgagctcgattgtatcatagcgatcatcatgttgctgctgctaattgtgccgataatgtggttccacaaacaccagcaaaaaagcgtgggagaacacggatgaataatttaccggtagttcgttcgccctggcggattgtgattttgctcggggctttacggggatcctgtagagtccacctgagatcgattgtcactggaaagcggatgttgcgggttgttgttctgcgggttctgctcttagctgacatgagattggggatcgtctggatctcggtaccaagttatcgggcggcgatgaaacgtgcgggtctcaacattcctgatggctatgaagtcactggtgattttgaatttaacggcgggtttgacgctatgcgccaactgctatcacatccgctgcgtcctcaggccgtctttaccggaaatgacgctatggctgttggcgtttatggatttgcccctatatttccagacatctgttatcacttaacccattacaagcccgctgccgcagatattcccgtggcgagcgataacccagcgcactatgcggatgccattcgttataatgctcgaacgcctctgcaaggttctttgctgccgttaacccgtctggtttgggcatgatactgatgtagtcacgctttatcgttttcacgaagctctctgctattccgttactctccggactccgcaccgccgtgttcttcggttcaagtcccaacatccgggcgaactggcgtgtttcattagcccggtagcatgaaccattatccgtcagccactccactggagacgacggaagatcgttgccgaagcggcgttccaccgctcccagcatgacgtcctgtactggttcactgttgaagccgccgttagtgaccggcccagtgcagtgcctcacgatcacagcagtccagcgcgaacgtgacacgcagtctctctccgttatcacagcagaactcgaacccgtcagagcaccatcgctgattgctttctttcacggccactctggcggcgagaaccaccccagcgagcagccagatcatccccggcaggtagcccatttgcgccgccagtaccggccccaccagcggacctgctccggcaatggccgcaaaatggtgaccgaacagcactttcttgtccgtcggcacatagtccagcccgtcgttatggcgcaccgctggcgtcatacgcgtcgggtcaaccgccagcacatttttggcgatatacagcccataaaaacggtaagcgatcagatagatacagaccgacgccaccacaatccacagcgcgttgatctgttccccacgatttaaagcaatgtatcccagagcaaatgctcccattacagagagcactgtccagacgaggtatttccctgatttgttcatagttgttatccgtgtgcgtgtccatagagatgttacattttgtttcaccgaaggaatgataccgctgacttcagccaggattgccggctctttcggacgacgtgcttcgaacaggtccgcaacgcgcggcagaccaccggtgatgtccttggtaccgccggattcctgcggaatacgcgccagggtgtcaccagagctgatctgtacgccatcttccagctgaacaatcgctttacccggcaggaagtactgcgctggcatatcggtacctgggatcagaacgtcgttaccctgagcatcaacgattttcagtgccggacgcagatctttaccacctgcggtacgttctgcggaatccagaaccaccagcgaagacagaccggtcagttcgtcggtctgacgcgtaatggtctggccgtcgatcatgtcagtaaagcgtacaaaaccgcttacttcggtgataaccggcatggtgtgcgggtcccagtttgcaacggtttcgccgccagcaacctgttcgccatcgcctttcgccagtaccgcaccgtaaggtactttgtagcttttgaccaacatcttgatataccatatctttgaacactggcagaatattaacagcctgccaagttggccgcctggatatacctcgtactggcaatgccggagaaacagctcatatggcagcattaaagcaaacctctcgctgagctggaagcgagccat

SEQ ID NO: 138616 - DNA, 3993 bp, Homo sapiens
atgagccagaaattaaaagtcgtcactattggtggcgggagcagctataccccggagttactggaaggatttattaagcgttatcacgaattgccggtcagcgaattatggctggtggatgtcgaaggtggtaaaccgaaactggatattattttcgatctctgccaacggatgattgataacgctggcgtcccgatgaagctttataaaacgctggatcgccgcgaagcattgaaagatgctgatttcgttactacccaactgcgcgttggccaattaccggcgcgtgaactggatgaacgtattccattaagtcatggttatcttggtcaggaaaccaacggcgcgggcggtttgtttaaaggtctgcgtaccattccggtgatttttgacatcgtaaaagatgtcgaagaactttgtccgaatgcatgggtgattaacttcactaacccggcgggaatggtcactgaagccgtttatcgtcataccggatttaaacgctttatcggcgtgtgtaatatttcgatcggcatgaaaatcctgaaaacaaggacccttgataccaccggttcaacctccactggcgatacgttgctgacgcaatctctgctgatggagctttccgcactgtgtcgggtggaggtggaagaaggtctggcgctggtcgcgttgattggcaatgacctgtcaaaagcctgcggcgttggcaaagaggtattcggcgtactggaaccgttcaacattcgcatgatttgttatggcgcatccagccataacctgtgcttcctggtgcccggcgaagatgctggatttgcccctatatttccagacatctgttatcacttaacccattacaagcccgctgccgcatatattcccgtggcgagcgataacccagcgcactatgcggatgccattcgttataatgctcgaacgcctctgcaagtcccaacatccgggactgataaccctactcggtaccctgttttcccgaataaattcaaagccgcactggctgcgaaacaggtacaaattggttgctggtcagcactctctaacccgattagcactgaagttcttggtttggcctgggtctgactggctggtgctgaatggcgaacatgcgccaaacgatatctccacgtttattccgcagttaatggccttgaaaggcagcgccagcgcgccagtagtgcgagtgccgaccaacgagccggtaattattaagcgtcttctggatatcggtttctataacttcctgattccttttgtagaaacaaaagaggaagcagagctggcggtggcatcaacccgttacccaccggaaggcattcgcggcgtctccgtttctcaccgcgccaatatgtttggcaccgtggcggattatttcgctcagtcgaacaagaacatcactattctggtccagatagaaagtcagcagggcgtagataacgtcgatgccattgccgctaccgaaggcgtagacggcatcttcgtcggccccagcgatctggccgcggcattaggccatctcggcaatgcatcacacccggatgtacaaaaagcaattcagcacatttttttgactaccctacgtcgaccccgagaaatctacgaaggtgcattgaaggcaattgcatttgaactggaaaaacggaatttaaatgacagtgtggccttaattggccaccgcatcgctcacggcggcagtatttttaccgagtccgccattattaccgatgaagtcattgataatatccgtcgcgtttctccactggcacccctgcataattacgccaatttaagtggtattgaatcggcgcagcaattatttccgggcgtaactcaggtggcggtatttgataccagtttccaccagacgatggctccggaagcttatttatacggcctgccgtggaaatattatgaagagttaggtgtacgccgttatggtttccacggcacgtcgcaccgctatgtttcccagcgcgcacattcgctgctgaatctggcggaagatgactccggcctggttgtggcgcatcttggcaatggcgcgtcaatctgcgcggttcgcaacggtcaaagtgttgatacctcaatgggaatgacgccgctggaaggcttgatgatgggtccccgcagtggccatgtcaactttgggcggatcgccattgatgacaaagtaagcaaagcggatctggaaatttttgttgatcccttaagcaagccgctgccgttcagcgaagttactggatcgaaaggtaaagcggataaagaaaaggtgggcgattacgtttttggcctgaaggcgcagggactatataacggtgaaccgctcacgggtacggaaaaaataggcggtatgctggcgctgcgtggcgaagggacgccgtttccggtacaggctgatttccgatctggtaacacccatgttgcttttgatggcgtcgtgaatgacccaatgaagatgggcggtgtccatttacagcttaaattttctggcgattcactgggggatctttatgaactgacgggcgttctgctgcccgataccccgccggttgaaacagatggtcggctggtacagaaaatcgacactcctagacgaaccctagctcgtaccctccccattcttccccagccgtttggtcagggcatcaacagcacgctcgacggcagccgtctcttccgcaaaccaggccacttcaagcggaccgggtgccatacgccactcttcagtaatggcttccgccacataacgttgctggcgcttaatgccgtgatgcaggaactttgcgcctccgcgcatggctttgctgattccttcagcggcgatatcaccggtataaggggccagcagttccgcagggtcgaactctgccagatctgccagcgcaacgaagttttgcaccacctgaatatcgccctgcacttccagctcaccactgcgaatcagtgcggtaagctgctggcgatcgcgaagtttcggcaacacactggcgtaggcgataacggtgcagtcagcatcgcctgcccattcgcccagtacatcaacctggcgttcgctgaacaaaaaatgttaaacccttcgtctgatgtttttcatctcggcctcactaaaaacgatttacaaggggctacgcttgccatcgtccctggcgacccggatcgtgtggaaaagatcgccgcgctgatggataagccggttaagctggcatctcaccgcgaattcactacctggcgtgcagagctggatggtaaacctgttatcgtctgctctaccggtatcggcggcccgtctacctctattgctgttgaagagctggcacagctgggcattcgcaccttcctgcgtatcggtacaacgggcgctattcagccgcatattaatgtgggtgatgtcctggttaccacggcgtctgtccgtctggatggcgcgagcctgcacttcgcaccgctggaattcccggctgtcgctgatttcgaatgtacgactgcgctggttgaagctgcgaaatccattggcgcgacaactcacgttggcgtgacagcttcttctgataccttctacccaggcgtggcgttcagcaacggggagcgcgccaagcagctccggcgcttctccatcgccaccctaaggggttttggcgtgggcaagcgcggcatcgaggaacgcatccaggaggaggcgggcttcctcatcgacgccctccggggcacgcacggtgagcgccaatatcgatccggctgcacgaagcaagtgacccatgaagtgttccttatgctgggctccgtgttgaaaaaccccaggttcttctccaacccccgggacttcaatccccagcacttcctggataagaaggggcagtttaagaagagtgatgcttttgtgcccttttccatcgcttggaagttcctgttagaatctaccattgagccgccaccagctgatactcccttaactgccaagcacccaatacctgcgcccag

SEQ ID NO: 138617 - DNA, 4994 bp, Homo sapiens
atgagtcatcaacttaccttcgccgacagtgaattcagcagtaagcgccgtcagaccagaaaagagattttcttgtcccgcatggagcagattctgccatggcaaaacatggtggaagtcatcgagccgttttaccccaaggctggtaatggccggcgaccttatccgctggaaaccatgctacgcattcactgcatgcagcattggtacaacctgagcgatggcgcgatggaagatgctctgtacgaaatcgcctccatgcgtctgtttgcccggttatccctggatagcgccttgccggaccgcaccaccatcatgaatttccgccacctgctggagcagcatcaactggcccgccaattgttcaagaccatcaatcgctggctggccctaggcgtcatgatgactcaaggcaccttgttcgatgccaccatcattgaggcacccagctctaccaagaacaaagagcagcaacgcgatccggagatgcatcagaccaagaaaggcaatcagtggcactttggcatgaaggcccacattggtgtcgatgccaagagtggcctgacccacagcctggtcaccaccgcggccaacgagcatgacctcaatcagctgggtaatctgcttcatggagagaagcaatttgtctcagcgatgccggctaccaaggagccacagcgcgaggagctggccgaggtggatgtggacctgctgatcgccgagcgtcccggcaaggtaaaaaccttgaagcagaatccgcgcaagaacaaaacggccatcaacatcgaatacatgaaagccagcatccgtgccagggtggagcacccgtttcgcatcatcaagcggcagttcggcttcgtgaaagccagatacaaggggctgctgaaaaacgataaccaactggcgatgttattcaccctggccaacctgtttcgggtggaccaaatgatacagctgccaacgtatgagttatcgtcgggtataggcgctgttcgcagacaggcagaacttgatggtacgcctgcgatcaattccaaacgtgtttaccggatcatgcgccagaatgcgctgttgcttgagcgaaaacctgctgtaccgccatcgaaacgggcacatacaggcagagtggccgtgaaagaaagcaatcagcgatggtgctctgacgggttcgagttctgctgtgataacggagagagactgcgtgtcacgttcgcgctggactgctgtgatcgtgaggcactgcactgggcggtcactaccggcggcttcaacagtgaaacagtacaggacgtcatgctgggagcggtggaacgccgcttcggcaacgatcttccgtcgtctccagtggagtggctgacggataatggttcatgctaccgggctaatgaaacacgccagttcgcccggatgttgggacttgaaccgaagaacacggcggtgcggagtccggagagtaacggaatagcagagagcttcgtgaaaacgataaagcgtgactacatcagtatcatgcccaaaccagacgggttaacggcagcaaagaaccttgcagaggcgttcgagcattataacgaatggcatccgcatagtgcgctgggttatcgctcgccacgggaatatctgcggcagcgggcttgtaatgggttaagtgataacagatgtctggaaatatatgggcaaatccaattaggcacgggtgaactgaatattaccaccggagtagtagttacagcccgtgatacacacattgctctcaatttccaaaagcgccgtaccaccggccttgccacgcagagccgccagcgttgccagaatcgccgtcgggtgatgggcaaaatcgtcatataccgtgacgccattcgcttcaccacgcaactccagacggcgacgagcattaataaacgaacccagcgcgttagcggcatctgccggcgctacaccaacatggcgagccgctgcaatcgccatcaggccattgtgcatattatgttcgcctaccagcgaccatttcacttcgcccactttttcgccatccagcaaaacttcccattcggaagcatcggtggtcagctttttcgcctgccagtgaccctgctcacccaccagctcctgctcgctccagcagcccatcgccatggtctgtttcaggttgatgtcattttccggccagataatacggccctgccccggaacgatacgcaccagatggtggaactgtttctggatcgctttcaggtcgtcaaagatatcggcgtgatcgaactcaaggttgttgaggatcagcgtacgcgggcagtaatgaacaaatttagagcgtttgtcgaaaaaggcgcagtcatactcatccgattcgataaaaaaaaggatatttttctccagtaccgcttccacacacggatttccacgggtcatggcgttgccaataatcaccagatccggctgcggctcgagctggctggcatcgtacccctgaatcagctcaatcccttgcctctcaactctgttccgatgatcaacatcatgaacggtggtgagaacgctgacaacaacgttgatatccaggaattcatgattcagccggttggcgcgaaaactgtgaaagaagccatccgcatgggttctgaagttttccatcacctggcaaaagttctgaaagcgaaaggcatgaacactgctgttggtgacgaaggtggctatgcgccgaacctgggttccaacgctgaagctctggctgttatcgctgaagctgttaaagctgctggttatgaactgggcaaagacatcactttggcgatggactgcgcagcttctgaattctacaaagatggtaaatacgttctggctggcgaaggcaacaaagcgttcacctctgaagaattcactcacttcctggaagaactgaccaaacagtacccgatcgtttctatcgaagacggtctggacgaatctgactgggacggtttcgcataccagaccaaagttctgggcgacaaaatccagctggttggtgacgacctgttcgtaaccaacaccaagatcctgaaagaaggtatcgaaaaaggtatcgctaactccatcctgatcaaattcaaagcacaacatgcaggtttgttacatatgtatacatgtgccatgttgggggtgggggggcaatgctggcggtactgcatgtctcaggcgttcaaagaggaccgattcgcgcaggatcagcgcgtcgcagtgaccaaaaacgtagttcgccagttggttaaattgctcatcctggaacgggccaacactgtgaccaatcataaacagcggctttttcgccataaacgtgcaaagtgcatgttcaaactgcggcacgccatagagatcgacaaaaaacgatccgccgacctggataatggcgtcgaacagcggatcgcccattaccgggcggttgagcagccaggaagaactgaccggatagcggctcatcacatccacttcggcgtgtggattgagaatgttgatggcatcaaggaaaagatcgcaattgttcagcagagctttgaaccggggatgacggtctccctcgttgcccggcaaccatggtgtagcagccagccagttatttctctggcgtaagcaataccaggaaggaagtcttactgctgtcgccgccggagaacaggttgttcctgcctctgaacttgctgccgccatgaagcagattaaagaactccagcgcctgctcggcaagaaaacgatggaaaatgaactcctcaaagaagccgttgaatatggacgggcaaaaaagtggatagcgcacgcgcccttattgcccggggatggggattgcacgtcattctcagacgaaccgatgactggatggatggccgccgcagtcgtcacactgatgatacggatgtgcttctccgtatacaccatgttatcggagagctgccaacgtatggttatcgtcgggtatgggcgctgcttcgcagacaggcagaacttgatggtatgcctgcgatcaatgccaaacgtgtttaccggatcatgcgcccagaatgcgctgttgcttgagcgaaaacctgctgtaccgccatcgaaacgggcacatacaggcagagtggccgtgaaagaaagcaatcagcgatggtgctctgacgggttcgagttctgctgtgataacggagagagactgcgtgtcacgttcgcgctggactgctgtgatcgtgaggcactgcactgggcggtcactaccggcggcttcaacagtgaaacagtacaggacgtcatgctgggagcggtggaacgccgcttcggcaacgatcttccgtcgtctccagtggagtggctgacggataatggttcatgctaccgggctaatgaaacacgccagttcgcccggatgttgggacttgaaccgaagaacacggcggtgcggagtccggagagtaacggaatagcagagagcttcgtgaaaacgataaagcgtgactacatcagtatcatgcccaaaccagacgggttaacggcagcaaagaaccttgcagaggcgttcgagcattataacgaatggcatccgcatagtgcgctgggttatcgctcgccacgggaatatctgcgggagcgggcgttgtaatgggggcaaatccagttgtgcaccacgcgatgaccgtaaagttcgcgtgatggcagccgattatgaaaatcagctcgacgagttttccctcgatgcgcccattgtcgcacatgaaaactatcaatgggctaactacgttcgtggcgtggtgaaacatctgcaactgcgtaacaacagcttcggcggcgtggacatgagatcagcggcaatgtgccgcaggtactcagctcaagaacagccttctccagaagtctcccctgagaactgcaggctggattccctggatgagcagtgtaggaagagcttatctgtcattacttcccagtgtctgtttatcagcttattcaatgcacccagaagcaagcagttccatggggattaa

SEQ ID NO: 138618 - DNA, 2851 bp, Homo sapiens; identical to SEQ ID NO: 130055

SEQ ID NO: 138619 - DNA, 1578 bp, Homo sapiens
atgggatttaccggcgtgttgatcgatctggattcaccagaaagtgttgatcgcgcagccgacgaggtgatcgccctgaccgataattgtctgtatgggatctttaacaatgccggattcggcatgtatggccccctttccaccatcagccgtgcgcagatggaacagcagttttccgccaactttttcggcgcacaccagctcaccatgcgcctgttacccgcgatgttaccgcacggtgaagggcgtattgtgatgacatcatcggtgatgggattaatctccacgccgggtcgtggcgcttacgcggccagtaaatatgcgctggaggcgtggtcagatgcactgcgcatggagctgcgccacagcggaattaaagtcagcctgatcgaacccggtcccattcgtactcgcttcaccgacaacgtcaaccagacgcaaagtgataaaccagtcgaaaatcccggcatcgccgcccgctttacgttgggaccggaagcggtggtggacaaagtacgccatgcttttattagcgagaagccgaagatgcgctatccggtgacgcatgagcgcggcaagctggcggaactgcgtttgctggtgatccctggccaggtggattatttgcaacacatcgaagaactggcggcgtttatcaagggactcggcgatgttccggtacgcctgaacgcgtttcatgcccacggcgtgtatggcgaggcgcaaagctgggcgagcgccacgccggaagacgttgagccgttggctgatgcgttaaaggtgcgcgggacttgtaggcctgataagacgcgtcaagcgtcgcatcaggcattgtgcgccaactgccggatgcggcgtaaacgccttatccggcctacggttcggcacaaacctgcaacggctgccggatgcggcgtgaacgccctatccgacctacggttatgttctggctcgttggcctttggcaacgattatcctatgagattggggcaattacgcgccctcgtcaaatcattgcgctttttctttacgcggttggcgcaacacttcgttgatttgcggatcgtccagcggacccgaaatgtgatagcgcaaaatggagactttgctccacagcggccccagcactttactggcggcaaacactgccgcgccaacaataaggttaaccgcaaaagccgcagccacgcccaccgtcgcagaaatctctggtgcgacaaccgcttccatattcaggtcgcgacgtaccagatttaccgaccctttcatggcgatatccgcctccaggccatccaccagcgtgtcgtcggtgtgcataacgccgtctttaatccacgcggtgctgggaatggagtcaaaatagaacccgtcgcttatacagagaagcggggaaggcgacggaagagggcgaaagcgcgagagcagacacagagcgacgcgaaaggaaagagaccaagaacgaagaagaaaagatggcaagagagagggggagaaaagcgcagagagacgacgacagcagaccagagcgcaaacgagcacagtcaagagcgcaagttgacccgggataaaagcaaatga

SEQ ID NO: 138620 - DNA, 789 bp, Homo sapiens
cccgcgcacctttaacgcatcagccaacggctcaacgtcttccggcgtggcgctcgcccagctttgcgcctcgccatacacgccgtgggcatgaaacgcgttcaggcgtaccggaacatcgccgagtcccttgataaacgccgccagttcttcgatgtgttgcaaataatccacctggccagggatcaccagcaaacgcagttccgccagcttgccgcgctcatgcgtcaccggatagcgcatcttcggcttctcgctaataaaagcatggcgtactttgtccaccaccgcttccggtcccaacgtaaagcgggcggcgatgccgggattttcgactggtttatcactttgcgtctggttgacgttgtcggtgaagcgagtacgaatgggaccgggttcgatcaggctgactttaattccgctgtggcgcagctccatgcgcagtgcatctgaccacgcctccagcgcatatttactggccgcgtaagcgccacgacccggcgtggagattaatcccatcaccgatgatgtcatcacaatacgcccttcaccgtgcggtaacatcgcgggtaacaggcgcatggtgagctggtgtgcgccgaaaaagttggcggaaaactgctgttccatctgcgcacggctgatggtggaaagggggccatacatgccgaatccggcattgttaaagatcccatacagacaattatcggtcagggcgatcacctcgtcggctgcgcgatcaacactttctggtgaatccagatcgatcaacacgccggtaaatcccat

SEQ ID NO: 138621 - DNA, 2112 bp, Homo sapiens
atgagcgcagcacgcggcgtatttgaacgcggcgactggtcactctcttctccggctaaacgtaaagcggtactgaataaactcgccgatttaatggaagcccacgccgaagagctggcactgctggaaactctcgacaccggcaaaccgattcgtcacagtctgcgtgatgatattcccggcgcggcgcgcgccattcgctggtacgccgaagcgatcgacaaagtgtatggcgaagtggcgaccaccagtagccatgagctggcgatgatcgtgcgtgaaccggtcggcgtgattgccgccatcgtgccgtggaacttcccgctgttgctgacttgctggaaactcggcccggcgctggcggcgggaaacagcgtgattctaaaaccgtctgaaaaatcaccgctcagtgcgattcgtctcgcggggctggcgaaagaagcaggcttgccggatggtgtgttgaacgtggtgacgggttttggtcatgaagccgggcaggcgctgtcgcgtcataacgatatcgacgctcttgccgcggcattgatatcaatatcgcggcatatagatccagatctatcgggtaaatcacgcacagtgcgtgaagccgaattcttcgaacttttcggcgagaaagtaaacgcagaaaacatcgtcgcccgttatgccaaactgcatctctatgatgcatttgccattcaggaatcacgccgtgttgatgctggtaatgaaatcgctccgttactgaaggtggaagggatgaaggtcggtctgatgacctgttatgacttacgctttccagagctggcgctggcacaggcattacagggagctgaaatcctggtacttcctgccgcctgggttcgcgggccgctcaaagagcatcactggtcaacgttgcttgccgctcgtgcgctggataccacctgttatatggtggcggcgggggagtgcgggaacaaaaatatcggtcaaagccggattatagatccctttggcgtcaccattgcggcagcgtcagaaatgcctgcactcattatggcggaagtgacgcccgaacgtgtgcgtcagaggatccccagttttaacgccgtggcagagttgataaacgccgggcatcaggagattgctttccttaccggctcgatggattcccccaccagcattgaacgtcttgccgggtataaagacgcgctggcgcagcatggtattgcgctcaatgaaaaacttatcgctaacggtaaatggacgcctgccagcggggccgaaggggtagaaatgttgctcgaacgtggggctaaatttagcgcgttagttgccagtaacgacgatatggcgataggtgcgatgaaagcgttacacgagcgcggcgtagcggtgccagagcaggtgtcagttatcggattcgatgatatcgctattgccccctacaccgttccggcgctctccagcgtaaaaattccggcgcggggcacgtatccggcttactctgcccgcgtattccgcgaaaaaggggtacccatcaacaaagcaccgggcgatgatgaaatcctgaaaaacaccgtcgattttgtctctttcagctattacgcctcgcgctgcgcctcggcggagatgaacgccaacaacagcagtgcggcgaacgtggtgaaatcgctgcgtaatccgtatctacaggtgagcgactggggctggggaattgatccactcggtctgcgtatcaccatgaatatgatgtacgatcgttatcagaagccgctgtttctggtggaaaacggcctgggcgcaaaagatgaatttgctgccaatggcgagattaacgacgactatcgcatcagctacttacgcgaacatatccgcgcaatgggcgaagcgattgcagacggcattccgctgatgggctacaccacatggggctgtattgatttagtttccgcctctacgggtgaaatgagcaaacgctacggctttgtctttgttgaccgtgaccacgcaagcgacgggacgcttacgcgcacgccaacgaaagactgcgactccccggactatcaggccgggagagtccacttccagctcacctcggagctccgggagcctttcagcacctgcttg

SEQ ID NO: 138622 - DNA, 976 bp, Homo sapiens
ggggcggacaggcgcgatatcgtttaatgcggcggcgagccagcaatgagcaacgaagctggcgctatctggatatcatcaaccggatgattgaacgacctgaaacccgttacacgcgtgagattggttttacctccaccaacatcgacctgatttacggcctgccgaaacagacgccggagagtttcgcctttaccctgaaacgtgtggcggagctgaaccccgatcgtctgagtgtctttaactacgcgcatctgccgaccatttttgctgctcagcgcaaaatcaaagatgctgacctgccgagtccgcagcaaaaactcgatatcctgcaggaaaccatcgccttcctgacgcaatcgggctatcagtttatcggtatggatcactttgcccgtccggatgacgagctggcggtggcccagcgtgaaggcgtgctgcatcgtaacttccagggctacaccactcagggcgataccgatctgctggggatgggcgtttccgccatcagcatgattggcgactgctacgcgcagaaccagaaagagttgaagcagtactatcagcaagtggatgaacaaggcaatgcgctgtggcgtggtattgcgctaacgcgtgatgactgtattcgccgcgatgtgattaagtcgctcatctgcaacttccgtctggattacgcccctattaagaaacagggggatttgcacttcgctgattactttgcggaagatctcaagctgctcgccccgttagcaaaagatgggctgggggatgtggatgagaagggaatacaggtgacggcgaaaggccggataaggcgtttacgccgcatcaggcatctgagcatgatgcctgatgcggcgctggtcgcgtcttatcaggcctacgactttctccgcatccggcataaacaacgagcttcagctaaacggcccaatcattgcggcacacagcacggcagcaacggcagtttgcg

SEQ ID NO: 138623 - DNA, 1776 bp, Homo sapiens
atgtttgattatgaaacattgcgcttcatctggtggctgctgattggcgtgatcctggtggtctttatgatctccgacggatttgacatggggatcggctgtctgctgccgctggtggcgcgtaatgatgatgaacgccggatagtgataaacagcgttggtgcacactgggaaggcaaccaggtctggttgatcctcgctggtggggcattatttgccgcctggcccagagtgtatgcagcggcgttttccggcttttatgtggcgatgatcctggtgctgtgctcactgttcttccgcccgctggcctttgattatcgcggaaaaatcgccgatgcacgctggcgtaaaatgtgggacgccggtctggtcatcggcagtctggtgccgccggtagtcttcggtatcgccttcggcaacttgttgctcggcgtgccgtttgccttcacaccgcaattacgcgtggagtatctcggcagcttctggcaactgctgacgccattccctttattgtgcggattgctcagccttgggatggtgattttgcaaggtggcgtctggttacaactgaaaactgttgccaatccacaaatccacacaggttttcggtccgataaacggtacgtcatcggcacaattctgcatcacggcagcagcgacgttaacgtcgatatgatcgttgtgatcgtgagtcgccagtaccgcgtcgatctggcgaatcgcaaacggatcaagaacaaacggggtgagtcaagaggaactgctccaacaagcactcgtcgcgcaactggcgatagtgaacagcttgaaggtgtgcaactgccggagccggatgaaccttcagcacgtcacgccttacccgccaacgaaccgcgcattgtgctgaacaatggcgtggtttcttataacgatcgccccattcttaataaccttagctggcagcatatcggttacgtcagcagtagtttgcatctggattaccgggtcagcactaccgtgcgtaatgtgattctttctggctattttgattcgattggcatttatcaggccgtttcggatcgccagcaaaaactggtgcagcagtggctggatattctcggcattgataaacgcacggctgacgctccgttccatagtctttcctggggacagcagcgtctggcgctgattgtccgcgcactggtgaaacatccgacgttgcttattctcgatgaaccactacaggggcttgatccgctgaatcgccagcttatccgccgttttgttgatgtgctgattagcgaaggctttattcccggtgactggatcaaagaaggcgcaattgtgattgatgtcggcatcaaccgtctggaaaatggcaaagttgtgggcgacgtcgtgtttgaagacgcggctaaacgcgcctcatacattacgcctgttcccggcggcgttggcccgatgacggttgccacgctgattgaaaacacgctacaggcgatgagtaacatggcgacattttctttaggtaaacatccgcacgttgagctgtgcgacttgctgaaactggaaggctggagcgaaagcggcgcgcaggcgaaaatcgcgattgccgaaggccaggtgaaagtcgacggtgcggttgaaacgcgcaaacgctgcaaaatcgtcgccggtcagacaacttttgccctctacgccccgttcatccatgctgatagcatcgacattttgccgaagcgaccatcatgccaaccgttattacgcacgccgccgttcccctatgcattggtttag

SEQ ID NO: 138624 - DNA, 2425 bp, Homo sapiens
atgcacgcttatcttcactgtctttcccactcgccgctggtggggtatgtcgacccggcgcaagaggtgctcgatgaggtcaatggcgtgattgccagcgcccgcgagcgtattgcggcattctcccctgaactggtggtgctgtttgcgccagatcactacaacggctttttctatgacgtgatgccaccgttctgtttaggcgttggagcgacggcaattggtgatttcggcagtgcggcaggagagctgcccgtgcctgtggagctggcggaggcctgtgcgcatgccgtcatgaagagcgggatcgatcttgccgtttcttactgtatgcaggtggaccacgggttcgcccagccgctggagttcctgctcggtgggctggataaggtgccagttctgcctgtgttcatcaacggtgtcgccacgccgctgcccggtttccagcgtacccgcatgttgggtgaagccattggacgtttcaccagcactctcaataaacgcgtgctgttcctgggttccggtgggctttcccatcagccgccggtgcccgaactggcgaaagccgatgcccatatgcgcgaccgtctgttggggagcgggaaagatttacccgccagtgagcgcgaattgcgtcagcaacgggtgattagcgccgctgagaagtttgttgaggatcagagaacgctgcatccgctcacaccgatttgggataaccagttcatgactttgctggagcagggacgctacgggactgacatctgttatcacttaacccattacaagcccgctgccgcagatattcccgtggcgagcgataacccagcgcactatgcggatgccattcgttataatgctcgaacgcctctgcaaggttctttgctgccgttaacccgtctggcgcttttgggtgtcgagcagaccatccggatggagaactttttcttaccgggtacgttgccgatgggggttaccattcttgatgaaaatggtcataccctgatttcgcttaccggaccagaaagtaaaattaagggcgatcctcgctggatgcaggaacgctcctggtttggctatacggaagggttccgggagctggtgctgaagaaaaatctgccaccctcatcgctaagcatcgtgtattcggtgccggttgataaggtgctggaacgcattcgcatgttgatccttaacgcaattttgctgaatgtgcttgccggagctgcattgtttactctcgcacggatgtacgagcgacgtattttcattccggcggaaagcgacgccctgcgactggaagaacatgagcagttcaatcgcaagattgtcgcctccgcgccagtgggtatctgcattttgcgtaccgctgatggcgtcaatattttaagtaacgaactggcgcatacctatctcaatatgcttacgcatgaggaccgccaacgactgacgcaaattatctgtgggcagcaggtcaataccgttgatgtcctgaccagccaccataccaatctgcaaatcagcttcggtcattcgcgctctctcttgttcggtattcgcaaatcacttgagcaaattgagtgggtgaatgttgtcggcgaatttgaagactctacagcactgatcaacaacctgccgaaactggatgcgcatgtgttgattaccgatctctccatgcctggcgataagtacggcgatggcattaccttaatcaagtacatcaagcgccatttcccaagcctgtcgatcattgttctgactatgaacaacaacccggcgattcttagtgcggtattggatctggatatcgaagggatcgtgctgaaacaaggtgcaccgaccgatctgccgaaagctctcgccgcgctgcagaaagggaagaaatttaccccggaaagcgtttctcgcctgttggaaaaaatcagtgctggtggttacggtgacaagcgtctctcgccaaaagagagtgaagttctgcgcctgtttgcggaaggcttcctggtgaccgagatcgctaaaaagctgaaccgcagtattaaaaccatcagtagccagaagaaatctgcgatgatgaagctgggtgtcgagaacgatatcgccctgctgaattatctctcttcagtgaccttaagccagataagacgcgttagtgtcttatctggcatttgcaccgattgccggatgcggcgtaaacgccttatccggcctacgattcccattatttcaacaaattacattaaagtaggccagataagacgcgtcagcgtcgcatctggcatttgcgctgaatgccggatgcggggtaaacgctttatcgtcctaggaattccgggatttctggacctctcggggtataacgcagcgtctgggaagcgccaaagcttgcatgcctgcagccgcgtaacctggcaaaatcggttacggttga

SEQ ID NO: 138625 - DNA, 4290 bp, Homo sapiens
atgactgcaggcagcgagatgcgaagttcatactgcaacagccgcgcgaaagtagaagacaccgctgcgcgcctgcaaagcaagggaattagcgcggcggcctatcatgccgggctggaaaataatgttcgcgccgatgtgcaggaaaaattccagcgcgatgacctgcaaattgtggtggcgacggtggcgttcggcatgggcatcaataaaccaaacgttcgcttcgtggtccactttgatattccgcgcaatatcgaatcctattatcaggaaaccggacgcgccgggcgtgatggcctgcccgcggaagcgatgctgttttacgatccggctgatatggcgtggctgcgccgttgtctggaagagaagccgcaggggcagttgcaggatatcgagcgccacaaactcaatgcgatgggcgcgtttgccgaagcgcaaacttgccgtcgtctggtattgctgaactattttggcgaagggcgtcaggagccgtgcgggaactgcgatatctgcctcgatccgccgaaacagtacgacggttcaaccgatgctcagattgccctttccaccattggtcgtgtgaatcagcggtttgggatgggttatgtggtggaagtgattcgtggtgctaataaccagcgtatccgcgactatggtcatgacaaactgaaagtctatggcatgggccgtgataaaagccatgaacattggaggcgggcgcacgtgttggcggaaatctccatgcaattgccggccgcgttcgtggcgccaaacgaagcaagcgaaatcgtcggggaaattaacccactgtcgcaattaccaaagaccattattgtcggagttatcaacctcaccttcaccgttctggcaattatgacggtggataaattattggtcgtgaagccactgcaaattgttcctgcaaaacttccgcgccacgctgatacccactatcgccgtgccggtggtgttgatgggaaccttctccgtactttacgccttcggttacagcgtcaacaccttaaccatgttcgcgatggtgctggcgatcggtctgctggtttaccttcactcacccatgaacagcagcaaaaagctgtcgagcggatccaggaactgatggcacaagggatgagcagcggccaggcaatcgcgctggtggcagaagagctgcgtaccagtttagcttcagtttgcgccagcacttcaggttcaccgcccacaagaaataccggcgtccttctttgcctgcgcgcgccatcagctcttcccagagatcggcaccggcaacgcgggaaacctgcgcctgcgggtactttttacgtactgaacctgcccgtcagcaaacagataatcgttggcagtcaggatggttattttaaacccgagcagcgtcaggcgctgtttgaacgcattcatgccagcggtgcgcaaatcgtcaccgttgcgatgggatcgccaaagcaggagatcatcatggcggggaaatattttggatcattcaccaacgggatgattaccggtacggtgcccattctggcggtgtggtttttttgcatgggggcgtcaataaaattaagcgcgacgggaacggtactgcgtaaatccggtacgctggtggtaactaaaattgccgtcgcgtgggtggttgcggcaattgcctcgcgtattattccggaacatggtgttgaagttggattctttgccggactttcaacgctggcgctggtggcggcgatggatatgaccaatggcggactttacgcttccatcatgcagcagtacggcacaaaagaagaagctggggcatttgtgttgatgtcgttggagtccgggccgctcatgacgatgattattctgggcactgccgggattgcctcgtttgaaccgcatgttttcgtcggcgcagtattaccgttcctggtgggctttgccctggggaaccttgaccctgaattgcgagaatttttcagcaaagcggtgcaaacgctgattccattctttgccttcgcgctgggcaataccattgatttgactgtgattgcccagactggtttgctggggatcctgttgggtgtggcagtaattatcgtgaccggtattccgttgattatcgccgataaattgattggcggtggcgatggcactgccggaattgccgcttccagttccgcaggggccgcggtagcgacacctgtgctgattgcagaaatggtgcctgcgtttaaaccgatggctccggcagcaacttcgctggtagcgacggcggtcattgtgacttcgattctggtgccaattcttacctctatctggtcacgtaaagtcaaagccagagcagcgaaaatcgaaattttaggtacgatacacatccagaccagtgccgaaaccggcaaagaagcgatgtcaatgccgtcagagatcggcgctaacctgtcgctgggcggttcatcactggcagtggcgtggaaaacgaaaaacccggaactgcgtcagacggcgctggctgcggcggcatcagccattatggcggggatttccgaaccggcgttatatggcgtggcgatccgcctgaaacgtccgcttatcgccagtcttatcagcggttttatttgcggcgcggttgccggtatggcggggcttgccagccactcaatggcagcgccggggctatttaccagcgtgcagttcttcgatccggcgaatccaatgagcatcgtctgggtgttcgcggtcatggcgctggcggtggtgctgtcgtttatcctcacactgttgctcggctttgaggatattcctgttgaggaagcggctgcccaggcgcgaaagtatcagagcgtacaaccgaccgtcgccaaagaatctgaaggtgcgttccgtgaaggtgacaaaggtctgaccactgtcgatatgatcccacacggcgagcatcgaatggcggtgaaactggggctggaaaaacgttttcagttgcgagatgacgagttttatcccagccatgaggcgacggatttttatcatcgttataaagaagatatcggcctgatgcagagatggatatcagtttccggtaccctgcgggttaatacctcaccaccctggttaaagatgaaattccatttacgcggcaaagagggagaaggcgtaacgattaccaatctgcgtaatctgtttttcacccctgcggggatcaaagaagagaatatccagaagctcactattgataactaccgcgagcatgatcagaaactggcgcgtgattgcggactggatttggtgggagagatggttgatattgtggcgcatggcgagttgggcggcgacttttcgttagtgcctgacagctacgtgacgatggggccgaaaagcatcatggcggcgaaaaacttgctgataattgtcagcggcgcgggtaaagcgcaggcactgaaaaatgttctgcaaggccaagcgacaaaaacacggcccccgcaacagaaaggacacacccccggcaggacaggagacggacaacccaaacaaaacgaaagcccctcacggcggccgaaccgccatcagaaaggcagtattggtatggtgctggcaaaaagccaccagttactggaaaaacgctatccggaatcaaaaatctcctgggtggagttccccgcgggtccgcaaatgttggaagcgttaaacgttggcagtattgatctcggcagtaccggggatattccgccaatctttgcccaggctgccggggctgatttggtgtacgtgggcgtcgagccaccgaagcccaaagccgaagtgattctggtggcagaaaacagcccgatcaaaaccgtagccgatcttaaaggtcacaaagttgcctttcagaaaggttccagttcacacaaccttttactgcgtgcactgcgtcaggccggacttaagtttaccgatatccaacccacttacctgacgcccgctgatgcccgcgccgcgttccagcaaggtaacgttgacgcctgggctatctgggatccctactactctgctgcattattacagggcggcgtgcgggtgctgaaagacggcaccgatctcaatcaaactggatcgttttatctggcagctcgtccctatgcagaaaaaaacggcgcttttattcagggcgtactggcaacctttagtgaggccgatgcgttaacccgcagccagcgcgagcaaagcatcgctttactggcaaaaacgatgggcttaccggcaccggtgattgcctcttacttagatcatcagcctcctaccaccatacaagctggttaa

SEQ ID NO: 138626 - DNA, 4010 bp, Homo sapiens
atggcgttgcggcgctgccttccagttcggttaacacgccgtggcacgatcgcaaggccacccagaccgaagaaaaagagcgcatcgcccgcaaagtggcggacgaaattccccaatggctcgacgctgtttatcgatatcggcaccacgccggaagcgcgcacgcattgcctcaatcacagcaatttgcgcattgtcaccaacaatttcaacgttgctaacacgttgatggtaaaagaagattttcgcatcattctcgccggtggcaaattacgcagccgcgatggcgggatcattggcgaagcgacgctcgattttatctcccagttccgccttgatttcggcattctggggataagcggcatcgatagcgacggctcgcttttggagttcgagccccacgaagttcgctttcaaacagcagacctgctaggcatagcagaaaacgaagctcgcgttgtagatatcgccgttaaagggcgaaaaattgctgctatcggtcaggatctgggcgatgcaaaagaagttatggatgcggcaaaaggtggtatcaccaccatgatcgaaatgccgctcaaccagctgcctgcaacggttgaccgcgcttcaattgaactgaagttcgatgccgctaaaggcaagctgactattgatgcggcacaactcggtggcctggtgtcttacaacatcgaccgtctgcatgagctggatgaagtgggcgttgtcggcttcaaatgcttcgttgcgacctgtggcgatcgcggtatcgacaacgacttccgtgatgtaaacgactggcagttcttcaaaggtgcgcagaagctgggcgaactgggtcagccggtgctggtgcactgcgaaaacgcgctgatttgtgagctttcatgcctgcaggtccaattttatcaacgctggtatcaaccaaataatatgacctttatcgtggtcggcgatatcgacacagctgaaaatcgcgtctggccgacaaaagccgaaaaccacctgcgctttaatatcattaatgataaagaaaaccgggtgaacggcatcgcactctattatcgcctgccaatggtacaagtgaacgatgagcaaagctttatcgaacaagctgaatggagcatgttagttcagctgttcaatcaacgtctgcaggaacgcatacagtcgggcgagttgaagactatttctggcggcactgcgcgcaggtgtaaaattgcacccggttatcagtcgctgtttttccgtgtaaatgcacgagacgataatatgcaggatgctgcgaatgcgttaatggcagagttggcaaccattggtcagcaagggttttctgctgaagaactcgatggtggtccttctcgttatatccttgccgatatgaacagcgacctgatcagtctctataacattgtgaagatgcgtactgatgagtacgtacaggccgcacgcgagctgtttgttcccgaaacaaattgcgccgaggtttactatcagttccgcgaagagttcaacaaaagccaggatccgttccgtcgggcggtactgtttttatatttgaaccgctacggttacaacggcctgtgtcgttacaatctgcgcggtgagtttaacgtgccgttcggccgctacaaaaaaccctatttcccggaagcagagttgtatcacttcgctgaaaaagcgcagaatgcctttttctattgtgagtcttacgccgatagcatggcgcgcgcagatgatgcatccgtcgtctattgcgatccgccttatgcaccgctgtctgcgaccgccaactttacggcgtatcacacaaacagttttacgcttgaacaacaagcgcatctggcggagatcgccgaagcctttctccatgcgatcgctgatattgcccagcgcaagcacgcagccatcgccatgcttagcgccagccagacaattaatagcgatcgcgaacgccattcgcgccagaaccaacgtgcaatcatgcttcctcctgcaactgcccgttcaccagcctgcgatggtctcgccacgtttgacaaccagctcaactccggtgaggatggagagttcatgctccccctgaccgacggacttcttaagatgatgaacttcaacaatgttttccgctggcatttgcccttcctgttcctggtcctgttaaccttccgtgccgccgcagcgatcacgttattgattctgggtgatagcctgagcgccgggtatcgaatgtctgccagcgcggcctggcctgccttgttgaatgataagtggcagagtaaaacgtcggtagttaatgccagcatcagcgacgacacctcgcaacaaggactggcgcgccttccggctctgctgaaacagcatcagccgcgttggggtgatggttgaacctgggcggcaatgacggtttgcgtggttttcagccacagcaaaccgagcaaacgctgcgccagattttgcaggatgtcaaagccgccaacgctgaaccattgttaatgcaaatacgtctgcctgcaaactatggtcgccgttataatgaagcctttagcgccatttaccccaaactcgccaaagagtttgatgttccgctgctgcccttttttatggaagaggtctacctcaagccacaatggatgcaggatgacggtattcatcccaaccgcgacgcccagccgtttattgccgactggatggcgaagcagttgcagcctttagcgttgctttctgcgggctgcttctacgcggtttactatgtcacctacaaaacccgcctacgcaaacgcgttgctgatgtaccgcgccgtccgctgtttaccatgaaccgcgtggagaccaatcttacgtgggtgatcctgatgggtatcgcgctggtaagcgtcggcatcttcttcatgcacaacggctttttgctgttccggcttaactcctacagtcagatcttttccagtgaagtctccggcgtggcgttaaaacgcttcttttactttttcatcccggcgatgctggtggtctactttctgcgccaggacagcaaagcgtggctgtttttcctcgtcagcacggtcgcctttggcttgctgacttatatgattgtcggcggcactcgcgccaatatcatcatcgcattcgctatcttcctgtttattggcattattcgcggctggatttcgttgtggatgctggcggcggcgggcgtgctggggattgttggcatgttctggctggcactaaaacgctatggaatgaataacgatactaccacgataacggggcggcagatagaccggctcttccgggtacattcgcgtttcgcatttggcgaacgcgtgcaggccgatcatccagatactacgaacctggagaatgacagccgccgttaccagcaagttgatcagcgtcagcggcaggcagattttccagccgaaggacattacctggtcataacgcggacgcgagatggtcacaatcccgatgtactcacccacgaagaacagaccgaacttcataccggaatattcaatgtggtaaccatccgccagttcctgctcggttaccggctggtcaaacgggagaccgtgacataccgcaacggacctgcaggcatgcaagctgataccgcccaagagttcatatcgacggcggtgtttggcacctcgatgtcggctcatcacatcctggggctgaaaacggagagaaccatgcacaaatttactaaagccctggcagccattggtctggcagccgttatgtcacaatccgctatggcggagaacctgaagctcggttttctggtgaagcaaccggaagagccgtggttccagaccgaatggaagtttgccgataaagccgggaaggatttagggtttgaggttattaagattgccgtgccggatggcgaaaaaacattgaacgcgatcgacagcctggctgccagtggcgcaaaaggtttcgttatttgtactccggaccccaaacttggctctgcgatcccggctcatcccctgatgctgtga

SEQ ID NO: 138627 - DNA, 5537 bp, Homo sapiens
  misc_feature (1)...(5537): n = a,t,c or g
ctgcatgctctgcacgtcccagcgaagcggagctgctggagcttatcgatacgctgaatgccgacaacaccatcgatggcattctggttcaactgccgttaccggcgggtattgataacgtcaaagtgctggaacgtattcatccggacaaagacgtggacggtttccatccttacaacgtcggtcgtctgtgccagcgcgcgccgcgtctgcgtccctgcaccccgcgcggtatcgtcacgctgcttgagcgttacaacattgataccttcggcctcaacgccgtggtgattggcgcatcgaatatcgttggccgcccgatgagcatggaactgctgctggcaggttgcaccactacagtgactcaccgcttcactaaaaatctgcgtcatcacgtagaaaatgccgatctattgatcgttgccgttggcaagccaggctttattcccggtgactggatcaaagaaggcgcaattgtgattgatgtcggcatcaaccgtctggaaaatggcaaagttgtgggcgacgtcgtgtttgaagacgcggctaaacgcgcctcatacattacgcctgttcccggcggcgttggcccgatgacggttgccacgctgattgaaaacacgctacaggcgatgagtaacatggcgacattttctttaggtaaacatccgcacgttgagctgtgcgacttgctgaaactggaaggctggagcgaaagcggcgcgcaggcgaaaatcgcgattgccgaaggccaggtgaaagtcgacggtgcggttgaaacgcgcaaacgctgcaaaatcgtcgccggccctccacaagaggtggaggagcagtcttctctaaactcccccggggaaaaggagactccctttcccggtctgctaagtagtgggtgttccttgacactttttgctaccggctttgattatcccagttcagtgcaaagacatgaaagaactcacactggagagaaaccctatgaatgcaaggaatgtggtaaagccttcagtcattcaagttacttacgaatacacgaaagagttcatactggagagaagccgtataaatgtccggcggcatcagccattatggcggggatttccgaaccggcgttatatggcgtggcgatccgcctgaaacgtccgcttatcgccagtcttatcagcggttttatttgcggcgcggttgccggtatggcggggcttgccagccactcaatggcagcgccggggctatttaccagcgtgcagttcttcgatccggcgaatccaatgagcatcgtctgggtgttcgcggtcatggcgctggcggtggtgctgtcgtttatcctcacactgttgctcggctttgaggatattcctgttgaggaagcggctgcccaggcgcgaaagtatcagagcgtacaaccgaccgtcgccaaagaatctgaaggtgcgttccgtgaaggtgacaaaggtctgaccactgtcgatatgatcccacacggcgagcatcgaatggcggtgaaactggggctggaaaaacgttttcagttgcgagatgacgagttttatcccagccatgaggcgacggatttttatcatcgttataaagaagatatcgccctgatggcagagatgggattcaaggttttccgtacctcaattgcctggagccgtctctttccgcagggcgatgaaatcacgcccaatcagcagggcattgctttttatcgttctgtctttgaagagtgtaaaaagtacggtatcgaaccgctggtcacgttgtgccacttcgatgtgccgatgcatctggtcaccgaatatggctcctggcgtaaccgcaagctggtggagtttttcagccgctacgccagaacctgctttgaagcatttgatggtctggtgaaatactggctaacctttaatgaaatcaacattatgttgcctagcccgtttctccggcgcgggtctcggtgtttgaagaaggtgaacaatcaggatcaggtgaaatatcaggccgcgcatcaccagctggttgccagtgcgctagccaccaaaatcgcccatgaggttaacccgcaaaatcaggtgggctgtatgctggcgggcggtaacttctacccttacagttgcaagccggaagatgtctgggcggcgctggagaaagaccgggaaaacctgttttttatcgatgtgcaggcgcggggcacgtatccggcttactctgcccgcgtattccgcgaaaaaggggtaaccatcaacaaagcaccgggcgatgatgaaatcctgaaaaacaccgtcgattttgtctctttcagctattacgcctcgcgctgcgcctcggcggagatgaacgccaacaacagcagtgcggcgaacgtggtgaaatcgctgcgtaatccgtatctacaggtgagcgactggggctggggaatcgatccactcggtctgcgtatcaccatgaatatgatgtacgatcgttatcagaagccgctgtatctggtggaaaacggcctgggcgcaaaagatgaatttgctgccaatggcgagtccggccccggcgaaatcgggaaaacgctcgccgcatttgctacctttggcgtcggatttcttttccgtccgctcggcggtgtcattttcggtcactttggcgaccgactgggacgtaagcgcatgttaatgctgaccgtctggatgatgggcatcgcgacagccttgattggtattcttccttcattctcgaccattgggtggtgggcacctattttgctggtgacactgcgtgccattcagggatttgcagtcggcggcgaatggggaggcgcggcgttgctttccgttgaaagtgcaccgaaaaataaaaaagccttttacagtagcggtgtacaagttggctacggtgtaggtttactgctttcaaccggactggtttcattgatcagtatgatgacgactgacgaacagatttttaagagcgccgggtatcgaatgtctgccagcgcggcctggcctgccttgttgaatgataagtggcagagtaaaacgtcggtagttaatgccagcatcagcggcgacacctcgcaacaaggactggcgcgccttccggctctgctgaaacagcatcagccgcgttgggtgctggttgaactgggcggcaatgacggtttgcgtggttttcagccacagcaaaccgagcaaacgctgcgccagattttgcaggatgtcaaagccgccaacgctgaaccattgttaatgcaaatacgtctgcctgcaaactatggtcgccgttataatgaagcctttagcgccatttaccccaaactcgccaaagagtttgatgttccgctgctgcccttttttatggaagaggtctacctcaagccacaatggatgcaggatgacggtaaagttatgcaaaaatcggtcttaattaccggatgttccagtggaattggcctggaaagcgcgctcgaattaaaacgccagggttttcatgtgctggcaggttgccggaaaccggatgatgttgagcgcatgaacagcatgggatttaccggcgtgttgatcgatctggattcaccagaaagtgttgatcgcgcagccgacgaggtgatcgcactgaccgataattgtctgtatgggatctttaacaatgccggattcggcatgtatggccccctttccaccatcacacgttgtgngtgtttcatcccaatcatttatgttgctagtactcagaaatcttcttgggagaaacatgtatataatatcctggagagggcttcatatccaggatctccgtctatcagcgatgttgtttcagtggaaatggatgtaaaaggctacaccactcagggcgataccgatctgctggggatgggcgtttccgccatcagcatgattggcgactgctacgcgcagaaccagaaagagttgaagcagtactatcagcaagtggatgaacaaggcaatgcgctgtggcgtggtattgcgctaacgcgtgatgactgtattcgccgcgatgtgattaagtcgctcatctgcnacttccgtctggattacgcccctattgagaaacagtgggatttgcacttcgctgattactttgcggaagatctcaagctgctcgccccgttagcaaaagatgggctggtggatgtggatgagaagggaatacaggtgacggcgaaaggtcgcttgctgatccgcaacatttgcatgtgctttgatacctatctgcgccagaaagcgcggatgcagcagttctctcggcgggcgttttttccataccccaaacccctttgctgtggaaactattttggagaggaccaggttctcggaaattatctcttttatgtgtttgggaatttggctcattaccaggttcacccaacgtgggtgtgtgtgctcccaagaggatgctggcttacaattgtgactttaccctatgatgatggcgtcgatgcgcttaatgtacttagcaagaatcatattgatatcgtgcttagcgacgtcaacatgccaaatatggatggttaccgcttgacgcaacgcattcgtcagttgggactgacgttgccggtaatcggagtaactgctaatgcgttggctgaagagaagcagcggtgtctggagtccgccgggaacgctggatgtgataaaacagacgctgacgttatatgccgagagggtcaggaaatcgcgggattcgtaggacggataaggcgtttacgccgcatccggcattcagtgcaaatgccagatgcgacgctgacgcgtcttatctggcctactttaatatttcttctggctactgatggttttaatactgcggttcagctttttagcgatctcggtcaccaggaagccttccgcaaacaggcgcagaacttcactctcttttggcgagagacgcttgtcaccgtaaccaccagcactgattttttccaacaggcgagaaacgctttcggntgtctggtgggccgcaacggcgcaggcaaatcgacgttaatgaaaatcctcaaccgtgaacaagggctggatgacggtcgcattatttacgagcaagatttgattgtagcgcgtctgcaacaggatccgccgcgtaacgttgagggtagcgtttatgatttcgttgccgaaggcattgaagaacaagcggaatatctgaaacgctatcacgatatttcgcgcctggtgatgaacgacccgagcgagaaaaatctcaacgaactggcgaaggttcaggaacagctggatcaccacaacctgtggcagctggaaaaccgcatcaacgaagtgctggcgcaactggggttagatcctaacgttgcgctgtcgtcgctttccggcggctggttgcgtaaagcggcattaggacgcgcgctggtgagtaatccgcgcgtgctgttgcttgatgaaccgacaaaccacctggatattgaaaccatcgactggctggaagggtttttgaaaactttcaacgggacgattattttcatctcccacgaccgttcgtttatccgcaatatggcgacgcgcatggggatcctctag

SEQ ID NO: 138628 - DNA, 2469 bp, Homo sapiens; identical to SEQ ID NO: 122987

SEQ ID NO: 138629 - DNA, 1611 bp, Homo sapiens
ctattgtgtatctgtttctgatctcttcgctctcgtttcgtactctttccttctgtctactgtcttctctctcttggtgtgtagtgttcgcttcttcttgtgagagcagagaatatagaaagaggaaggtcgtacagcaacgacgacggtcgtgacaacagccccggcggatgtcatcaccatgtcccacaacgaggcgctggcaccgatagaaaactcgttatgtcgtgaggtatgcgccacctccttacgggcggcctgccaggtgctcatgagcgtttctgcataaggcagtagtttttcaccggcagcgataacggtggcccttgtttgcatgtcgtgcctctcggtgttgcgtttaggtctcaggctgcgccgggtgttagttagggtgatttcgttcttgcgagccgcatgcgaacatctgccactgcgaagccagttaccgaaccggtcgcacactgatggaaaagtgatgaaggaaacagtcgcggagcaggcgcaatcaaccgagctttcaaatcggtgaccggcaaaggcggcatcaaagtgattgatgccagtagcgtcaagtttggtcgtttcgacggcgcagagccgcattgcgtgggcttgactgatcttgtgaccggagacgacggcagcagcatggccgccggttttatgcagtgggagaacgcattcttcccgtggaccctgaactacgacgaaatcgacatggtgctggaaggggagctgcatgttcgccacgaaggccaaaccatgatcgccaaagcaggcgacgtgatgtttatcccgaaaggctccagcatcgaatttggtacgacatccagcgtgaaattcctgtatgtcgcctggccggctaactggcaatcccatacgctcagcgaaggcgcagagatccatctccctgcggacagtcgcctgacgccctctgcccgggagttgctggaaagccgccatctgcgcatcaagtttattgacgagcagggccgcctgtttgttgacgatgaacagcagcagccgcagcccgttcatgggctgaccagtagcgatgaacatccgcaggcgtgctgcgaactgtgtcgccagccggtggcaaaaaagccggatacgctgactcacctgtcggcggaaaaaatggtcgccaaaagcgatccgcgtctgggttttcgcgcggttctcgacagcaccattgcgctgttttacagcgaataaataatcacctccctgtttttgtatcttctctgcaatatctttctggcaacccatcgcatcagttgtgatgatttttcctttaatatccagcatgttaagaagttcagggatagctgtgatctcattggatttcttatccgtcttgatctgcccgatgaccagactgtgcattgttgagaacgcactaatgacatgaatcgctcccctgcggcgactcttgtcataagagtgccggagcgtttttccatcaattgcaatgacgtctttatcatttgatgaatggcaatcacgcatccagttaataaagcaactcgtgaaattttgcaggactgatacgggatacaactctggcaatggtatcgtgaacaggaataccattttcaaaatcaccat

SEQ ID NO: 138630 - DNA, 2825 bp, Homo sapiens
atgtatccacataacagagtgccgtacgactgtaaaaagaacatcaagtgtttcttcttctacactggagggatcttcaggagaggatcccccctggtagttgctgcgactgacggcccgatgccgcagactcgtgagcacatcctgctgggtcgtcaggtaggcgttccgtacatcatcgtgttcctgaacaaatgcgacatggttgatgacgaagagctgctggaactggttgaaatggaagttcgtgaacttctgtctcagtacgacttcccgggcgacgacactccgatcgttcgtggttctgctctgaaagcgctggaaggcgacgcagagtgggaagcgaaaatcctggaactggctggcttcctggattcttatattccggaaccagagcgtgcgattgacaagccgttcctgctgccgatcgaagacgtattctccatctccggtcgtggtaccgttgttaccggtcgtgtagaacgcggtatcatcaaagttggtgaagaagttgaaatcgttggtatcaaagagactcagaagtctacctgtactggcgttgaaatgttccgcaaactgctggacgaaggccgtgctgcgtgccagccgacaagaaccgaaagccagcgcatccgcgaaaccatcattgcccagctgccggaaggccagtttaccgaaagcctggtcgcacagctgatggaaaaagtgatgaaggaaaaacagtcgctggagcagggcgcaatgcagccgagcttcaaatcggtgaccggcaaaggcggcatcaaagtgattgatggcagtagcgtcaagtttggtcgtttcgacggcgcagagccgcattgcgtgggcttgactgatcttgtgaccggagacgacggcagcagcatggccgccggttttatgcagtgggagaacgcattcttcccgtggaccctgaactacgacgaaatcgacatggtgctggaaggggagctgcatgttcgccacgaaggccaaaccatgatcgccaaagcaggcgacgtgatgtttatcccgaaaggctccagcatcgaatttggtacgacatccagcgtgaaattcctgtatgtcgcctggcccgctaactggcaatccctatgaaagatttcatcaccgaagcatggctaagagcgaaccatacgctcagcgaaggcgcagagatccatctccctgcggacagtcgcctgacgccctctgcccgggagttgctggaaagccgccatctgcgcatcaagtttattgacgagcagggccgcctgtttgttgacgatgaacagcagcagccgcagcccgttcatgggctgaccagtagcgatgaacatccgcaggcgtgctgcgaactgtgtcgccagccggtggctaaaaaagccggatacgctgactcacctgtcggcggaaaaaatggtcgccaaaagcgatccgcgtctgggttttcgcgcggttctcgacagcaccattgcgctggcagtgtggctgcaaattgaactggcggaaccgtggcagccgtggctggcggatatccgttcgcgtcttggcaacattatgcgcgccgatgcgctgggggaaccgctgggctgccaggcgattgtcgggctttctgacgaagatctgcatcggctttctcatcagccgctgcgctatctcgaccacgatcatctggtgccggaagccagccacgggcgcgatgctgcgttgctcaatctgctacgcaccaaagtgcgggaaacccgaaaccgtagcggcgcagggtctttatcacccgcagcttttgaagtattacgcccggaacattttgcaggcgctgaaccgcctttcgagcacggtctacgtgatgatgatcctgagcgtaacgaagcagccgctaacggtgaagcagatccaacaacgactgggggaaacgcaatgattattgaacgttgtcgtgaactggcgttgcgagcgcccgccagagtggtttttccggatgcgttagaccaacgtgtgctgaaagccgcgcaatatttacatcaacaaggtctggcaacgcccattctggtcgccaatccgtttgaacttcgtcagtttgcgctcagtcacggcgtggcgatggacgggctacaggtgattgatccgcatggcaacctcgcaatgcgggaagaatttgctcatcgctggctggccagcggttcccccagcgcatcggcgcgcataatgttgccaagacgcgaacggatatccgccagccacggctgccacggttccgccagttcaatttgcagccacactgccagcgcaatggtgctgtcgagaaccgcgcgaaaacccagacgcggatcgcttttggcgaccattttttccgccgacaggtgagtcagcgtatccggcttttttgccaccggctggcgacacagttcgcagcacgcctgcggatgttcatcgctactggtcagcccatgaacgggctgcggctgctgctgttcatcgtcaacaaacaggcggccctgctcgtcaataaacttgatgcgcagatggcggctttccagcaactcccgggcagagggcgtcaggcgactgtccgcagggagatggatctctgcgccttcgctgagccaccatgtcgatttcgtcgtagttcaaggtccacgggaaagaatgcgttctcccacttgataaaaaccggcgggcatgctgctgccgtcgtcttcggtcacaagatcagtcaagccccacgcaatgcggctctgcgccgtcgaaacaccaaacttgacgcttcttgcatcatcactttgatgcgcgcctttggcggcaccgaattgaaactggcttga

SEQ ID NO: 138631 - DNA, 966 bp, Homo sapiens
tcaccctcccttcgcaataaacgcccgtaataactcattgccccacggtatgatttcgcccgtaacgtattgaaggatgacttcaggcaaggagcgaccatgctgcaacaggttccaacgcgtgcttttcatgtgatggcgaaaccgagcggttccgattgtaatctgaactgtgactactgtttttatctcgaaaaacaatccctttaccgcgaaaagccagtcacgcatatggacgatgacacgctggaagcgtatgtccgtcactatatcgctgccagcgaaccgcaaaacgaagtggcttttaccttctactgaagaggttgtggtcattctctggaaatatctgaattcattccgggcagcagaatccgggcagaaatcagcaactgggcctcccgcgcagcagaaaaggggaatccagtcgggcccacccttcctgccagcgcagaccgcaagtctggccccatcctctcgccgggagtcggccaccccgaccgtgggcagcctgcgcccgtttgggtcccatcgccccggcccggcagatacctgagcggtggccagggcaggtccccgttcttgccgatgcccatgttctgccatgtctcgccggaagcctgcgtccggccttatacgacttctagctcggtacccagcacggtagagcgtatgatttcgcagataccagtgaacagtgagtaaggtttgtgcttcactgagaggagccagcggatcgcgactttgcgtggtaaaaatagcttcttcacccaacaccatgattttgtccgtactccgattcctccgggcgaccagttgcaggagatcgttatcaagaatggtgatggtgcgctgtagctgattgaactgctggatttctttctgtgagcgttgatgcaactcggaagcttgcgaaaaaatcataaacgccagcacgctaagcattgagaaaatcgccagcgccgccat

SEQ ID NO: 138632 - DNA, 1863 bp, Homo sapiens
ttattctaacggcatgtttattggcgtaatcagcaatgaccctggtattgttacaaacgtagaatatggccaggaggagtggacgacatccgtgatgaagtggggctctgcgtcggggtgtacgataaccccgccgatctgagcgccaagtcctggacggtgatgcgctttagcgaaaccgaacagaacggcaagctggagtggctgatccgtaaagacggctgtatgcactgtgaagatcccggctgcctgaaggcgtgcccgtctgctggtgcaatcattcagtacgctaacgggattgtcgatttccagtcggaaaactgcatcggctgtggttactgcattgccgggtgtccgtttaatattccgcgcctcaacaaagaggataaccgggtatataaatgcacgctctgcgtcgatcgcgtcagcgtcggccaggaaccggcttgtgtgaaaacctgtccgaccggggctatccacttcggcaccaagaaggagatgctggagctggcggaacagcgcgtggcgaaactgaaagcgcgtggttacgaacatgctggcgtctacaacccggaaggggtcggtggtacgcacgttatgtacgtgctgcatcacgccgatcagccggagctgtatcacggtctgccgaaagatccgaagatcgacacctcggtaagcccgaccaggccagactgttccgggggatttctcctcgctttcgggcgtctcaatctcttcatccatcagagcttcgatttcgaaggtgttcatgtgaccgctgataatcaggcgcagataatcgacgataaaatcaagcatgacgctatccgcgaggatgcgtgggtagctggcgaagatctcgctctcacggggattttcaatatcacgttccagcgaaaacatccccatctgccgcgatttcgccatcaaccgataaagcagagccagcagatccatatacattgctttggtgtatttggagcgacgaaacagcaacggcagcgccttcagcgtgcctttaatcgctttgccattattgccgacgataaacgacccaatccctgcaccggcaataatcaccagttcagcgggttgatagagtgctccaaggcttccaccggtcatcaaataaccgccgaaaactgtaccgagaacaaccaggtaacctaataagataagcacgacatcatccttccatctctgttcatccagcagttgtgggataatatcggcaggattctgggaaagtttacgtctttttactgcccgggatggcggttgacataagctgcaggcaaagctgccaacaggctgtgcaatacgcagaactgaactacgggcacgagggttctcagccacctcttcttcgcccggcattaacttgcctagtgctcgcagctgacggccacccagttttttgagctgctcttcagtcatcggtaaccctgccggaacttgcggaccgcggctgttttcacgcataaaacgtttcacaatacggtcttccagcgagtggaagctgatgatcgaaagccgcccacccggggccagcacgttgagcgagctttttagcgcctgctctatctcctccagttcactgtttacccaaatgcgcaccgcctggaaggtacgggtcgcgggatgtttaaacttatctttcaccggcgttgcagcagccacgacttccgccagttctttggtgcgggtcatcggctgttcgcggttacgctcgacaatggcgcgggcaatgcgtttggcaaaacgctcttcaccataggttttcaatacccaggcgatatcggcttcttctgcggtttgtagccattcagcggctgactgcccacgggttgggtccatacgcat

SEQ ID NO: 138633 - DNA, 1158 bp, Homo sapiens
atggatgtaatatatgggtatccgagcaacaagcaggtggcagtcagcggctggcaagagaactcgggcgtttcactggaacaactggtggaaacctatctgcccgtcggcctgaaacatgtgctgtgtaccgatatctcgcgcgacggcacgctggcaggctctaacgtctctttatatgaagaagtgtgcgccagatatccgcaggtggcatttcagtcctccggcggtattggcgacattgatgatgtggcggccctgcgtggcactggtgtgcgcggcgtaatagttggtcgggcattactggaaggaggccatcgcatgctggcaaaacgcataatcccatgtctcgacgttcgtgatggtcaggtggtgaaaggcgtacagtttcgcaaccatgaaatcattggcgatatcgtgccgctggcaaaacgctacgctgaagaaggcgctgacgaactggtgttctacgatatcaccgcttccagcgatggccgtgtgtacccaacattaattactcgcctggccgatcgctttggcgtgcagtgtattgtggtcggtattgatacctggtacgacgccagaaacctgaaagatatcagtgtggtgggcttgctaggggcacaggtgcccagtgtcagggcagggatgccacagagccgcaggcagactgaaggggcccagggcatggtcaggaacgaagaaggagggagcctgaggctctcccaccaccaggcctgcaaagccactcacactcagcagtggacacttgaggtcacggcccagagctcttacaatctctttcctgagcaatgggtgaaactattttgggggatccggcaaggagatcttccactggcttttagtcaaaagctgagccgacagacattccagcagcaacagacccaaacaccaagacccattgttggacaagcacctaaggatttgcaaaccggcacaggcacgccccaaacccacgctgtgcactccggggaccacgctgcgggtgagcagagctgcaagtcgtgcaaggccccaatttatccgttaactgcccagttctccctggagactcgcagcttctggggaagtgagtggggctacagcacccacggggagctccgaagacgggacaagggacgcagacgcttctattga

SEQ ID NO: 138634 - DNA, 4677 bp, Homo sapiens
ctacagcgtcatgcccgtactacccaatacatgacgcgaaatcatgaccagactgaaagagaaccccctgaggttcccaggagagtcgtggtcggcgaaatgcgcgccgatggtctgcaccttgcccgcgtcttccccgacggtcggcggcagcgtcgccccgcccggcaccagaatagtcggcaggtcgtgcatcgcggccagcgcaatcatggtggcgggcagccctttatcgcaggtcgctacgccgatcaccgcccgccgcgtcggcagggagcggatcaggcggcgaaacacgatcgccgcgtcgttgcggtacggcagggaatcgaacataccgtgcgtgccctgcgagcgcccgtcgcacggatcgctgacgaaggccgcgaacgggatcccgccattgcgggtgatctccttcgccgccgcctgcatctgcatgccgatctcccaatgcccggtgtggtagcccagcgcgattgggcgtccgtctccggcgcggatgccgccctgagtgccgataatcagcacctctttgccggtgagcttgttggcgtcccagcccatcccggcgttctgcgtcatgccgaacaggttgccgctgggagattccatcagcatctgcggggtcagcggcagagcgccctgcggccccgccgcgtgggtgatcaccgcataaaacgcgtcgtcctgcggggtgaaaattttctcaatggtcatcgttatcgtccggctcagcaaagcttgagctgttgcagcagggttttcagctgcgccttgccatgctgtaggtgactctagaggatcccttactgtaagacttgaagggaagtgcaccctccccactgggctgccgtcagggttgagggagttaatatccataaggcgctccaggctactgcagcctgcctttaacggattccccggtccatatgcacctgcgcagcacagtgttgcggcagtgagtgaatggaccgggatgcaggtgaaataagtgaactggcgcagaatcgtctggctattggcgttggttactctgccaacacttgcggaggagacgccgttacaactggtgcttgaacttcgactcaaccactgccgattagcggacgttctggtggacaacttgtaatagtttagcgccttgtgctggaggatacccatcaaccggagcagccctaccagtgtcgcggaaactccccggaagaggtttattgttgtcaggctggggagagcataacgcgcgataccgcgctggtacgttcctgtgggctctattttgcgccgcagcggttgcatattggcgcagatgtgtgggggcaatatggcatgtggtttctgcgcatcaggcgcggcactctcggggatggcacaatccgtcgggtatttgttggcagcctgtgggccgccgtcgtgattgttgaaatcggagtagagcacatcggcgtatttaaagcttaaacggtgcgcctggccctctgcttcgcaaaagacgttcatttcacgaccgatacgggtggcgagcgacataacatgcgcttcacgcagcgggtcgataggcgggttagtcacctgggcaaactgctggcggaagtagtcgtaaataatgcgcggctgactggagagcacggcgaatggggtatcatcgcccatcgaaccgaccgcttcctgaccgttttcgcccagtacgcgaattacggagtccagctcttccgcgctgtagttaaactgtttctggtagctggcaagcgtgtcgtcgtccagttcgcggctacccacttcttcatcgggcagatcttcaaacggtaccagtcggcggacgtttttctccatccactctttatatggatggcggcttttcagatcgtcatcggtttctgccgagtgcagaatacgcccactgcgggtgtcgataaccatcagttcgcctggcccgacgcggcctttttcgaccacttcgtcaggctggtaatcccagataccgacttcagaggcgcaggtgatgagcttatctttggtgatgacgtagcgcgccggacgcagaccgttacggtcgaggttacaggcggcaaaacgaccgtcggacatcacgatgcccgccgggccatcccacggctccatatgcgtggagttaaagtcgaggaaggcacgcagttccgggtccatatccggggttgttcttgcaggcgggtggtaattcatatattctattcccatatcacatcccatcatctcatcgtcatcatcatcatcgtcatcatcgtcatcatcatcatcatcgtgatcatcattctcatcatcatactcatcatcggtcaccgcctttgaaagtatgcattcagacaaaaattggaaagcctccaagttccaaattgttggcgaaacacaccggaagatggtaacgccgcgcatgtggctgcttttgccagaagggcaacggatacatatgccgatgcggatggtggcgttccatggaatgccgaatctggcgcttacaatgtcacccgctctggcgacagctatattctggccggttatctgttcagcagcctcggcgcgttcggcgtggtcagcctgatgtccagcccgtatcgtggcccggatgctgattccctgttctcttaccgcggtctgttctggcatcgtccgatcctcgcggcagtgatgacggtgatgatgctgtctctggccggtatcccgatgacgctgggctttatcggtaagttctacgtgctggcggtcggtgtccaggcacacttgtggtggctggtgggtgccgtggttgtcggttcggcaatcggcctcatcaaactggcagtacagcgcgggcggtatcgttgtgctgatctctgcactgttggtactggtgctgggtgtatggccacaaccgctgattagcattgtgcgtttggcaatgccgctgatgtaatctgttactttgtaagtcagaaagccgccgacatgctcggcggtttttaattttgctttttcgccacgataagccagcgcggtcgcgtaagtaatatatgactgaggatcggtgaagatcccctgtgattgcaggggttggcctctgcgctggcggttctggctgacgaaaacgtggttcacggcccgctggaagtgcatgaccgaagaacagtgcaacaccacatcttgctcgatcgcggaacgtgaggtgtcggcactgtaaatgttctccattaatggtccgttgtcgccaaaagtaatatgcaacaccgtcaggagcggaacacctaacgcttcttcctgcgtccagccgctcatcttctccgccactggattcataaaggtaattttcatcgccatatcaatacagaccacggcttcaccgatggaatcaagcgtaatgtgcaggcgctctttttcctgaaacaatgcctcgttaagctgtttcacttcggtcatatccatattgatgccgaggagacgttcgacttcgccttctttattcagtacccggttggcgagggcgcggatatggcgaataccgtcttttacggtaatgcgaaattccagtttaaagggcgagcgtgattgcaacgaatcacgaatcactttttcggcatgctggcgatcttccggcagcacgcactcgtaccacacctgccagttcggtttgatatgtggaggaatttcatacagctcgaacatccgcttatcccagctaaaaatattcggcttcaactcccactcccagatgccaatcccggccgcttcgttagccagagtgatgcgctcaatcagttgctggatgacctgtacggtgcgtatagctcgtaagtgtctcatctgaagctgttcaaccgcagctgcacggaaagtatcacccgccgccagcatcaccgatttaccctgctgctcaaactgacgcgccagcttaccaatcgtcgtggttttacccacaccgttgacgcccaccatcaggatcacaaacggcgctttgccttcaacattcagcggctcatcgactttcgccagaatctcgcccatctcttctttcagcaggccatagagcgcctcggcgtcacgaagctgcttgcgggatgcgccttccgtcagattggtgataattttacgtgtggtttccacacccacatcggcgatcaaaagctgctcttccagctccgcggaacaggctgataaatccggaaccgagattctctttggttttaacaggctgcgttcaggcgcgcgaaaaacttcttggtcggttttccggtccgaacgattttccacgggtgtcttctttggcgaggaacacaatacgctttctgcgttctgaacgatagcggcaaacgcgccaccatgttcggttcggtcgcggtgatccgcgagtccggtatcaacagcgtaggtcatctgccgtggttcgagcgcgtgtggtatgcgctggcaaaccatccgattctgctggcggtgctggcggctatcagtgtgatattgctggcatgggtactgtggcgtctgctgcgaattattagtcgtcgtcgtcttaacccggataacgagtaattgaagatgaatgtgttgcgtagtggaatcgtgacgatgctgctgctggctgcctttagtgttcaggcagcctgtacctggcctgccgtgttcatcccaccagacatcgatgggtgcataactgacaggcaaatgcaacat

SEQ ID NO: 138635 - DNA, 878 bp, Homo sapiens
aggccaggtacaggctgcctgaacactaaaggcagccagcagcagcatcgtcacgattccactacgcaacacattcatcttcaattactcgttatccgggttaagacgacgacgactaataattcgcagcagacgccacagtacccatgccagcaatatcacactgatagccgccagcaccgccagcagaatcggatggtttgccagcgcataccacacgcgctcgaaccacggcagatgacctacgtaataaacgtcgccaacacgtaggctgttgataccggactcgcggatcaccgcgaccgaaccgaacatggtggcgcgtttgccgctatcgttcaccgcatcgttaagcatttcataaccgcgtgggctatctgccaacagcgcaatcacgctgcgctggtcgttatacggcgactggaagccaatcaccgccgccatcgcaccggaagaggtcagcgttgaccgggtttctgccgcgcgatcgctctcgtccggcacaatgccggggaacggggtctggcgcatcggtgttttcacccagctttcggtcgcctgcaccaataggtcgatctgcttatcgtctttcagtttgtccgggataccaccgatgatcatgatgtcggcatctttgccctggcggctaacgaccgtgcagctttcgataatattctcgacccaaccggtagcgtcgatgttctgctgccgttgccggggcgtcacaatattgcgaatgcgctggcagccgctgcgctctccatgtccgtgggcgcaacgcttgatgctatcaaagcggggctggcaaatctgaaagctgttccaggccgtctgttccccatccaactggcagaaaaccagttgctgctcgacgactc

SEQ ID NO: 138636 - DNA, 687 bp, Homo sapiens
atgaaagaggcgcaaaagccggacaccgccagctaccgcacctttaacgaattctttgtccgtccgctgcgtgacgaagtacgcccaatcgataccgatccgaatgtactggtcatgcctgccgatggcgttatcagccagttgggtaaaatcgaagaagataaaatcctgcaagccaaaggccacaactacagcctcgaagccctgctggcaggcaactatctgatggcggacctgttccgcaacggtacgtttgtgaccacttacctctccccgcgtgactaccaccgcgtacacatgccgtgcaacggtattctgcgtgagatgatctacgtgccgggcgatctcttctccgttaaccatctcacggctcagaacgtgccgaatctgtttgcccgtaacgaacgcgtgatttgcctttctgataccgaatttggcccaatggcgcagattctggtcggagcgacgaatggtggcagcattgagacggaaaatgttgtcgaaaagcgtgtaagaggtgcgcaatgcgtaagcagtggctcgggatctgcatcgcggcaggaatgctcgcggcatgtacaagcgatgatggtcagcaacagacgctacgccagaatcactaacctggctaacgggcgaatgatcgtggtgcgcattaatgatcgcggcccttacggcaacgaccgc

SEQ ID NO: 138637 - DNA, 3847 bp, Homo sapiens
  misc_feature (1)...(3847): n = a,t,c or g
atggcgactgaagaattcaactatgcaaacccgtggcagaggttggaggggactgcgtgtggaagacttgatcatttgcaagccccgttaggcaacctactagatcccttggtgtaccaacaaccggtgcgacagttttcccggcaggcttggcggctgggcaggcattgccgggcacccccagggcacagccgagggctgccagtgcagcccgtgcatggccatcaactagcactcacagccgtggcatgcacagcaacgcagcactggcatctccaacaatcatcagcatcaaattctacaagaccgccggcccccccacaaaaagaagcacaaacaaacaaacaatgcaaaaggccactgggaacacaacagaaaacatcacctggccctatacagcgacatccccaaccgacactcgaccatgcaaccccgccaaaagacgggaacagtcgagacaataaggcacaaataaagaccggagagccaacacaacacggcaaagccagctatgaaagtcctggaacaggcgcggcgctttcttggaatccgctggttaagcgcaccggcgtcgctggcgaatctgtaattttgttagtggtcggcaatatcctcaacattgtgctggatgtctggctggtgatggggctgcatatgaacgtgcagggcgcggcgctggcgacggttattgcggaatatgcaacattgctgattggtctgctaatggtgcgtaaaatcctcaaactacgcggaatttccggcgaaatgctgaaaactgcctggcgaggaaacttccgtcgcttgctggcgcttaaccgcgatatcatgctgcgttcgctgttgttgcaactctgtttcggcgcgatcaccgtacttggcgcgcgactggggagtgacattatcgctgttaacgcggttctgatgacgctactcacctttaccgcctatgcgctggatggttttgcctacgcggttgaagcgcactccggtcaggcatacggtgcgcgcgacggtagccagttgctggatgtctggcgggcagcgtgccgccagtcggggatcgtagcgttactgttttcggtggtttatttgctggctggggaacacatcattgcgttactgacgtcgttaacccagattcagcagctggctgaccgctatcttatctggcaggtgattttgccggtggttggcgtctggtgttatctgctggacggcatgtttataggcgcaacgcgtgccaccgaaatgcgtaacagtatggcggtggccgccgcaggttttgcgctgacgctccttacgctgccgtggctgggtaatcatgctttgtggctggcattaaccgtctttctggcgttgcgcgggctttctctggcggctatctggcggcgtcactggcgcaatggcaggccaggtacaggctgcctgaacactaaaggcagccagcagcagcatcgtcacgattccactacgcaacacattcatcttcaattactcgttatccgggttaagacgacgacgactaataattcgcagcagacgccacagtacccatgccagcaatatcacactgatagccgccagcaccgccagcagaatcggatggtttgccagcgcataccacacgcgctgcccagcccgcggtttaggcagatctcccgcggttcaactgccaaagtcccatgcgctaaggccagggcattcttgagagttaagtccgacccaacattaattactcgcctggccgatcgctttggcgtgcagtgtattgtggtcggtattgatacctggtacgacgccgaaaccggtaaatatcatgtgaatcaatataccggcgatgaaagccgcacccgcgtcactcaatgggaaacgctcgactgggtacaggaagtgcaaaaacgcggtgccggagaaatcgtcctagcgtatgtctctgagcnntttacttttatgtcagggatgatcaacaagttcaaagaggtgttcccgaaagcgcaggtttctatgtatgaagcgcaactgtcttcgttcttaccggcaatccgcgacggtcgactggattttgcgattggtacgttaagtgcagaaatgaagcttcaggatttacatgttgagccgctgttcgagtccgagtttgtgctggtagccagtaagtcccgaacatgcaccggcaccaccacgctggagtcgttgaagaacgaacagtgggtgttgccacaaactaatatggggtactacagcgaactgcttactacgttacaaagaaatggcatcagtattgaaaacatcgttaaaaccgactcagtcgtgacaatttataatcttgttctcaatgctgatttcttaactgtaattccttgtgatatgacgtcaccttttggttctaatcaatttattactattccggttgaagaaacattacctgtggcacaatatgccgcgacactggtgccgcatctcgattttcgcctttgcctccgcaccgcaagaagacgaaacgctgcgtctgaagatgaaagcgattgttgcccgtggcgcaggaacagtgattgtcacgctgggtgaaaacggcagcattgcctgggatggcgcgcagttctggcgtcaggctcctgaaccggtgacggttatcgacaccatgggtgccggagattcgttcattgccggattcctttgcggctggtctgcggtgatgacattaccgcaggcgatagcgcagggaacggcgtgcgcggcgaaaaccattcagggccacgggtcgattatgtcagctacggaccgctactctcatcaactcctctacgctaccgtccgccagcgactgctggatgatatcgcgcagggggtttaccaggccgggcaacagatccctaccgaaaacgagctttgtacacaatataacgtcagccgcattaccattcgcaaagccatcagcgacttagtggcagacggcgatgacttcaggcaaggagcgaccatgctgcaacaggttccaacgcgtgcttttcatgtgatggcgaaaccgagcggttccgattgtaatctgaactgtgactactgtttttatctcgaaaaacaatccctttatcgcgaaaatgcagtcacgcatatggacgatgacacgctggaaccgtatgtccgtcactatatcgctgccagcgaacggcaaacgaatggctttttcactggcagggcggctgaccacgctactcgggcttgcggtttaccgccgtgcgccgccagagcgcaaaccacctttggtcgcgtcatggctggcggcttaatgctgatattattcgtttatgtcttcgtaaatattggtatggaaaatgttgtcgaaaagcgtgtaagaggtgcgcaatgcgtaagcagtggctcgggatctgcatcgcggcaggaatgctcgcggcatgtacaagcgatgatggtcagcaacagacgtgaagtttcggatacgttagtgacgggaggttgggataaacaaaaaatgtctgacgcgattaaacatgcgcggaaagaaaccgataaattcatcgaggttatgaataaaaaagatgccgatactttcgcagtcaaagccccgataaccgatcacggaagaaccgagcatttctggcttacggatgtcacttattctaacggcatgtttattggcgtaatcagcaatgaccctggtattgttacaaacgtagaatatggccaggagtggaaaatcaagaaagaagatatttcagactggatgtatacgcgcggggataaaatttacggcggttataccattgatcctttattggtcacctatcccaaagaagaagccgacgagctaagagcaaaattagttcgctaa

SEQ ID NO: 138638 - DNA, 413 bp, Homo sapiens
gccccttcccctaggtgctctgtcccagggagatgggagttttatctataagcccctgactggggctgcttcctttctttcagagatgctctgcccagagaggaggaatctagagaggcagtctggctacagtggctttacatctatatttttataagtataaaattagaagctaattagatataatgaatggtcaagtaaagtagacatattttcacatttacatccatttccaaattttgtgatactgagtttgtaaagaagtccaatttcgctatttgctgcatttgcttttcaacaaaaattgtatttagtattttcactaaactatgtaagagcacttagctcgttgataactttcatcaccattgtgaagctatacaagttataaactattttaaggcttttcccat

SEQ ID NO: 138639 - DNA, 456 bp, Homo sapiens; identical to SEQ ID NO: 122180

SEQ ID NO: 138640 - DNA, 886 bp, Homo sapiens
atgccagctgctgtggcaggcaggcagctccaggtgccagcacaggtgctggctccatgtaaacccgtggctggatcagatgcactagccagcaggcaggaacatttaagtctgctaaagcagtgcccacagctgctccttcccgcaggagctctgtcccacggagatgggagttttatctatgagcccctgactggggctgctgcccttctttcagagatgctctgcccacagagcaggaatctagagaggcagtctggctacagctgctttgcagagctgcagtgggctctgcccagttcaaactctccagcagctttgtttactgggagaggaaaactgcctactcaagcctcagtaatggcagacgccccttccctcaccaagcccaagcatcccaggttgactttagactgctgtcctcgcagccagaatttcaagccagtggattttagcttgctgggctccatgggggtgggatccactgagctagatcacttggctccctggcttcaggccccctttccaggggagtgaacagttctgtctcgctggcgttccaggtgccactgggggttcagagtcagtgctgcacacaaggaattcatacaagatgttggaagttagaagggaagtagcagctcttatatctgccctgaaagtcagtgccaagtgcaggaactgtggcagctcacatgctcttactgagccggtagctcaccttgttggcgtgagacatcaaccagacccacaggggctccagctcccaccatacctcctcctgcagcttctcctagtcctgggccaatgtgtgtacaacctcatggtgaagactagagaaaaagctactactgctggtcaccatggcagcagctgctggccatga

SEQ ID NO: 138641 - DNA, 726 bp, Homo sapiens
ccggagaatctcgcgttgatctgctggcgcgggtgaaattaagtcacgataagctgaaagatttacgtgagcgcaaagccagtctggaagcccgtgcgctggaagcgttaagcaagaacgttaatccgtcgttgattaacgaagttgctgaagaaatcgcgcgccttgagaatctcattaccgctgaagagcaagtgttgtcgaatctggaagtctcccgtgatggcgtggaaaaagcagttacagcgacagcgcagcgtatcgctcagtttgagcagcaaatggaagtcgttaaagccactgaagccatgcagcgtgcacaacaggctgtaacaacctctaccgttggcgcatcttccagcgtttcgacagcggcagaatccttaaaacgcctgcaaacgcgtcaggccgaacgtcaggctcgcctggatgctgccgcacagttggagaaagtcgcagacggtcgcgaccttgacgaaaagctggcggaagccggaattggcggtagcaataaaacgtttcgtttgctggaagatgaattgctgattgcgctgccgggtgaggaatttacggtagccgccgtcagccacatcgatctgggcggcggtagtcagattttccgctactacacttcaggcgatgagtttctgcaaatcaataccaccggcggcgaagatattgatgacattgatgatatcaagctctttgtctatgaagagagctacg

SEQ ID NO: 138642 - DNA, 1638 bp, Homo sapiens
atgtcaaagccaaaatacccttttgaaaagcgccttgaagtcgtgaatcactacttcacaactgatgatggttacaggatcatctcggcacgttttggtgtcccccgaacccaggtcaggacatgggttgccctctatgaaaaacatggagaaaaaggtttaattcccaaacctaaaggcgttagtgctgatccagagttgcgtattaaggtcgtgaaagctgtgatcgagcagcacatgtcccttaatcaggctgctgctcactttatgcttgctggtagtggttctgtagccaggtggctgaaggtctatgaagagcgcggagaagctggtttacgcgcgctcaagattggcaccaaaagaaacattgcaatatcagttgatccagaaaaagcggcatcagcattggagctgtcaaaagaccgacgcattgaggatcttgaaaggcaagttcgatttcttgaaacgcggcttatgtatctaaaaaagctgaaagccttagctcatcccacgaaaaaagatttcaaggctacgcggccaaacgagaagtgggttaccgatgttactgaatttgcagtcaatgggcgcaagctgtatttgtctccagtaatagatctcttcaacaacgaagttatttcttacagcctttcggaaagaccagtgatgaacatggttgagaatatgctcgatcaggcattcaaaaagcttaatcctcacgagcatcctgttctgcactctgaccagggatggcagtatcgtatgagaagatatcaaaatatccttaaagaacatggtattaaaccaagcatgtccagaaaaggcaattgtctggataatgctgtggtggagtgtttctttggaaccttaaagtcggagtgtttttatcttgatgagttcagtaatataagcgaactgaaggatgctgttacggaatatattgaatactacaccagcagaagaattagcctgaaattaaaaggtctgactcccattgaatatcggaatcagacctatatgcctcgtgttaactgtccactttttgggatcagtacagggacaggccgtgtcatcgtttatttacgctggggaaatcgtttatctcccaggcggaagaatccattgaagaaacccagggacgtgcgcatgctggaacagcatattcgtgacgctaaagctgaactcgataaagccggaaaatctcgcgttgatctgctggcgcgggtgaaattaagtcacgataagctgaaagatttacgtgagcgcaaagccagtctggaagcccgtgcgctggaagcgttaagcaagaacgttaatccgtcgttgattaacgaagttgctgaagaaatcgcgcgccttgagaatctcattaccgctgaagagcaacgtctgtttggcaaggataataagccagctatcgctcgtggtccgctgggacttcatctcaatagtggctttacgctcgacacgttagcgtttcgtttgctggaagatgaattgctgattgcgctgccgggtgaggaatttacggtagccgccgtcagccacatcgatctgggcggcggtagtcagattttccgctactacacttcaggcgatgagtttctgccaatcaataccaccggcggcgaagataattga

SEQ ID NO: 138643 - DNA, 2457 bp, Homo sapiens
atgcggtggatcctgttcatcctcttctgcctgctgggcgcacctgcccacgcggtatccatacccggcgttacaaccacaacgacaacggactcaacgactgaaccggccccggaaccggatatcgaacaaaaaaaagcggcctatggcgcactggcggatgtgctggataatgacacctcgcgtaaagagttgatcgaccagttgcgcaccgttgccgctacgccccctgctgaaccggtaccaaaaatagtgccgccgacgctggtcgaagagcaaaccgtgctgcaaaaggtcaccgaagtcagccgccattatggtgaagccctttccgcccgcttcgggcaactttatcgcaatatcaccgggtcagtgtgcaattgcattgcaacctgcgtcattgtgctggcccctggcagccaatgttgctccactagccctgccagtgtgcatttgctgcttgttaaaactgcagttcacaaccatccaactaacagctgcaactgccaaagctgcctgtttggtgcgcaggttgtgtgtgcatccatcgtaagatgtacgcaccttgcatgtgcaatggcaaagctatgtgccacttggccctgtcgatatttcacacactggtacgttgcacttgtgggaccaaaccccttggacagtaaacaccccaaacctatacatccagcccctttcgacaagcacaagaatacacccctatatctgacccagacttgtggccgttcacttcaagacctgcaaggcagtgcccctggggacccggaatctgccactatcacacaaagcgcgtttttgccgccagacccttgcaacattggggctgcccattgtggctgccccttgcattggctgcggctcattattacatccagtttacctgcccatccttgctgcctcgcggtccatattcgacacaccctggccatcaatgggcacacaggcaaacaccaggccctaacgacaccgggattgacacgcgaccggttgtaccgagagctatggtccaagggtaccacagggagaatttcggatttaaacaagacccaaagccttgtagcaccctatcctacactgggtgaagacattagaaatggtcgtaaaagaaaggccgtatgctcatctcgcctcccaatcatgtggccacacacccaacgcattcaattgcgcgaccccattcaggccgcttggtattctccacttccattcaagtggccccacgctcatggactccacttggtctcccgcattcttgtcgctaggctttctcctccctcccatcaaaggggccacaccacccagcgcctcccattagcgagtccccttcaatgcccgtttggtcatctaccccgtcccattcatcgtggcaacaccatcaacggcagctctattggagaatccccacataatggacctagggagttcggacgcagccacgatcccgcggacacccaaccggcacgcgcacccccacaccgcgccaggcagactccaccgcacaacagtggcacacaaccagcgccctcccgacaccaccaagtacagcaacgcgcacactcacgacagtacggcgcaccacaacaacagacacaatgtgacgcaccacacacgcacctgcgtccacacccaacaccggtacaatgctttgcaggccgtatccgtgctgctggcgtcgcaaaacgccgagtcatcttccgcgcgacgccgcagtggttcgtcagcatggatcagaaaggtctgcgtgcgcagtcactgaaagagatcaaaggcgtgcagtggatcccggactggggccaggcgcgtatcgagtcgatggttgctaaccgtcctgactggtgtatctcccgtcagcgcacctggggtgtaccgatgtcactgttcgtgcacaaagacacggaagagctgcatccgcgtacccttgaactgatggaagaagtggcaaaacgcgttgaagtcgatggcatccaggcgtggtgggatctcgatgcgaaagagatcctcggcgacgaagctgatcagtacgtgaaagtgccggacacattggatgtatggtttgactccggatctacccactcttctgttgttgacgtgcgtccggaatttgccggtcacgcagcggacatgtatctggaaggttctgaccaacaccgcggctggttcatgtcttccctaatgatctccaccgcgatgaagggtaaagcgccgtatcgtcaggtactgacccacggctttaccgtggatggtcagggccgcaagatgtctaaatccatcggcaataccgtttcgccgcaggatgtgatgaacaaactgggcgcggatattctgcgtctgtgggtggcatcaaacgactacaccggtgaaattgccggttctgacgaaaatctgaaacgtgcttgccattacaacgcgtgctcgatctcgcttgccaggcgcaggcattaa

SEQ ID NO: 138644 - DNA, 1518 bp, Homo sapiens
ttaaccaataatatgaagtgatgtcagcgggatatcgacacccaacgcgcgcgaaaataaccactctggctcgccgagatcgttaaaagattcctcaccatttagcagcaaatattcgtaagtatcttcggttacttgccgttggtagcccatggtaaaattatggacctcccatttggcatggttttgattttctactttttccagcatgtagacgggttcgatatttcccggttcttcgctgttaaaaaatcgctgccagcgtttttcctgccagtttaaggtcattgctcccatcgctttggcgttgatcgcctcgcgccagtgactctctttactgataccgtagctctcttcatagacaaagagcttgatatcatcaatgtcatcaatatcttcgccgccggtggtattgatttgcagaaactcatcgcctgaagtgtagtagcggaaaatctgactgggtaccgagctcgaattcgtaatcatggtcatagctgtttccgcctggccctgagagagttgcagcaagcggtccacgctggtttgccccagcaggcgaaaatcctgtttgatggtggttccgaaatcggcaaaatccttctttaatttatacccaaaggacctcctaggagtctgtgccctcatagatagaactgggtcgctctcatcatacaggattttcgcctgctgcgcacaccagcgtggaccgctgcttgcaactctctcagggccagccggtgaagggcattcagctgtgcccgtctcactggtgaaaagactaaccaccctggcgcccaatacgcaaaccgcctctccccgcgcgttggccgattcattaatgcagctggcacgacagtttccgactttggtgatggcataatagtctcttgcagacattaatacatccagtgtgaaaagttgagaatttattgtgctaagatgcccgctttccagtcgggaaacctgtcgtgccagctgcattaatgaatcggccaacgcgcggggagaggcggtttgcgtattgggcgccagggtggtttttcttttcaccagtgagacgggcaacagctgattgcccttcaccgcctggccctgagagagttgcagcaagcggtccacgctggtttgccccagcaggcgaaaatcctgtttgatggtggttccgaaatcggcaaaatccattaattgcgttgcgctcactgcccgctttccagtcgggaaacctgtcgtgccagctgcattaatgaatcggccaacgcgcggggagaggcggtttgcgtattgggcgccagggtggtttttcttttcaccagtgagacgggcaacagctgattgcccttcaccgcctggccctgagagagttgcagcaagcggtccacgactggtttgccccagcaggcgaaaatcctgtttgatggtggttcgaaatcggcaaaatcctgttggtctgttcagggactcagtttcttcctggttaagtcttgcaggtggtgatggaaccaggaatttctccat

SEQ ID NO: 138645 - DNA, 3054 bp, Homo sapiens
ttatgagatcctattgtgctctaaagtgaactccgcgcccactgcgcgcgcttcgtcgagcatcgccagctccacgccaaactctttcagccctttttcgctgccacagatactctggaaaatcagcccgcccggtgcgccacgacggatcgcttcgatctgggtggtgacgtgcgccagtacacagccctgagttgggatgttgaatttgtcgatcacgccatagatggtatccaacacgcggcttaagttttccacgtcgtcagtcaccgggttaacgccgatcaccgcatcgcccaccccgaaggaaagcccttcgtagatttgcgcggcgatactttgcacgtcgtcacgggtgtcatttggctgcaaacgggcgctaaaggtgcccggaataccgatggtggtattggcctttttgattaccggcattttcttcgcgccgtagatcaggtccgcgttggagcaaatcttcgctaccgccgcgaccacttccgaggtcagccctttgcgggtaaaggcaatgtcgtccacgctggtttcatcgctcagcacatactcacgcagttcgctgatgctccagtttttaatctggttgtaggccgtttcgttaacatcgtcctgaatcagccgcgtcacgcagtcatcttcataggcaatcaccggattattgcggatgtccggcgagatacgcgccaggaacaagccgacaaacggcgaccatgccacccaccatgcccagaagaagagcgtccagttattcatccactcaaccggacggtcgaaggcaaaactgttgagcgtcatgcccataaagcgattcacatagtcgccaacattcagcaccagtgcattaagcaggaacgaagtgtcgcccataaacaatacgaacaggatcaatcccagcgccagcgcgacattaagctccgataacacgcgaatgcccttatcgacaccggaggtgacagagatcgtggcgattatcaccgacaaggcgatcagtgccgctttcgccgccatcgaatcgggaatatcaaacagtacgctcaagccatagttaagctgcaccacaccgataccgagcgtagtggcaataccgaagatagtgccgatcaccgctgcaatatccactgagtgacctatcggcccgttaatccgtttaccgaagatcgggtacagcgccgagcggatggtgagcggcaaattataacgatagctaaagtatccgagcgccatgcccatcagcgcatacatcgaccagccggttaagccgtagtgaaacagcgtccagaccatcgcctgacgcgcgggctcaatcgtctgtcccgcgccttccggcggctgcatatactgcgttaccgggtcggctacgaggttagttggcgatgactctaaatcagaggggtacccggccatgtgaggtgtcagtctgcccctactggggggttcctcccagttaggctcacattcactcgagatgcgctctaaagcgcattgcccggcgtatttcgctacctggcccagatgtaacggcagcagtgattcaagtttttcgcgcaacaggcgtgccagaaccggagaggtgccgccagaggagaccgctaccatgagcggtgagcggtcaataatcgacggcataataaagctggcggctttcggcgcatcgaccacgttacagaagatgcgacgagcttcagcggcttcgctgacgcgctggttaagcgcgtcatcatccgtcgctgcaatcgccagccagcaggtgtcgagaaggctttcatcaaatggcccttcgacgagggttaacatgcctgcatctgcccatgcggtgaacccagcggttttcaggtcgttaaatgctgcgatatcgcccgcatccacagaaaccgttttggcgatttgttgtttgccattggcgtagtgcatattgccaacgttaatgcgattcaccggaacgccacctttcaccagcgtcaggaaatcggcgggtgttttacaaaccagcaggattttctgtcgatcggcggcgcgatgaatgttgtcgataactttttgcagcgtccagatacgtacggcgatcccttcagcaaaaacacccttgagattgtgcaggaaggtgttgaagcgcgtaaaaccatgcgttttgccgacggcagcgaactggaagtcgactttatcgtcttctctaccggtatccgtccgcgcgataagctggcaacccagtgtggtctggacgttgctccgcgtgggggtattgtcattaatgattcctgccagacttccgatccggatatctacgccatcggtgaatgcgcaagctggaacaaccgtgtatttggtctggtagcacctggctacaaaatggcgcaggtcgccgttgaccatattctcggtagcgaaaacgcctttgaaggtgctgaccttagcgccaagctgaaactgctgggcgtagacgtaggcggtattggtgatgcgcacggtcgcacgcctggcgcacgtagctacgtttacctcgacgaaagtaaagagatctacaaacgcctgattgtcagcgaagacaacaaaaccctgctcggtgcggtactggtgggcgataccagcgactacggtaacctgctgcaactggtgctgaacgctatcgaactgccggaaaacccggattccctgatcctgccagcacactcgggtagcggcaagccgtctatcggggttgataaactgccggacagcgcgcaaatctgctcctgcttcgacgtcactctgcttgtgctctggcagcgggcgaatcacaatcttcttgcccggctggttgagtgccgaaatcggggtaatacaggccagaccattcttgccgttcatgttcagaccgtcggaaccgcacacaccttcacggcaggagcggcggaacgacaggctgggatctttctcttttagctggataagcgcatccagcagcatcatgtcgcgaccttcatccgcttccagggtgtaatcctgcatacgcggagcatcatcaacatccgggttatagcgataaattgaaaactcgagtctcat

SEQ ID NO: 138646 - DNA, 2049 bp, Homo sapiens; identical to SEQ ID NO: 124887

SEQ ID NO: 138647 - DNA, 6018 bp, Homo sapiens
atgctacacataaacatcacttacaatgagctacgatcacagatttctgatccaaataagccaggtttgttcacaactcatcgggctcggtaccccgctctgctctggcggaagcggaagttagtattacgacaaaacttctccgtccatcgacgttgctttccaggcagtgatcaggatgcactgaaagcaaaatttgcccgtaatgcagctatcggcgtgaccgattacaccattctcggcacggtaaaaggtgcggagttgagctgctgcgctttacccatccgtttatgggcttcgacgttccggcatcctcggcgatcacgttaccctggatgccggtaccggtgccgttcacacgcgcctggccacggcccggacgactatgtgatcggtcagaaatacggctggaaaccgctaacccggttggcccggacggcacttatctgccgggcactatccgacgctggatggcgtgaacgtcttcaaagcgaacgacatcgtcgtgcgctgctgcaggaaaaaggcgcgctgctgcacgttgagaaaatgcagacagctatccgtgctgctggcgtcacaaaacgccgatcatcttccgcgcacgccgcagtggttcgtcagcatggatcagaaaggtctgcgtgcgcagtactgaaagagatcaaaggcgtgcagtggatcccggactggggccaggcggtatcgagtcgatggttgctaaccgtcctgactggtgtatctcccgtcacgcacctggggtgtaccgatgtcactgttcgtgcacaaagacacggaaggctgcatccgcgtacccttgaactgatggaagaagtggcaaaacgcgttaagtcgatggcatccaggcgtgcaagcgccccagaacgcgccaaacagcgacgcattggcaaaggtgatcaaaaagcaggtagcggtgcagcaatggcctgcaaaatcatcaacaagaacgagaaactgccgccagtgcgcccgattgtgccagatgtcaattatatgcaagctcggctacgtactagtttgcccagtactggtaatagcagggcaagtgtagcgctaacgcatagtggtccggcgatatttcgaaccggtgcaggcgaggcggtttcacgttgcgccaaaagagctggttgccgctattcgccgcctggcgacgagcacggcctgaaacgacgtattgattatgtatgccgaataaagcattcacgccgcatccgcaagttgtattgctcaacttcgctaaatctgtggtggcagttgtacaacatcaaaagccagtcgtcgacgccagggtccaaggctgtctgcaagcaagctgccttcattgaccattcgcctgggaagaattcggcacttcgtcgcgcataccaaccgcacatcacctgcaatggttggctgacgtccaaacggcggccttcccccaaagggtttttttccaaaaaaccccgggatttaaacccttttcccaaaaatttccaaaccggaccggccaataatttctcctggaccatcatcggtgcccacctgcgcacggctggcacccagcgactgggcggcacgaagcgaacctgctgcacgcttttcacccccgccagcgccgacatcgccaccgtgcaaaaatcgctaaatagatcatcgacctggtttgccaccatccatgttgttgaccgaacctacgccatgtcccgcatctgccggacatatgttcggacctgcacgtctccgcgcgggacgcccttggcgtccggttcgcccatttcgcgctggacgttgaatttgaactctacgccttcttcccgcgcgtttttcactcgcggcgggaacccggcatgttctcttcatcacgacgataggcacaggaacgtgcttcgctccctggcgcacggacgtacgcacgcagtccatcgcatgtcgccaccgccaaggaccaccacgcgtttgccttccatgctgacgaagaggaacggcagcgctgcgtacacgccatcggcgtcttcgttttccagccgccgcgcattgactgataagtcccgacgccaaggaacacggcatcgtatcactcagcagatcgtccagctcttgaaggccggaataccgaaggtcagcagcccgccatttctggatgacggtcgaagacaacggcttttacgccgttacgcgtcagacatccgcacacgccagacctgccgggcctgcgccgataatcgccaccgcttgtccactttgaaaatgccatgtaccaggccctatcccattttggtacccggaatggaactccgaagaactggcttttgcgaaacaaattcaggctcgctcacctccaacgatcggcaaaacagtctgaataatatcgccgcaacggtggcgaaaacggcaaggtttttgcactacgtcatcgtgaaacggatgcccccccccaggcgcgcattgctcatcaacgcgatcgccagtacggcgcagtcccagttcgcgcagggcgtcagattacctttgcggaaaaaatgttcaatggcgcgctccgcctgcccgcaatatagactttgccttctttcagccgctggcgcagatcgtccggggcaagtccaccagcaccacgtcgtcggcggcatcgaaaaaaggatcgggccggtttcccaacagccagcccttccagcatggcggcggtatctttcgcccgtgggtttctaccacgccaaccacaatatccagcccttgcgccgcagtcgctgggcttctgccagcatcgcccaggtcttcccgacgcctgacaggcaccgaagaaaactttcagcttcccccgatgcggcgcggcagttgttccagcagacgatcggggtcgggacttcaaccggaacgctcgcgctggcatccgggttagcggccctgcataacccgtcaatgtcgttaaaagtagttgctggcttgttcaatttgctgttgatactggataatttgctgattatgcgcggcatctgcccttgtaattcatgccgttggctgagtaaccgcagctggcgttctgctcatcttgtgcatccagccacggttgaatatcgtccagtggctgcaggtgatattgaggctggccgtgacggcttgccattgttgacgcgaccaggtgctgagcagtgggcgttgctcagcatgttgcgccagggcggtagcaacttcatcgcggttaacgtcaacgtgatcgccgcaagcgcattaagtttttgctcagatgggttaactgttgctgccattgccgcagatgctcgcgatcgctggttgttgggagaactgcgcacgccaacccgccgttactacgaagacctggtgaaaaacaggcctcgctcccctgtcagaccacctatcccgcaaccgccaaaacgccagacctccctgaacgtcattaaacctggcgtggctacgggtcgttacgctggcagcgccgccttcatcttcaacaccaccgaatttgtccctgttggcctgctcctgacattgcgcaaagttttcacatgcaaaccgctcaggtcggcatcatttgaccatttacgcatgggtagtagcgctaatgtcattgccttttatgtaatgaccagtcaggttgaacggcgcaaattactgatctgcctgtttgtgtgtttattgccagccacgtactgtcgtttttgtcgtggagctttaccgtctgctaaagagaatgatgtggtactggtcgcgggcaaaggccatgaagattccagattgttggcaatcagcgtctggactactccgatcgcgtcacggatacgcgtctggcgtttggtgaactggctgcatggttcgccagcaagttccggcgcgcgtggttgctctgacggggtcctccgcaaaacctccgttaaagagatgacggcggcgattttaagccagtgcggaacacgctttatacggcaggcaatctcaacaacgacatcggtgtaccgagacgctgttgcgcttaacgccggaatacgattacgcagttatttgaactggcgcgaaccatcagggcgaaatagcctggactttgagtctgactcgccggaagctgcgctggtcaacaacctggcagcggcgcattctggaaggtatattaaggccaggccgcaaccggcgattttcgacaaggagaaggggggaaggaaaaaggcgccagggaacaaaggggataaatccaggggtaaaacgcaggtgcaaagatctatcaacttcccttcaacaaccctccccgattctgctgttataatttcgacggccaacaccctgatatcaaaccccgtgatttcagcatcagtattatctccgatgtatatactagacaccttcccgggagcggtaaaacagctgccgacgaagtgcgatcaaggtgaccggacccgcgcaggtgattggcgggcgctcctattgttcttcagctccgatgacggtgcagaaaagaacggaatcaacgctgaactggcgatgaaatcttcgacctggtggagaaattcgctggttacggatttaacaaatcgcatctgcggcctatgctttggtgtcatatcaaacgttatggctgaaagcgcctatcctgcggagtttatggcggcggtaatgaccgccgatatggacaacccgagaaggtgcgctgatgaactcgctggcgatggtaccgagctcgatttagaagaggtggtgagagcccaaggggccgtggtggggcttaaagccctccgtgctccctcaggtggcggggacgtcttactttccgttgctacgctcttgaataacatttacgtgacaatacagacgttacgccttcgatacctgcgcgccgaggtgtgccgaaatttagaaatagggtatcatctgggagaaatgtgcaaacagcaccttcagctcagcctaactaacgggctaagttatctggaaaagaagtctgagggcagctgggaacatctgggaactactcaagttcaacaagctatgtcctttgtccagcccttattgatttccccccctccactaccagctgtaccaggaagtgacaacagggactcactagatgcgtcatcattgtcaccaagaagagaaaaaaagaatccaacatatgtcttccattggcgagcatttgcccggcaaagcgttcaacgaaatgacctggtctatgcaggtgacgcgcgtaacaacatgggcaattcgatgctcgagctgcggcgcttaccggtctggatttgcgtctggtcgcgccacaagcggctggccggaagctgcgctggttacggaatgccgcgccctggcacagcaaatgttggtgccatcagccgcacctttaccatcggccaggtttttcgccaatcaaaggtcgctttcgcctggttgttagcatcgttcagtacggtgcccccagtgcaccggatttcaccagcgccagcgcttctggcagcgcatcgacccaaacaccggaatgctggacttgttgtgtgctttcagcgcttcaaccggcccattgccatcgcatcgttgttggcgataaccacttcgattttgttgcgttcgggccagacagccaggcgtccatcttatctttcgcctgagcggttcccacattgcggaagcccggggcggctggaccctacagtcatgacaacccaggggacttcgaaaacggtcggagagcacgccgatggccagtgcgcccggcggcaaatccgcgcgcagcgcaggatcgacgcctttcgaggtactcaaagcgacgaaagccaaagcgaagtccggagacgtcctgaacagcgctgtgtccgaccagtagtcggaacactcctggtagcaccatcaaacgcgcctaaccaagagccgtgccttatcaacggcgaccgaaagattgttagtccgaggatccaacgaattaaagaggcaagagaaagcgaaatccaatcaaagagcgtacgaggtacggggaagacactgtacgaggatgagtcggacacggaggaacgagctgacgattag

SEQ ID NO: 138648 - DNA, 1656 bp, Homo sapiens
tcagctactccgatggcctgcatctcccagtgaaacaggaagcggaatggcaacaggctgtgcatcttcaggtggggccggcggttgtatttctccagcggcaagcacgtcctctataagcggaatcaatttggctaatgttttactactgcgaaaaatatccctgcacgccaaacggacttcccggtccggctcaccagggttacgacgcgctatctcaaaagctttcggtacaacagtgtcaaatttaatgatgtctgcaatatcgtaaacaaaggaaagaggctttcctgtatgcacaaacccaatagctggtgcataaccagctgcaagtatcgccgcttcagttacgccgtataaacaggaagttgcagcgctaatgcattggttgatcgtatcgcccttttcccagtctttcggatcgtagcgacgtccattccatgtcacgccgtattgcttcgccagaagtgcgtaggttgcccgcacgcgactgccttctatacctctgagttgctctccaggctgaccagaagcataaacacgaacgcccgcttcccccacccataccaacaatgttccaacttgcgcagccaggcgtacagctgcatgcgaaacccgtgtaccaggttccagcatgatgcaggcaaccgagccaacaggaatatgagtgcggatccctgtcttgtcgataagtacaaacgcgccatctattacatcgatctggccattatttgtcagaaagatcagtgttttgacattagcatccgtggtggcagccagccatgcggcatcttctccacgccagtgcgcaatacgttgcaaaatatggggcagatgggctggctcgttgcgccgggatgatggctttggcgtgagatcgcgagggagcagatacggcgcatcagtttcgatcagtaatttttccgccggaatcaacggcaaaagttcccgcagctccagtccgcgtcgttcatcgcaaacccaaccggtaatgccgatataaattccatgcgccacgcacgcctgcatctcttcgcgtgtgccggtaaagcaatgaagaaccgcaccaggcagtttatccagccacggctccagcaatgtcataaaccgctcgtgggcatcgcgacagtgcataaataccggcatgtttaaatctgcggcaatgcgtagctgggcaacaaaagcgcgttcctgctcttccggcgtcgaaaagttgcggttaaagtcgagaccacattcaccaatcgccaccacttctggctgcgcggccagctcaataatcgcttcttcagtcgcagcttgccactggctgctgtcgtgaggatgtacgcccgccgttgaccaacaggacgaatactgacgcgccagcttttgcgcctgctggctttcacgcaggttagtgccggtgatgagtagcccattaactcccgcgtcaaaagcgcacgctacaacatcatcacggtctttcgcaaattgcgaactggtcaaattaacgccgatatcaaacatcctgtactccatatgacaaccgccctcttcccgatttcgccctttaccaacgtaaaagcgtgagaagaagacaccgatttcaaacagacagtacatcgggatcgccaacagcgtgcgcgagaagacatccggcggcgtcagcaacat

SEQ ID NO: 138649 - DNA, 4317 bp, Homo sapiens
atggattccccctttggtgttttgcaggaggaccctgtgctgaccgtgatcacccaggtggggctgaccatctctctgctgtgcctcttcctggccatcctcaccttcctcctgtgccggcccatccagaacaccagcacctccctccatctagagctctccctctgcctcttcctggcccacctcctgttcctgacgggcatcaacagaactgagcctgaggtgctgtgctccatcattgcagggctgctgcacttcctctacctggcttgcttcacctggatgctcctggaagggctgcacctcttcctcaccgtcaggaacctcaaggtggccaactacaccagcacgggcagattcaagaagaggttcatgtaccctgtaggctacgggatcccagctgtgattattgctgtgtcagcaatagttggaccccagaattatggaacatttactcactgttggctcaagcttgataaaggattcatctggagcttcatggggccagtagcagtcattatcttgataaacctggtgttctacttccaagttctgtggattttgagaagcaaactttcctccctcaataaagaagtttccaccattcaggacaccagagtcatgacatttaaagccatttctcagctatttatcctgggctgttcttggggccttggtttttttatggttgaagaagtagggaagacgattggatcaatcattgcatactcattcaccatcatcaacacccttcagggagtgttgctctttgtggtacactgtctccttaatcgccagatcaactcccttctcctgacctggaccttgtggatcctgaggcagaggctttccagtgttaatgccgaagtctcaacgctaaaagacaccaggttactgaccttcaaggcctttgcccagctcttcatcctgggctgctcctgggtgctgggcatttttcagattggacctgtggcaggtgtcatggcttacctgttcaccatcatcaacagcctgcagggggccttcatcttcctcatccactgtctgctcaacggccaggtacgagaagaatacaagaggtggatcactgggaagacgaagcccagctcccagtcccagacctcaaggatcttgctgtcctccatgccatccgcttccaagacgggccctcctcaggacctgtctgttcatctctggtacgcaggccccatggagcgggcaggggcagagagcatcctggccaaccgctcggacgggactttcttggtgcggcagagggtgaaggatgcagcagaatttgccatcagcattaaatataacgtcgaggtcaagcacattaaaatcatgacagcagaaggactgtaccggatcacagagaaaaaggctttccgggggcttacggagctggtggagttttaccagcagaactctctaaaggattgcttcaagtctctggacaccaccttgcagttccccttcaaggagcctgaaaagagaaccatcagcaggccagcagtgggaagcacaaagtattttggcacagccaaagcccgctatgacttctgcgcccgagaccgatcagagctgtcgctcaaggagggtgacatcatcaagatccttaacaagaagggacagcaaggctggtggcgaggggagatctatggccgggtgaggcaggcagggctgggtgacggggagggcatgggggttgagctggtggtggacgagactggaactggggactggagaagtgtctcggtggcactcacacggcccctgtctaaaccttgtatgtacggtacagcttcatttctgtacgtaccggactgcccggcaatagatgatgcttaccgccattcgattccgcctgtttcacaccacccgacaaattgttacattgtcaccccgtataagtgcccggtcaccgctactatacctatcagacattgtggagacacggtatttgttcacacacatgaggtttgcactggtcgcactatctgtaactcccagtcatccaacgttatcaatgagaccactggtgtggcttttgtctcctttgtgggcatggaatcggttttaaatgagcgcttcttccaagaccaccaggctcccttgaccacctctgagatcaagctgaagatgaattctcgagtcgttgggggcataatgactggagagaagaaagacggcttctcagatccaatcatctacactctggagaacgttcaggtttgtgaagaggtctctactgagattcttgtctacctgttgggaactcctcgtctctcgattgccttaactctcattttttacgggaagctattgaggccgccaaagcagaagtttgagaggcccatctgtgtttcctggagcactgatgtgaagggtggaagatggacatcctttggctgtgtgatcctggaagcttctgagacatataccatctgcagctgtaatcagatggcaaatcttgccgttatcatggcgtctggggagctcacgatggacttttccttgtacatcattagccatgtaggcattatcatctccttggtgtgcctcgtcttggccatcgccacctttctgctgtgtcgctccatccgaaatcacaacacctacctccacctgcacctctgcgtgtgtctcctcttggcgaagactctcttcctcgccggtatacacaagactgacaacaagatgggctgcgccatcatcgcgggcttcctgcactaccttttccttgcctgcttcttctggatgctggtggaggctgtgatactgttcttgatggtcagaaacctgaaggtggtgaattacttcagctctcgcaacatcaagatgctgcacatctgtgcctttggttatgggctgccgatgctggtggtggtgatctctgccagtgtgcagccacagggctatggaatgcataatcgcgtctgtttggacaaggataataagccagctatcgctcgtggtccgctgggacttcatctcaatagtggctttacgctcgacacgttagcgtttcgtttgctggaagatgaattgctgattgcgctgccgggtgaggaatttacggtagccgccgtcagccacatcgatctgggcggcggtagtcagattttccgctactacacttcaggcgatgagtttctgcaaatcaataccaccggcggcgaagatattgatgacattgatgatatcaagctctttgtctatgaagagagctacggtatcagtaaagagagtcactggcgcgaggcgatcaacgccaaagcgatgggagcaatgaccttaaactggcaggaaaaacgctggcagcgattttttaacagcgaagaaccgggaaatatcgaacccgtctacatgctggaaaaagtagaaaatcaaaaccatgccaaatgggaggtccataattttaccatgggctaccaacggcaagtaaccgaagatacttacgaatatttgctgctaaatgatcgtccgccgcttcctcaaaccctgtttgccgcctgtcagcatctgctggcgatgttcgttgcggtgatcacgccagcgctattaatctgccaggcgctgggtttaccggcacaagacacgcaacacattattagtatgtcgctgtttgcctccggtgtggcatcgattattcaaattaaggcctggggtccggttggctccgggctgttgtctattcagggcaccagcttcaactttgttgccccgctgattatgggcggtaccgcgctgaaaaccggtggtgctgatgttcctaccatgatggcggctttgttcggcacgttgatgctggcaagttgcaccgagatggtgatctcccgcgttctgcatctggcgcgccgcattattacgccgctggtttctggcgttgtggtgatgattatcggcctgtcgctaattcaggttgggttaacgtccattggcggcggttacgcagccatgagcgataacaccttcggcgcaccgaaaaatctgctgctggcaggcgtggtcttagccttaattatcctgcttaaccgtcaacgtaacccttacttacgcgtggcctcactggtaattgcgatggcggccggatatgcgctggcgtggtttatgggcatgttgccagaaagcaacgaacctatgacgcaagaactgattatggtgccaacgccgctctattacggtcttggcattgaatggagtctgctgctgccgctgatgctggtctttatgatcacttcgctggaaaccatggcgatatcacggcgacctctgacgtttccgaacagccagtgtccggtccgctgtacatga

SEQ ID NO: 138650 - DNA, 2109 bp, Homo sapiens
atggtcattatccttgcagtgctggcgatgatcgtggtgaaagccctgactcatagcccgtggggaacatataccgttgcgttcaccattccgctggcgctgtttatggggatctacctgcgctatctgcgtccggggcgtattggcgaagtgtcggtcatcggtctggtattcctgattttcgccattatctctggcggctgggtggcagaaagtccgacctgggcaccgtactttgactttaccggcgtgcagttgacctggatgctggtgggttacggttttgtggcggcggtgctgccggtgtggttactgctggccccgcgtgactacctctctaccttcctgaaaatcgggactatcgtcggtctggcggtaggcattttgattatgcgcccgacgctgaccatgcctgcgctgaccaaatttgtcgatggcactggcccggtatggaccggtaacctgttcccgttcctgtttatcaccatcgcctgtggcgcggtgtctggcttccatgcgctgatctcttgtgggaccacgccgaagatgctggcgaacgaaggcaggcgtggctttatccgcttcggtgggatgttaatggaatccttcgtggcgattatggcgctggtttccgactgtatcatcgatccgggcagtcattgctcccatcgctttggcgttgatcgcctcgcgccagtgactctctttactgataccgtagctctcttcatagacaaagagcttgatatcatcaatgtcatcaatatcttcgccgccggtgtagcggaaaatctgactaccgccgcccagatcgatgtggctgacggcggctaccgtaaattcctcacccggcagcgcaatcagcaattcatcttccagcaaacgatacgcttacgtgtcgagcgcgctgggaaaaaccagacctatttattcttattgacagccgtatcctatatgtgctctaaagatgtacaaggttggagagcagaacagcgtctgtatgtcctgtcatctgccggaacagttgcaaaaagcgttctggccgcacgatgtccacgagcagccatgacctggtctcgtcgccagtttctcaccggcgtcggcgtgctggcagccgtcagcggcaccgcagggcgcgtggtggcgaaaacgttgaatatcaatggggtgcgttacggcatggtgcatgacgagtcgttatgcatcggctgtaccgcctgtatggatgcttgtcgggaagtgaacaaggtgccggaaggcgtctcgcgcctgacgattattcgtagcgagccgcagggcgaatttcctgatgtgaaatatcgcttcttccgcgtgagtgaatatatcaccctgaccgtgcggcggattgatgacggtgtcggctcccagtggctgacgcgcgatgtaaaacgcggtgattatctctggctttcggacgcgatgggggaatttacctgcgacgataaagcagaagataaattcctgttgctggcggcaggctgcggcgtcacgccgattatgtcgatgcgtcgctggcttgcgaagaaccgtccacaggccgatgtgcgggtgatctacaacgtgcgtacgccgcaggatgttattttcgccgatgagtggcgtaactatccggtaacgctggtggcagaaaataacgttaccgaaggctttatcgctggtcgtctcactcgcgaactgctggcaggtgtacctgacttagcttcacgtaccgtgatgacctgcggcccggctccgtatatggattgggtagagcaggaagtgaaagcgctcggcgtgacgcgtttctttaaagagaaattcttcaccccagtagcagaagcggcgaccagcggtctgaaattcaccaaactgcaaccggcacgagaattttacgccccggttggcaccacgctactggaggcgctggaaagcaataacgttccggttgtcgctgcctgccgtgcgggtgtttgcggctgctgtaagacaaaagtggtttccggtgaatatacggtgagcagcacaatgacgctgaccgacgccgaaatcgctgaaggttacgtactggcctgctcctgccatccgcagggggatttggttctcgcataa

SEQ ID NO: 138651 - DNA, 2180 bp, Homo sapiens
atattctgttttgtcgtatcgccagcacagcctgccgacattgttcggtgacattggcaatatcatggttgatatcaatgcgcacaatatcctgttcatctgcttgtggacgctccagtgcctcaaactgactttttagtaacgctaccggcataaaatgcccagcccgacgctgcattcgcgcgagaatagtttcatagtcgccattcagaaatcgtttggcactttgttgtttgccattggcgtagtgcatattgccaacgttaatgcgattcaccggaacgccacctttcaccagcgtcaggaaatcggcgggtgttttacaaaccagcaggattttctgtcgatcggcggcgcgatgaatgttgtcgataactttttgcagcgtccagaaacgtacggcgatcccttctgccagtaccatttccatcaggttttgttgtaccggatcttcggcaacctcatcgttggctaccagcaccagatttgcccccgcaaatccgacccattgaacgccgacctgaccgtgaatcaagcgttcatcaatccggcttaaaacaatatttggcatagcgtgttcctctttgttttgcttattggccttcacaggctgtgtggtactgcgccaggatgtcctgaatatggttgataatgagttcccgtggcgttggctgcagctcgccggagcgaactttcacgtactgcagcggcagatactggctgatcagcggcagcggaattggtgaatccgccagattacgtaccagatgagcgaaagcgtcatcaatctggctgtccggccagtaatagcgcacgcgatccgagtagctataaccacgcgccagacgacgcgcgttgccgtcaccgtggtagtggctttgccagtattccgggcggtcgagcatcacgtcttccagcacctgacgcagaccagaacaggctttcgctggcaccagttcttcttcaatcgccgcccgagagaacagagcttcacgcagggggacagtcaagctgggcccctttcgaatgggaaggggcaccccgcggggaggaatggactctagtatctgtaggggctctaaaataagatctactcgccactcgcatagccaggcggtggcttctttaatgccaactcgtcgcatccgtttgaaaacccaaccgcactgaccaacttcgtgcagatgctggcgatcttcttgatcccaacggcgctgtgctttgcctttggtgaagtgatgggcgatcgccgccaggggcgcatgttggggagagctgttgaccgcgggggggaatgccgggcaaaatgggcaacccgaattgggaaaaacactgccaaagaaaccggcggactggtaccacggattgggcgagtataacaccgaatggtacggacgatgaaggaggtacaaagaggcgacactctttgtgtccttctgcttcacgtcgagaagaagacagaacgaaacatcggacagaggaagagacaaaggatggaccgaactggctgttttgttggcttcaagatcgttcctggctgcagcgttggttgccgtatcaatgaccgatgctttccagactttaaccggctgtccttcaatttccagccagctcattggccatggattgaaagcgcgaatgcagcgttcaagctgtgctgccgaaagtgaccagtcaatacgcgcttcttctttactcaacttctcggcgtaagtgacaagagtttcgtcctgaacttctggtttcgccgtgccgtctgccagttgtttcaacgtggtgataagcccttgtgggccaagctctgccagcttgtcgtacagcgtaccactggtatcttctgcagtaatcgggcaggagagcttatagagcatatcaccggtgtctaaaccgacatccatttgcataatggtcacaccagtttctgcatcacccgcccatagtgagcgttggattggtgcagcaccgcgccagcgtggcagcagtgaaccatgaacgttgatacagccaagacgcggcatctccagcactgctttcggcagaattaaaccataggcgacgacgaccataacatcagcctgcagttcggcgaccagttgctggttttcttgtggacgcagggaaacaggttgaaaaacgggcagacctttttcctcagccagaactttaaccgggctgggcat

SEQ ID NO: 138652 - DNA, 1198 bp, Homo sapiens
cataaatcgtcgtgttgtactgatcgtggctgcgtactgtcgccatgaccagcttactgttaaacgctgaagagggatcgttacccgaacgttatccgtgaagagattgaacgtctgctggagaacattactgttctggcagaagcggcggcgctggcaacgtctccggcgctgacagatgagctggtcagccacggcgagctgatgtcgaccctgctgtttgttgagatcctgcgcgaacgcgatgttcaggcacagtggtttgatgtacgtaaagtgatgcgtaccaacgaccgatttggtcgtgcagagccagatatagccgcgctggcggaactggccgcgctgcagctgctcccacgtctcaatgaaggcagccagctcgccggagcgaactttcacgtactgcagcggcatatactggctgatcagcgggagtggaattggcgtgtccgtcccattacttatcagcattggcgaaagcgtcatcaatctggctgtccggccagtaatagcgcacgcgatccgagtagctataaccacgcgccagacgacgcgcgttgccgtcaccgtggtagtggctttgccagtattccgggcggtcgagcatcacgtcttccagcacctgacgcagaccagaacaggctttcgctggcaccagttcttcttcaatcgccgccagagagaacagagcttcacgcagggcgaaggtcagcgctgggccaactttcagaatggcaaagtggtcaatcaccagctggcgcagcgattgcggcgtttgataatcggtagagtgcgcttcgaaaatcagcgtttcgtagttttcgaccatctggcttaaggcgctcgctttggcgggctgataatcaataacgttggtgtgatcgaattcgacgccgggttgaaccaccagggcaatgatgcgtggccagatggcattcaaaccttgcttttcaaaggcgtgacgatgggcttccagcgtggcgcgggcggcatccggcgtggtgaccgccagctcgcttaaggtttcatgcgcgccgccaggtaccggcacttcggtaccaatgacatactccagatcggcttcgccaaagtgttcaagacaggtttcttccgccactttcgccagacgggcggcgcgttcagccaagatgtcatcagttacgggaatcggatctgctgacaggacatgttgcat

SEQ ID NO: 138653 - DNA, 5652 bp, Homo sapiens
atgggccgcggcggactcacgcgcgcgggcttcgctcgggcctgggccactcggtcatggcgacccctggctggcgagcgcgcccaacgccgcgggcggaccccatccccgcaccctcgcgccgcgggcggccgccattgttacctcgggccgcggttccagtcgccttggcaacggtcgcgcagcgtcagggacgctgctgcggaaagtggagacggtggcggtgcggggatgcgcatgtacgatggggccgcggggcaaaacgacggcattcagacacgcaaccgttttatacagtgtccaagagtacgttccacctggggctactgggaagcccaaggattcacatttgccatggaggaatcaacagggacgcccacctgctccccagcctcaggctgggcttctccaccggaactctgggaggagcccatccccagctacacgtctgggcccaggctctcggagctgctttggagaaacatgcttggcgttgtctatgccaatgccaggctcctgggactctacaggtttctccaggagaatgttttgacccacacgaggagcgtgttaaagtctctgatccaacagaccccagagacgagcagtttcatcctgtgcctcagccacaggtcagcccctcctcacactggccagcctcagcgacaggacccagttcccatccttctttcagccctgctcagtcacctcacgaccacccatgcagtggtgcagctgatgctcacttccgatggtcttggctgccacctgccgcctctaccgaccacagttgctgttgtgttcaccatggctgtctcttccgtcctggcctcagggtcaccaggggtctgccagacgccttcaacaagtccaagttcctaccttcagcgtgctgctgttctgcagcttctggacaaccttcctgccccgtaccacagcgcacagggcaagtccactgtggccgtggagatcttttcctcctggcttccatggcagggctgctgggtggcatctttgccccaaatgtacatcatcctgctaaagcccgagcggaatgccccagactggccacatgacctagggtccaggacccgctgggctggtgttcggggcggcctggagactacacacagggcggcgccactacgcaagcgcgggttacgtcatcggctgggcgccagcccaagcggcgcgttacccaggtcagtacgtgtgttggtagcgatctccgctctggtcttcgactctcttttgagtcggtccggggggtttgtgccgttaaaattcactgcccctggtgacatgcccaatggtccaacccgtcagccaggaaagcgcttgtccaggaccatatggcggccccctggccgacgccggaagtccccgccgggatacgagctccagcagacccctcggcgcgctccggtcgacgcagggaaagcagccgccatgtccgcggctgaggtgaggcctttgctcagactgtgggtccgccgtagtgcggggcttggggggtcaggagagccggctgggagaggcggcgtcaggttgggatttgctgtgttcctgggcagtgcctggtcaatcagtcctcgggatggcagccatcaacccgtgggcctctgggggcgggctgtgaggctggaagtcctgttctacttcagctgcatagatctgatcatgattggtgccttccactccgctctgtgctcctggcccatctccctcctgaacagccgccccgacccatcccccacccaatcaccccaccatcctccccccaaccagccgtcacagccgtcgtcgctgcccctcccctgtattcccagtgcgctgcccttcacacttccccagctcgtttattatggaactcctccgtgtggcatcctagctcccaacgccctccccactccagaaccatcactgactggcgcagtgaacacgtcttctatgtcactaagcatccggctcagcggcaaagcccttctgcccatccccgcaatagaatttggggctcggctgcagatctcagtgcccatgccagggccaccacagattgcccatgggggggcccagatcctcctcaccagccatgtagacctcatccccttcacatcatcccaggccctcttcatcttccagaaacagccaccatcagtccaggactctcatcagctcagcaagcccagggacaccgaagcccagcgtctgcgcttccggcagttccagtaccagtggcgagcgggccgcacctcgcgctgggccagctctggacgctgtgccccagtggctgaggcccgaggcgcgctccaaggagcagatgctggagctgtggtgctggagcagttcctgggcgcgctgcccagcaagatgcggacctggtgcagtcacagggcccccgaagctgcagggaggccgccagcctggtggggacctcacacagatgtgccagcaggaaggggtgctgcagggatgttcggggaaagtctgcccccccagaaggcctggagaattgggggctctgggaagaacaggcccctctacgatccctttctcccgcacagttctggtatctctggactcggtcgaacccaggactggagtttcggtgaggaggaagatgggaagagtccaaggtccagaaagaaccatcgcagggcatgcgtgccgcttctgggacggcctcaaggatgccccatcaaggactgtgtgaggttgtccccagcgctcccagtcttccctcacccggactatgcggctgcttccggcgtcgaccgggagcgccccccggggtctcctgggacctgtagttccacgcgcacttccggcgtcggacagcggcgccgccatgacaggaaatcaattgccaagcctgaggtcatctccctgttggagcaaggagaagagccgtgtcagtggagcaggcatgtcctcaacgcacttgtccagccatgctggatcacaacttcgcaaacacccgacgtcagcatcgatggtgttattgatatcttccatctgtgcgccacggacataagcccgcttcaaacgctgacggtgcgagagaccttctgccagacgtgttgtcagctcatccagcgtttcgtgaacgccgcctgcgcgacttcattcagacaggcgaaacccgctgccatcgcaatcggttaccggaaagcgtacccgcctgatagaccggacccgtcggggccaggcatccattacatcacgacgaccaccgaatgcgcctaccggcattccacgccgatgattttgccgaggcagcttaaaccacgctcgcgcttcaatcacgcagtggtaccgactagtcgatggcttggcgctgagatcgcgagggagcagatacggcgcatcagtttcgatcataatttttccgccggaatcaacggcaaaagttcccgcagctccagtccggtcgttcatcgcaaacccaaccgcgcacgctacaacatcatcacggtcttcgcaaattgcgaactggtcaaattaacgccgatatcaaacatcctgtctccatatgacaaccgccctgacgggcggttgaatttattcttcagtttttcgctttctgcttcagcgtcgttttcctcttcccgatttcgccctttacaacgtaaaagcgtgagaagaagacaccgatttcaaacagacagtacatgggatcgccaacagcgtttgcgagaagacatccggcggcgtcagcaacatcccgacaacgaatgcaccaaccagcacatacgggcgttttttgcaatcagcgacaccataaaggtcagcttgatcggcgtaaagaaggcgaggccacgtcggtggcgatcatcgttgaaccttgcggcaactgctgatcaatggcgcggataccagatgcgtgataagcggttgagtatcttctacagacagtttacggtttatcactcgacgaaggggaaggtgcagcggttttcggttagcgtccgcagcaggttttaccaccggctctggcgtggtttctggcttcgttccggcgaactggcctgcgtttgtgcagcggcaggcgttacgccctctgcgcagcttcattatctttcaccaccgggttatggatggtgtgcgcttatcgctcgccttttcaggatcgtttgcaacgtaggaacgcttcatcgacccgcggcctggcgtagttcatccatcgacgctttcagttcgggcgtcattgagctttcagatcatcaccgactttgccgtcaagcgtttatgcgcttgagcgtatcgcggaacaggaaagggacatcaagcaagttcatcactggtgataaccggcaaagttattcgagccggacatttccatatcgatggtgccgccactacgccgctgatcatcgcctgcgcgttaccgagagtgctgtccgggaacgttttaatttcagctcgcctttggttctctcctgcaataaatcattgaatttttcgccgcaatatgttgcgagcgggcaacgcatcctgaccgcatggtcagcgtccagtcaggccaatgaacatgagattcgtattcgcgtcgcggagagtcgctgtccgatatgtcgagtgcctatagataatcggtctgcctggagtagctacatcctcgccggcataacaggttgcactgtgatatcggtccacctagcgcataccggtgcgtccctccttatgctaatggcagcattcatattggtcactcggttacaagttctgaaagacattatcgtgaagtccaaagggctttccggttatgactcccttcgcgccaagtgccgcgaatacgcggcgacccaggttgacggtcaacgcaagactttatccgtctggtgcgtgctgggcgactggtcgcacccgtacctgccatggacttcaaaactgaagccaacatcatccgcgcgctgggcaaaatatcggcaacggtcacctgcacaaaggcgcgaagccagttcactgcgtaatgcagcgtatcggcgtgaccattacaccattctcggcacggtaaaaggtgcggagcttgagctgctgcgtttacccatccgtttatgggcttcgacgttccggcaatcctcggcgatccgttaccctggatgccggtaccggtgccgttcacaccgcgcctggccacgcccggacgactatgtgatcggtcagaaatacggcctggaaaccgctaaccggttggcccggacggcacttatctgccgggcacttatccgacgctggtggcgtgaacgtcttcaaagcgaacgacatcgtcgttgcgctgctgcagaaaaaggcgcgctgctgcacgttgagaaaatgcagcacagctatccgtgtgctggcgtcacaaaacgccgatcatcttccgcgcgacgccgcagtggtcgtcagcatggatcagaaaggtctgcgtgcgcagtcactgaaagagatcaaggcgtgcagtggatcccggactggggccaggcgcgtatcgagtcgatgttgctaaccgtcctgactggtgtatctcccgtcagcgcacctggggtgaccgatgtcactgttcgtgcacaaagacacggaagagctgcatccgcgtcccttgaactgatggaagaagtggcaaacgcgttgaagtcgatggcatcaggcgtggtggggatcctctag

SEQ ID NO: 138654 - DNA, 3189 bp, Homo sapiens
ttaaccaataatatgaagtgatgtcagcgggatatcgacacccaacgcgcgcgaaaataaccactctggctcgccgagatcgttaaaagattcctcaccatttagcagcaaatattcgtaagtatcttcggttacttgccgttggtagcccatggtaaaattatggacctcccatttggcatggttttgattttctactttttccagcatgtagacgggttcgatatttcccggttcttcgctgttaaaaaatcgctgccagcgtttttcctgccagtttaaggtcattgctcccatcgctttggcgttgatcgcctcgcgccagtgactctctttactgataccgtagctctcttcatagacaaagagcttgatatcatcaatgtcatcaatatcttcgccgccggtggtattgatttgcagaaactcatcgcctgaagtgtagtagcggaaaatctgactaccgccgcccagatcgatgtggctgacggcggctaccgtaaattcctcacccggcagcgcaatcagcaattcatcttccagcaaacgaaacgctaacgtgtcgagcgtaaagccactattgagatgaagtcccagcggaccacgagcgatagctggcttattatccttgccaaacagacgggcatcatccgtgcggctaaaaaaggcaaaaaaaccttcattctgcatgatggccctccttatgcgaatggcagcattcatattggtcactcggttaacaagattctgaaagacattatcgtgaagtccaaagggctttccggttatgactcgccgtatgtgcctggctgggactgccacggtctgccgatcgagctgaaagtcgagcaagaatacggtaagccgggtgagaaattcaccgccgccgagttccgcgccaagtgccgcgaatacgcggcgacccaggttgacggtcaacgcaaagactttatccgtctgggcgtgctgggcgactggtcgcacccgtacctgaccatggacttcaaaactgaagccaacatcatccgcgcgctgggcaaaatcatcggcaacggtcacctgcacaaaggcgcgaagccagttcactggtgcgttgactgccgttctgcgctggcggaagcggaagttgagtattactgacaaaacttctccgtccatcgacgttgccatccgtttatgggcttcgacgttccggcaatcctcggcgatcacgttaccctggatgccggtaccggtgccgttcacaccgcgcctggccacggcccggacgactatgtgatcggtcagaaatacggcctggaaaccgctaacccggttggcccggacggcacttatctgccgggcacttatccgacgctggatggcgtgaacgtcttcaaagcgaacgacatcgtcgttgcgctgctgcaggaaaaaggcgcgctgctgcacgttgagaaaatgcagcacagctatccgtgctgctggcgtcacaaaacgccgatcatcttccgcgcgacgccgcagtggttcgtcagcatggatcagaaaggttgcgacatcgggtttcacgccagtagtaatggcaaacgccgtgccgacgatagtaccgataatcacgttaggcggctgtgcgcccgccagcggggccagccccatccacaccagttccagcgtaccgccggttaaaattccggtatgcagatcgccaagtaccagcccgaccaacgggccgaggaccaccgggcggtgcatatgggttaggccgttaaacatatccaggccagcgataaaggcgataatgcccaacgcaaatgccccagcggttttcaggtcgttaaatgctgcgatatcgcccgcatccacagaaaccgttttggcgatttgttgtttgccattggcgtagtgcatattgccaacgttaatgcgattcaccggaacgccacctttcaccagcgtcaggaaatcggcgggtgttttacaaaccagcaggattttctgtcgatcggcggcgcgatgaatgttgtcgataactttttgcagcgtccagaaacgtacggcgatcccttctgccagtaccatttccatcaggttttgttgtaccggatcttcggcaacctcatcgttggctaccagcaccagatttgcccccgcaaatccgacccattgaacgccgacctgaccgtgaatcaagcgttcatcaatccggcttaaaacaatatttggcatagcgtgttcctctttgttttgcttattggccttcacaggctgtgtggtatgcgccaggatgtcctgaatatggttgataatgagttcccgtggcgttggctgcagctcgccggagcgaactttcacgtactgcagcggcagatactggctgatcagcggcagcggaattggtgaatccgccagattacgtaccagatgagcgaaagcgtcatcaatctggctgtccggccagtaatagcgcacgcgatccgagtagctataaccacgcgccagacgacgcgcgttgccgtcaccgtggtagtggctttgccagtattccgggcggtcgagcatcacgtcttccagcacctgacgcagaccagaacaggctttcgctggcaccagttcttcttcaatcgccgccagagagaacagagcttcacgcagggcgaaggtcagcgctgggccaactttcagaatggcaaagtggtcaatcaccagctggcgcagcgattgcggcgtttgataatcggtagagtgcgcttcgaaaatcagcgtttcgtagttttcgaccatctggggctccagcaatgtcataaaccgctcgtgggcatcgcgacagtgcataaataccggcatgtttaaatctgcgccaatgcgtagctgggcaacaaaagcgcgttcttgctcttccggcgtcgaaaagttgcggttaaagtcgagaccacattcaccaatcgccaccacttctggctgcgcggccagctcaataatcgcttcttcagtcgcagcttgccactggctgctgtcgtgagaatgtacgcccgccgttgaccaacaggacgaatactgacgcgccagcttttgcgcctgctggctttcacgcaggttagtgccggtgatgagtagcccattaactcccgcgtcaaaagcgcacgctacaacatcatcacggtctttcgcaaattgcgaactggtcaaattaacgccgatatcaaacat

SEQ ID NO: 138655 - DNA, 1374 bp, Homo sapiens
atgaccgattttcgggagagcgacaccatgagtttatttgataaaaagcatctggtttcccccgccgatgccctgcctggacgtaacaccccgatgcccgtagccacgctgcatgcggtcaacggtcactcaatgaccaatgtacctgacggaatggagattgccatttttgcgatgggttgtttctggggtgtggagcgtctgttctggcagttacccggcgtttacagcaccgccgcaggctataccggcggctatacgccaaatccgacttatcgggaagtgtgctccggtgatacgggtcatgccgaagcggtacgcattgtttacgatccttccgtcatcagctatgagcagttgctacgcaagtaccgttgtgttgccgttgcattgttgggctacttcaaatgcaaaccgatcctgctcaacccgagttataaatccatgcaggatgacttggcatttattgcgcgatttcactttaaagacctcaagtttcggcgctttagtttgaaagcggaccaaaaatcccgcatctatgagcgtgttttatcaattgctggagtcaacagctggaaagataagcaacatcaaccccggcttgttgaacatttgctggtctgcgctgaaagctgggtggcaccccgcgcactctttgacgcagcaatcgagtacctggcccaccagaagatcgccattcctgcctatttggttgcgtttttggttcttggtcccttagtgttgtctctcatcccttcgcagatgttgccgtcgttaacgtggtcaagcatcacgtattcaatagttgttatcgtcgaagctggctatcagtaccattctcgactgcgaagattcggtcgcgtcgaggttaacgaacagatcgaatacctgatccacaacccaatcaggacgcgcgccagggcggtcaactttgttgataacaacaatcggcttcaggccccacggatattacggcaggattcatggtggatcaccagacctttaccggggctgacgtgggcgataatcgggtcgccaggaatcctgccacaggtggtcaaatcggcgcgcgtcatgaaacaggcggtggcctacctcgaaccgtttattgaagccagcaaagagcagggcaaaaccaacggcaagatggtgatcgccaccgtgaagggcgacgtccacgacatcggtaaaaatatcgttggtgtggtgctgcaatgtaacaactacgaaattgtcgatctcggcgttatggtgcctgcggaaaaaattctccgtaccgctaaagaagcgatgctgatttgggtgtcgtgctgtttaccagtcgcgatgccagtcactatcaacaagggcaaggaacgcagttacttcacctga

SEQ ID NO: 138656 - DNA, 1827 bp, Homo sapiens
atggggattctcgtcagtccgttgctcgcaccgctaatcggcggtctgctggatacgatgtggaactggcgcgcctgttatctctttttgttggttctttgtgctggtgtgaccttcagtatggcccgctggatgccggaaacgcgtccggtcgatgcaccgcgcacgcgcctgcttaccagttataaaacgcttttcggtaacagcggttttaactgttatttgctgatgctgattggcggtctggccgggattgccgcctttgaagcctgctccggcgtgctgatgggcgcggtgttagggctgagcagtatgacggtcagtattttgtttattctgccgattccggcagcgttttttggcgcatggtttgccggacgtcccaataaacgcttctccacgttaatgtggcagtcggttatctgctgcctgctggctggcttgctgatgtggatccccgactggtttggcgtgatgaatgtctggacgctgctcgttcccgccgcgctgttctttttcggtgccgggatgctgtttccgctggcgaccagcggcgcgatggagccgttccccttcctggcgggcacggctggcgcgctggtcggcggtctgcaaaacattggttccggcgtgctggcgtcgctctctgcgatgttgccgcaaaccggtcagggcagcctggggttgttgatgaccttaatgggattgttgatcgtgctgtgctggctgccgctggcacgcgggtaccggctgtcgagctggaccagcaccactgcgtcagaggacatagattgtgaagagggcgatggtgagggcaatgagacccacggcctccagctggctgtggagccggagggtttgcaacccaattacatgggccggggaaaaattcggtttcgtgatacttgcctcctgttttgtactcagtctcggggctcccagtggggatttgcccggacggaacttgtcgcgcttttaccgccattcttgtctggcgctgccgattatcgcgctggcctggcactatggttggcaaggggcgctgattgcgacgttgatgaacgccatcgcgctgatcgccagtcaaacctggcgcgatcatccggtggatttattgctctcgctgctggtgcaaagtctgacaggcggttgcgtgaacttaaccagtcgctgcaaaaggaactggcgcgcaatcagcatctggctgaacggttgctggaaaccgaagagagcgtgcgccgtgatgtggcgcgtgagctgcatgatgatatcggtcagaccatcactgctattcgtactcaggcgggcattgttcagcggctggcggcagataacgccagcgtgaagcagagcgggcagctcatcgaacaactatcgctgggcgtttacgacgcggtgcgccgtttgttgggtcggttacgtccgcgccagttggatgatctcaccctggagcaggccatccgctcactgatgcgggaaatggagctggaagggcgcggtattgtcagccatctcgaatggcgaatcgatgaatcagcgttaagcgaaaaccagcgcgtgacgctgtttcgtgtctgccaggaagggctgaacaacattgtgaaacatgctgatgccagcgcggtcaccctgcaaggctggcagcaggatgaacggttgatgctggttattgaagacgatggcagcggtttgccgccgggttccgggcaacaaggttttggcctcaccggaatgcgcgagcgcgtaacggcgctgggtggcacattacacatttcctgtctgcacggcacgcgtgtcagcgtttctctacctcaacgctatgtctaa

SEQ ID NO: 138657 - DNA, 1755 bp, Homo sapiens; identical to SEQ ID NO: 128995

SEQ ID NO: 138658 - DNA, 702 bp, Homo sapiens
atgcgcttcgtcatgtctgtgacgatgtatcacacgacgttggtggggttggatattaaacacctcaacctggagtctggtaaagtgtgggttatgggaaaagccagcaaagagccccgcctcccgattggtcgcaacgctgtggcgtggattgagcactggcttgatttgcgcgacctgtttggtagcaaagacgacgcgctttttctgtcgaaactgggcaagcgtatctccgcgcgtaatgtgcagaaacgctttgccgaatggggcataaaacaagggctgaataatcacgttcatccgcataaattacgtcactcgttcgccacgcatatgctggagtcgagcggcgatcttcgtggtcttttccgctttgtaagcgcaaaacggcacgcgaaaggttccaaagttgggtcgcccataatttacgcggaccagatcatcattggtgccggtcagaaccatccggcccggtggcggggcttaccccggaaatcacgcttattggtcagtccttcaaacgacaaacgcagaaaagcaggcgccgcacccgttgccgcactgcgccatttccctcccatcagcattgaaaatgcgatagtgaaaatccagttcaggatcattcggcggctcaaccaccagcagttggtcaaaccctacccccaggtgccgatcagccaggcgacgaatcagttccggtga

SEQ ID NO: 138659 - DNA, 5516 bp, Homo sapiens
atgaatttccgccacctgctcgagcagcatcaactggcccgtcaattgttcaagaccatcaatcgctggctggccgaagcaggcgtcatgatgacccaaggcactttggtggatgccaccatcattgaggcacccagctctaccaagaacaaagagcagcaacgcgatccggagatgcatcagaccaagaaaggcaatcagtggcactttggcatgaaggcccacattggtgtcgatgccaagagtggcctgacccacagcctggtcaccaccgcggccaacgagcatgacctcaatcagctgggtaatctgcttcatggagagaagcaatttgtctcagccgatgccggctaccaaggagcgccacagcgcgaggagctggccgaggtggatgtggactggctgatcgccgagcgtcccggcaaggtaaaaaccttgaagcagaatccgcgcaagaacaaaacggccatcaacatcgaatacatgaaagccagcatccgtgccagggtggagcacccgtttcgcatcatcaagcggcagttcggcttcgtgaaagccagatacaaggggctgctgaaaaacgatagtgtgtgtcttactggctctaaggataatgtactgctggtgatccatcactacggtgatagtagtgtcgtcatcgtgcgaactgaccatcttgtcatcggcaaggtatttttctttggtatacgggtccgtcacctcctggtattccagtttgatgttatcggcaatacacagcgcattcatcaggggctggacggttttttcctgcatatccacgaggtagtagtaactgccatcctcgcagccatcgggcgactggcggtggaagagaacatggcgctgttgatggaacaggctatcgccaacgaaggcctgttttatcgcctactctacctgcagcgcagtctcaccgccgccagcagtctcgacgatatgctgatgcgctttcaccgctgggcgcgcgatctcggcctggcagagctgctggtggtgctaccggaagcgaaagcggtgggatcggtggcgatgtcgatgctgggaagcgatgctgatttgggtgtcgttgctgtttaccagtcgcgatgccagtcattatcaacaagggcaaggaacgcagttatttcatgaaattgcgctgatgttgccggagcttctggagcgttggattgaacgcgtatgcccgatttacacacagatggtcagcagaaggcgatcatcaattttgccagcgaagccggctgcaatctgcagcgggatcttgggtgtcttccagggctacgaggaatataacgtcaactccggggaaattgtcggtctgctggggccaaacggtgccggtaagaccaccactttctacatggttgtaggcattgtgccgcgcgatgcgggcaacatcattattgatgatgacgatatcagtctgctgcctctgcatgcacgcgcgcgccgcggtatcggctatctgccacaggaagcctccattttccgtcgcctcagcgtttacgataacctgatggcggtactgcaaattcgtgacgacttgtctgctgaacaacgtgaagaccgcgcgaacgagctgatggaagagtttcacattgagcacctgcgtgacagcatggggcagtcactctccgggggtgaacgtcgccgtgtagaaattgcccgcgcactggctgcgaatccgaaatttattctgctcgacgaaccgtttgccggggttgacccgatctcggttatcgacattaaacgcatcattgagcacctgcgcgacagcggcctgggcgtgctgatcactgaccacaacgtgcgtgaaacactggcggtttgtgaacgcgcttatatcgtcagtcaggggcatttgatcgcccacggcacgcctacagaaatcttacaagacgaacaccaggagagtacgattctgaacatgaagcaaggtttgcaactcaggcttagccaacaactggcgatgacgccacagctccaacaggcaattcgtctgttgcagttgtcgacgctggaacttcagcaggagctacagcaggcgctggagagtaatccgctgcttgagcaaatcgacactcatgaagaaatcgacacccgcgaaacgcaagacagtgaaacgctggacaccgccgacgcgctcgaacaaaaagagatgccggaagagctgccgctcgatgccagttgggacaccatttacaccgctggtacaccatccggcaccagcggtgaatacattgacgacgagctgccggtctaccagggcgaaacgacgcaggccttgcacgaagtcatcagtgggcaggttcagctgacacgggcagcgaaaagcagcacgagctacagttgcggattcagggggagcctgtctccgggcagcttaatctggcaggaagttttgatcgcaaagaagaacgctggaaggggaactcttagcaatacccgcttccagacgccggttggcccgtggtcgctgacccgcgatattgcgctggattaccgcaataaggagcaaaaaatcagcatcgggccacactgctggcttaacccgaatgcggaactgtgcgtgccgcaaactatcgatgcgggggccgaagggcgtgcggtggtgaatctcaaccgcttcgacctcgccatgctgaaaccgtttatgccagaaaccactcaggccagcggtatcttcacgggtaaagcggacgttgcctgggacaccacgaaagaggggctgccgcagggcagtatcaccctttcggggcgtaacgtgcaggtaacgcaaaccgtcaacgatgcggcgctgcccgtggcgtttcagacactgaatctgacggcggaattgcgtaacaaccgtgccgaattgggctggaccatccgcctgaccaataacggccagtttgatggacaggtgcaggtgaccgatccgcaaggccgccgtaatcttggtggcaacgtcaatatccgtaacttcaaccttgcgatgataaaccccatctttacccgtggggaaaaagcagcggggatggtgagtgccaacttgcgtctgggtggtgatgtgcaaagcccgcagttgtttggtcagcttcaggttacgggtgtggatatcgatggcaactttatgccgtttgatatgcaaccgagccagcttgcggtcaactttaacggtatgcgctcgacgcttgccggtacagtacggacccagcagggtgaaatctacctgaacggtgatgccgactggagccaaattgaaaactggcgggcgcgggtaacggcgaaaggcattcacttcgtgtcaaagcttgcttggcgtcgcctggttcctcctttctcgttcgtttgtaattatcacatcccaggtcccactttcaggctcagtgtatataccttcccttccttgcctaatcgtgcactgccatgtgggtcacgccagcctggtggggcgtctagtaaacggccgtcccagtcgtctcgtgctcgttttcgtgttggtacggcagccggcacgcacgtttctcccgaaccaacaagtggtggtcgctgggtagcaggcttaggtaatcccgtataccacaccccttgcgcccatgtccgggtgctaccggtcgctccgtgtggtttccgcgggtccgcacgccgttcccccgcctttcgcacgggccacggcgcaccgggtcctcctacttaccctatgctggggtatcctcctctgggccgaaatcggcgctatcgatggtgtagtagtagcagccggagcatcagctcggttggcgtgcacgaggccggggctacttcagctatcgctttcacgccgtatatggataacctcgtcgcgctgccgtcgggtatactggctattattcagtcgtttgtcgtccggccacgtcgcgcccgtttagttctaatcaactgtaaccggtaccctatcaacagccgcttctccttcgcccccctgcattttcccaagtcccctcccccatttctcccactgttgcacgtactagcccaaatccagttgcacgtgacaccctatcgtggctacgcctggtcacaaactacttcccactcctcgctaactcactctccaggccacgcttcgcgcaacactaatgttactaagcccacgacaccactacgtgactatctgctcctggctgccacgctgccggctacggcacaagctctgtctactagactttgcgttccgttatcgcaacacatcgggattagtgtgtacccacttcgcccggactcgcccccgccgggtcagcgcagcagcatcaacgcaaatctatgcgttttcaccgccctgatcaggtccaaatctctcgttgaacaactctcggtacatcccccccgcggtcccctagccggcctagcggcattttcgcgatcttgcgttttttctgagggaactacatcgcctcccgtcctcaacatttaccaattggcgcctgacaggatcgttgacgcgtccccgaggttttaccaaggaatcgcaaattacatgaatgtattgaacgtaatggcaatccaaaataagaaccaggaggagcagcagcatgaacacatgaccgcgcaccggaacgtgtggtgtctgaccggaaaatcggcgctatacgatggcatgccccttatccgccctaatggccataaccaaagcaaaccaccgtatatcaatttctattgggccaagccccacacaagttatagttcaatttcaaaatcggcgctatacgatggcagtaagcccagtaatatgccccgaggagttcatgtacgcacacgaggcaaccattatgggaacgccgtccgtaaggcctggggtccccgagccctcggtagtccgtgcagcctgacccaccggaaggatgtagggtggaattctagagtaagaccacctcgttgggaagttgtcaataatagggtacagggacctccaggtcctcgaggtccacctcgtcgacgtcgtccgcattgttttggaatacacggatgtaggcgtgaagggcatgtgccagttggaccaggagtgctgcatgaaataacaacagtaggaacagcagggacaatcggtcaagtgctctgtgattcagtgcgcaacgttatccgggcaccgagcgcatactgcattcttaaccaatcgtgtgcgcagctcccccatcgcccccctctattcaaaccgtcgttccagatttatccgggcttcttggtagatgcccgagtctcaattcgaacggtccgcgccgctccgtaccgaactgccaatttggggcctgatgggccacggaatgtgcttcttaatagggaaagcgatgttgcatgccgccatgcacgcacagtgccgtggctgatacacggcgtgcgatttcgtcaaggccgcgccacaaggcgatcggcaaatatcctgcatccgacggcgttggtcatcgctcagccacggcaaacgttcactggcaagacgagcagtaaacagtcacgttggggagtccgtcgtagag

SEQ ID NO: 138660 - DNA, 3761 bp, Homo sapiens
gctggcgcttaggtgcgccgtcgaaccatactcatctggcattaagccgtcagtctttcgaaccgctgcgtattcagcgttaggggcaggaacagcactatcttgggccgcttaacggaccagagctgctggtggtgctaccggaagcgaaagcggtgggatcggtggcgatgtcgatgctgggaagcgatgctgatttgggtgtcgtgctgtttaccagtcccgatgccagtcactatcaacaagggcaaggaacgcagttacttcatgaaattgcgctgatgttgccggaccttctggagcgttggattgaacgccgtcagcttgaggcgatcatcaattttgccagcgaaaacggcctgcaaagctggcagcaatgtgatgtgacgatggtgcgcaattttgctgtacgcagtcgccgtaaagggctgggagcagcaagtctggcgttacggctttctgcgctacgtagcttttttgactggctggtcagccagaacgaactcaaagctaacccggcgaaaggtgtttcggcaccgaaagcgccgcgtcatctgccgaaaaacatcgacgtcgacgatatgaatcggctgctggatattgatatcaatgatcccctcgctgtacgcgaccgtgcaatgctggaagtgatgtacggcgcgggtctgcgtctttctgagctggtggggctggatattaaacacctcgacctggagtctggtgaagtgtgggttatggggaaaggcagcaaagagcgccgcctgccgattggtcgcaacgctgtggcgtggattgagcactggcttgatttgcgcgacctgtttggtagcgaagacgacgcgctttttctgtcgaaactgggcaagcgtatctccgcgcgtaatgtgcagaaacgctttgccgaatggggcataaaacaagggctgaataatcacgttcatccgcataaattacgtcactcgttcgccacgcatatgctggagtcgagcggcgatcttcgtgcgagaggcgcttacctttgtgccaaattattatccggggctgcgcaggttccagaatggagatctgcattcgcctggtttgcccgctgtgccgaacaggcaaggcaaaaccagtacttacaggtcagctcttgcgtacccgccctggaaggctgcgatgttaacggtgccagttttacccttgaacagatgctcgcctggcgggaccatccgcaggttaccggccttgcagaaatgatggactaccctggcgtaattagcgggcagaatgcgctgctcgataaactggatgcatttcgccacctgacgctggacggtcactgcccgggtttgggtggtaaagaacttaacgcctatattactgcgggtattgaaaactgccacgaaagttatcagctggaagaaggacgccggaaattacaactcggcatgtcgttgatgatccgcgaagggtccgctgcccgcaatctcaacgcgctggcaccgttgatcaacgaatttaacagcccgcaatgcatgctctgtaccgatgaccgtaacccgtgggagatcggccatgaaggacacatcgatgccttaattcgccggctgaaatgcattaccgagtttatcgagcaggataccgaagaagcccgccagcaggctacgcgcccgattgaagtgattgaaggcccgttgatggacggcatgaatgtggtcggcgacctgtttggcgaagggaaaatgttcctgccacaggtggtcaaatcggcgcgcgtcatgaaacaggcggtggcctacctcgaaccgtttattgaagccagcaaagagcagggcaaaaccaacggcaagatggtgatcgccaccgtgaagggcgacgtccacgacatcggtaaaaatatcgttggtgtggtgctgcaatgtaacaactacgaaattgtcgatctcggcgttatggtgcctgcggaaaaaattctccgtaccgctaaagaagtgaatgctgatctgattggcctttcggggcttatcacgccgtcgctggacgagatggttaacgtggcgaaagagatggagcgtcagggcttcactattccgttactgattggcggcgcgacgacctcaaaagcgcacacggcggtgaaaatcgagcagaactacagcggcccgacggtgtatgtgcagaatgcctcgcgtaccgttggtgtggtggcggcgctgctttccgatacccagcgtgatgattttgtcgctcgtacccgcaagagtcgaaacccaggcggtacagctaacgcacaatctaccttcgagcaaaaagcggcaaatccctttgataataacaatgatggtctgccggatttaggcatggctcccgaaaatcatgatggggaaaaacactttgctgaaattgtgaaagatttcggcgaaaccagtatgaatgataacgggctggatactggcgagcaggcaaaagctttcgcattgggaaaagtccgcgaatggtggtcgatgccggacaatgacattcgccgccgaagaaccgcaaggcattcacgcctgaaagagaatctgccgctgattacgctaatcgtgatgatggcaatcagctggggtctggagcagttcaatcatccgttcgggcaactggcgtttatcgcgaccacgctggttgggctgtacccgattgctcgtcaggcattacggttgatcaaatccggcagctacttcgccattgaaaccttaatgagcgtagccgctattggtgcactgtttattggcgcaacggctgaagctgcgatggtgttgctgctgtttttgattggtgaacgactggaaggctgggccgccagccgcgcgctgtggcgattaacagccatagcgccacccttgggacagcaactggttggcactctcgcacacgttccgccgttcttcctgatgatggcaggtctggcggtttacgcggtgctgtttgcgggctggtcaagtaacaacaaatactcgttgctgggtgcgatgcgtgcttctgcgcagaccctgagctacgaagtgttcctcgggctttccttgatgggcgtggtggcgcaggccggttcattcaacatgaccgacatcgtcaacagccaggcgcatgtgtggaacgttatcccgcaattctttggttttattacctttgccatcgcgggcgtggcggtatgtcaccgtcacccgtttgaccagccggaagccgagcaggaactggcggatggttaccacattgaatattccggtatgaagttcggtctgttcttcgtgggtgagtacatcgggattgtgaccatctctgcattgatggtgacgctgttcttcggtggctggcaaggcccgttgttaccgccattcatctggttcgcgctgaaaaccgcgttctttatgatgatgttcattttgattcgtaatgtccttcggctggaaaatctgcctgccgctgacgctgatcaacttgctggtaacggcggctgtcattctctggcaggcgcaataaggggcaataagaccatgaccttaaaagaattgttagtaggtttcggcacccaggttcgtagtatctggatgatcggcctgcacgcgttcgccaaacgcgaaacgcgaatgtacccggaagagccggtctatctgccgccccgttatcgtggtcgtatcgttctgacccgcgacccggacggcgaagagcgttgcgtagcctgtaacctctgcgcggtagcctgcccgtcggctgtatctcgatgcaaaagcagaggatag

SEQ ID NO: 138661 - DNA, 1116 bp, Homo sapiens
atggcgcgcgatctcaacgtccgtgaaggggcggtgcagagcgtaatgggcgcttatctgctgacttacggtgtctcacagctgttttatggcccgatttccgaccgcgtgggccgccgaccggtgatcctcgtcggaatgtccatttttatgctggcaacgctggtcgcggtcacgacctccagtttgacggtgttgattgccgccagcgcgatgcaggggatgggcaccggcgttggcggcgtaatggcgcgtactttaccgcgagatttatatgaacggacacagttgcgccatgctaacagcctgttaaacatggggattctcgtcagtccgttgctcgcaccgctaatcggcggtctgctggatacgatgtggaactggcgcgcctgttatctctttttgttggttctttgtgctggtgtgaccttcagtatggcccgctggatgccggaaacgcgtccggtcgatgcaccgcgcacgcgcctgcttaccagttataaaacgcttttcggtaacagcggttttaactgttatttgctgatgctgattggcggtctggccgggattgccgcctttgaagcctgctccggcgtgctgatgggcgcgtcgttttttggcgcatggtttgccggacgtcccaataaacgcttctccacgttaatgtggcattcggttatctgctgcctgctggctggcttgctgatgtggatccccgactggtttggcgtgatgaatgtctggacgctgctcgttcccgccgcgctgttctttttcggtgccgggatgctgtttccgctggcgaccagcggcgcgatggagccgttccccttcatggcgggcacggctggcgcgctggtcggcggtctgcaaaacattggttccggcgtgctggcgtcgctctctgcgatgttgccgcaaaccgggcagcctggggttgttgatgaccttaatgggattgttgatcgtgctgtgctggctgccgctggcgacgcggatgtcgcatcaggggcagcccgtttaagcgcacgtcaccgcagcatcgtcatcagctccatgggagaacgatgctgctttatcagatcacgcatcacccgcatatgcggtgcggagtaa

SEQ ID NO: 138662 - DNA, 2532 bp, Homo sapiens
atgcactttatgttgcaaaaagaggtggtgaatcgtctggttgcaggaccgaacagcaaagcgtatggtcgattaagcgtcatggcgccacactattgcaatgtgatcccggtactggaagtaccgccgtcgtcggttacaccacaaaacacagtggatttttttgtcgtgcgcctggttcctcatgcaacgatgcctcacccggttaaagatgttcgtgtgttgagccgcatcaccaccgaagcctttaaccagcgtcgtaaaaccattcgtaacagcctcggcaacctgtttagcgtcgaggtgttaacgggaatggggatcgacccggcgatgcgagcggagaatatctctgtcgcgcaatattgccagatggcgaactatctggcggataacgcgcccttgcaggagatgtgtattcaggttcatagcgtctacattgaggctccatcttcacctgataatgaacgatttacccctggaagaatacccctgcgtacgggatcttgtccccggccggttcctgaaatttctccaagggatcctaagggaacgacgctcgtgctggcatccgatctccctgggcggattcccgtggatccccgctctatcattgttatgctcttcctggcggtacgctggttacaacggcaacttgccgggcaagaattgctggaaacccgggctactcgtatcttaaacggtgagcgtggctctaatgtgttgggaaccatctatgaatggccgcccagaaccagcagtgcgctggatacgctgcttcgtgaaattcagaacgcacgcgaacaacacagccgtcttgatacgctgatccgctcttatgccgcccaggacgtgaaaaccggcctcaataaccgactctttttcgataatcagttagcaacgttactggaagatcaggagaaagtaggtacccacgggatcgtgatgatgattcgtctgccggatttcaatatgttgagcgatacctgggggcacagccaggttgaagaacagttcttcactctgacgaatctgctgtcgacatttatgatgcgctaccctggcgcactgctggcgcgttaccaccgcagtgattttgctgcgctgttaccgcaccggacgttaaaagaggcagagagcatcgccgtgttccgagcactgtcaagactgccagacctctggcacaggtccataggtactctcacggaggcattgcctcagacagacaagagacaggaacaaattgcagttgctttgacatcttacagtggcctatacgggttgggatacggcagtaaggagattcagctgacgtattcagggactgcgggagacctaatctctccggggctttcggccattcacggaagatgtattctgaacacattagtattcatagttaaacttcgttggatggaaaatacccttcaccgctttggtactcaccatgggtgcagcgctgtccgctcttcacatttggacagtggatccccccgtcggtcgagttggcacatggcccgcgcacgtaatcatattcatgttctggaagagaacatggcgctgttgatggaacaggctatcgccaacgaaggcctgttttatcgcctactctacctgcagcgcagtctcaccgccgccagcagtctcgacgatatgctgatgcgctttcaccgctgggcgcgcgatctcggcctggcagagctgctggtggtgctaccggaagcgaaagcggtgggatcggtggcgatgtcgatgctgggaagcgatgctgattggggtgtcgtgctgtttaccagtcgcgatgccagtcactatcaacaagggcaaggaacgcagttacttcatgaaattgcgctgatgttgccggagcttctggagcgttggattgaacgcggctgggagcagcaagtctggcgttacggctttctgcgctacgtagcttttttgactggctggtcagcccagaacgaactcaaagctaacccggcgaaaggtgtttcggcaccgaaagcgccgcgtcatctgccgaaaaacatcgacgtcgacgatatgaatcggctgctggatattgatatcaatgatcccctcgctgtacgcgacctgatgtacggcgcgggtctgcgtctttctgagctggtggggctggatattaaacacctcgacctggagtctggtgaagtgtgggttatggggaaaggcagcaaagagcgccgcctgccgattggtcgcaacgctgtggcgtggattgagcactggcttgatttgcgcgacctgtttggtagcgaaagagagcgacgccagcacgccggaaccaatgttttgcagaccgccgaccagcgcgccagccgtgcccgccaggaaggggaacggctccatcgcgccgctggtcgccagcggaaacagcatcccggcaccgaaaaagaacagcgcggcgggaacgagcagcgtccagacattcatcacgccaaaccagtcggggatccacatcagcaagccagccagcaggcagcagataaccgactgccacattaa

SEQ ID NO: 138663 - DNA, 1752 bp, Homo sapiens
atggcgagacgtattctggtcgtagaagatgaagctccaattcgcgaaatggtctgcttcgtgctcgaacaaaatggctttcagccggtcgaagcggaagattatgacagtgctgtgaatcaactgaatgaaccctggccggatttaattctcctcgactggatgttacctggcggctccggtatccagttcatcaaacacctcaagcgcgagtcgatgacccgggatattccagtggtgatgttgaccgccagaggggaagaagaagatcgcgtgcgcggccttgaaaccggcgcggatgactatatcaccaagccgttttcgccgaaggagctggtggcgcgaatcaaagcggtaatgcgccgtatttcgccaatggcggtggaagagttgccaaccaactaccgcttaaaacaagtgaaacagctggccttgaaatgccattctgtaacccagaaaatcaccgatctctccgggggtaatcagcagaaagtcttgatctccaaatggctgtgctgttgcccgcaagtaatcattttcgatgaacctacccgcggcatcaacgttggcgcaaaagccgaaatttacaaagtgatgcgccaactggcggacgacggaaaagtcatcctgatggtgtcatcggaactacctgaaattatcaccgtctgcgaccgcatcgccgtgttctgcgaaggacgactgacgcaaatcctgacgaatcgcgatgacatgagcgaagaggagattatggcatgggctttaccacaagaccatatggctaacgatagctggagcgggcaggataaagctcaacactttatcgcctcggcgatgctttccgccgccggaaatgaattgctgaagttgtggctcatcttctggcaaaatcgggcggaacaagcagcgttcaccgtttttcaattctacccattcttccagctgatgcggataagggcgcactgccagccgactctcgttatcgccttcaaacggcgagatatccaatcgtcctgcgacttacgaatgcaggagccacctgtctggctggatatcgaaatcactactgatgagtatctgcatgatattcagcgcaaaatccaggcattaaccgaatcattgcctgtcgaagtattgctggtacgtcggagtcgtgaacagcgcgagcgtgtgttagccagccaacagcgtgaaaccctcagcgaactcagcgtcgaagaggtgttcaatcgccgtctggcactggaagaactggatgaatcgcagcagcaacgtctgcagcatcttttcaccacgacaacacgaagcatgaaaattctcagcctgcgcctgaaaaacctgaactcattaaaaggcgaatggaagattgatttcacccgcgagccgttcgccagcaacgggctgtttgctattaccggcccaacaggtgcggggaaaaccaccctgctggacgccatttgtctggcgctgtatcacgaaactccgcgtctctctaacgtttcacaatcgcaaaatgatctcatgacccgcgataccgccgaatgtctggcggaggtggagtttgaagtgaaagtaaatcagggcgtggttgaaaacctggccagcgagcaggccgcccgtatggtggcgatgaaagccgcgaccgacaatggcggcagcctgattaaagagctgcagttggtatacaacaaagctcgtcaggccagcattactcaggaactcaccgagatcgtctcgggggccgccgcggtttaa

SEQ ID NO: 138664 - DNA, 3125 bp, Homo sapiens
atgaacatcgatgcaaaaatcctcaataaaatactggcaaaccgaatccagcagcacatcaaaaagcttatccaccacaatcaagttagcttcatccctgggatgcaaggctggttcaacatacacaaatcaatgaaagtaatccagcatataaacagaaccaaagacaaaaactacatgattatctcaatagatgcagaaaaggcctttgacaaaattcaacagcccttcatgctaaaaactctcaaaaaactagtggctggcatgatggcagtggctgctcctgacgacccgccaccgccatcggtatcatcttccaagccatcaacagtggcacctccgggccgcatctccccgtcggggcgcgccctctgcaccagcttacccagtgccttgagcagctcgtcgaaattctcgctgctgcgcatcttccaggtgccggcgaagttgggcatggtggcggtggcggcggcggcaggtgtgaacgccatgctgaggaaagtggccgtagcggctgcgtccaagccgcacgtggagatccgccaggacggggatcagttctacatcaagacatccaccacggtgcgcaccactgagatcaacttcaaggtcggagaaggctttgaggaggagaccgtggacggacgcaagtgcagggtgaggccccagagccactacagcgtccccgtgtccccgctcggtgcccatggcccactgctgctggaggaacctgtgtctccctttgcagcctgtggcgcgccttccttgcaggtgcctcaaggcgcgcagcgctgggcgcatagcgccagtctccgccttgcgagctcagagtgtgcccgctgcacctacgctgtcggtccctcacgcaacagcctctgcccccatgcccaatttcgtcggcacttgaataatgctcagcgagctgaaaatttctcctatctgctcaaggcactggggtacgaactggcaagaattcttccgcttcttaatgagcgcttttaccctgtgctttccattagaacccatactggggttagcttcgttttcattcagtgcctggcctctgtcctcgatatcagtttagccacttgggagaatgagaacaagatccgctgcacgcaaactcttcttgaaggggacggccccaaaacatactggacccgtgagctggccaacgatgaacttatcctgctgattgaatttggtgtggtcgccgcacctgagggccagcagtccacagctgtctaccactggtgcaataccgcggtgctggacccactggcatgtatgttactaattttgatgaatcttgccaaattgctttccacagagcttgggtaccgagctcgaagctttccctcaacccaaaaaaacctttttaaaaatacaagtcgacactgcatgttcactcagtgcggcagcgaaaatgacgtctactcaagcggtagcctcactcacggcacgcaggtgaataaactgctgcagaacatccgggagcgcgttaagacgaccattttcagccataacccgaatcaggttctgaccgttttcgtccagttgctcaccacaaactgcgataaacgactcggcgagcgtttctggcgcaagcgcgccagagagaagctctgccatttgttcgtttttggttacctcggcggcaaacgccagcatgtcctgccagcgttctacactttggtgttcgacggcaaagtcaaaagctgctttggcttcagcgacaagtttatccacgatgtcgctgttagcagcttcatccacggaacgttcgatgatcttctcggcgccagcaacagccaggatagcaacttgcttacgcagctcttcacgggcacgtttacgctcggcttcaatttccgcctgcgcctgggccacgattttactggtcggtcgcgctggcctttgcaaggtcaaggtccttatgtgctcgttctgcggaagcaaggccgtcagcaatttctttttgacgtttttcgatggctgccattaatggcggccatacgtacttcatgcagaacagaacgaacaggacaaacgcgatggcctggccgaggattgttgcgttcagattcaccacacaagggtctgagccaggagtcgtacccttatgcagaaaccatgcgcaaagtgattggtcaccttgcacacggtaatctggaatataagcacccttacctggaagaccgcgacgttaaacgcgtgggctacctggtggtgtcgaccgaccgtggtttgtgcggtggtttgaacattaacctgttcaaaaaactgctggcggaaatgaagacctggaccgacaaaggcgttcaatgcgacctcgcaatgatcggctcgaaaggcgtgtcgttcttcaactccgtgggcggcaatgttgttgcccaggtcaccggcatgggggataacccttccctgtccgaactgatcgggtcgggtaaaagtgatgttgcaggcctacgacgaagtccgtctggacaagctttacatttgcaaccaccaattttattacccccatgtctcaggttccgaccatcagccagctgctgccgttaccggcatcagatgatgatgatctgaaacataaatcctgggattacctgtacgaacccgatccgaaggcgttgctggataccctgctgcgtcgttatgtcgaatctcaggtttatcagggcgtggttgaaaacctggccagcgagcaggccgcccgtatggtggcgatgaaagccgcgaccgacaatggcggcagcctgattaaagagctgcagttggtatacaacaaagctcgtcaggccagcattactcaggaactcaccgagatcgtctcggggggccgccgcggtttaaacaggttatttcgtagaggatttaaagatggctacctggaaagattgtccaggtaatcggccgccgtagttgacgtccgaattccctcaggatgccgtaccgcgcgtgtacgatgctcttgaggtgcaaaatggtaatgagccgtctggggctggaagttcagcagcagcttcggcggcggtatcgtaccgtacctcgcaatggggttcctccgaacgtctgcgttcgcggtcttggatgtaaaagaaccttgaacaccccgattgaag

SEQ ID NO: 138665 - DNA, 757 bp, Homo sapiens
cgaagctgtttgaaggtagcgagaacttcaaacaggattcgtctatgtgggcgacgtggctgatgtgaatctgtggttcctggaaaatggcgtttccggcatcttcaatctcggtactggtcgtgcggaatccttccaggcggtagctgcctgtacgctggcttatcacaagaaaggccagatcgaatccattccgttcccggataaactgaaaggcggctatcaggcgttcagtcaggcagatctgacaaatcgaagtatgcgtccggatcaaaccaaaagcaggcaccgtgttggcatattcgtagcgttccaggcaggaacgtccgccagctcctggcatgacttcacttagtttagcggccgtttccagtgataatccggtttccggcgatgaacacattcggctggcgcgcgcttctggtagattcgggattgggcgagtagcgcaaccgaagcgcatccagcggcgttcatcaacaccacgggcagcaaccgatttaggcaatcctggccacagaccatgtacggtcagaaaatcagctttgttggtcgtttcggtttgcaggcgacattcatctcgttcgttacgatttcgatcgtgttgactctggcaaaatccggtttgccaggagagggccaggacatagcgatcaaaatcgccatactgttttgcctgcaacgctaaggcgttggcagaagagaagggaagcagagaaaccgcgagcaacgcggcgttacgccagaatgctttcat

SEQ ID NO: 138666 - DNA, 3294 bp, Homo sapiens; identical to SEQ ID NO: 115210

SEQ ID NO: 138667 - DNA, 2547 bp, Homo sapiens
tcacgatgggtcgcttcgcctaaccgaacttgctccagcaactgttgctgagcggttggtgctgcctcgaccatcggcatgacggccagaccgagggaaagcgtgaatatgtttagtgtgaatttgcgcattcctggccccagtcaggtaataactcaccttttgtcgagaagcggaaacggtgttgatcccagccttgtccaaacagttgttgggtgctggggtggaggagtggttgtgtttgttgcgttggtggcgcgtagtgtgcttgtgggttcgggttggttcgttgagggtgtggtgcgttgctgcgtggtgctgtcgttgtctgttgttggtgtggtgtcttgtcggtgggacgcagaggggatgatgagggtatttgtcttctgcttttgggtgtgaccggtgttgtgcttgcctggctgtttgggtcgcggtggggccgtccccttgtgtatgcgtgtgcgtgtggtcgtgtgtgtcagtgcggttcgttggttccttcctggcgcgtttctggtgttgcgttcgtagcgagggggtgcggtggctgctgaagcgggcatgacgcataccgcgaacaaattcaggaatatcgagtgatttcgttgttgctgaacccgaacggaccatgttaacaaatgtcagtccactaacgacgcctacccgaccggtttccgtatcgcagtttactcttccctgattaagctggtagatgcgattaaccaactgcgtgaaggctttgaacgtaaagctgtcgaattccaggacatcctgaaaatgggtcgtacccagctgcaggacgcagtaccgatgaccctcggtcaggaattccgcgctttcagcatcctgctgaaagaagaagtgaaaaacatccaacgtaccgctgaactgctgctggaagttaaccttggtgcaacagcaatcggtactggtctgaacacgccgaaagagtactctccgctggcagtgaaaaaactggcgcttaaatcgctggcgttcgtaggaaatctcttccagtaaacgctccagaacagtgtgtaaacgacgagcaccgatgttttcggtagattcgttcacctgccatgccgcttccgcgatgcgtttaataccggagtcggtaaactcgatatttacgccttcagtcgccatcagtgctttgtactgcacggtgatagaggcattcggctcggtcagaatacgctcgaagtcgctggtggtcagcgcctgcagttcaacgcggattggcagacgaccttgcagttccgggatcaggtcagacggtttcgcaatctggaacgcgccagaagcgataaacagaatgtggtcagttttgaccatcccgtgtttggtggaaacggtgcaaccttctaccagcggcagcaggtcacgctgaacgccttcacgagaaacatccggaccggaagactcgccgcgtgcggcttgtttggcttgctgggccgcccacacggttgctgggaaccatgggagctggcacgctggtgctgggtgcatgctgcttgccatggccgcgggagggagcccataatgttgcaacggccgcatgcggtggctggcgggcaagatgcgatctgcgatttcgtttgtcatgcaagctgggcctgtcacgccagttttttggctggaatgcctgacgagcgagcgcacggttcctgtctgctgttcggtctgtccccagttgtttttagcaggtgggatcagcacgtcgagaatacgatcttctgccagttcttcagcgcgataacgtaattccgccagcggcagaatagttggccgttcggcacctggcagcagggcgatgacttcatccagacgttcggtcggtgcgtgcatcatgatgtattttgattcgcgcgcctggatcacaccctgaatacgggtcagcagtttgtcgatcagttgctgtttggattctgccatgtcgccatcgcgttgaatcaggcaggctttcgagcgatagataacttcgacttcgcgcaggccgttagcttccagcgtggcaccggtggaaaccagatcgcaaatcgcatccgccagtccggcacgcgggtcgacttcaacagaaccgttcagtaagcaggatttaaaagagatgcctttctggtcgagataacgcttgagcaggtgaggataagaggtggcgatacgtttaccgtttaaggagagcggaccgtcccaggcttcatcaaccggcgttgccagcgaaagacgacagccgccgaaatccagacgacgcagggtaaagtagcgtggatcttcaccctgggcgcggcggttaagcagctcttcttccagcacgttttcgccgataatcccaaggtctaccacgccatccattaccagaccgggaatgtcgtcgtcacgcacgcgcagaatatcaatcggcatgttttctgccatcgcgatcaggcgctgggtgtgaagattaattttaatgccacagcgcgccagcaattcgcgtgagtcatcacttaaacggccggatttctgcatagctatgcgtaaacgagtgttgtctgtcat

SEQ ID NO: 138668 - DNA, 1998 bp, Homo sapiens
atggagagacaaaaggatagcaatgctacagagagtaagagatatggagataaaatgagaattaaaatttcagaaggagaagagaaagagaatggtgcagcatcaatatttgaagagacaatagttgaaaaattcccaaattggttaagacacaggccaaaatctgaagccgtgactgtggcggaaattttaagccccctggttcccatctacgaggtgcacagcacaggggaaaataacgaggtttgcaacgggtgcccgaacggcgagctctttgctgtcccccaaggtcttcccaatgggtgtccgtgggacctggcccacaaacgctttggtttttcgccgtgtaacaatggcgtggccccggaatttccctgtgcttattgcccgtgtgggccctcgttccacttgttgcccgcccattacggtcgtaaccccggtgctccagggcaccctggtgccctgagaacaatggcgacagcggatttatgttctgccaaagatgactgtgtgcgactgaaaaatgcgctggtcaatctcggcaacagtaaagactgggacgcgctggtaaaacgcgccaacgccgggaagctcgatggcgtgaatgtgttattacttatcattagctcaagtcaggtaagaagcccagaattcagcgaaaggcccgcggggattccaagggttaaatccacgggccacgacaaattcagagacccggcacggatcacgacacaacacggcaacaccggaaacacacggactatacgatattcgctaaaaacggaacggataatgaaggacgatctgaccggtccgttattaatggagcgcatgcacgaacatgccaccaagtttgaaactgagatcatttttgatcatatcaacaaggtggatctgcaaaaccgtccgttccgtctgaatggcgataacggcgaatacacttgcgacgcgctgattattgccaccggagcttctgcacgctatctcggcctgccctctgaagaagcctttaaaggccgtggggtttctgcttgtgcaacctgcgacggtttcttctatcgcaaccagaaagttgcggtcatcggcggcggcaataccgcggttgaagaggcgctgtatctgtctaacatcgcttcggaagtgcatctgattcaccgccgtgacggtttccgcgcggaaaaaatcctcattaagcgcctgatggataaagtggagaacggcaacatcattctgcacaccaaccgtacgctggaagaagtgaccggcgatcaaatgggtgtcactggcgttcgtctgcgcgatacgcaaaacagcgataacatcgagtcactcgacgttgccgctttattcgggaaggcgaaagcaaagggcaactgttgttggatcagctgcatgctgcaggcgactctagaggacccctgccttcaagctaactatgcctgggtatatgacatcatatttgtaaagcaggtgtgcagcaagggcttcacagacctcagtgagcgtctcctctgggagcccacgtggctcaagccagcacaaagccagatctatttggtggctgctgttgttcactcttggcataccgtatgccacccattcttgtcctttacccagatcatcaagacaaagccctaccagttcagaagccctaccagaagcacaaaggcgacaccagaagtcaacagcagcccacagcgtggcaacaaacaaaggcattacacagggttcgtgcatccacaaagcaacgggccggcaccgccaagtcaccctgcgacccgcatcgcctcatcccaaggacaatctggcaacccccactgtgcaaatgccctcaatccaatcgacactaggccgcagcaaacaaccggcgaagcagaaaagcgcacgccaccacacccactacccacgggacgccggaccaaggcaccaagacaacaacagtattgcaatgacaccacgggcacaggagcgccacacaaggcaaagcccgagacatag

SEQ ID NO: 138669 - DNA, 2856 bp, Homo sapiens
atgcggactcgtggtgtcccggcttttcaagatgacgatcgtttaacgacaaacgcgataacgttagcggtcatcatgttcatcagcgggctggacgatttttttattgatgtcgtctactgggtacgccgcattaaacgcaagttgagtgtttatcgccgctacccgcgaatgagttaccgcgaactgtataaaccagatgaaaaaccgttagcgattatggttccggcgtggaatgaaacgggcgtcatcggcaatatggccgagctggcggcgaccacgctcgactacgaaaactatcatatctttgttggcacctaccccaacgaccccgatactcagcgtgatgttgacgaagtgtgcgctcgcttcccgaatgtgcataaggtagtctgcgcgcgtcctggccccaccagcaaagccgactgtctgaacaacgtgctggacgccatcacccaatttgagcgtagcgccaatttcgcttttgctggttttattctgcatgacgccgaagatgtgatttcaccgatggaattgcgtctgttcaactatctggtcgagcgtaaagatctgattcagatcccggtgtatccgttcgaacgcgaatggacgcacttcaccagcatgacttacattggaaacattcagcgactgcaccatgccgatcatcggaatgatgatgtcctgatccgccagggccaatgcttcctgcgtgatgcccgttttctcctgtcccatcaaaatgcaggtcgggcgagtgtaatcaatttcgcggaaatcgacagcgttatcagaaagatgggttgccagaatctgcatgccctggcctttgagatgagcgacggcatcgccaatggtgcggtgtgttttcacctgtacccagctgttactacccgccgctgccgaagccatgatgactgtgtgcgactgaaaaatgcgctggtcaatctcggcaacagtaaagactgggacgcgctggtaaaacgcgccaacgccgggaagctcgatggcgtgaatgtgttattacgcccggtgagtgcggaatcgctggataacctggtggcaacctccaccgcgccgtttatcacgcatgaaacggcgcgagcggcacaatcactaaacagtccggcccccggcggattcctgattgtcagcgacgaaggcagcgattttgttgatcagccctggccttcggcatcactttacgactacccgccgcaagaacagtggaacgctttccagaaactggcacaaatgctgatgcatacgccgtttaacgccgagggtatcgtcacaaaaatcttcactgacgccaatggtacgcagcatattggccttcatccgatcccggatcgttccggcctgtggcgctatctcagcaccacattgctgctactgacgatgctgggtagcgccatttacaatggcgtacatgcctggcgtcgttaccagcgtcatcgcactcgcatgatggagattcaggcctattatgaaagctgccgttcactggttatgttggcagccgtgagcctgccgctacaggcggcttcccccgttaaagtcggttcaaaaatcgataccgaaggtgcgctactcggcaatatcattttgcaggtgctggaaagccacggcgtaccgacggtgaataaagtgcaactcggaacgactcctgtggtgcgcggggcgattacttccggtgaactggatatctatccggaatataccggcaatggcgctttcttctttaaagatgaaaacgatgcagcgtggaaaaacgcgcagcaaggttacgagaaagtcaaaaagctcgattcggagcacaacaagttaatctggctgacgcccgcgcctgcaaataacacctggactatcgccgtgcgtcaggatgtggcagagaaaaataaactcacttcgcttgccgacctgagtcgttatctgcaagagggcggcaccttcaaactggcagcctcggcagagttttacccgcagagcgcgcggcctgcaaaatggaacagcgtgcgaacagcagttcagttccttccggggagcgttctgtacgcaggttgcgcacatagtcttctgcaccgagggcgataccgatcaaacgctcggaagcaacatcctgagcggtatcggttttcggcagacgcacaacgtccgcaccaccgcgaacgacggcttccagtaaatgattactcttgtattcataatggaccattaagcatggagcgaaaaatggcgactcactttgcccgagggattttaacggaaggacatctgatttctgttcgtctcccctcccagtgtcatcaagaagcccgaaacattccccctcatcgtcaaagccgttttctggcgtccagaggtttactcgcagaactgatgttcatgctgtatggcattggcgaattgccggaaatcgtcaccctgccgaaaggtaaaccggttttcagtgataaaaatttgccttcgttttccatttcctatgccgggaatatggttggcgtggcgttaacaaccgaaggtgaatgtggcctcgatatggaactacagcgtgcgacgcgcgggtttcatagcccacacgcgcccgataaccacaccttttccagcaatgaatcgctatggatcagtaaacaaaacgatcctaacgaagcgcgggcgcagctcatcacgctgcgccgaagcgtgctaaaactaaccggtgatgttttgaatgacgatccgcgcgatctgcagctgctgcccattgccggacgcctgaaatgtgctcatgtaaatcgggtaccgagatcgagtgtatcatgtcaacttctagagtccaggataaagatatggggattttgcccccaaatatag

SEQ ID NO: 138670 - DNA, 1758 bp, Homo sapiens
atggctcattcatcatcactcggtattatcgacctggtctatcccgcacactggcagccatacattgctcaggatctcggtcaacaaaccgatatcgatatctatctcgaccgccatgtagtgcgtcagggacgatatctttcgctgcatgatgaagtaaaaaactttccgttacagcactggctgcgcagtacgattatcgctgcgggctcgctgctggtgctgtttatgctgttattctggatcccgctggatatgccgctgaaattcactctctcatggatgaaaggcgcgcagaccattgaagccaccagcgtaaaacaactggctgacgctggcgtgcgggtaggcgatacattgcgtattagcggtacgggaatgtgtaatattcgaacttccggaacctggagcgcgaaaaccaattcaccttttttaccgtttgactgctcgcagatcatctggaacgacgcccgctcattgccattaccagaatctgaactggtcaacaaagcgacggcattgactgaagcagttaatcgccagctgcaccctaaaccggaagatgaatctcgcgtcagtgcctcattacgaattactgatgcgtttgctggtcgggtactgtcgcgcaaactgattgaagagaaactgtatacctgggacgaagaggtcaccagtaatgccgttgaagtgcatgtgcatcatctgcgacgcaaactcggtagtgattttattcgtaccgtgcatggtattggttacacattaggatccaccctggcagtacagcgagtccgtagaactgaatgggaggtacagaatcgtatcccttctggaactatattaaaggccttgatggaaggtggtgaaaatgggccctggatgagatttatgagagcagaaataacagcagagggttttttacgagaatttgggagactttgctctgaaatgcgttttcggatcgtgctgtacatattgttacatgtccgccacggtatcgccttcgtcagacagttctacttctacgctaccgtcagggaagacgaacacgtcaaccgcttcggtatcaccgaacaggttgtgcatgttgccgaggatctcctgatatgcgccgaccataaagaaaccgagcatcggcggattctctggatcgtactccggcattggcattgtcgtggcaataccgtcaccatcaatatagtggtcgatagcaccgtcagagtcacaggtaatatccagcagcacagcgcgacgttccggcacttgatccagcccttccagcggcagaaccgggaacaactggtcgatcccccatgcgtccggcatcgactggaacagcgagaagttgacgtacattttgtccgccatacgttcctgcagctcgtcgataatcggacgatgagcacggttttgcggatccagctgcttttgcacttcatggcacatgctcatataaagctgctcagcccatgcacgttcttgcaggctaaaaaattccgggagatttgcccggaagatggaggggaagcctccttctcaagtgtcattggcacccccttctatgtgatggagtactgcccaggtctcatctacaaagacccttccctgccaggcttggagcccagccacagacgagccatatacactgccatgaacacagtcctgtgcaaaattcacagtgtggatctgcaggctgtgggacttgaagactatgggaagcaagcgaaggaacttgatcataatggatttgtctttttctga

SEQ ID NO: 138671 - DNA, 4023 bp, Homo sapiens
tcagcagacgtcttctgaacgtgaactggagatgtctaccgagattgcacgtctcaaacgccagctggcagaacgggatgaagagctggctatcctccaaaaggccgcgacatacttcgcgaagcgccttgtatctttaagcgcatatgtatcggtatcattacccttggaatcctgcagttttactaagctaacagcaccaaggttggcagttgcggaacctgcagtattatcaatctgaacaggtgtaccgcctgaagtgatagttgtagctttagtagtatttgcatcagttacagttgcatttgccgttgctccagtcgccattgtcactgtaccatcattagcaactgttactgcgtaatacttcccatcgttatcaccaccggtgattttcgcatagtaatcattaccattatcagtataaacaccctcaattgaagctgggttagttccgccagtatcagtggctgcttccgtagaaagggtaattccagtaagtttaatattgtttgtggtggtagcaccaaaagcagttactggagcactagtggtaactgtatcgttagttttaacgctaaaaccatcaaggccaagagttttagcatcaatctgcttcagatcgatagtgatagtctggttatcatttgcgccaacctggattttcatggagccattttttgccagcacgttcacgccgttgaactgggtctgaccagatacgcggtcaatttcatccagacgggatttaatttcgtcctggatagcagacagatcagactcagagttagtaccggtagtggcctgtaccgtcagttcacgcacacgctgtaagttgttgttgatttcggacagcgcgccttcggtggtctgcgcaacggagataccgtcgttggcgttacgggccgcctgagtcaggcctttaatgttagaggtgaaacggttagcaatcgactgacccgctgcgtcatccttcgcgctgttaatacgcaagccagaagacagacgctcgatagaactcgacagcgcagactggttcggatctttttctgttttatccatcggaagccaggactgtgttaactcacagaaacgatcgatattagcttcactcttagcactcatttttaaggtcagcgacttttgcttctggctatagttcgcctccattaactgcagttcagggtgttccagcagaagtgtttgtaaatgatagagcaacggcacagcttcaggatattgctgagcgagttgctgcttaaagtaaaaacgaaaattgtgggtgcgtttgatctgcgggaaataacgttgccaggtttcttgctgttgttgctgaagttgatcttcaatcttaagcgtatgccagagcgcgatgctccggctgccaacaaaagaaagaatggcgagaacgagacagcttactgccaggcgggcgagccattttcccgatttgcttacagttttctgtttacgaaaaataccatgcagcatgtcatagcgctggaatgcaatatcggcagaatacaaactcagtgatggtatttcaggatgctggataagtggattggccgctgcaacgccgtgaggtactacaccataacaaagcatattctcaggcggaaactgggcagcaagatgctgtaaccagtgttcatccagttcgttgaaggcatgtgcggcactgcgaatgagccagcttgtttgctggttaaccagagtccagctatctacttcccagggaagatagcagccatctggcaaaacccgcgtcacgttgagtccggcagtatgtaaacgctcaagatagcgactgagtttctccgactgaatgcctatcacctcgacaccactatatgccgtttgaagaggccgcccggggatatgagattttcgaaaaacgtgaagaggagtgccgtaaggtgattctggtacccggtgcacaaagcgcagaggcggcgcagaaggcggtttcaggtctggtgaatgcgatgccggggggaacaatatgatcgtcaggagtggttttcgaggtaaaggacagccatgacgataatcgccgccataatcagacatcctatcaggatgtaaaatgcttctgccatggttattcccacaaacgaaacggaataattttgcagcaaaagtgaacagtgagaaccaggaaaaattgctgattttgcgtaaagaggatgcgagtgcatcctctgggtgaggttgtggcaagaatgagtttgcagaaagcggagcgttgatggcgtcagctttgatcgagatctgaatttcagtcaaatacgcagggttaccctggcacgttagcttaactgctttcacgttctcttttccccagcttttggcaaaggcggcgtcaaagtcacggcggctcactgttttaccgtaattatccgcaaggaattttccgcgttcgctctctttaatttcttgattcaggcgtaccatcgtaccgaagtatgcgtccggatcaaaaccaaagcaggcaccgtgtttggcatattcgtagcgttccaggcaggaacgtccgccagctcctggcatgacttcacttagtttagcggccgtttccagtgataatccggtttccggcgatgaacacattcggctggcgcgcgcttctggtagattcgggattgggcgagtagcgcaaccgaagcgcatccagcggcgttcatcaacaccacgggcagcaaatgatgccgtcattctgggcaataaagttgtggcgctgtcgtgatcgaagttgatgaccccgttatcctggttccagaagaaggcattctgatcgccggcattattagcgctgactaccagtgacttcgcagaaacatcaatcgttccgtcattgataaaacgaccatttccgccccacatattaacggctccgttgtgggaagaattactgatgttcatgtgaccggtattataaagcgtaccggactggttgatgtgcacagcattcttgtcgttatcaagaataaactcgccgcggttattgaaagctgaattattattaacttccagcatcccggtgttgttaccctcactactacttccgaggttccaggttccttcgttatttgccactgcagtacctgtcagcgcagcacctctcataatcgccccgtcagtttgattattaaagaccccgccagccgacatcatccgccctgttacactgccactattattgaatacccccgcgttctgcacgattttattgatggttccggtgttgttcactaacgaactatcagcaccagcattcatggtaatttgcgcagtcatttctccggcattattgaggattccaccgctaacatcgacgttattcgtcatcaccccggcatttttaatgacggcacccttgtcaagttttactaagttattgatgatgccaccgctggtattttccagaagaccgcttgataccgtaatttgatcaccggaaagcgttccgctattaacaacattcccagccagcttatcagtcacagcagcagatttatttagcgttacagtttctccgcttcgtgtaatcgtatcgccaccggtatagatcagtgaggtgaaatcatctgtattattgtactcattccccgattggcacacgccgaaagtgcagattgtaccatagttaacaattgttctgtgcatcgttataaacgctgaccagtccacattgatattgatacaccgtctgttctccaactcgctggcaccggccattgttgccgcgtccatcaaagtactggagatgtcgaaagcgggcagcgaatgcgtgaccgtctgtgggcgaacgcgcgtcagttccgtgagcaaatgtcggcggcgggctttaccctggcgtgagccgatcacgccattattccggtcatgcttggtgatgcggtagtggcgcagaaatttgcccgtgagctgcaaaaagagggcatttacgttaccggtttcttctatccggtcgttccgaaaggtcaggcgcgtattcgtacccagatgtctgcggcgcat

SEQ ID NO: 138672 - DNA, 3959 bp, Homo sapiens
atgaagcggtaccgccctcgagagattctcccgtggaaagtacccccaggaaattatacccctaaaatattcaaaattaaaggaaccggacataaccccatgagtgcaatagaaaatttcgacgcccatacgcccatgatgcagcagtatctcaggctgaaagcccagcatcccgagatcctgctgttttaccggatgggtgatttttatgaactgttttatgacgacgcaaaacgcgcgtcgcaactgctggatatttcactgaccaaacgcggtgcttcggcgggagagccgatcccgatggcggggattccctaccatgcggtggaaaactatctcgccaaactggtgaatcagggagagtccgttgccatctgcgaacaaattggcgatccggcgaccagcaaaggatgctgtagatctggaaatcgcaacggaggaagaaagatcgttgctgtaagcctgaaaaaagtatcgggtgctgctaaaccgtgtggacacttccgtagcaccagatatcgagtggcttattcaaccataataaacaataaagcaggaatatggagcgcatttgagggtgtatctgcaactcggccaaaccccactccgagggcaagtccggcagttcgcactctctcgcggggtacgcccgagcctcgaaaaatctcgacggacgcagacaatctcgctcagggttctttaaaagaacgtttgcccgcctggctgtggggcaagaaagagaacagtaagtgggaagtgctggacagcaattcggcctccgatggtgatgtctggatggcctggtcgttgctggaggcggggcgtttgtggaaagagcagcgttataccgacatcggcagcgcgttgctaaaacgtatcgcgcgggaggaagtggtgacggtgcctgggctgggttccatgttgttaccgggcaaagtgggttttgctgaggataacagctggcgttttaaccccagctacctgccgccgacgctggcgcagtatttcacccgctttggcgcgccgtggaccacgctgcgcgaaaccaatcaacgtttattgctggaaaccgccccgaaaggtttttcgccagactgggtgcgctatgagaaagacaaaggctggcagctaaaagccgaaaaaacattgatcagcagctacgacgctatccgcgtttacatgtgggtaggcatgatgcctgacagcgatccgcaaaaagcgcggatgctcaaccggtttaaaccgatggcgacattcactgagaaaaacggttatccgccggaaaaagtggatgtggctacggggaaagcgcagggtaaaggaccagtcggtttttctgccgccatgctgccctttttacaaaaccgcgatgcgcaggccgttcagcgccagcgcgtggccgataactttcccggcagcgatgcctattacaactatgtgctgaccctgtttggacaaggctgggatcaacaccgtttccgcttctcgacaaaaggaatgcgcaaattcacactaaacatattcacgctttccctcggtctggccgtcatgccgatggtcgaggcagcaccaaccgctcagcaacagttgctggagcaagttcggttaggcgaagcgacccatcgtgaagatctggtgcaacagtcgttatatcggctggaacttattgatccgaataacccggacgtcgttgccgcccgtttccgttctttgttacgtcagggcaatattgatggcgcggccatacgagtgactgctgtatgcacgttccctctagaggatccccatgaagaatatgcgctgagtcgtccgcgcgggctgcgtgaagcgttgctgatcgtcgcctccttcctgatgttctttttctgcctgattaccccggatgtatttgttccgtggctggcaggcggcgcgttactgctgctgggcgcaggtctgtgggggctattcgcgcccccggcaaaatcctccctgcgggaaattcatcgtgtgaaacgaaactccccgacgttggggattgtttggcgaaaacgatcaggaacagatcaacaatatttcactcggtattatcgacctggtctatcccgcacactggcagccatacattgctcaggatctcggtcaacaaaccgatatcgatatctatctcgaccgccatgtagtgccactggctgcgcagtacgattatcgctgcgggctcgctgctggtgctgtttatgctgtattctggatcccgctggatatgccgctgaaattcactctctcatggatgaaaggcgcgcagaccattgaagccaccagcgtaaaacaactggctgacgctggcgtgcgggtaggcgatacattgcgtattagcggtacgggaatgtgtaatattcgaacttccggaacctggagcgcgaaaaccaattcaccttttttaccgtttgactgctcgcagatcatctggaacgacgcccgctcattgccattaccagaatctgaactgggtcaacaaagcggcgggcattgactgaagcagttaatcgccagctgcaccctaaaccggaagatgaatctcgcgtcagtgcctcattacgttcagcaattcaaaaatccggcatggtattgcttgatgattttggcgacattgtactgaagacagcggatttatgttctgccaaagatgactgtgtgcgactgaaaaatgcgctggtcaatctcggcaacagtaaagactgggacgcgctggtaaaacgcgccaacgccgggaagctcgatggcgtgaatgtgttattacgcccggtgagtgcggaaatcgctggaataacctgggggcaacctccaccgcgcccgtttatcaacgccatgaaacggcgcgagcggcactatcactaaacagtccggcccccggcgaattcctgattgtcagcgacgaaggcggtaccgaccctagctggcccagcaatcgaatccggtgaaattacggcgttatagccttcctctagcaccgcctgtgttcgaacgagttcatctgcgagtcgtttctcatcaggtagttgcatctgagattcgcttgccagaacggtgttaggcaaacctgccagagcataatgcgcttctccggctcctttctctgcacagagaaccagaccgatgggcggattttcatccggtagcgtccagtgctctttggcgtagttgagatacatattcatctgtccggcatcgctatagctgaatttgcccacttttagatcgacgattagcaggcagcgtaaacggcggtggaaaaacagcagatcgacacgaaaccagttgtcatcaatgcgtaaccttcgctgccgaccaacaaaggcaaaatcatccccaagttccagcatgaaatccatcaggtggttgatcagcgcctcctcaaaatcggattctgaatattcatctttcaattccagaaattcgagcacaaagggatcgcgtatcgcctgttgcggaagaatatgcgtctcggcaggagcgtgttgttgcagcatggctgatttgtcatgtgacagtagtgtccgctcataaaactgggtcgcaatttgccgctctagctggcgaacagaccagccacagcggagcgtctctttttcataaaagctgcgggcgtcagcgtttttaacggaaagtaaacggacgtaggtggaccctgggtgatggggggatttacaaatccaggataaatagctagtagtggcaacaatttcttctggtttcagtaatcctttctcaattaacggtaataattctcccagccatgcgtgaacgtgggtctgtcccattttaaacgacaaccctttatcaaaggcgtcgccaaagcaggcaccgtgtttggcatattcgtagcgttccaggcaggaacgtccgccagctcctggcatgacttcacttagtttagcggccgtttccagtgataatccggtttccggcgatgaacacat

SEQ ID NO: 138673 - DNA, 1425 bp, Homo sapiens
ggagtcctgccaggcccacctggggtccccacagccaacccatgcacgggacagccccgggcgactgagaggggatacgaaggtcttctgggccctctcatcccaggccagcgtccaccacaactcaaagacagcggggggactgcacccaccactcctcccaagaagcagtggttgcacatttccaacatagcgaggaggaccacatgagacccctgcagccacggatggagccgccagacctgcccttccagggtgcacgggctgggagccccccggtgtcacccggcctttttctgggggcagcagtgggttcagggcagacagtgggaggaagtcagtggaggatgttcccagccaaggggatgagctggatcccgggcgcctggtcagcctggctcgcggcacccttcacagacaccactgatcggaagacgtaggggcttctccttgaaataggagctctccaggcagtccccggccgtcgcccttttcttagggtcgtacatgaacaggaagtgcagcaggcgcagcccggcctccgacagccatgggaacttgtgcttcaggttgttgtagggctgcttccggaggctgtactggccgaccagtggcagcttggaaaagcccggccagatgttctcactgggcgtgcccagcagctgcacgatcaagtcgatctggtggatctcggaagtgccggggagaagaggcctgtgcgccagcagctcggccagtatgcagcccacagcccacatgtcgatgctggtggtctgcgtggtggttcccaacagcagttcaggggctcggtaccagagagtgaccaccttgggggtcattggctttactgggacaccataggcccgggccaggccgaaatccgctgtcttcacacaacccttgtcggtcatgagcaagttggaaaccttcaggtccctgtggataatgaagttcctgtgcagatactggaggccccggagcacctgcagcacgatgcacttgacctgagcctccgagaagggtgttggcatattctccaggaggctggccaggtcctgctcacagtaacccatcaccaggaagatgctctccaggtggttccccacaaccacctccttcagctccacgatgttcggatgacgcaggcggagcagcagcgtgatctcccgcaagctgctgatggggatgccatccttctccttgtccatccgcaccttcttcagtgcgacaatctcatctgtctgggtgtcccgggcccgatacacaatgccgtaggtaccctctccaatgcggttcagcttctcaaactccttcacactccggcatcgtcccaggaatacacttcagacggatctgctcgcactccagatctggctccgccatgccgagcgctggccccgcctctcttgcgcgcaggcgcagact

SEQ ID NO: 138674 - DNA, 2853 bp, Homo sapiens
  misc_feature (1)...(2853): n = a,t,c or g
atggggaagaaacccacacccttacccaagccccaccccgcaccttggtgggaccaggccgcccaacgagaatttgatttagaaaacggtcaccggtcccaggatgccaaatggacctttagcccccggcggagagcagataccaggaatcgctatgctgcaggaaagctgggagccgaagtggcatacagtcggccccgatggatgaacgtgtgcgttgatgctgaaaaagtgattggtatttccggacatctgctggcacctgaggtgtgtattgttgttggcgcttctggcgcagcagcgttaatggcgggcgtacgcaatagcaagtttgtggtggcgattaatcatgacgccagcgctgcggtatttccacaggcagatgttggcgtggttgatgactggaaagtggtgctggaggcactggttgaaatccggaaacaagctttagaaaagttttggacccattttggcttttatacgcccttttctaaaataggaatcattttgccaggcacgtatcaggcgattggtatcctgatgatgagtaaagttggcaccgcccgcccaccagataaaacgaatatccgggaaatgtcggttcataccgttgtgttgatatgcgccaccagggttttccagtgcttcaacaatgcgggcaacaggatgtatatccaccgcatcggcagccacccggcaagctgccttgcatggaagagagcaccgcagaacgccgcgtggggtaccaccattggcaaaatgcatgatggtattttggtggaaaatagccgccagctcgcggattttccgtgcgccaacaccacaaatctctgctgcccattcggcggtttgcgctattccgtaatggaccgagacacgaccactcgaggctctaccattgtgcgcaaaggggggggcaaagaaacttctcaactgaacaaactggatgacccagactgttctaccagggaggcgaacaaggacccacaaacaagcctcacccggggggtcccagggggcagacccaccggggaggcccccaccaaaaaagaaggttgcgagttgtcagtatctcatggtatatcagaaactaaaaattaccagatgcatatccaagggcctcaaggaaagtatgagttcgacattactctaacaaggcttttggtggaagaagagaaaaaagagaaacctacacgaaaaatccgaacccttttctgcggtccccgcaacggtcttcaaggaaattaccacccgggaaacccatcatgggaccgctctgttttgcacatgggaaatccggggggaattccggttcttacccccgttaaccaactttggaaaaccgtggccaatcaatttcaggccgaagatcgtcgacgttttgtcgtcaaaattttatcgcctggaaacgttgacaagccgatcaaatcctcgaagacatcgaatttgcgttgccagctggtaaatgatgaagttccggtcgcagcacctgtggcctttacgggtcagactttatggaatcatcagggattttatttcgctgtttgtccaagcgtcggtggtcgccagttcgaagctgataatatcgatcagatggaagcggttgggcgttatttagggcgtatgcaccagacggggcgcaaacagctttttatccatcgcccgaccatcggtttgaacgaatatctcattgagccacgcaagctgtttgaggacgctacactgataccttccgggttgaaagcggcattcctgaaagcgacagatgagctgattgccgccgttacagcacactggcgagaagatttcaccgttctgcggctacatggagactgccacgccgggaatattctctggcgcgataaaccaatgtttgtttttctggatgatgcaccccatggtccagccgttcaggatttgtggatgttgctcaatggcgataaagccgagcagcggatgcaactggaaactattattgaagcttatgaagaatttagcgagttcgacaccgctgaaatcggactgattgaacctttacgcgccatgcgtttggtttattatcttgcctggctaatgcggcgttggcgtattcgcagctggccgttcgtcgtactggcgggtattaggttttgggcacggattcgtttgctggatatccagcagaagaaagtggagaggcggaccggcgtttatttgccgagttatggcggtgtcgtagcgaactcttatctgccatcaaacgggctttctgcgttggggctgtatgcctgggcgcgggtcgatgaatcttccgataataattcattgcttaatccggcgaagaaattcacttatcaggcaccgcaaaacgttgaggacacttatgtcgtgtttatcatcggtgaaaccacgcgttgggaccatatgggtattttcggctatgagcgtaataccacgccgaaactggcccaggagaaaaatctggcggcgttccgtggttactcctgtgataccgcaaccaaactcgtactgcgttgcatgtttgtacgtcaggggggcgcggaagataatccgcagcgcacattaaaagaacagancattaaaaaggttctgaagctgtttggattcagccccgccctctacgctatgcagagcgaaatgtggttctacagcaacacgatggcggacaacattgcttatcgtgagcagattggtgcggagccacgtaatcgtggcaagccggtagatgatatgttgctggtagacgaaatgcagcaatcgctagggcgcaacccggatggtaagcatctgatcattctgcataataagctgtgcctcccagagtacgataaaggtatgcggagattacgctag

SEQ ID NO: 138675 - DNA, 1725 bp, Homo sapiens
atgaaagtggacctccagtgtttgtccggagtcccgcgtgtaaaaggtgcccggggcgcaagaggagaacgcggcaaacccccgggagaaccccgtacacagtccttgaccgccagcgagcgaaagcaggacactttaaccccggaaggcctgggaaaggtctcaacgcttgcgaaaaacctgggatgcttcagtggcaccttgcggggtaaagtacaaggccactggatggaattcaaaagggaccacacctggactcgcgacatcgatgtcataaaggacattggtttaaactttcctgacgtgcactttgtgcaagaaggaaaatgcatttggaaattccctgcgttgcctatatcctgtgacggtttggatgagataggtatgatatgttccttgactatttgggttggctatgacatgcaaaacagtagccacagcaccatacaccgcatgtcgtggaacgatacgctggatgaacgtaatagctggggcatgtctgccggactgcaatccgatcgtccggacaatggagcccaggtgagcggtaactatcagcacctgagttcagcgggtgagtgggatatttctggtacctatgccgccagtgattacagttccgtcagcagcagctggagcggttctttcaccgcaacccaatatggtgcagcatttcatcgccgcagctccaccaatgaaccacgcctgatggtcagcaccgatggcgtggcagatattccggttcagggcaatctcgactacaccaaccattttggcattgcggtggtgccgttgatttccagttaccagccttccaccgtggcggtgaacatgaatgacttacccgacggcgaaacagttgcagttttcgtcatcaaggaaacatggattgaaggcgcgataggttacaaatcactggcttccgatccggtaaagacgttaacgtcatcatacgcaacgccagcggtcagttccctcccctcggtgcggatatccgccaggatgacagcggcattagccgtattcgcagctggcggtcgtcgtactgccgggtttatggtttgggcaccgatccgtttctgggatatccagcagaagaaagtggagaggcgaccggcgttgattggccgagttatgccggtgttcgtagcgaactcttatctggccatcaaactgggctttctgcgttggggctgtatgccctgggcgcgagtcgatgaatcttccgataataattcattgcttaatccggcgaagaaattcacttatcaggcaccgcaaaacgttgatgacacttatgtcgtgtttatcatcggtgaaaccacgcgttgggaccatatgggtattttcggctatgagcgtaataccacgccgaaactggcccaggagaaaaatctggcggcgttccgtggttactcctgtgataccgcaaccaaactcatactgcgttgcatgtttgtacgtcaggggggcgcggaagataatccgcagcgcacattaaaagaacagaacattttcgcggttctgaagcagttaggattcagttctgacctctacgctatgcagagttttttgtggttctacagcaacacgatggcggacaacattgcttatcgtgagcagattggtgcggagccacgtaatcgtggcaagccggtagatgatatgttgctggtagacgaaatgcagcaatcgctagggcgcaacccggatggatttaaatga

SEQ ID NO: 138676 - DNA, 963 bp, Homo sapiens
tcaaagatcagatggttgtaggtgtgtagtattatttctgagggctatggcgatgcccacgcccaccagtaccggtggacaggcgtttacggcgagggtggagatattttcgaagacgaatttcaccacgccttcgtagccttcttcttttcgtactagcgtgtcagggtcttcgccatcagatatgctgatgtaatcgtgaacagtgcgctggaaaaactgcgtaaaggttcgcggcaaaatctcaccgcaccggcaacgatgatcgactggcgtcctgttgttcatgaaatgcgcctgttcaaatcgccagaagagattgccgtactccgccgcgcgggagaaatcaccgccatggcacacaatggcataagccagctgatgcgagcgtgacggcgcgagcaggtgcgaaagcaggtcatagtgatccggtggttctgaatggaagggccatcgctcaacggataaaaggtactccggggataacaggctgataccgcccaagagttcatatcgacggcggtgtttggcacctcgatgtcggctcatcacatcctggggctgaagtaggtcccaagggtatggctgttcgccatttaaagtggtacgcgagctgggtttagaacgtcgtgagacagttcggtccctatctgccgtgggcgctggagaactgaggggggctgctcctgaccccatgccgaactcagaagtgaaacgccgtagcgccgatggtagtgtggggtctccccatgcgagagtagggaactgtggcagtatggccattttcacgatatgattcttcctatccatgaggatgaaatgtttttcctttagtttgtgtcctcttatttcattgagcagtggtttgtagttctccttgaagaagtccttcacgtcccttgttagctgtattcctaggtattttattctctttgtagcaattgtgaatgggagttcattcat

SEQ ID NO: 138677 - DNA, 1870 bp, Homo sapiens
atgaggctgcgctgcacgcggcgcgggagggacacacttccgtgcacactctcaacttcgagtacgccgtggagcgcgtcctcgcaggtccccayggctttcagctttgggaaagcagtgggttcctgccagaggagtgggggcagctgctgtgccagacactgcaaaacacacctggcttctctccgacagccctgcggggtcgagaggactggcgctgcctgtgtcttactgaaaatttattttcgtgtaacccatttaccttttatgtggaaatcgaaaagccttttgataatagtagcaaagcaggaaggactgagtgggaacccacaagcccagttgaaagaaaatacatgacgtacttgagtgctcaggacccacgagctgattcaagttgtacagaatggacacttacagatgtgtggaaaatctgagacaggaaatgaagcctcaccaggactgccaaaaagagcaagatcctgtccaaggaagaacagaaagtggttgcgtttcatgagtcgggccacgccttggmgggctggatgctggagcacacgaggccgtgatgaaggtctccataaccccctcggacaaaacgccgccctgggctttggtcagattgctccccaaagaccagcacctcttcacccaaggagcagctttgagcggaggttcattgccctgggaggacgggcctcgggaacacttttccctcaacgaggtcacttcctggggcacaggacgacctgaggaaggtcacccccatcgcctactccatggtgaagcaggttgggatggcacctggcatcgggcccatctccttccctgaggcgcaggagggcctcatgggcatcgggcggcgccccttcaaccaaggcctgcagcagatgatggaccatgaagcaagactgctggtggcccaaggcctacagacacaccgagaaggtgctgcaggacaacctggacaagttgcaggcgctggcaaacgcccttctggaaaaggaagtgataaactatgaggacattgaggctctcattggcccgccgccccatgggccgaagaaaatgatcgcaccgcagaggtggatcgacgcccaggaggagaaacaggacttgggcgaggaggagaccgaagagacccagcagcctccacttggaggcgaagagccgacttggcccaagtagttgggaggtgttggctgcacgtgcgggtggtccgggaagtgagggctcactcagccaccctgagttgcttttcagctgaggtttgcacttcctctcgcggccctcagtagtccctgcacagtgacttctgagatctgttgattgatgacccttttcatgattttaagtttctctgcagaaactactgacggagtcctgtgtttgtgagtcgtttcccctatggggaaggttatcagtgcttcccgagtgagcatggaacacttcgagttcccagggttatagacagtcgttcccagtgtggctgaggccacccagaggcagcagagcattcagactccaaacagacccctgttcatgccgacgcttgcacgaccgccccagttcctgtggctccctcggaatgctaaggggatcggacatgaaaggaccctgtgagccgattgtcctatctccagcggccctgtcatccagctcactcatcaatggggccacacagtcaggcccaggcactgggctccggaggactcaccactgccccctgctgccatgtggactggtgcaagttgaggacttcttgctggtctagtcacgcatgcagtgttggggatgccttggtttttactgctctgagaattgttgagatactttactaataaactgtgtagttggaaaatctaaaaaaaaa

SEQ ID NO: 138678 - DNA, 2496 bp, Homo sapiens
atggcagtcactctcggatcgcaactggcgctcaccactttggggcatcacttcgtttaccgactgcgtagtgaatttatcaagcggattctggatactcacgtcgagcgcattgaacaactcggtagcgcctcgttgctggcggggttaaccagcgatgtgcgcaatatcaccattgcttttgtgcgtctgccggaactggtgcaggggatcattctcactatcggttcagcggcgtatctgtggatgctgtcgggcaaaatgttgctggtaacggctatctggatggcgatcaccatctggggcggttttgtgctggtggcgcgggtgtacaaacatatggcgaccctgcgtgaaaccgaagacaagctgtacacggattttcaaactgtacttgaagggcgcaaagagctgactctgaaccgggaacgcgccgagtatgtgttaacaacctctacattcctggctcgctaccggggatctctagagtcaatccgcatggtttacgcgccgacccaggagcacggcaagcaggttaaaatcgaagaccgtgacatcttctcgctgaccaacgaagaagtgcaggaactggcaaaacaggccgtacaaattgagaaacactacggtcgcccgatggatatagagtgggcgaaagatggccacaccggtaaactgatcattgtgcaggcacgtcctgaaaccgtgcgctcaatcggtcaggtcatggagcgttatacgctgcattcaaaggattatcgccgaacgcgtgctatcggtcatcgcatcggtgcgggtacggtgaaagtcatccatgacatcagcgaaatgaaccgcatcgaacctgacgacgtgctggttactgacatgaccgacccggactgggaaccggtcatgaagaaagcatctgccatcgttaccaaccgtggcggtcgtacctgtaacgcggcgatcatcgctcgtgaactgggcattccggcggtagtgggctgtggagatgcaacagaacggatggaagacggtgagaccggcggtatcgcctccatcaaccgcgcggctatgtacggccagaaatgtgcgctgattgaagccaaagagctgggcggcacctgcgtaaatgttggctgtgtgccgaaaaaagtgatgtggcacgcggcgcaaatccgtgaagcgatccatatgtacggcccggattatggttttgataccactatcaataaattcaactgggaaacgttgatcgccagccgtaccgcctatatcgaccgtattcatacttcctatgaaaacgtgctcggtaaaaataacgttgatgtaatcaaaggctttgcccgcttcgttgatgccaaaacgctggaggtaaacggcgaaaccatcacggccgatcatattctgatcgcacaggggtcgtccgagccaccggatatttcgggcgttgaatacggtattgattctgatggcttctttggccttcctgctttgccagagcgcgtggcggttgttggcgcgggttacatcgccgttgaactcgcgggggttaataacgggcccgccgacagcagcgttctgtttaaccgcgttcgcgacctgacggcggagatctggtttggccgtcgcttaggccaggatgccgcgccagagaaactgggcgttgaccgcgcactggcattcagcgaaatcaatcagcaactttatcaactacttaacggcctggatgtggtttaccatgcccagggcgaatatgcatatgctgatgtaatcgtgaacagtgcgctggaaaaactgcgtaaagattgccgtactccgccgcgcggagaaatcaccgccatggcacatacacgggcgatggaaaaatgccgtccgggaatgttcgagtaccatctggaaggcgaaattcaccacgaatttaaccgccacggtgcgcgctatccgtcctataacaccattgtcggcagcggtgaaaacggctgcattctgcactacaccgaaaacgagtgtgaaatgcgcgacggcgacctggtgttgattggaattccagctcggtaccggggatctctagagtcaaccaatatcacgcagcagttttttcgccggattggtaccggaaaacagatcgcggaatccctgcataccagccagcatcaacgccgcactgtgcttgcggctaccgtcatagcgacgcagataaatgtactgcccgatgtctttcccctgacgatgcaaccgtttcagttcggcaatcagctctgcagcatccataaagccgagatttaccccctgccccgccagcgggtgaatggccagaatgccttcgccatggaaaacctgccgcgccaccgcatcatgcgtgtcttccgtgcgaatggtcgctaccagcgcgtgatgctgataaatccagaaagtcagcggaatatcggctttgttgcgaaccaggaatttagcgcgtcgcgcaataaccagacgcggcgttcgcccgcgcgcctgcatttcggcacttag

SEQ ID NO: 138679 - DNA, 1566 bp, Homo sapiens
atggcggcctgccggccctgggcaatgatgggcttatcacccgggccatcggctgttgaaggtgtactgggtcccccagcattgccatcccgccggcgctgcgctcgatttctcaacgggccttatcttgctttccgcggggcatggctcgggaaacttctgaagtcatattcttgtgtggatgtacagaaatggcatcggagtcgcaaaagactatgcgctggtattttctggtacaaacttgctgcattacaaggccatagtgacgcgcaaaacaatctggccgatctttatgaagacggaaaaggcgttgctcaaaacaagacactcgccgcattctggtatttgaaaagcgcacagcagggtaatcggcacgcccagtttcaaattgcatgggattataacgctggcgaaggggtggaccaggactataagcaagcgatgtactggtatctgaaggctgccgctcaggggagcgtcggcgcttacgtcaacatcggttatatgtataaacacggacaaggcgttgagaaagattatcaggctgcctttgaatggtttacgaaagccgctgaatgcaatgacgccactgcctggtataacctggccattatgtatcactacggagaaggaagacctgtcgatctccgacaggctctcgacctgtatcgtaaagttcagtcatccggaaccagagatgtcagtcaggaaattcgtgccgccggcaattctgctctgctcggtgtgtttgcgtttttcctgcccgacacgccaccaaaaagcaccggcaaaatggatattaaagtcatgctcggcctggatgcgctgatcctgctgcgcgataaaaacttcctcgtctttttcttctgttcattcctgtttgcgatgccactagcgttctattacatctttgccaacggttatctgaccgaagttggcatgaaaaacgccagcggctggatgacgctcggccagttctctgaaatcttctttatgctggcattgccgtttttcactaaacgctttggtatcaaaaaggtattattgcttggtctggtcaccgctgcgatccgctatggcttctttatttacggtagtgcggatgaatatttcacctacgcgttactgttcctcggtattttgcttcacggcgtaagttacgatttttactacgttaccgcttacatctatgtcgataaaaaagcccccgtgcatatgcctacccctgcgcaggggctgattacgctctgctgccagggcttcggcagtttgctcggctatcgtcttggcggtgtgatgatggaaaagatgttcgcttatcaggaaccggtaaacggactgactttcaactggtccgggatgtggactttacggcggatcctgcaggcatgtgggatacacggctttatcgccccgagcatcaacattgaagagctgaacgagcaggctgcgggtctgaacatcgtgaccgaaacgaccgatcgcgaactgaccaccgttatgtctaacagcttcggcttcggcggcaccaacgccacgctggtaatgcgcaacgtgaaagattaa

SEQ ID NO: 138680 - DNA, 1863 bp, Homo sapiens
ctgttaaaaaagcttttatccaacaagagcctatagcttcgctcagcatcagagccacggcctcctgttgggtcctccgtgtggggagcagggatccagctcagcctccagcccagggctctcctggtagctcggggtatcctcaattgtggctcccaccccataccttgtccctcttgtcctcatctggagtcctgccaggcccacctggggtccccacagccaacccatgcacgggacagccccgggcgactgagaggggatacgaaggtcttctgggccctctcatcccaggccagcggtccaccacaactcaaagacagcggggggactgcacccaccactcctcccaagaagcagtggttgcacatttccaacatagcgaggaggaccacatgagacccctgcagccacggatggagccgccagacctgcccttccagggtgcacgggctgggagcccccggtgtcacccggcctttttctgggggcagcagtgggttcagggcagacagtgggaggaagtcagtggaggatgttcccagccaaggggatgagctggatcccgggcgcctggtcagcctggctcgcggcacccttcacagacaccactgatcggaagacctggtgtgggaatacaggcgtgtgccaggcccaccgtcagggtttacagcgcttgctctggccctcggaggtggctggggcggcccgcttgttgcggtggtggggaaaggtcggcatgagctccggctcacagggtaggggcttctccttgaaataggagctctccaggcagtccccggccgtcgcccttttcttagggtcgtacatgaacaggaagtgcagcaggcgcagcccggcctccgacagccatgggaacttgtgcttcaggttgttgtagggctgcttccggaggctgtactggccgaccagtggcagcttggaaaagcccggccagatgttctcactgggcgtgcccagcagctgcacgatcaagtcgatctggtggatctcggaagtgccggggagaagaggcctgtgcgccagcagctcggccagtatgcagcccacagcccacatgtcgatgctggtggtctgcgtggtggttcccaacagcagttcaggggctcggtaccagagagtgaccaccttgggggtcattggctttactgggacaccataggcccgggccaggccgaaatccgctgtcttcacacaacccttgtcggtcatgagcaagttggaaaccttcaggtccctgtggataatgaagttcctgtgcagatactggaggccccggagcacctgcagcacgatgcacttgacctgagcctccgagaagggtgttggcatattctccaggaggctggccaggtcctgctcacagtaacccatcaccaggaagatgctctccaggtggttccccacaaccacctccttcagctccacgatgttcggatgacgcaggcggagcagcagcgtgatctcccgcaagctgctgatggggatgccatccttctccttgtccatccgcaccttcttcagtgcgacaatctcatctgtctgggtgtcccgggcccgatacacaatgccgtaggtaccctctccaatgcggttcagcttctcaaactccttcacactccggcatcgtcccagcctgtgttccggaggcaccgtgaagaagccctccttacgaatacacttcagacggatctgctcgcactccagatctggctccgccatgccgagcgctggatcctctgcttgtgctcttctcgacacgcttatttctgggtgtccaaatccttgtcacacttcctgaactcaaagaaatgccaggccaggctgggggcggtggctcac

SEQ ID NO: 138681 - DNA, 2474 bp, Homo sapiens; identical to SEQ ID NO: 120341

SEQ ID NO: 138682 - DNA, 2794 bp, Homo sapiens
atgacgtacttgagtgctcaggaccacgagctgattcaagttgtacagaatggacacttacagatgtgtggaaaatctgagacaggaaatgaagcctcaccagtcaagtgcatcgtgctgcaggtgctccggggcctccagtatctgcacaggaacttcattatccacagccaggagcagaccatcccagaccccagcatctctgaccagcaggagacaccactgctggcgggagacatggctcagagagggcgtcgtggtggtttttactacgttaccgcttacatctatgtcgataaaaaagcccccgtgcatatgcgtaccgctgcgcaggggctgatcacgctctgctgccagggcttcggcagtttgctcggctatcgtcttggcggtgtgatgatggaaaagatgttcgcttatcaggaaccggtaaacggactgactttcaactggtccgggatgtggactttcggcgcggtgatgattgccattatcgccgtgctgttcatgatttttttccgcgaatccgacaacgaaattacggctatcaaggtgatggaggactccatgagctcggccaccaccctgaccacgccgcaggagcaggtggacagcctcatcatgcagatcgccgaggagaatggcctggaggtgctggaccagctcagccagctgcccgagggcgcctctgccgtgggcgagagctctgtgcgcagccaggaggaccagctgtcacggagctttatctgcctgatggcgatgatgtcagcgttttcgatcgggcgtgatgcattggcaggttgggtcaatcacttcctgcttggtcttggcgttacgcaaccgaagctggataaagtgaccggcgaaaccggtgaagctatcgacgatctgcgtaacattgcgcaactgggttacgacgaagacgaagatcaggaagagcttgaaatgtcgcttgaagagatcatcgaatacaagtacaaaaaccgactctacactaaaaacaaaaaacgtaaggagagtgttatgagtgagatatcccggcaagagtttcagcgtcgccgtcaggccctggtggagcaaatgcaacccggcagcgccgagctgatttttgctgcaccagaagtaacacgtagcgccgacagcgaatacccctatcgtcagaacagtgacttctggtacttcaccggctttaacgaaccggaagcggtgctggtgctgattaaaagcgatgacactcataaccacagcgttctgtttaaccgcgttcgcgacctgacggcggagatctggtttggccgtcgcttaggccaggatgccgcgccagagaaactgggcgttgaccgcgcactggcattcagcgaaatcaatcagcaactttatcaactacttaacggcctggatgtggtttaccatgcccagggcgaatatgcatatgctgatgtaatcgtgaacagtgcgctggaaaaactgcgtaaaggttcgcggcaaaatctcaccgcaccggcaacgatgatcgactggcgtcctgttgttcatgaaatgcgcctgttcaaatcgccagaagagattgccgtactccgccgcgcgggagaaatcaccgccatggcacatacacgggcgatggaaaaatgccgtccgggaatgttcgagtaccatctggaaggcgaaattcaccacgaatttaaccgccacggtgcgcgctatccgtcctataacaccattgtcggcagcggtgaaaacggctgcattctgcactacaccgaaaacgagtgtgaaatgcgcgtacggcgacctggtgttgattgacgcgggttgtgaatacaaaggttacgctggcgatattacccgcaccttcccggtcaacggcaaattcacccaggcccagcgtgaaatctacgacattgtgctggagtctctcgaaaccagcctgcgcctgtatcgtccgggaacttccattctggaagtcactggtgaagtggtgcgcatcatggttagcggcctggtaaaactcggcatcctgaaaggtgatgttgatgaactgatcgctcagaacgcccatcgtcctttctttatgcatggccttagccactggttaggactggatgtccatgacgtgggtgtttatggtcaggatcgctcgcgcaatctggaaccgggcatgaatgatcagatgcttaccatccgggttgcgccctatcgattgctgcatttcgtctaccagcaacatatcatctaccggcttgccacgattacgtggctccgcaccaatctgctcacgataagcaatgttgtccgccatcgtgttgctgtagaaccacatttcgctctgcatagcgtagagcctgccggaggtaatgttggcgatggtgttgatggtgatgattgtcactgcgttatcgggtttccagcgaacattaatgaacagtcttgccagcagaaaccagtaccaacagctctggcggcatggctggcagcaaacgcaactgcgcgcgatttcgccacctgccaactggcaggtcaaccgaatgcagacatcgcaggcgggatgtgtcagcatcagcgttacgctagtttcacccgggggcagagaaggcgagatgacccgcctgcattgcccgaatcgtcagtagtcaagagccgctatgttaagggtctaccattccaatcgtctggacgtgctggaagcgttgatggagtttattgtcgaacgcgaacggctggacgatcctttcgaaccagagatgattctggtgcaaagtaccggtttggcacaagaaatctgattccctcgtaa

SEQ ID NO: 138683 - DNA, 345 bp, Homo sapiens
  misc_feature (1)...(345): n = a,t,c or g
gcgtcactgggtttcggcgtctggcaagcggttcagctgtctgctccctagcagccggccttcgggtcgggcgtctccgccggctactgccgcttcagttctcacactgaagaatgcaacgtcttgattaacttgcttaaggaatgtcacaaaaatcacaacattctgaaattttttggttattgtaatgatgttgatcgggagttgagaaaatgcctgaagaatnnnnnnnnnnnnnnnnnnnnnnnnnnnnnnnnnnnnnnnnnnnnnnnnnnnnnnnnnnnnnnnnnnnnnnnnnnnnnnnnnnnnnnnnnnnnnnnnnnnnnnnnnnnnnnnnnnnnntag

SEQ ID NO: 138684 - DNA, 804 bp, Homo sapiens; identical to SEQ ID NO: 130193

SEQ ID NO: 138685 - DNA, 924 bp, Homo sapiens
atgatgacttacctgacaggcgacgcggtgctgttcagtaacgatgctttcggtcaacactactgcgacgagcatctgttcaacgatgaagtggatcagacggagcttttcgagcagtgccagcgttactacgccaatatcctgacgccgttcagccgcctggtaacaccgaaaattaccgagatcctgggctttaacttaccagtcgatatgatagccacttcccacggcgtggtatggcgcgataacccgacgcaaattgtcgagctgtacctgaaatgggcggctgattatcaggaagacagaatcaccattttctacgacaccatgtcgaataacacccgcatgatggctgacgctatcgcccaggggattgcggaaaccgacccacgcgtggcggtgaaaattttcaacgtcgcccgaagcgataaaaacgaaatcctgactaatgtcttccgctcaaaaggcgtgctggtcggcacttcgacgatgaataacgtgatgatgccgaaaatcgccgggctggtggaggagatgactggtttacgctggtcggaccgaacttttttagatcggtttcgcggaagttggcgatcacataccagtgacgagtgtcgattaggatgcagtttggtcagggcaatatccgcttcgaccgccgcacgctgggcaactaatgcatccacgccgctgacggcgctggcggctgactgcgcctgtaacaatacggcattaagatccgcttctgcggcgcgctgcgccgttcttgcacggtcaacatcttccgctgagacaaaaccttctttcagtaatggctcggtgcggcgtaatgtatctgtggcctgtttcgcggcggcacgggctttttctaccgtggcattaaccgagtcggcaccaaactgttgcgcgtcaacgctacgctgg

SEQ ID NO: 138686 - DNA, 556 bp, Homo sapiens
gggggaggaggtgctggattaccgccaggcgggggcgtactacgcttcctgccgccagactgtcatagaaggcggcaaccacgcattcacgggcttcgaagattatttcaacccgatcgtcgattttcttggtctgcaccatctctgacgatcaactcgaattactaacttaaaccatgacgcaaacttataacgctgatgccattgaggtactcaccgggcttgagccggttcgccgccgtccggggatgtataccgataccactcgccctaaccatttggggcaagaagtcattgataacagtgtggatgaagcactggcgggtcacgcaaaacgcgtggacgttattttacatgctgaccagtcgttagaagttattgacgatgggcgcgggatgccggtggatattcacccggaagagggtgtaccggcggttgaactgattctttgccgtctgcatgcaggcggtaaattctctaacaaaaattaccagttctctggcggcctgcatggcgtggggatttcggtggttaacgccctgtcgaagcgcgtaga

SEQ ID NO: 138687 - DNA, 1099 bp, Homo sapiens; identical to SEQ ID NO: 130363

SEQ ID NO: 138688 - DNA, 1929 bp, Homo sapiens
atggccacagctaaagctaaccaggaaatacaggagtggctcgggaaatatggtactgcgcgcgtcaaactgaatgtcgataaagatttctcgctgaaggattcttcgctggaaatgctttatccgatttatgatacgccgacaaatatgttgttcactcagggggcaatacatcgtacagacgatcgtactcagtcaaatattggttttggctggcgtcatttttcaggaaatgactggatggcggctgtgattacttttatcgatcatgatttatcccgtagtcatacccgcattggtgttggtgcggaatactggcgcgattatctgaaactgagcgccaatggttatattcgggcttctggctggaaaaaatcgccggatattgaggattatcaggaacgcccggcgaatggctgggatattcgtgctgagggctatttacccgcctggccgcagcttggcgcaagcctgatgtatgaacagtattatggcgatgaagtcgggctgtttggtaaagataagcgccagaaagacccgcatgctatttctgccgagcattcgcctgaatttcgcagtgaagccctgaagcttgtgaacgcatcggtgttactgccgcagcccgtgaactcagcctgtatgaatcacaactctacaactggcgcagtaaacagcaaaatcagcagacgtcttctgaacgtgaactggagatgtctaccgagattgcacgtctcaaacgccagctggcagaacgggatgaagagctggctatcctccaaaaggccgcgacatacttccgaagcgcctgaaatgaagtatgtctttattgaaaaacatcaggctgagttcagcatcaaagcaatgtgccgcgtgctccgggtggcccgcagcggctggtatacgtggtgtcagcggcggacaaggataaacattgctgtagtacgccgcgcagatggctccagaacttccttcgtctacaccagctacctggcgaaagtgaacgaagagtggaaaaacaacgttggtactggctctaccgtaaaatggccgatcggtctgggcggtaaaggtaacgacggtatcgccgcgttcgttcagcgtctgccgggtgcaattggttatgttgaatatgcttacgcgaagcagaacaacctggcgtacaccaaactgatctccgctgatggtaaaccggttagtccgaccgaagaaaacttcgctaatgcagcaaaaggtgcagactggagcaaaaccttcgctcaggatctgaccaaccagaaaggcgaagatgcatggcctattacctctaccacgttcattctgatccacaaagatcagaagaaaccagaacaaggcacagaagtgctgaaattcttcgactgggcgtacaaaaccggggctaaacaggcgaacgacctggattacgccagcctgccggatagtgtagttgaacaggttcgcgctgcgtggaagaccaatattaaagacagtagcgtcaatttcgatatggcgaacgtctttttcagagttacgcccggtaattttctggttaacagagaggctagccaccagcggcgcgtctttgctgtacgggctggtgtggatttcatttaccgcgccagtagcgacggattgcgaaggtgccgcgacaggcgcacgcgatttaagcgcatcaaccacgcgggcgcgccactcgctggcagcagcctggtattcaacatcggcatcgacacggtcgagcaggcgttcaccacccagttccgccagcttgctgtcgaaatctttcccggactggcagaaaaattcataagagctatcgccgaggctaaacacggcaaacgcggtgttttccagctttggcgcttttttggagaacaggaacttatgcagcgcgacggcttcttccggcggttccccttccccttgcgttga

SEQ ID NO: 138689 - DNA, 2965 bp, Homo sapiens
gaagttggagactgtgtgtggttccgcagaagtctgggtttctacagagctgaactgagactccatcgtgttccaggccagatcagccagaagaaagtcatccattgctgtctgagtttcgttgctggtgaagaacaagctccccagggtttcaaacccagaactcatggtctgtgtttctgtactgttcaactgaactttgctttctagagcaggtatatttttagcagtggagactccttcagtttgggtctctgtgtcagatgaatcagtactcacggaaaagctggagtgtttcagaatacttcccagaggcagatgagggctactgtctaagaaaaagtttaagtctgtctgtgtctgtgtgtcaaacatctcaaggcctaagaagttagaatttcccctacacccataggactgagcagaggtatctgcgagtaagaagtccgtttgagtctctatgtccagtgactccaagactggctcggtggtcatggtgctaagttcactctcttcagtttgagtctggatatttgaggccgaaaagaactcttcgatatcaaaatcgattccggggttctgggctgggccagatgggagctgggtgtcaggtccaggatttgtgtcagacaaaagactacgatgaaaccaatgtctgggcaggcagattacttgacaagatgttttccaaatcacttaataaatctatggtttgggtctgattatctgtcatgttctgtgaaggaagcatactattctgtgcactgaaatttataattggtgcagatttctcaatatcttgatttaaagtcttaggctcattctgaggtaacaaactatgagttactgtctctgctactaaactgttgcttataatgttacctgtagcaacattatatgatgaatgaacactctcaaaaatgtctccgcacattccagcttggtccatctgtacatggtcatccgttggactttctatcccactggtttgagtttctctggagaccccacctgactggaaacaggtgtccataaatgcatcagtctgagcagctatagatgaagttaccttagagctgggcaaaaatgtctgagtgtgaacactaatgggaagagacacttgagaatcaaacgacaaatcagtttgagaacaagacgacacagaggaatcagcagtggcccactgtgcagaaggtataaagttttgtgaggcataagacagatctgtctgcacgttgattgaagaaatgctattcttttgacacgtgttccctagttcttgtaaaggattagatggacttttaccaaagttcacttgaacaccagtacttattggctcaccagcaataggattagcaattttgaaaagaggtaggctctccttaagagagcaagcctctgaatctaggccgaggatcagggttcctactgacaagggcattaagtgcacagcccctgtggcagagccctgatcaacacctaacaccacaggctgggctgaggagtcggctgtaggcacaaagacaggcatgacagaaaactgcatcacgggtagtttaaccaaagccactttgggctttggtaaaagcaacttctgaggatatctcggtggtgttgtaagagtctgcttgtcagtgttagagccacaagagtcttcaaaagatggttctagctttatttctgaagcttctagttcttgagtgtctggtctagggattggttggttgttcaatgattcaatggtcttgttggataacttctggttttgtgcacagttttccattttccttttcttactaggtgggtccctgtgttctgcaggtatctcgtgcccagttcggtagatgtgagactgcagtgctgttctactggcgtagggacagccgcatgtgcaccggaaggtcttgccacagtcctctgcatgtcttttcaggtcccattctgtaccgtacgaattgctgcacttactacatttgtgcttcttctcagcatgcattttcataaagtgctgttttacgagagaaaactgagaaaacggtctctcagggcctctggggcagccttcaattggacagcagtagaatttcggtccagttttcaaatcttttcttattgttggattgactatgccatcctgcaaaaggaaaattactttaaattattatttcaaaaaaacaacacaacaggctggagtggaaacggaatgactgaaaacgagcacattttgtgaaatacttttaattaagagtttttccatctagtgtcagcagtaagagaaaaagagtatgagtagactaaacgaaatgtggtgagaatactaagcaagactctaaaattctgcattcatttgaccattattgaattcctcttagtcaatttacattccagggagatgccccccttgtatgttcctaggctgtgaaatgctccagaaaaccacggattaggatcactacaagattcctgctcatttcaaacacatcgtcagtgaagctcggtaatcctttcattatcttttccaacctccctcatgctcccctgtagtgtgtgctctcatcattgaatgccttttactatctcctgtcctcttctaagtgccccttcgttcaagtcctcctatttatgtggattttgtcattagcctcaatctaatttctagaccttcagtctctttttcactcatactttatcagattcacctttctcaagtatagcttcgatcatgtcattacctccctcaaacgttttcagcagcacccccgtactgttcaagtcccaactttttgagcctgggatactcaaagtcccttactccatagcttcaaactactttttcttctctcattacttcattacaccgaagagaacgccttctaatgccccccacaccttttcatgggcagagatttatttgtatcttctgttgcctttgggaatgttttgaacagaataaatgttcaataaa

SEQ ID NO: 138690 - DNA, 3435 bp, Homo sapiens
atgttgatggcagaatactttgccatccagatgtgtcgggaaatcaagctgcctctgttcccggggtttacggagcgcgccagagaaacattgctgaattatcgttggccgggaaatattcgtgaattgaaaaacgtggtggaacgttcagtgtatcgccacggcaccagcgattatccgcttgatgacatcattattgatccctttaacagcgtccgcctgaagatgtatcgccgtttcagaaaccacctcgcttccaacactgccgctggatttaccgcatcggcggcgcagtatgaagatggtaaacagtacactaccctggaaaaaccggtagctggcgcgccgcaagtgctggagtttttctctttcttctgcccgcactgctatcagtttgaagaagttctgcatatttctgataatgtgaagaaaattcttccggagggggtcaagatgtttgatcaggcaggcgccgatagcaagaaactgccttcacaatacattgctggagtacgccgtgcagatggctccgggacttccttcgtcttcaccagctacctggcgaaagtgaacgaagagtggaaaaacaacgttggtactggctctaccgtaaaatggccgatcggtctgggcggtaaaggtaacgacggtatcgccgcgttcgttcagcgtctgccgggtgcaattggttatgttgaatatgcttacgcgaagcagaacaacctggcgtacaccaaactgatctccgctgatggtaaaccggttagtccgaccgaagaaaacttcgctaatgcagcaaaaggtgcagactggagcaaaaccttcgctcaggatctgaccaaccagaaaggcgaagatgcatggcctattacctctaccacgttcattctgatccacaaagatcagaagaaaccagaacaaggcacagaagtgctgaaattcttcgactgggcgtacaaaaccggcaacgatcgtaaagtcatgcagattgacccgctggaagcgccggatttgatctggctgctgcaacagacgggagatgaagtgctggattaccgccaggcggtggcgtactacgcttcttgccgccagactgtcatagaaggcggcaaccacgcattcacgggcttcgaagattatttcaacccgatcgtcgattttcttgaagtcattgataacagtgtggatgaagcactggcgggtcacgcaaaacgcgtggacgttattttacatgctgaccagtcgttagaagttattgacgatgggcgcgggatgccggtggatattcacccggaagagacctgcaggcatgcaagagctgaaaacgatcctggtgaccaatcccacgctgcaattcgatgcgatattcgccagcacatcaacggaaaaactcatctttgcctcactgtcaatttgactatagatattgtcatatcgaccatttgattgatagtcattttgactactcattaatgggcataattttatttatagagtaaaaacaatcagataaaaaactggcacgcaatctgcaattagcaagacatctttttagaacacgctgaataaattgaggttgctatgtctattgtggtgaaaaataacattcattgggttggtcaacgtgactgggaagtgcgtgattttcacggcacggaatataaaacgttgcgcggcagcagctacaatagctacttcatccgcgaagaaaaaaacgtgctgatcgacaccgtcgaccataaattcagccgcgaatttgtgcagaacctgcgtaatgaaatcgatctggcggatatcgattacatcgtgattaaccatgcagaagaggaccacgctggggcgctgaccgaactgatggcacaaattcccgatacgccgatctactgtacagccaacgctatcgactcgataaatggtcatcaccatcatccggagtggaattttaatgtggtgaaaactggcgacacgctggatatcggcaacggcaaacagctcatttttgtcgaaacaccaatgctgcactggccggacagcatgatgacttacctgacaggcgacgcggtgctcttcaattacgatgctttcggtcaacactactgcgacgagcatctgttcaacgatgaagtggatcagacggagcttttcgagcagtgccagcgttactacgccaatatcctgacgccgttcagccgcctggtaacaccgaaaattaccgagatcctgggctttaacttaccagtcgatatgatagccacttcccacggcgtggtatggcgcgataacccgacgcaaattgtcgagctgtacctgaaatgggcggctgattatcaggaagacagaatcaccattttctacgacaccatggtgaataacacccccatgatggctgacgctatcgcccaggggattgccggaaaccggcccacgccttgcgggggaaaatttcaacgtcggcccgaaacgataaacacgaagatcctgacctattgtctttccgctcagaaaggggagcttgattggccgccctctagaggatccccggcggcttgcccgactcatgcgctgatttgtgtcgatcgtaataaacttgaacaactgagcgcagaaaaacgccgccgaattcccggaaatattcgtagaatacggagcgggcggtatcgccgacctgtgactgccggatgcgacgctgtcgtgtccggcagggcgggttacgcaattcatgatggcgggaataactcaatggcaaaaaacacatcttgcggtgtccaactgcgtattcgtggcaaagtgcagggcgttagttttcatccgtttgtctggcagctggcacagcaattaaatcttcacggcgatgtctgtaatgacggcgatggctgggccactgctgattcctctgtgtcgtcttgttctcaaactgatttgtcgtttgattctcaagtgtctcttcccattagtgttcacactcagacatttttgcccagctctaaggtaacttcatctatagctgctcagactgatgcatttatggacacctgtttccagtcaggtggggtctccagagaaactcaaaccagtgggatagaaagtccaacggatgaccatgtacagatggaccaagctggaatgtgcggagacatttttgagagtgttcattcatcatataatgttgctacaggcctgcgacagcctggtcttactggtccccatctcctgcggccgactggcggtaagaacgggcttgtcagaactctccgtcagggacctgagaaggaacaacggaacgcgttcggaacggcttggactcccaagactcacctgattagtggccacaccgggagaattgaagcggcagtagccggcggagacgcccgaccagaaggccggctgctagggagcagacagttgaaccgcttgccagacgccgaaacccagtga

SEQ ID NO: 138691 - DNA, 529 bp, Homo sapiens; identical to SEQ ID NO: 117835

SEQ ID NO: 138692 - DNA, 369 bp, Homo sapiens; identical to SEQ ID NO: 122077

SEQ ID NO: 138693 - DNA, 394 bp, Homo sapiens; identical to SEQ ID NO: 117837

SEQ ID NO: 138694 - DNA, 911 bp, Homo sapiens
  misc_feature (1)...(911): n = a,t,c or g
nataacccatatcttcatattcatgcagaagacactctcctgcctttctatcttgggcaaaaggacgatgtcacttatgcaataaagcccacttgctggccggggcttgacattattccttcctgtctggctctgcaccgtattgaaactgagttaatgggcaaatttgatgaaggtaaactgcccaccgatccacacctgatgctccgactggccattgaaactgttgctcatgactatgatgtcatagttattgacagcgcgcctaacctgggtatcggcacgattaatgtcgtatgtgctgctgatgtgctgattgttcccacgcctgctgagttgtttgactacacctccgcactgcagtttttcgatatgcttcgtgatctgctcaagaacgttgatcttaaagggttcgagcctgatgacgatgtcacttatgcaataaagcccacttgctggccggggcttgacattattccttcctgtctggctctgcaccgtattgaaactgagttaatgggcaaatttgatgaaggtaaactgcccaccgatccacacctgatgctccgactggccattgaaactgttgctcatgactatgatgtcatagttattgacagcgcgcctaacctgggtatcggcacgattaatgtcgtatgtgctgctgatgtgctgattgttcccacgcctgctgagttgtttgactacacctccgcactgcagtttttcgatatgcttcgtgatctgctcaagaacgttgatcttaaagggttcgagcctgatgtacgtattttgcttaccaaatacagcaatagtaatggctctcagtccccgtggatggaggagcaaattcgggatgcctggggaagcatggttctaaaaaatgttgtacgtgaaacggatgaagttgg

SEQ ID NO: 138695 - DNA, 3819 bp, Homo sapiens
ttacaatttggcatgtttttgcagtgactggttctggttgttcctttccatgtttagcgcgtccttcaggagctcttgtagggcaggcctggtggtgacaaaatctctcagcatttgcttgtctgtaaagtattttatttctcccacacttatgaagcttagtttggctggatatgacattctgtgttgaaaattcttttctttaagaatgttgaatattggcccccactctcttctggcttgtagagtttctgccaaggggtcagctgttagtctgatgggcttccctttgtgggtaacctgacctttctctctggctgcccttaacattttttccttcatttcaactttggtgaatctgatgattatgtgtcttggggttgctcttctcgaggagtatctttgtggtgttctctgtatttcctgaatttgaatgttggcctgccttgctaggttggggaagttctcctggataatatcctgcagagtgttttccaacttggttccattctccccatcactttcaggtacacagtcaaatgtaggtttggtcttttcacgtagtcccatatttcttggaggctttgttcgttccttttcatttttttctctaatcctgtcttcatgctttatttcattaagttgatcttcaatctctgatatcctttcttccgttgtgtatgcttcacgaagttcttgtgatgtgtttttcagctccatcaggtcatttatgttcttctctaaactggttattctagttagcaattcctctaaccttttttcaagcttcttagcttccttgcattgagttagaacatgctcctttagcttggagaagtttgttattacccaccttctgaagcctacttctgtcaattcgtcaaacgcattctccatccagttttgttccattgctggcgaggagttgtgatcctttggatggggttttggtgtggacgtcctttttgttgaagttgatactattcctttctgtctgttagttttccttctaacaggcccctctgctgcaggtctgctggagtttgctggcagtccactccggaccccatttgcctgggtatcaccagcagaggctgcagaacagcaaagactgctgcctattccttcctctggaagcttcatcccagagaggcacccgtcagatgctagccggagttctccagtatgaggtgtctgtcgacccctgctgggaggtttctcccagtcagggggcacggggttcagggacccacttgaggaggcagtctctcccttagcagagctcgagcgttgtgctgggagatctgctactcttttcagagctggcacgcaggaacgtttaagtctgccaaagctgcacccacagccaccccttcccccaggtgctctgttgtttcctgactttttaatgatcaccattctaattggtgtgagatggtatctcattgtggttttgatttgcatttctctgatggccagtgatgatgagcattttttcatgtgtcttttggctgcataaatgtcttcttttgagaagtgtctgttcatatcctttgcccactttttgatggggttgtttgtttttttcttgtaaatttgtttgagttcattgtagattctggatattagccctttgtccgatgagtaggttgcgaaaattttctcccattctgtaggttgcctgttcactctgatggtagtttcctttgctgtgcagaagctctttagtttaattacatcccatttgtcaattttggcttttgttgccactgcttttggtgttttagacatgaagtccttgcccatgcctatgtcctgaatggtattgcctaggttttcttctagggtttttatggttttaggtctaacatttaagtctttaatccatcttgaattgatttttgtataagatgtaaggaagggatccagtttcagctttctacatatggctagccagttttcccagcaccatttattaaatagggaatcatttccccattgcttgtttttgtcaggtttgtcaaagatcagatggttgtagatatgcagcattatttctgagggctctgttgtgttccattgatctatatctctgttttggtaccagtaccatgctgttttggttactgtagccttgtagtgtagtttgaagtcaggtagtgtgatgtctccagctttgttcttttggcttaggattgacttggcgatgtgggatcttttttgtttccatatgaactttaaagtagttttttccaattctgtgaagaaagtcattggtagcttgatggggatggcattgaatgtataaattaccttgggcagtatggccattttcacgatattgattcttcctatccatgagcatggaatgttcttccacttgtttgtatcctcttttatttcattgagcagtggtttgtagttctccttgaagaggtccttcacatcccttgtaagttggattcctaggtattttattctctttgaagcaattgtgaatgggagttcactcatgatttggctctccgtttgtctgttgttggtgtataagaatgcttgtgatttttgtacattgattttgtatcctgagactttgctgaagttgcttatcagcttaaggagattttgggctgagacagtggggttttctagatatacaatcatgtcatctgcaaacagggacaatttgacttcctcttttcctaattgaataccctttatttccttctcctgcctattgccctggccagaacttccaacacagccttgcatcccagggatgaagcccacttgatcatggtggataagctttttgatgtgctgctggatttggtttgccagtattttattgaggatttttgcatcaatgttcatcaaggatattggtctaaaattcccttttttggttgtgtctctgccaggttttggtatcaggatgatgctggcctcataaaatgagttagggaggattccctctttttctattggttggaatagtttcagaaggaatggtaccagctcctccttgtacctctggtagaattcggctgtgaatccatctggtcctggactttttttggttggtaagctattggttattgcctcaatttcagagcctgttattggtctattcacagattcaacttcttcctggtttagtcttgggagggtgtatgtgtcgaggaatttatccatctcttctagattttctagtttatttgcatagaggtgtttgtagtattctctgatggtaatttgtatttctgtgggatcggtggtgatatcccctttatcattttttattgtgtctatttgattcttctctcttttcttctttattagtcttgcttgtggtctatcgattttgttgatcttttcaaaaaaccagctctgtcttctggcttgtagagtttctgccgagagatccgcttttagtctgatgggcttccctttgtgggtaacttgacctttctctctggctgcccttaacattttttccttcatttcaactttggtgaatctgatgattatgtgtcttggagttgctcttctcgaggagtatctttgtggtgttctctgtatttcctgaatctgaatgttggcctgccttgctagattggggaagttctcctggataatatcctgcagagtgttttccaacttggttccattctccccgtcagtttcaggtacaccaatcagacgtagatttggtgttttcacatagtcccatatttcttggtggctttgttcatttctttttattcttttttctctaaacttcccttctcgcttcatttcattcatttcgtcttccat

SEQ ID NO: 138696 - DNA, 3288 bp, Homo sapiens; identical to SEQ ID NO: 128489

SEQ ID NO: 138697 - DNA, 4371 bp, Homo sapiens; identical to SEQ ID NO: 121210

SEQ ID NO: 138698 - DNA, 1042 bp, Homo sapiens
ttagttgactgtcagctgtccttgctccaggatgctgtttttgacaacggatgttttattgcctttgatgttcattaagaagcttggcgcaaatgttgcctttttatcctcgaagaagcctctgtttgtcatgtagcttgtgataaccacattgttgcctttggcttgcggcaggaagaagttcgtgccgccgccgtagtacgctttgttaaataaagattcttcgccttggtatccgttttctgttcccgtgttggcttcgaatacaaggtatttatggcctttgtcttcaacgtagtgagggtctctcagcgtatggttgtcgccggatgtataattgccttcatcgataaactgctgaacgttctgatatgtttttccgtctccgtcaaaaatcgttttgtgatcttccactccgttgattttgagtgtgtcatcagattttgacacatttacctgcgctgttgtcaggctttgtttgccgtaatgtttaccggaatagtcagtgtagaataaacggatttttccgtcagatgtaaaggttgcagaaccggaccattcttgcgtctgatctttcaggatcggatcgttggcgtcgaacttatcgctgtctttaaagacacggcccgcgtttttccagctgtcgattgagttgtcgccgaccttttgataaaacatgtagattgatgtgtcatcagcgtctttcgggcttcccgcaagagcaaacacaacgtgatagccgttgtattcagctactgttccgtcagcgttttgcagcggccagctgtcccacacatcaagtccttttgcagactcaatatttttaatcgttgattgatcgaattgaggcacttggtatttttcgttttgctgctgtttagggatctgcagcatatcatggcgtgtaatatgagagacgccgtacgctgatgaatccccgaacttggccgtaacctccacaaagagcgactcgctgtataccgttggcatgctagctttatctgttcgggcaatacgatgcccattgtacttgttgactggt

SEQ ID NO: 138699 - DNA, 2079 bp, Homo sapiens; identical to SEQ ID NO: 135984

SEQ ID NO: 138700 - DNA, 2253 bp, Homo sapiens; identical to SEQ ID NO: 118103

SEQ ID NO: 138701 - DNA, 2484 bp, Homo sapiens
  misc_feature (1)...(2484): n = a,t,c or g
gcaagtccctccctaggtcgggtcccgggtcggggagcgcaatgatattagtgnctaagggtgtgctcctctatactccctttggagagttgtcttatattaacacaccctcgggtttttgaaactctgcgatttggtggtccctccacattaattcgcaagnttatataaaaacccgcaaaccattgattaaggtatgttcagaatgaacctcatggaaccccttacccagtgcataaacgctggtcatgaaatgacgaaggctatcgccattgcacagtttaatgatgacagcccggaagcgaggaaaataacccggcgctggagaataggtgaagcagcggatttagttggggtttcttctcaggctatcagagatgccgagaaagcagggcgactaccgcacccggatatggaaattcgaggacgggttgagcaacgtgttggttatacaattgaacaaattaatcatatgcgtgatgtgtttggtacgcgattgcgacgtgctgaagacgtatttccaccggtgatcggggttgctgcccataaaggtggcgtttacaaaacctcagtttctgttcatcttgctcaggatctggctctgaaggggctacgtgttttgctcgtggaaggtaacgacccccagggaacagcctcaatgtatcacggatgggtaccagatcttcatattcatgcagaagacactctcctgcctttctatcttggggaaaaggacgatgtcacttatgcaataaagcccacttgctggccggggcttgacattattccttcctgtctggctctgcaccgtattgaaactgagttaatgggcaaatttgatgaaggtaaactgcccaccgatccacacctgatgctccgactggccattgaaactgttgctcatgactatgatgtcatagttattggacagcgcgcctaacctgggtatcggcacgattaatgtcgtatgtgctgctgatgtgctgattgttcccacgcctgctgagttgtttgactacacctccgcactgcagtttttcgatatgcttcgtgatctgctcaagaacgttgatcttaaagggttcgagcctgatgtacgtattttgcttaccaaatacagcaatagtaatggctctcagtccccgtggatggaggagcaaattcgggatgcctggggaagcatggttaataaaaaatgttgtacgtgaaacgaatgaagttggtaaagctgccccgatggtggattcgttaattgcgcgcgtaggagtaatggctcgcggtaatgccattactttgcctgtatgtggtcgggatgtgaagtttactcttgaagtgctccggggtgatagtgttgagaagacctctcgggtatggtcaggtaatgaacgtgaccaggagctgcttactgaggacgcactggatgatctcatcccttcttttctactgactggtcaacagacaccggcgttcggtcgaagagtatctggtgtcatagaaattgccgatgggagtcgccgtcgtaaagctgctgcacttaccgaaagtgattatcgtgttctggttggcgagctggatgatgagcagatggctgcattatccagattgggtaacgattatcgcccaacaagtgcttatgaacgtggtcagcgttatgcaagccgattgcagaatgaatttgctggaaatatttctgcgctggctgatgcggaaaatatttcacgtaagattattacccgctgtatcaacaccgccaaattgcctaaatcagttgttgctcttttttctcaccccggtgaactatctgcccggtcaggtgatgcacttcaaaaagcctttacagataaagaggaattacttaagcagcaggcatctaaccttcatgagcagaaaaaagctggggtgatatttgaagctgaagaagttatcactcttttaacttctgtgcttaaaacgtcatctgcatcaagaactagtttaagctcacgacatcagtttgctcctggagcgacagtattgtataagggcgataaaatggtgcttaacctggacagcccacagtcattcagtcctggtgctggcgatcacgctaacagcccacagtcatccagtcctagtactggtgttcacattaacagcccacagttgtccagtcttagtgctggtgttcacactatcagcccacagtcttccaatcctagtgttggtgtaacagccctcagtcatccagacctagtgtgggtgttcacgctaacagcccacagtcggccagtcctagtgtgggtgttcacactaacagcccacagtcgtccagtcctagtgtgggtgttcacactaaaagcccacagttgtccagtcctagtgtgggtgttcacactaaaagcccacagtcatccagtcctagtgcaggtgatcacgttaacagcccacagtcatccagtcctagtaccagtgatcatgctaatagccacagccatccagtcttag

SEQ ID NO: 138702 - DNA, 1696 bp, Homo sapiens
ttaaggcaattggccggtgttgatacagcgggtaataatcttacgtgaaatattttccgcatcagccagcgcagaaatatttccagcaaattcattctgcaatcggcttgcataacgctgaccacgttcataagcacttgttgggcgataatcgttacccaatctggataatgcagccatctgctcatcatccagctcgccaaccagaacacgataatcactttcggtaagtgcagcagctttacgacggcgactcccatcggtaatttctatgacaccagatactcctcgaccgaacgccggtgtctgttgaccagtcagtagaaaaccccgccccagatcatccagtgcgtcctcagaaaacagctccaggacacgttcattactggtcaacagacaccggcgttcggtcgaagagtatctggtgtcatagaaattgccgatgggagtcgccgtcgtaaagctgcgaaagtgattatcgtgttctggttggcgagctggatgatgagcagatggctgcattatccagattgggtaacgattatcgcccaacaagtgcttatgaacgtggtcagcgttatgcaagccgattgcagaatgaatttgctggaaatatttctgcgctgggttggtaactttgagggcagctggtaccgctcctatgacccagtcctttttcaaaagagacgaaggcttaacccatccggctttacgatactgacccaggctctcgtaataacgccagggcagacggatgggggatttcttttgtttcaaataagcagaatttgtgttagccggttctttaccccgataaagaagggaatgagatatggggggaatatgtccactgaaaagccctctggatggactgtgcgcacgtttgataaaccaaggaaaagattcatagcctttttcatcgccggcatcctcttcagggcgataaaaaaccacttccttccccgcgaaactcttcaatgcctgccgtatatccttactggcttccgcagaggtcaatccgaatatttcagcatatttagcaacatggatctcgcagataccgtcatgttcctgtagggtgccatcagattttctgatctggtcaacgaacagatacagcatacgtttttgatcccgggagagactatatgccgcctcagtgaggtcgtttgactggacgattcgcgggctatttttacgtttcttgtgattgataaccgcttgttccgccatgacagatccatgtgaaagtgtgacaagttttttagattgtcacactaaataaaaaagagtcaataaaccggggatacctttgggaaaaaaacagctttttctgaaggcaatttggtaccaggggtaaaggggaatttggtcacaagacaggactggtcatttggagggtgattttggcaccactggaagggggcaatttgtcacaacacctttctctaaaaacaacatggataaaggccttacaaggcgctctaaaaaagaagatctaaaaactattgaaaaaataattattaaaatatccccgtggataagggggttacccccaagggaagtttttttaggcatcgggtggaaagcgaaatttataagtgctgttccctggggcttctcgtcattaagggcttgcctggcgtcgatgcgggagcatattggtgaaaggaagaccaatagggttggggcatag

SEQ ID NO: 138703 - DNA, 8724 bp, Homo sapiens
  misc_feature (1)...(8724): n = a,t,c or g
atgaaactcatggaaacacttaaccattgcataaacgctggtcatgaaatgacgaaggctgtcgccattgcacagtttaatgatgacagcccggaagcgaggaaaataacccggcgctggagaataggtgaagcagcggatttagttggggtttcttctcaggctatcagagatgccgagaaagcagggcgactaccgcacccggatatggaaattcgaggacgggttgagcaacgtgttggttatacaattgaacaaattaatcatatgcgtgatgtgtttggtacgcgattgcgacgtgctgaagacgtatttccaccggtgatcggggttgctgcccataaaggtggcgtttacaaaacctcagtttctgttcatcgtgctcaggatctggctctgaaggggctacgtgttttgctcgtggaaggtaacgccccccagggaacagcctcagtgtatcacggatgggtcccagatcttcatattcatgcagaagccgctctcctgcctttctatcttggggaaaaggacgatgtcacttatgcaataaagcccacttgttggccggggcttgacattattccttcctgtctggctctgccccgtattgaacctgagttaatgggcaaattgatgaaggcagatccttcatgcctgggcctccacccaccacccactggggcggtcaagccagtagcaggtcagcaactctctggacagagctgcgaagggcaactgaaagcctctctgccactgcccctgcagtggaactacccatgctaccctcagactaataaaggagcaaagaccctacgtgccttatgcacacctccaacaagctgtagtcgacccaaggagaggaggccacatggttcttattatgttgtacgtgtaacgggtgacgttggtaaaggtcagatccggatgagaactgttgttgaacaggccattgatcaacgctcttcaactggtgcctggagaaatgctctttctatttgggaacctgtctgcaatgaaattttctatcgtctgattaaaccacgctgggagattagatgggggaagcgtgcgcctgttattccaaaacatacgctcaatactcaaccggttgaagatacttcgttatcgacaccagctgccccgatggtggattcgttaattgcgcgcgtaggagtaatggctcgcggtaatgccattactttgcctgtatgtggtcgggatgtgaagtttactcttgaagtgctccggggtgatagtgttgagaagacctctcgggtatggtcaggtaatgaacgtgaccaggagctgcttactgaggacgcactggatgatctcatcccttcttttctactgactggtcaacagacaccggcgttcggtcgaagagtatctggtgtcatagaaattgccgatgggagtcgccgtcgtaaagctgctgcacttaccgaaagtgattatcgtgttctggttggcgagctggatgatgagcagatggctgcattatccagattgggtaacgattatcgcccaacaagtgcttatgaacgtggtcagcgttatgcaagccgattgcagaatgaatttgctggaaatatttctgcgctggctgatgcggaaaatatttcacgtaagattattacccgctgtatcaacaccgccaaattgcctaaatcagttgttgctcttttttctcacccccgtcaggcaccgtgtatgaaatctaacaatgcgctcatcgtcatcctcggcaccgtcaccctggatgctgtaggcataggcttggttatgccggatctggctctgaaggggctacgtgttttgctcgtggaaggtaacgacccccagggaacagcctcaatgtatcacggatgggtaccagatcttcatattcatgcagaagacactctcctgcctttctatcttggggaaaaggacgatgtcacttatgcaataaagcccacttgctggccggggcttgacattattccttcctgtctggctctgcaccgtattgaaactgagttaatgggcaaatttgatgaaggtaaactgcccaccgatccacacctgatgctccgactggccattgaaactgttgctcatgactatgatgtcatagttattgacagcgcgcctaacctgggtatcggcacgattaatgtcagatccccctatgatgtcatagttattgacagcgcgcctaacctgggtatcggcacgattaatgtcgtatgtgctgctgatgtgctgattgttcccacgcctgctgagttgtttgactacacctccgcactgcagtttttcgatatgcttcgtgatctgctcaagaacgttgatcttaaagggttcgagcctgatgtacgtattttgcttaccaaatacagcaatagtaatggctctcagtccccgtggatggaggagcaaattcgggatgcctggggaagcatggttctaaaaaatgttgtacgtgaaacggatgaagttggtaaaggtcagatccggatgagaactgtttttgaacaggccattgatcaacgctcttcaactgatacttcgttatcgacaccagctgccccgatggtggattcgttaattgcgcgcgtaggagtaatggctcgcggtaatgccattactttgcctgtatgtggtcgggatgtgaagtttactcttgaagtgctccggggtgatagtgttgagaagacctctcgggtatggtcaggtaatgaacgtgaccaggagctgcttactgaggacgcactggatgatctcatcccttcttttctactgactggtcaacagacaccggcgttcggtcgaagagtttccttgtaccctctggcaggaggagcgactcaagccttcgcgaaagaaaataaccaaaaagcatacaaagaaacgtacggcgtctctcatattacacgccatgatatgctgcagatccctaaacagcagcaaaacgaaaaataccaagtgcctcaattcgatcaatcaacgattaaaaatattgagtctgcaaaaggacttgatgtgtgggacagctggccgctgcaaaacgctgacggaacagtagctgaatacaacggctatcacgttgtgtttgctcttgcgggaagcccgaaagacgctgatgacacatcaatctacatgttttatcaaaaggtcggcgacaactcaatcgacagctggaaaaacgcgggccgtgtctttaaagacagcgataagttcgacgccaacgatccgatcctgaaagatcagacgcaagaatggtccggttctgcaacctttacatctgacggaaaaatccgtttattctacactgactattccggtaaacattacggcaaacaaagcctgacaacagcgcaggtaaatgtgtcaaaatctgatgacacactcaaaatcaacggagtggaagatcacaaaacgatttttgacggagacggaaaaacatatcagaacgttcagcagtttatcgatgaaggcaattatacatccggcgacaaccatacgctgagagaccctcactacgttgaagacaaaggccataaataccttgtattcgaagccaacacgggaacagaaaacggataccaaggcgaagaatctttatttaacaaagcgtactacggcggcggcacgaacttcttccgtaaagaaagccagaagcttcagcagagcgctaaaaaacgcgatgctgagttagcgaacggcgcccttcgtatcatagagttaaataatgattacacattgaaaaaagtaatgaagcccgtgatcacttttaaacacggtaacctggtgaaattgaaccgcgccaatgttttcaaaaatgaacggcaaatggtacgtgttccctgattcacgcggttcaacaatgacgatcgatggatgccagcctacgtgttctgaggctttgcagaactttcaacggtataccggcatacagcatgtgcatcgcataggaatggcggaacgtatgtggtgtgaccggaacagagaacgtcacaccgtcagcagcagcggcggcacccgcctccccaatccaggtcctgcccgttctgaacattttgaggcatttcagtcagttgctcaatgtacctataaccagaccgttcagctggatattacggcctttttaaagaccgtaaagaaaaataagcacaagttttatccggcctttattcacattcttgcccgcctgatgaatgctcatccggagttccgtatggcaatgaaagacggtgagctggtgatatgggatagtgttcacccttgttacaccgttttccatgagcaaactgaaacgttttcatcgctctggagtgaataccacgacgatttccggcagtttctacacatatattcgcaagatgtggcgtgttacggtgaaaacctggcctatttccctaaagggtttattgagaatatgtttttcgtctcagccaatccctggtcttccttagagctagcagtgatcatgggaccaattctggccaataagtgtgacaatctaaaaacttgtcacacttcacatggatctgtcatggcggaaacagcggttatcaatcacaagaaacgtaaaaatagcccgcgaattggccagttcaaacgacttcctttgaggcggcaaatagtctcttccggggatcaaaaacgtatgctgtattctgttcgttgaccagttcaaaaaatttgatggcaccctacaagaaccatgccggtatctgcgagatcccatgttgcttaaatatgttgaaatatttcggattgccctttgcggaagcccagtaaggatatccggcaggcattgaagagtttcgcgggaaaggaagtggttttttatcgccctgaagaggatgccggcgatgaaaaaggctatgaatcttttccttggtttatcaaacgtgcgcccagtccatccaaagggctttacagtgtacatatcaacccatatctcattcccttctttatcgggttacagacccggtttacgcagtttcggtttagtgaaacaaaagaaatccccaatccgtatgccatgcgcttatacgaatccctgtgtcagtatcgtaaagccggatggctcaggcttcgtctctctgaaaatcgacttgatcataaaaccgtaccagctgcctcaaagttaccagcgtatgcctgacttccgccgccgcttcctgcaggtctgtgttaatgagatcaacagcagaactccaatgcgcctctcatacattgagaaaaagaaaggccgccagacgactcatatcatcagaatatctgatggcaccctacaggaacatgacggtatctgcgagatccatgttgctaaatatgctgaaatattcggattgacctctgcggaagccagtaaggatatacggcaggcattgaagagtttcgcggggaaggaagtggttttttatcgccctgaagaggatgccggcgatgaaaaaggctatgaatcttttccttggtttatcaaacgtgcgcacagtccatccagagggctttacagtgtacatatcaacccatatctcattcccttctttatcgggttacagaaccggtttacgcagtttcggcttagtgaaacaaaagaaatcaccaatccgtatgccatgcgtttatacgaatccctgtgtcagtatcgtaagccggatggctcaggcatcgtctctctgaaaatcgactggatcatagagcgttaccagctgcctcagagttaccagcgtttgcctgacttccgccgccgcttnctgcagatcagaaaatctgatggcaccctacaggaacatgacggtatctgcgagatccatgttgctaaatatgctgaaatattcggattgacctctgcggaagccagtaaggatatacggcaggcattgaagagtttcgcggggaaggaagtggttttttatcgccctgaagaggatgccggcgatgaaaaaggctatgaatcttttccttggtttatcaaacggctgtcctgggtatttattggtatttatcagcgatgtggcctgattcctatctgtgaaacttacagtctagttatcagaatatctgatggcaccctacaggaacatgacggtatctgcgagatccatgttgctaaatatgctgaaatattcggattgacctctgcggaagccagtaaggatatacggcaggcattgaagagtttcgcggggaaggaagtggttttttatcgccctgaagaggatgccggcgatgaaaaaggctatgaatcttttccttggtttatcaaacgtgcgcacagtccatccagagggctttacagtgtacatatcaacccatatctcattcccttctttatcgggttacagaaccggtttacgcagtttcggcttagtgaaacaaaagaaatcaccaatccgtatgccatgcgtttatacgaatccctgtgtcagtatcgtaagccggatggctcaggcatcgtctctctgaaaatcgactggatcatagagcgttaccagctgcctcaaagttaccagcgtatgcctgacttccgccgccgcttcctgcaggtctgtgttaatgagatcaacagcagaactccaatgcgcctctcatacattgagaaaaagaaaggccgccagacgactcatatcatcagaatatctgatggcaccctacaggaacatgacggtatctgcgagatccatgttgctaaatatgctgaaatattcggattgacctctgcggaagccagtaaggatatacggcaggcattgaagagtttcgcggggaaggaagtggttttttatcgccctgaagaggatgccggcgatgaaaaaggctatgaatcttttccttggtttatcaaacgtgcgcacagtccatccagagggctttacagtgtacatatcaacccatatctcattcccttctttatcgggttacagaaccggtttacgcagtttcggcttagtgaaacaaaagaaatcaccaatccgtatgccatgcgtttatacgaatccctgtgtcagtatcgtaagccggatggctcaagcatcgtctctctgaaaatcgactggatcatagagcgttaccatgctgcctcaaagttaccagcgtatgcctgacttccgccgccgcttcctgcaggtctgtgttaatgagatcaacagcagaactccaatgcgcctctcatacattgagaaaaagaaaggccgccagacgactcatatctttttcgatatgcttcgtgatctgctcaagaacgttgatcttaaagggttcgagcctgatgtacgtattttgcttaccaaatacagcaatagtaatggctctcagtccccgtggatggaggagcaaattcgggatgcctggggaagcatggttctaaaaaatgttgtacgtgaaacggatgaagttggtaaagatacttcgttatcgacaccagctgccccgatggtggattcgttaattgcgcgcgtaggagtaatggctcgcggtaatgccattactttgcctgtatgtggtcgggatgtgaagtttactcttgaagtgctccggggtgatagtgttgagaagacctctcgggtatggtcaggtgctgtatcccagggaggtgagagttttatctatatgcccctgactggggctgctgcctttctttcagagatgccctgcccagagaggaggaatctaaagaagcagtgtggctacagtggctttgctgcatgcggttatcaatcacaagaacgtaaaaatagcccgcgaatcgtccagtcaaacgacctcactgaggcggcatatagtctctcccgggatcaaaaacgtatgctgtatctgttcgttgaccagatcagaaaatctgatggcaccctacaggaacatgacggtatctgcgagatccatgttgctaaatatgctgaaatattcggattgacctctgcggaagccagtaaggatatacggcaggcattgaagagtttcgcggggaaggaagtggttttttatcgccctgaagaggatgccggcgatgaaaaaggctatgaatcttttccttggtttatcaaacgtgcgcacagtccatccagagggctttacagtgtacatatcaacccatatctcattcccttctttatcgggttacagaaccggtttacgcagtttcggcttagtgaaacaaaagaaatcaccaatccgtatgccatgcgtttatacgaatccctgtgtcagtatcgtaagccggatggctcaggcatcgtctctctgaaaatcgactggatcatagagcgttaccagctgcctcaaagttaccagcgtatgcctgacttccgccgccgcttcctgcaggatcataactcttcaccagaaagggaacaaaactggatggagaatgagtttgacgaactgacagaagtaggcttcagaaggtgggtaataacaaactcctccgagctaaaggagcatgttctaacccaatgcaaggaagctaagaaccttgataaaaggttacaggaactgctaactagaataagcaatttagagaacatagatgacctgatggagctcaaaaacacagcacaagaacttcatgaaacatacacaagtatcaatagccaaactgatcaagcagaagaaaggatatcagagattggagatcaacttaatgaaataaacatgaagaccagattagaggagaaaaaaaaaggaaagggaacgaacaaaggcctccaagaaccactttggngatga

SEQ ID NO: 138704 - DNA, 4205 bp, Homo sapiens
atggagaaattgctactggaaaatgacagcttaagtaaggatgtaagccgcctagaaactgtgtttgtacctcctgagaaacatgaaaaagagataatagctctgaaatccaatattgttgaacttaagaaacagctgtctgaacttaagaaaaaatgtggtgaagaccaggagaaaatacacgctctcacatctgaaaacactaacttgaagaagatgatgagtaatcagtatgtgccagttaaaacccatgaagaggttaaaatgacactgaatgacacgttagccaaaactaacagagaattattagatgtgaagaaaaaatttgaagatataaatcaggaatttgtaaaaataaaagataagaatgaaatattaaaaagaaacctggaaaacactcagaaccaaataaaagctgagtacatcagcctggcagagcacgaggcaaagatgagctcgctaagtcagagcatgagaaaggtgcaggatagtaatgctgaaatcttggccaactacagaaaaggccaagaagagattgtgacactgcatgccgaaattaaagcacagaagaaggagctcgacacaatacaagaatgcattaagataatgaagcgtgcgcctgttattccaaaacatacgctcaatactcaaccggttgaagatacttcgttatcgacaccagctgccccgatggtggattcgttaattgcgcgcgtaggagtaatggctcgcggtaatgccattactttgcctgtatgtggtcgggatgtgaagtttactcttgaagtgctccggggtgatagtgttgagaagacctctcgggtatggtcaggtaatgaacgtgaccaggagctgcttactgaggacgcactggatgatctcatcccttcttttctactgactggtcaacagacaccggcgttcggtcgaagagtatctggtgtcatagaaattgccgatgggagtcgccgtcgtaaagctgctgcacttaccgaaagtgattatcgtgttctggttggcgagctggatgatgagcagatggctgcattatccagattgggtaacgattatcgcccaacaagtgcttatgaacgtggtcagcgttatgcaacccgaccgcagaatgaatttgctggaaatatttctgcgatggctgatgcggaaaatatttcacgtaagattattacccgctgtatcaacaccgccaaattgcctaaatcagttgttgctcttttttctcaccccggtgaactatctgcccggtcagttattgacagcgcgcctaacctgggtatcggcacgattaatgtcgtatgtgctgctgatgtgctgattgttcccacgcctgctgagttgtttgactacacctccgcactgcagtttttcgatatgcttcgtgatctgctcaagaacgttgatcttaaagggttcgagcctgatgtacgtattttgcttaccaaatacaccaatataaatgcttctcagtccccggtggatgagggagaaattcgggatggcctgggaaagcatggttctaaaaaatgttgtacgtgaaacggatgaagttggtaaaggtcagatccggatgagagctgattttgtgcacggccattgatcaacgctcttcaactggtgcctggagaaatgctctttctatttgggaacctgtctgcaatgaaattttcgatcgtctgattaaaccacgctctgagattacataatgaagcgggcgcctgttattccaaaacatacgctcaatactcaaccggttgaagatacttcgttatcgacaccagctgccccgatggtggattcgttaattgcgcgcgtaagaagtaatggctcgcggtaatgccattactttgcctgtatgtggtcgggatgtgaagtttactcttgaagtgctccggggtgatagtgttgagaagacctctcgggtatggtcaggtaatgaacgtgaccaggagctgcttactgaggacgcactggatgatctcatcccttcttttctactgactggtcaacagacaccggcgttcggtcgaagagtatctggtgtcatagaaattgccgatgggagtcgccgtcgtaaagctgctgcacttaccgaaagtgattatcgtgttctggttggcgagctggatgatgagcagatggctgcattatccagattgggtaacgattatcgcccaacaagtgcttatgaacgtggtcagcgttatgcaagccgattgcagaatgaatttgctggaaatatttcggcgctggctgatgcggaaaatatttcacgtaagattattatccgctggatcaacaccgccaaattggctaaatcagttgttgctcttttttctcacccggggaaatatctgcccggtcaagaagcttgcatgcctgcaggcatatggtgcaagctgttggtagatctaccattctggggtctggagcacagtggctcttctctcacagcttcactaggcagtggcccaagtggcactttgtgtgagggctccaaccccacgtttgccttctgcactgcccttgtagaagtttttcataagggctccattcctgcagtagacttctgcctggacatccaggtcgactctagaggatcccctttcgatatgcttcgtgatctgctcaagaacgttgatcttaaagggttcgagcctgatgtacgtattttgcttaccaaatacagcaatagtaatggctctcagtccccgtggatggaggagcaaattcgggatgcctggggaagcatggttctaaaaaatgttgtacgtgaaacggatgaagttggtaaaggtcagatccggatgagaactgtttttgaacaggccattgatcaacgctcttcaactgatacttcgttatcgacaccagctgccccgatggtggattcgttaattgcgcgcgtaggagtaatggctcgcggtaatgccattactttgcctgtatgtggtcgggatgtgaagtttactcttgaagtgctccggggtgatagtgttgagaagacctctcgggtatggtcaggtaatgaacgtgaccaggagctgcttactgaggacgcactggatgatctcatcccttcttttctactgactggtcaacagacaccggcgttcggtcgaagagtatctggtgtcatagaaattgccgatgggagtcgccgtcgtaaagctgctgcacttaccgaaagtgattatcgtgttctggttggcgagctggatgatgagcagatggctgcattatccagattgggtaacgattatcgcccaacaagtgcttatgaacgtggtcagcgttatgcaagccgattgcagaatgaatttgctggaaatatttctgcgctggctgatgcggaaaatatttcacgtaagattattacccgctgtatcaacaccgccaaattgcctaaatcagttgttgctcttttttctcaccccggtgaactatctgcccggtcaggtgatgcacttcaaaaagcctttacagataaagaggaattagttaagcagcaggcatctaacttacaaagcagaaaaaaatacagcaagatggccaggccactctatactgtattcaaggaaacccagagggcaactactcatctagtagaatcccacaccagtggcagaaacagccttcaaaacaataaagcaggccctagtacaagcgccagccttaagctttcccacaggacaaaacttctcttatttgtcatagagagagcaggagtagctcttgcactccttactcagacttgtgggacaaccccagaaccagtggcatatctaaattattacccgctgtatcaacaccgccaaaatgccctaaatcagttgtgcttcttttttctcacccccggtgaactatctgcccggtcaggtgatgcacttcaaaaagcctttacagataaagaggaattacttaagcagcaggcatctaaccttcatgagcagaaaaaagctggggtgatatttgaagctgaagaagttatcactcttttaacttctgtgcttaaaacgtcatctgcatcaagaactagtttaagctcacgacatcagtttgctcctggagcgacagtattgtataagggcgataaaatggtgcttaacctggacaggtctcgtgttccaactgagtgtatagagaaaattgaggccattcttaaggaacttgaaaagccagcaccctga

SEQ ID NO: 138705 - DNA, 4724 bp, Homo sapiens
  misc_feature (1)...(4724): n = a,t,c or g
atgaagcgtgcgcctgttattccaaaacatacgctcaatactcaaccggttgaagatacttcgttatcgacaccagctgccccgatggtggattcgttaattgcgcgcgtaggagtaatggctcgcggtaatgccattactttgcctgtatgtggtcgggatgtgaagtttactcttgaagtgctccggggtgatagtgttgagaagacctctcgggtatggtcaggtaatgaacgtgaccaggagctgcttactgaggacgcactggatgatctcatcccttcttttctactgactggtcaacagacaccggcgttcggtcgaagagtatctggtgtcatagaaattgccgatgggagtcgccgtcgtaaagctgctgcacttaccgaaagtgattatcgggttctgggtggcgagctggatgatgagcagatggctgctttatccagattggatacttcgttatcgacaccagctgccccgatggtggattcgttaattgcgcgcgtaggagtaatggctcgcggtaatgccattactttgcctgtatgtggtcgggaggtgaagtttactcttgaagtgctccggggtgatagtgttgagaagacctctcgggtatggtcaggtaatgaacgtgaccaggagctgcttactgaggacgcactggatgatctcatcccttcttttctactgactgggcaacagacaccggcgttcggtcgaagagtatctggtgtcatagaaattgccgatgggagtcgccgtcgtaaagctgctgcacttaccgaaagtgattattgtgttttggttggcgagctggatgataaacacatggctttattattcagaatggggtacgattatttgcccaacaaagtgcttatgaacgtggtcagcgttatgcaagccgattgcagaatgaatttgctggaaatatttctgcgctggctgatgcggaaaatatttcgcgttagattattacccgctgtaaaaacaccgccgaattgccagggtgcgggcttgtcaagttcgttaagaatggcgtcaaatgtcacgacacacgcagttggcacacgaggcctgtccaggttaagcaccatttcatcgccctcatacaaagcagtcgctccaggagcaaaccgatgtcgtgagcataaacgagttcttgaagcagatggcgttttaagcacagaagttaaaagagtgagaacttctgcagcttcagatatcaccccagctggcttctgctcatgcagggctatcaaagatgccgagaagccaggccgactcccgcacccggatagtggaatttcgagaccgggttgaccaaccgggttgtttctccatttggccaaattattctatatgcgtaatgtgtttggtccgcgattgccacgtgctaaagacgtatttccaccggtgatcggggttgctgcccataaaggtggcgtttacaaaacctcagtttctgttcatcttgctcaggatctggctctgaaggggctacgtgttttgctcgtggaaggtaaccgaccccccagggaacagcctcaatggtatcgcgggagggggacccagctcttcatatttaatcaagaagcccctttcctgcccttctatcttggggaaaaggacgatgtcacttatgcaataaagcccacttgctgcccggggcttaacattattccttcctgtctggctctgccccgtattgaaactgagttaatgggcaaatttgatgaaggtaaactgcccaccgatccacacctgatgctccgactggccattgaaactgttgctcatgctcatgactatgatgtcatagttattgacagcgcgcctaacctgggtatcggcacgattaatgtcgtatgtgctgctgatgtgcctgattgttctcacgcctgttgagatagtttgactacacctccgcacggcagtttttcgatatgcttcgtgatctgctcaagaacgcgtgatcttaaagggttcgagcctgaagtacgtattttgcttaccaaatacagcaatagtaatggctctcaattcccggtggatggaggagcaaattcgggatgcgtggggaagcatggttctaaaaaatgttgtacgtgaaaccggttgaagtgggtaaaggtgcagatccggatgagaacctgtttttgaacaggccattgatcaacgctcttcaactgatacttcgttatcgacaccagctgccccgatggtggattcgttaattgcgcgcgtaggagtaatggcctcccggtaatgccattactttgcctgtatgtggtcgggatgtgaagtttactcttgaagtgctccggggtgatagtgttgagaagacctctcgggtatggtcaggtaatgaacgtgaccaggagctgcttactgaggacgcactggatgatctcatcccttcttttctactgactggtcaacagacaccggcgttcggtcgaagagtatctggtgtcatagaaattgccgatgggagtcgccgtcgtaaagctgctgcacttaccgaaagtgattatcgtgttctggttggcgagctggatgatgagcagatggctgcattatccagattgggtaacgattatcgcccaacaagtgcttatgaacgtggtcagcgttatgcaagccgattgcagaatgaatttgctggaaatatttctgcgctggctgatgcggaaaatatttcacgtaagattattacccgctgtatcaacaccgccaaattgcctaaatcagttgttgctcttttttctcaccccggtgaagctatctgcccggtcaggatgttcagaatgaaactcatggaaacacttaaccagtgcataaacgctggtcatgaaatgacgaaggctatcgccattgcacagtttaatgatgacagcccggaagcgaggaaaataacccggcgctggagaataggtgaagcagcggatttagttggggtttcttctcaggctatcagagatgccgagaaagcagggcgnctaccgcacccggatatggaaattcgaggacgggttgagcaacgtgttggttatacaattgaacaaattaatcatatgcgtgatgtgtttggtacgcgattgcgacgtgctgaagacgtatttacaccggtgatcggggttgctgccataaagactgggaccacggtccatatcgtatcgtcgtccagtttattaggcggggaccatggtccatctcgtatcggcggtctattattagtctgtgactacgggcctctcgtatcgtcgtctgggatcagcggtcctactcgtatcgtcggtctgattattagtctgggaccaggataccacttgtgttttcggtctgattatcggactgggatcacggatccactttatattggtgatgcgactattcgcgtgagtctacgagtatattctttgccgtcaaggtcaaggattgaacatgtcgtcgctaactgtggaatgatccctaaacagcagcaaaacgaaaaataccaagtgcctcaattcgatcaatcaacgattaaaaatattgagtctgcaaaaggacttgatgtgtgggacagctggccgctgcaaaacgctgacggaacagtagctgaatacaacggctatcacgttgtgtttgctcttgcgggaagcccgaaagacgctgatgacacatcaatctacatgttttatcaaaaggtcggcgacaactcaatcgacagctggaaaaacgcgggccgtgtctttaaagacagcgataagttcgacgccaacgatccgatcctgaaagatcagacgcaagaatggtccggttctgcaacctttacatctgacggaaaaatccgtttattctacactgactattccggagtaatggctcgcggtaatgccattactttgcctgtatgtggtcgggatgtgaagtatactcttgaagtgctccggggtgatagtgttgagaagacctctcgggtatggtcaggtaatgaacgtgaccaggagctgcttactgaggacgcactggatgatctcatcccttcttttctactgactggtcaacagacaccggcgttcggtcgaagagtatctggtgtcatagaaattgccgatgggagtcgccgtcgtaaagctgctgcacttaccgaaagtgattatcgtgttctggttggcgagctggatgatgagcagatggctgcattatccagattgggtaacgattatcgcccaacaagtgcttatgaacgtggtcagcgttatgcaagccgattgcagaatgaatttgctggaaatatttctgcgctggctgatgcggaaaatatttcacgtaagattattacccgctgtatcaacaccgccaaattgcctaaatcagttgttgctcttttttctcaccccggtgaactatctgcccggtcaggtgatgcacttcaaaaagcctttacagataaagaggaattacttatgcagcaggcatctaaccttcatgagcagaaaaaagctggggtgatatttgaagctgaagaagttatcactcttttaacttctgtggctaaaacgtcatctgcatccagaactagtttaagctcacgacatcagtttggctcctggagcgacagtatttgtataagggcgataaaatggtgcttaacctggacatgtctcgtggttcaactggagtgtttagatcgcttgcatgcctgcaggtcgactctagaggatcccccatag

SEQ ID NO: 138706 - DNA, 3623 bp, Homo sapiens
atgaaactcatggaaacacttaaccagtgcataaacgctggtcatgaaatgacgaaggctatcgccattgcacagtttaatgatgacagcccggaagcgaggaaaataacccggcgctggagaataggtgaagcagcggatttagttggggtttcttctcaggctatcagagatgccgagaaagcagggcgactaccgcacccggatatggaaattcgaggacgggttgagcaacgtgttggttatacaattgaacaaattaatcatatgcgtgatgtgtttggtacgcgattgcgacgtgctgaagacgtatttccaccggtgatcggggttgctgcccataaaggtggcgtttacaaaacctcagtttctgttcatcttgctcaggatctggctctgaaggggctacgtgttttgctcgtggaaggtaacgacccccagggaacagcctcaatgtatcacggatgggtaccagatcttcatattcatgcagaagacactctcctgcctttctatcttggggaaaaggacgatgtcacttatgcaataaagcccacttgctggccggggcttgacattattccttcctgtctggctctgcaccgtattgaaactgagttaatgggcaaatttgatgaaggtaaactgcccaccgatccacacctgatgctccgactggccattgaaactgttgctcatgactatgatgtcatagttattgacagcgcgcctaacctgggtatcggcacgattaatgtcgtatgtgctgctgatgtgctgattgttcccacgcctgctgagttgtttgactacacctccgcactgcagtttttcgatatgcttcgtgatctgctcaagaacgttgatcttaaagggttcgagcctgatgctgaaacaagccagggagctctgggcacactggcaaatgtagtgacctcccttgccaacctaagtgaatctttgaacaacggtgacacttcagaaatccagccagaggaccagtctgcaagtgagataactcgggcatttgataccttagctaaagcacttaataccacagacagctcctcttctccaagcttggcagatgggatagacaccagtggaggagggagcatccacgtcatcagcagagaccagtcgacacccatcattgaggttgaaggccccctcctttcagacacacacgtcacatttaagtcaattcgggaggatcgaaacggcagatcgcaaaaaacagtacatacagaaggagacatgaacatgaacatcaaaaaaattgttaatcaagcccccaggttcgtacttttacggctgccacttctggcaggagaagcgactcaagccttcgcggaaagaaattacccaaaggccatacaaagaaacgtacggcgtctctcatattacacgccatgatatgctgcagatcccttaaacagcagcaaaacgaaaaattccaagggcctcatttcgatccaatcaacgaattaaaaatattgagtctgcaaaaggactttatgtgtgggcaagctggccgctgcaaaacgctgacggaacagtagctgaatacaacggctatcacgttgtgtttgctcctgcgggaagcccgaaagacgctgatgacacatcaatctacatgttttatcaaaaggtcggcgacaactcaatcgacagctggaaaaacgcgggccgtgtctttaaagacagcgataagttcgacgccaacgatcccgatcctgaaagatcagacgcaagaatggtgccggttctgcaacctttacatctgacggaaaaaatccggtttattctacactgactattccggtaaacattacggcaaacaaagcctgcctccttgcgcatgtttatgtgtcaaaatctgatgacacactcaaaatcaacggagtggaagatcacaaaacgatttttgacggagacggaaaaacatatcagaacgttcagcagtttatcgatgaaggcaattatacatccggcgaccaccatacgctgagagaccctcactacgttgaagacaaaggccataaataccttggtattcgaaagcccacacggggaacagaaaacggattcccaaggcgaagaatctttatttaacaaagcgtactacggcggcggcacttacttctttcgtaaagaaagccagaagcttcagcagagcgctaaaaaacgcgatgctgagttagcgaacggcgccccttcgtatcatagagttaaataatgattacacatctgaaaaaagtaatgaagccgctgatcacttcaaacacggtaactgatgaaaatcgagcgcgcgaatgttttcaaaatgaacggcaaatggtacttgttcactgatttcacgcgggttcaaaaatgaccgatcgatgggatttaaactcaacggatatttacatgcttggttatgtatcaaactctttaaccggcccttacaagccgctgaacaacaacaggggcttgtgctgcaaatgggtcttgatccaaacgatgtgacattcacttactctcacttcgcaagcagtgtctcactggtaatttattacagcctgctgcatccaaaatccacagacatctggcagggctgcctaaggaagtcctgtggcattgcaggaggtgataaaacagagagaagagattctccccgggccacagatctagctgggaagagaaccgagagctcaggctcatgccaaggggcaagttatgaaccaaccattttagggaagccccctacccctgagcaggtccccccagaggctgggctggggacccaggttgctgtggaggactctttcctcagtcatcaccactggctgtgggtgaaacttgccctaaaaacaggaaatgtgtctaagatcaatgccgcctttggagataacagtcctgcctattgtccacctgcatgggggttgagtcaacaggactacctgcagagaaaggccttgtctgcccagcaagagctcccatcctcatcccgtgacccctcaaccttagagaacagctctgcgtttgaaggtgtccctaaagcagaggccgacccattggaaacctcaagttacgtatcttttgccagcgatcagcaggatgaagcacctacccagaacccagcagccacgcaggggggagggcacccaaaggaaggagctgacgctgtttctgggacacaggggaaggggacagtcaacaacagacccctgactgcagacgatgactccatcctctcgggagggacctgggggactcagcttgagaaaccagaaaagccacaaggaggctcctaccacatggtgctttgctttgccctcaaaggacagaaggacagagaaagcgcggatctgggaagtgacggacagaacggtcaggacctggattggggaggcggttgcgcgactgctgctgacggtgtgacgttctctgttccggtcacaccacatacgttccgccattcctatgcgatgcacatgctgtatgccggtataccgctgaaagttctgcaaagcctgatgggacataagtgcatcagttcaacggaagtctacacgaaggtttttgcgctggatgtggctgcccggcaccgggtgcacgtttgcgatgccggagtctga

SEQ ID NO: 138707 - DNA, 10734 bp, Homo sapiens
  misc_feature (1)...(10734): n = a,t,c or g
atgcccttgagagccttcaacccagtcagctccttccggtgggcgcggggcatgactatcgtcgccgcacttatgactgtcttctttatcatgcaactcgtaggacaggtgccggcagcgctctgggtcattttcggcgaggaccgctttcgctggagcgcgacgatgatcggcctgtcgcttgcggtattcggaatcttgcacgccctcgctcaagccttcgtcactggtcccgccaccaaacgtttcggcgagaagcaggccattatcgccggcatggcggccgacgcgctgggctacgtcttgctggcgttcgcgacgcgaggctggatggccttccccattatgattcttctcgcttccggcggcatcgggatgcccgcgttgcaggccatgctgtccaggcagcctaacttcgatcattggaccgctgatcgtcacggcgatttatgccgcctcggcgagcacatggaacgggttggcatggattgtaggcgccgccctataccttgtctgcctccccgcgttgcgtcgcggtgcatggagccgggccacctcgacctgaatggaagccggcggcacctcgctaacggattcaccactccaagaattggagccaatcaattcttgcggagaactgtgaatgcgcaaaccaacccttggcagaacatatccatcgcgtccgccatctccagcagccgcacgcggcgcatctcgggcagcgttgggtcctggccacggtctggaaacgcggaagtcagcgccctgcaccattatgttccggatctgcatcgcaggatgctgctggctaccctgtggaacacctacatctgtattaacgaagcgctggcattgaccctgagtgatttttctctggtcccgccgcatccataccgccagttgtttaccctcacaacgttccataaccgggcatgttcatcatcagtaacccgtatcgtgagcatcctctctcgtttcatcggtatcattacccccatgaacagaaatcccccttacacggaggcatcagtgaccaaacaggaaaaaaccgcccttaacatggcccgctttatcagaagccagacattaacgcttctggagaaactcaacgagctggacgcggatgaacaggcagacatctgtgaatcgcttcacgaccacgctgatgagctttaccgcagctgcctcgcgcgtttcggtgatgacggaggagcgactcaagccttcgcgaaagaaaataaccaaaaaggcatacaaagaaacgtacggcgtctctcatattacacgccatgatatgctgcagatccctaaacagcagcaaaacgaaaaaataccaagtggctcaatttggatcaatcaaggattaaaaatattaattttgcaaaaggacttgatgtgtgggacagctggccgctgcaaaacgctgacggaacagtagctgaatacacgggctatcacgttgtgtttgctcttgcggaaggcccgaaagacgctgatgacacatcaatctacatgttttatcaaaagggtcggcgccaactcaatcgacagctggaaaaacgcggggccgtgtctttaaagacagcgataagttcgacgccaacgatccgatcctgaaagatcagacgcaagaatggtccggttctgcaacctttacatctgacggaaaaatccgtttattctacactgactattccggtaaacattacggccaaacaaagcctgacaacagcgcaggtaaatgtgtcaaaatctgatgacacactcaaaatcaacggagtggaagatcacaaaacgatttttgacggagacggaaaaacatatcagaacgttcagcagtttatcgatgaaggcaattatacatccggcgacaaccatacgctgagagaccctcactacgttgaagacaaaggccataaataccttgtattcgaagccaacacgggaacagaaaacggataccaaggcgaagaatctttatttaacaaagccgtactacggcggcggcacgaacttcttccgtaaagaaagccagaagcttcagcagagcgctaaaaaacgcgatgctgagttagcgaacggcgccctcggtatcatagagttaaataatgattacacattgaaaaaagtaatgaagccgctgatcacttcaaacacggtaactgatgaaatcgagcgcgcgaatgttttcaaaatgaacggcaaatggtacttgttcactgattcacgcggttcaaaaatgacgatcgatggtattaactcaaacgatatttacatgcttggttatgtatcaggatcaactaagttaccgctgatggccactggggtcagtccttctggggaccttatgagagactgtgtaggacatacttcagaactgtcccaccaaggcccaaggaaactaggatgtttatccagcaactcttgtctgtccttggttgagagctgttctcagggcaacttacagcccacccctcatgttcctatggctggagagggatcttcaggcaaagagacacagtgccctcccttttcggccgcggcgcgtgactggtgtgacaatctaaaaacttgtcacacttcacatggatctgtcatggcggaaacagcgggttatcaatcacaagaaacgtaaaaatagcccgcgaatcgtccagtcaaacgacctcactgaggcggcatatagtctctcccgggatcaaaaacgtatgctgtatctgttcgttgaccagatcagaaaatctgatggcaccctacagggaacatgacggtatctgcgagatccatgttgctaaatatgctgaaatattcggattgacctctgcggaagccagtaaggatatacggcaggcattgaagagtttcgcggggaaggaagtggttttttatcgccctgaagaggatgccggcgatgaaaaaggctatgaatcttttccttggtttatcaaacgcgcgcacaggtccattccagagggcgctttacagttgtaccatatgcaacccataaatcctcattcccttctttatcgggttacagaaccggtttacgcagtttcggcttagtgaaacaaaagaaatcaccaatccgtatgccatgcgtttatacgaatccctgtttcagtctagtaagactaatgggtcaggcatcgtctctctgaaaatcgactggatcatagagcgttaccagctgcctcaaagttaccagcgtatgcctgacttccgccgccgcttcctgcaggtctgtgttaatgagatcaacagcagaactccaatgcgcctctcatacattgagaaaaagaaaggccgccagacgactcatatcgctatcagagatgccgagaaagcagggcgactaccgcacccggatatggaaattcgaggacgggttgagcaacgtgttggttatacaattgaacaaattaatcatatgcgtgatgtgtttggtacgcgattgcgacgtgctgaagacgtatttccaccggtgatcggggttgctgcccataaaggtggcgtttacaaaacctcagtttctgttcatcttgctcaggatctggctctgaaggggctacgtgttttgctcgtggaaggtaacgacccccagggaacagccctcaatgtatcacgaatgggtccagaatcttcatattcatgcagaagacactctcctgcctttctatcttgggaaaaaggacgatgtcacttatgcaataaagcccacttgctggccggggcttgacattattccttcctgtctggctctgcaccgtattgaaactgagttaatgggcaaatttgatgaaggtaagctgcccaccgatccacacctgatgctccgactggccattgaaactgttgctcatgactatgatgtcatagttattgacagcgcgcctaacctgggtatcggcacgattaatgtcgtatgtgctgctgatgtgctgattgttcccacgcctgctgagttgtttgactacacctccgcactgcagtttttcgatatgcttcgtgatctgctcaagaacgttgatcttaaagggttcgagcctgatgtacgtattttgcttaccaaatacagcaatggggatcctctagcgaggaccggcattgcatcaccgagtggcattttattttttttttttatcagtttcacaagactggcgctcggtggcccccgagaagcataccatactaaaccaggccagaaccctgctgagaacagcagcacagaagctggaaacgatgaacctccagcacgctgtcccaagcaacaggaaactctagattggacatgggtgaagctggaaaccatcattctgagcaaactattgcaagaacagaaaaccaaacaccgcatgttctcactcaaagacggttttttcgcccttggacgtggaagtccacgttctttaatagtggactcttgttccaaactggaacaacactcaaccctatctcgggctattcttttgatttataagggattttgccgatttcggaaccaccatcaaacaggattttcgcctgctggggcaaaccagcgtggaccgcttgctgcaactctctcagggccaggcggtgaagggcaatcagctgttgcccgtctcactggtgaaaagaaaaaccaccctggcgcccaatacgcaaaccgcctctccccgcgcgttggccgattcattaatgcagctggcacgacaggtttcccgactggaaagcgggcagtgagcgcaacgcaattaataaaaaatttaagaaggggatcctctaccgacgggccgcgattcatgtctgagtgcgatgaaattcatctcaagccatatagaatgacattagccaaaacccaaaaggtaacaaatgctgacatcttcagtcaaccagacaacgggagccaattacaaacgcaaacagcttccgctcggagcgaccacataaagataacatccgggccacaacgtgaacgcacgcaagataacgcagccagacaggcagagacgaaatgctggaacggcgacagccaagacaaaggccataaaaaccaagatgcgaagccaaacacgggaacagaaagcggacaccaaggcgaagaatctttattaaacaaagcgcactacggcggcggcacgaacttcttccgtaaagaaagccagaagcttcagcagagcgctaaaaaacgcgatgctgagttagcgaacggcgccctcggtatcatagagttaaataatgattacacattgaaaaaagtaatgaagccgctgatcacttcaaacacggtaactgatgaaatcgagcgcgcgaatgttttcaaaatgaacggcaaatggtacttgttcactgattcacgccgttcaaaaatgacgatcgatggtattaactcaaacgatatttacatgcttggttatgtatcaaactctttaaccggcccttacaagccgctgaacaaaacagggcttgtgctgcaaatgggtcttgatccaaacgatgtgacattcacttactctcacttcgcagtgccgcaagccaaaggaaacaatgtggttatcacaagctacatgacaaacagaggcttcttcgaggataaaaaggcaacatttgcgccaagcttcttaatgaacatcaaaggcaataaaacatccgttgtcaaaaacagcatcctggagcaaggacagctgacagtcgggggccaaccccttcgcccagtgaaaaaccgcggccgggtctttaaaaacagcgatagttcgacgcccaacgatccgatcctgaaagatcagacgcaagaatggtccggttctgcaacctttacctctgagggaaaaatccgtttattctacactgactattccggtaaacattccggcaaacaaagcttgacaacagcgcaggtaaatgtgtcaaaatctgatgacacactcaaaatcaacggagtggaagatcacaaaacgatttttgacggagacggaaaaacatatcagaacgttcagcagtttatcgatgaaggcaattatacatccggcgacaaccatacgctgagagaccctcactacgttgaagacaaaggccataaataccttgtattcgaagccaacacgggaacagaaaacggataccaaggcgaagaatctttatttaacaaagcgtactacggcggcggcacgaacttcttccgtaaagaaagccagaagcttcagcagagcgctaaaaaacgcgatgctgagttagcgaacggcgccctcggtatcatagagttaaataatgattacacattgaaaaaagtaatgaagccgctgatcacttcaaacacggtaactgatgaaatcgagcgcgcgaatgttttcaaaatgaacggcaaatgcagtggcagtgtggacgtgtgtggactgtggcaaggtgctagccagcgccggggtgccagcctccatgcaggcatttgcagcagctgggtggcagcatggctggaggagggcagggggtccctgcaaggaatagaattgggcactcatgggggcagtctgctgttctccatgcttagttttgggcaggcagcagtgtcggcggcaggggctggtggtctcattgctgccagtgctcctatgacagtggtggtttactctagaggatccccgatcctgaaagatcagacgcaagaatggtccggttctgcaacctttacatctgacggaaaaatccgtttattctacactgactattccggtaaacattacggcaaacaaagcctgacaacagcgcaggtaaatgtgtcaaaatctgatgacacactcaaaatcaacggagtggaagatcacaaaacgatttttgacggagacggaaaaacatatcagaacgttcagcagtttatcgatgaaggcaattatacatccggcgacaaccatacgctgagagaccctcactacgttgaagacaaaggccataaataccttgtattcgaagccaacacgggaacagaaaacggataccaaggcgaagaatctttatttaacaaagcgtactacggcggcggcacgaacttcttccgtaaagaaagccagaagcttcagcagagcgctaaaaaacgcgatgctgagttagcgaacggcgccctcggtatcatagagttaaataatgattacacattgaaaaaagtaatgaagccgctgatcacttcaaacacggtaactgatgaaatcgagcgcgcgaatgttttcaaaatgaacggcaaatggtacttgttcactgattcacgcggttcaaaaatgacgatcgatgatcttcatattcatgcagaagacactctcctgcctttctatcttggggaaaaggacgatgtcacttatgcaataaagcccacttgctggccggggcttgacattattccttcctgtctggctctgcaccgtattgaaactgagttaatgggcaaatttgatgaaggtaaactgcccaccgatccacacctgatgctccgactggccattgaaactgttgctcatgactatgatgtcatagttattgacagcgcgcctaacctgggtatcggcacgattaatgtcgtatgtgctgctgatgtgctgattgttcccacgcctgctgagttgtttgactacacctccgcactgcagtttttcgatatgcttcgtgatctgctcaagaacgttgatcttaaagggttcgagcctgatgtacgtattttgcttaccaaatacagcaatagtaatggctctcagtccccgtggatggaggagcaaatttcggatgcctggggaagcatggttctaaaaaatgttgtacgtgaaacggatgaagttggtaaaggcatcccgaatttgctcctccatccacggggactgagagccattactattgctgtatttggtaagcaaaatacgtacatcaggctcgaaccctttaagatcaacgttcttgagcagatcacgaagcatatcgaaaaactgcagtgcggaggtgtagtcaaacaactcagcaggcgtgggaacaatcagcacatcagcagcacatacgacattaatcgtgccgatacccaggttaggcgcgctgtcaataactatgacatcatagtcatgagcaacagtttcaatggccagtcggagcatcaggctatcaagaattcccgagaaaacagggcggccttcggccacccggtatatgaaatttgaagaccggggtgaagcaccggtgtggtttatcaaattgaacaaattattcataggcgtaatgtgtttggtacgcgattgcgacgtgctgaagacgtatttccaccggtgatcggggttgctgcccataaaggtggcgtttacaaaacctcagtttctgttcatcttgctcaggatctggctctgaaggggctacgtgttttgctcgtggaaggtaacgacccccagggaacagcctcaatgtatcacggatgggtaccagatcttcatattcatgcagaagacactctcctgcctttctatcttggggaaaaggacgatgtcacttatgcaataaagcccacttgctggccggggcttgacattattccttcctgtctggctctgcaccgtattgaaactgagttaatgggcaaatttgatgaaggtaaactgcccaccgatccacacctgatgctccgactggccattgaaactgttgctcatgactatgatgtcatagttattgacagcgcgcctaacctgggtatcggcacgattaatgtccgaatactcttcctaccttactggtctgaagattcctattcatcttataagggagaggcctcttggaagcttgtgcctcatttcccctggacttcacccaatactcctttaccctttgctgattttgctttgtatccttttgctgtgaccgatcatagctgcnacaatgaatgcctgcaggtcgactctagaggatccccccatgataaagtgagagtcaatgaggtgacaaagctgtggaagtcctggggcactggatcagtcaaggtcctgtcactcaaggcagaaccagatggcaagggagcctattggtatagaccacataaggcaacctcttggatctcggagcagagtggagaagtctggagagtgcagctgaaggagccaacagtgaatatcccacagacttgttcagaattacaactccagggtccaaacctattagaaggcaatgttctcaagtttttcgatatgcttcgtgatctgctcaagaacgttgatcttaaagggttcgagcctgatgtacgtattttgcttaccaaatacagcaatagtaatggctctcagtccccgtggatggaggagcaaattcgggatgcctggggaagcatggttctaaaaaatgttgtacgtgaaacggatgaagttggtaaagatacttcgttatcgacaccagctgccccgatggtggattcgttaattgcgcgcgtaggagtaatggctcgcggtaatgccattactttgcctgtatgtggtcgggatgtgaagtttactcttgaagtgctccggggtgatagtgttgagaagacctctcgggtatggtcaggtaatgaacgtgaccaggagctgcttactgaggacgcactggatgatctcatcccttcttttctactgactggtcaacagacaccggcgttcggtcgaagagtatctggtgtcatagaaattgccgatgggagtcgccgtcgtaaagctgctgcacttaccgaaagtgattatcgtgttctggttggcgagctggatgatgagcagatggctgcattattcagattgggtaacgattatcgcccaacaagtgcttatgaacgtgttgcttcaaagagaataaaatacctaggaatccaacttacaagggacatgaaggacctcttcaaggagaactacaaactactgctcaatgaaataaaagaggatacaaacaaatggaagaccattccatgctcatgggtaggaagaatcaatatcgtgaaaatggccatactgcccaaggtaatttatagattcagtgccatccccctcaagctaccaatgactttcttcacagaattggaaaaaactactttaacgttcatatggaaccaaaaaagagcccgtattgccaagtcaatcctaagccaaaagaacaaagctggaggcatcaggctacctgacttcaaactatactacaagactacagtaaccaaaacagcatggtactggtaccacagcagagatagaggccaatggaacagaacagagccttcagaaataatgctgcgtatctacaaccatctgatctttgacaaaccctgggaaaaaccaagcaatgggggaaagggttcccctgtttaataaatggtgctgggaaaactggctagccatatgtagaaagctgaaactggatccccttcccttacaccttatacaaaaaatcaaattcaagatggattaaagactttaaatgttagatctaaaaccattaaaaaccctagaaggaaaacctaggcaatacccatttcaggacataggcatgggcaaggacttcatggctaaaacaccaaaagcaatggcaacaaaagccaaaattgacaaatgggatctaattaaactaaagagcttctgcacagcaaaagaaactaccatcagagtgaacaggcaacctacagaatgggagaaaatttttgcaatctatccatctgacaaagggctaatatccagaatctacaaagaacctaaacaaatttgcaaaaaaaaaaaaaagtcgacc

SEQ ID NO: 138708 - DNA, 3380 bp, Homo sapiens
  misc_feature (1)...(3380): n = a,t,c or g
atgaacatgaacatcaaaaaaattgtaaaacaagccacagttctgacttttacgactgcacttctggcaggaggagcgactcaagccttcgcgaaagaaaataaccaaaaagcatacaaagaaacgtacggcgtctctcatattacacgccatgatatgctgcagatccctaaacagcagcaaaacgaaaaataccaagtgcctcaattcgatcaatcaacgattaaaaatattgagtctgcaaaaggacttgatgtgtgggacagctggccgctgcaaaacgctgacggaacagtagctgaatacaacggctatcacgttgtgtttgctcttgcgggaagcccgaaagacgctgatgacacatcaatctacatgttttatcaaaaggtcggcgacaactcaatcgacagctggaaaaacgcgggccgtgtctttaaagacagcgataagttcgacgccaacgatccgatcctgaaagatcagacgcaagaacggtccggttctgcaacctttacatctgacggaaaaatccgtttattctacactgactattccggtaaacattacggcaaacaaagcctgacaacagcgcaggtaaatgtgtcaaaatctgatgacacactcaaaatcaacggagtggaagatcacaaaacgatttttgacggagacggaaaaacatatcagaacgttcagcagtttatcgatgaaggcaattatacatccggcgacaaccatacgttgagagaccctcactacgttgaagacaaaggccataaataccttgtattcgaagccaacacgggaacagaagaacggatacgacaggcgaagaactctttatttaccnagcgtgggcacactttgtcaactcgcgggtcactttgggagaactcaaaggtcggcgacaactcaatcgacagttggaaaaacgcgggccgcgtctttaaagacagcgataagttcgacgccaacgatccgatcctgaaagatcagacgcaagaatggtccggttctgcaacctttacatctgacggaaaaatccgtttattctacactgactattccggaaacattacgtctataaagcctgacaacagcgcagtggaagatcacaaaacgatttttgacggagacggaaaaacatatcagaacgttcagcagtttatcgatgaaggcaattatacatccggcgacaaccatacgctgagagaccctcactacgttgaagacaaaggccataaataccttgtattcgaagccaacacgggaacagaaaacggataccaaggcgaagaatctttatttaacaaagcgtactacggcggcggcacgaacttcttccgtaaagaaagccagaagcttcagcagagcgctaaaaaacgcgatgctgagttagcgaacggcgccctcggtatcatagagttaaataatgattacacattgaaaaaagtaatgaagccgctgatcacttcaaacacggtaactgatgaaatcgagcgcgcgaatgttttcaaaatgaacggcaaatggtacttgttcactgattcacgcggttcaaaaatgacgatcgatggtattaactcaaacgatatttacatgcttggttggcccagggcttcccggtatcaacagggacaccaggatttatttattctgcgaagtgatcttccgtcacaggtatttattcgcgataagctcatggagcggcgtaaccgtcgcacaggaaggacagagaaagcgcggatctgggaagtgacggacagaacggtcaggacctggattggggaggcggttgccgccgctgctgctgacggtgtgacgttctctgttccggtcacaccacatacgttccgccattcctatgcgatgcacatgctgtatgccgacttttttcatgctgcttctcgcctcttctctctggtgttcaaactgctaatctctcaggcccttgagtatgcaggtttctcttatctcaaagcctttgcaattgccggtccctctgcttataaatcccttcctgagtctttggatgctcaggggagactctgttctcaggctccacatgggcagtacctgaactgcaggcgcctcccctcacccaacaggtgcaatgctgcaggactccagatccgaggtctcacagattcaaataagcagaaaatcaccaagaacatattgcttaatgatattatccaggataacttccccaatctagcaaggcaggccaacattcaaattcaggaaatacagagaatgccacaaagatactcctcgagaagagcaactccaagacacataattgtcagattcaccaaagttgaaatgaaggaaaaaatattaagggcagacagagagaaaggtcaggttacccacaaagggaagcccatcagactaccagcggatctctcagcagaaactctacaagccagaagagagtgggggccaatattcaacattctttccttcatttcaactttggtgaatctgacaattatgtgtcttggtgtaccttaaagtgacggggagaatggaaccaagttggaaaacactctgcaggatattatccaggagaacttccccaatctagcaaggcaggccaaccgttcagattcaggaaataccagagaacgccacaaagatactccttgagaagagcaactccaagacacataattagtgtgggttcaccaaagttgaaatgaagggaaaaaatattaagggcagcccagagagaaaggtcggggttacccacaaagggaagcccatcagactaacaacagctgatctctcagcagaaacttctacaagcccagaagacagagtggggggccgatattcaacattctctaaagaaaagaattttccaacccagaatttccatatccagccaaacctaagcttcataagtgaaggagaaataaaatactttacagacaagccaaatgctgagagatttttgtcaccgccagcctcccgcctgccctaaaagagcaccaggcctgccctaaaagagctcctgaaggaagaagcacttaaacatgggaaagggaaccaaccagttacccagcttgcttgccaaaattcattgcccaaaattgttaaaggacccttcgagggcttagggaagggaacttgcatcaactaatggacaaaataaccagctaacattcataatgacaggatcaaattcacacataacaatattaactttaaatgtaaatgggctaaatgctcccatttaaaagacacagactgggcaaattggataaagagtcaagacccatcaatgtgctgtattcaggaaacccatctcacgtgcagagacacacataggctcaaaataaaaggatggaggaagatctaccaagcaaatggaaaac

SEQ ID NO: 138709 - DNA, 3641 bp, Homo sapiens
atggacgatatcccgcaagaggcccggcagtaccggcataaccaagcctatgcctacagcatccagggtgacggtgccgaggatgacgatgagcgcattgttagatttcatacacgggtcaccgtcgacagcgacacacttgcatcggatgcagcccggttaacgtgccggcacggcctgggtaaccagtgtgacaatctaaaaacttgtcacacttcacatggatctgtcatggcggaaacagcggttatcaatcacaagaaacggtaaaaatagcccgcgatcggtccagtcaaccgacctcactgaggcgggcatatagtctctcccagggatcaaaaacgtatgctgtatctgttcgttgaccagatcagaaaatctgatggcaccctaccaggaacatgacggtatctgcgagatccatgttgctaaatatgctgaaatattcgggattggccctctccgaaagccagtaaggatatagcggcaggcattgaagagtttcgcggggaaggaaagtggttttttatcgccctaaagaggatgccggcgataaaaaaggctatgaatctttttccttggtttatcaaacatgaaaacgtaattgtcacccatttcagtgaagaagtgaaaacagtggttgaaagttaccagcagagcatgaatatgagagcttctagtgaagtaacagaaccaggctacgccacaaggaactcaagaggtgtgctgcacaggctgcccagccatccatcaaagcggacctatgacggtatctgcgagatccatgttgctaaatatgctgaaatattcggattgacctctgcggaagccagtaaggatatacggcaggcattgaagagtttcgcggggaaggaagtggttttttatcgccctgaagaggatgccggcgatgaaaaaggctatgaatcttttccttggtttatcaaacggatgaagaatggtgcctggtatattgatctggctctgaaggggctacgtgttttgctcgtggaaggtaacgacccccaaggaaccagccccaatgttccccggatgggtgccagatcttcataattagtgcaaaacacagctcttctgcctttttatcttgttgaaaaggacgatgtcacttatgcaataaagcccacttgctggccggggcttgacattattccttcctgtctggctctgcaccgtattgaaactgagttaaatgggcaaatttgatgaagggaaactgcccaccgatccacacctgatgctccgactggccattgaaactgttgctcatgactatgatgtcatagttattgacagcgcgcctaacctgggtatcggcacgattaatgtcgtatgtgctgctgatgtgctgattgttcccacgcctgttgagctatgtttgattacgcctccgcactgcagttttttgatatgcttcgtgatctgctcaagaacgttgatcttaaagggttcgagcctgatgtacgtattttgcttaccaaatacagcaatagtaatggctctcagtccccgtggatggaggagcaaattcgggatgcctcccgaagcatggttctaaaaaatgttgtacgtaaaacggatgaagttggtaaagctgccccgatggtggattcgttaattgcgcgcgtaggagtaatggctcgcggtaatgccattactttgcctgtatgtggtcgggatgtgaagtttactctttgaattgttccgggggtgatagtgttaaaaagacctctcgggtatggtcaggtaatgaacgtgaccaggagcttgtttctagaggacgcactgaatgatctcatcccctcttttctactgactggtcaacaaacaccgggcgttcgttcgaaaagaatttggtgtcatagaaattcccgatgggagttcgccgtcgtaaagctgctgcacttcccgaaaagtaattatggtgttctggttgccgagctggatgatgagcagatgcctgcatatcccagattgggtaacgatttatcgcccaacaaagtgcttatgaaacgtggtcagcgttatgcaagccgaattgcagaatgaatttgctcggaaatatttctgcgctggctgatgcggaaaatatttcacgtaagattattacccgctgtatcaacaccgccaaatttgcttaaatcagttgttggtcttttttctccaccccggtgaactatctgcccggtcaggtgatgcacttcaaaaagcctttattgataaaggaggatttacttaagcagcaggcatctaaccttcatggagcagaaaaaagctggggtgatatttggaagctgaagaagttatcactctttttaccttctgtgcttaaaacgtcatctgcaatcaagaactagtttacagctcacgacatcagtttgctcctggagcgacagtattgtataagggcgataaaatggtgcttaacctggacaggtctcgtgttccaactgagtacagatacggtgtcttcttaaatgttcttcttccggcaacaaagtattttcagttgcacgatccaagcctacgtaacatggaacttaattactctctggcttcagaggatctggttttgaaggggctacgtgttttgctcgtggaaggtaacgacccccagggaacagcctcaatgtatcacggatgggtaccagatcttcatattcatgcagaagacactctcctgcctttctatcttggggaaaaggacgatgtcacttatgcaataaagcccacttgctggccggggcttgacattattccttcctgtctggctctgcaccgtattgaaactcacctaatgggcaaatttgatgaaggtaaactgcccaccgatccacacctgatgctccgactggccattgaaactgttgctcatgactatgatgtcatagttattgacagcgcgcctaacctgggtatcggcacgattaatgtcgtatgtgctgctgatgtgctgattgttcccacgcctgttgagcatgtttgattacgcttccgcacggcagtttttccatatgcttcgtcctctgctcaagaacgttgatcttaaagggttcgagcctgatgtacgtattttgcttaccaaatacagcaatagtaatggctctcagtccccgtggatggaggagcaaattcgggatgcctggggaagcatggttctaaaaaatgttaaagaatttgctggaaatatttctgcgctggctgatgcggaaaatatttcacgtaagattattacccgctgtatcaacaccgccaaattgcctaaatcagttgttgtcttttttctcaccccggtgaactatctgcccggtgatgcacttcaaaaagcctttacagataaagaggaattacttaagcagcaggcatctaaccttcatgagcagaaaaaagctggggtgatatttgaagctgaagaagttatcactcttttaacttctgtgcttaaaacgtcatctgcatcaagaactagtttaagctcacgacatcagtttgctcctggagcgacagtattgtataagggcgataaaatggtgcttaacctggacaggtctcgtgttccaactgagtgtatagagaaaattgaggccattcttaaggaacttgaaaagccagcaccctga

SEQ ID NO: 138710 - DNA, 1962 bp, Homo sapiens
  misc_feature (1)...(1962): n = a,t,c or g
ctaaacgtagtgagggtctctcagcgtatggttgtcgccggatgtataattgccttcatcgataaactgctgaacgttctgatatgtttttccgtctccgtcaaaaatcgttttgtgatcttccactccgttgattttgagtgtgtttctattttgtgacacatttacctgcgctgttgtcaggctttgtttgccgtaatgtttaccggaatagtcagtgtagaataaacggatttttccgtcagatgtaaaggttgcagaaccggaccattcttgcgtctgatctttcaggatcggatcgttggcgtcgaacttatcgctgtctttaaagacacggcccgcgtttttccagctgtcgattgagttgtcgccgaccttttgataaaacatgtagattgatgtgtcatcagcgtctttcgggcttcccgcaagagcaaacacaacgtgatagccgntgtattcagctactggttccgtcagcggtttgcagcggccagctgttccacacatcaagtccttttgcagactcaatatttttaatcgttgattgatcgaattgaggcacttggtatttttcgctttgctgctgtttaggatagcatttgagactgacaggtatcgatcatagctgatgaggacaatgttatatacagatgctgtacataacagatagtcagtagtgagccaaaatacacagatttcctttccaaaatcccattcgaacagcgtgtgagggatgtacaaaggaatggagatcacaccgagggcgccgttcgctaactcagcatcgcgttttttagcgctctgctgaagcttctggctttctttacggaagaagttcgtgccgccgccgtagtacgctttgttaaataaagattcttcgccttggtattttttttctgttcccgtgttggcttcgaatacaaggtatttatggcctttgtcttcaacgtagtgagggtctctcagcgtatggttgtcgccggatgtataattgccttcatcgataaactgctgaacgttctgatatgtttttccgtctccgtcaaaaatcgttttgtgatcttccactccgttgattttgagtgtgtcatcagattttgacacatttacctgcgctgttgtcaggctttgtttgccgtaatgtttaccggaatagtcagtgtagaataaacggatttttccgtcagatgtaaaggttgcagaaccggaccattcttgcgtctgatctttcaggatcggatcgttggcgtcgaacttatcgctgtctttaaagacacggcccgcgtttttccagctgtcgattgagttgtcgccgaccgcgtttgaagtgatcagcggcttcattacttttttcaatgtgtaatcattatttaactctatgataccgagggcgccgttcgctaactcagcatcgcgttttttagcgctctgctgaagcttctggctttctttacggaagaagttcgtgccgccgccgtagtacgctttgttaaataaagattcttcgccttggtatccgttttctgttcccgtgttggcttcgaatacaaggtatttatggcctttgtcttcaacgtagtgagggtctctcagcgtatggttgtcgccggatgtataattgccttcatcgataaactgctgaacgttctgatatgtttttccgtctccgtcaaaaatcgttttgtgatcttccactccgttgattttgagtgtgtcatcagattttgacacatttacctgcgctgttgtcaggctttgtttgccgtaatgtttaccggaatagtcagtgtagaataaacggatttttccgtcagatgtaaaggttgcagaaccggaccattcttgcgtctgatctttcaggatcggatcgttggcgtcgaacttatcgctgtctttaaagacacggcccgcgtttttccagctgtcgattgagttgtcgccgaccttttgataaaacat

SEQ ID NO: 138711 - DNA, 1086 bp, Homo sapiens; identical to SEQ ID NO: 135846

SEQ ID NO: 138712 - DNA, 1494 bp, Homo sapiens; identical to SEQ ID NO: 127562

SEQ ID NO: 138713 - DNA, 1611 bp, Homo sapiens
atggcggaaacagcggttatcaatcacaagaaacgtaaaaatagcccgcgaatcgtccagtcaaacgacctcactgaggcggcatatagtctctcccgggatcaaaaacgtatgctgtatctgttcgttgaccagatcagaaaatctgatggcaccctactgtacatgacgtatcgtaagccggatggctcaggcatcgtctctctgaaaatcgactggatcatagagcgttaccagctgcctcaaagttaccagcgtatgcctgacttccgccgccgcttcctgcagtgcataaacgctggtcatgaaatgacgaaggctatcgccattgcacagtttaatgatgacagcccggaagcgaggaaaataacccggcgctggagaataggtgaagcagcggatttacttggggtttcttctcaggctatcagagatgccgagaaagcagggccactaccgcacccggatatggaaaatcgaggacgggttgagcaacggggtggttataccattgaaccaaataatcatatgcgtgatggtgttggtacgcgatggcgacgtgctgaagacgtattttccaccgctgatcgggggttgctggccataaaggggggcggttacaaaacctcagtttctgttcatcttgctcaggatctggctctgaaggggctacgtgttttgctcgtggaaggtaacgacccccagggaacagcctcaatgtatcacggatgggtaccagatcttcatattcatgcagaagacactctcctgcctttctatcttggggaaaaggacgatgtcacttatgcaataaagcccacttgctggccggggcttgacattattccttcctgtctggctctgcaccgtattgaaactgagttaatgggcaaatttgatgaaggtaaactgcccaccgatccacacctgatgctccgactggccattgaaactgttgctcatgactatgatgtcatagttattgacagcgcgcctaacctgggtatcggcacgattaatgtcgtatgtgctgctgatgtgctgattgttcccacgcctgctgagttgtttgactacacctccgcactgcagtttttcgatatgcttccggatctggtcaagaaccgcgatcttaaaggggtcgagcctgatatgagaaaacagaggcacaggaaagctaaggatttacttgcacaggaccctacagctatgaccacagatgaactcttaaaagaagcaaccagatgtcccatctgcacagcttacttagaaaagccaatgtccttggagtgtgaatgtgtcttctgcctcagctgcaccaattcactgcagaaggagccccaaggggaaggtgtcttgtgtcccttctgcctggaggcttctcagaaaaacaacatcaggctcaatcggcagctggggaggctggtttcgcacattaaggaactggagcccaagctgaaaaagattctgaagatgaacttcaaggatgcggaagttccaagattctccagccccaaaccctgctcctccttcttctccacctgttacctgtccaaaaactgctcaaaccacccatgctattctccctatcctggaagtggctggggctga

SEQ ID NO: 138714 - DNA, 1131 bp, Homo sapiens
atgctccgactggccattgaaactgttgctcatgactatgatgtcatagttattgacagcgcgcctaacctgggtatcggcacgattaatgtcgtatgtgctgctgatgtgctgattgttcccacgcctgctgagttgtttgactacacctccgcactgcagtttttcgatatgcttcgtgatctgctcaagaacgttgatcttaaagggttcgagcctgatgtacgtattttgcttaccaaatacagcaatagtaatggctctcagtccccgtggatggaggagcaaattcgggatgcctggggaagcatggttctaaaaaatgttgtacgtgaaacggatgaagttggtaaagtagctgaatacaacggctatcactttgtgtttgctcttgcgggaagcccgaaagacgctgttgacacatcaatctacatgttttatcaaaaggtcggtgacaactcaatcgacagctggaaaaacgcgggccgtgtctttaaagacagcgataagttcgtcgccaacgatccgatcctgaaagatcagacgcaagaatggtccggttctgcaacctttacatctgacggaaaaatccgtttattctacactggctatgccggtaaacattacggcaaacaaagcctgacaacagcgcaggtaaatgtgtcaaaatctgatgacacactcaaaatcaacggagtggaagatcacaaaacgatttttgacggagacggaaaaacatatcagaacgttcagcagattatcgatgaaggcaattatacatccggcgacaaccatacactgagagaccctcactacgttgaagacaaaggccataaataccttgtattcgaagccaacacgggaacagaaaacggataccaaggcgaagaatctttatttaacaaagcgtactacggcggcggcacgaacttcttccgtaaagaaagccagaagcttcagcagagcgctaaaaaacgcgatgctgagttagcgaacggcgccctcggtgtgacgcacccagtccaatttcgactactgacggtgaccattcactccttcgactcctcggttgtgctacagaggacgcgtaggctactaatcgggatggacaatagtatcacgtatctatga

SEQ ID NO: 138715 - DNA, 1257 bp, Homo sapiens; identical to SEQ ID NO: 137335

SEQ ID NO: 138716 - DNA, 1974 bp, Homo sapiens; identical to SEQ ID NO: 127326

SEQ ID NO: 138717 - DNA, 1704 bp, Homo sapiens
ttagtctgggaccacggtcccactcgtatcgtcggtctgataatcagactgggaccacggtcccactcgtatcgtcggtctgattattagtactgggaccatggtcccactcgtatcgtcggtctgattattagtctgggaccacggtcccactcgtatcgtcggtctgattattagtctgtccaggttaagcaccattttatcgcccttatacaatactgtcgctccaggagcaaactgatgtcgtgagcttaaactagttcttgatgcagatgacgttttaagcacagaagttaaaagagtgataacttcttcagcttcaaatatcaccccagcttttttctgctcatgaaggttagatgcctgctgcttaagtaattcctctttatctgtaaaggctttttgaagtgcatcacctgaccgggcagatagttcaccggggtgagaaaaaagagcaacaactgatttaggcaatttggcggtgttgatacagcgggtaataatcttacgtgaaatattttccgcatcagccagcgcagaaatatttccagcaaattcattctgcaataggcttgcataacgctgaccacgttcataagcacttgttgggcgataatcgttacccaatctggataatgcagccatctgctcatcacccagctcgccaaccagaacacgatatcgctttcggtaagtgcagcagctcagtttctgttcatcttgctcaggatctggctctgaaggggctacgtgttttgctcgtggaaggtaacgacccccagggaacagcctcaatgtatcacggatgggtaccagatcttcatattcatgcagaagacactctcctgcctttctatcgatccacacctgatgctccgactggccattgaaactgttgctcatgactatgatgtcatagttattgacagcgcgcctaacctgggtatcggcacgattaatgtcgtatgtgctgctgatgtgctgattgttcccacgcctgctgagttgtttgactacacctccgcactgcagtttttcgatatgcttcgtgatctgctcaagaacgttgatcttaaagggttcgagcctgatgtacgtattttggtagtgagggtctctcagcgtatggttgtcgccggatgtataattgccttcatcgataaactgctgaacgttctgatatgttttccgttctccgtcaaaaatcgttttgtgatcttccactccgttgattttgagtgtgtcatcagattttgacacatttacctgcgctgttgtcaggctttgtttgccgtaatgtttaccggaatagtcagtgtagaataaacggatttttccgtcagatgtaaaggttgcagaaccggaccattcttgcgtctgatctttcaggatcggatcgttggcgtcgaacttatcgctgtctttaaagacacggcccgcgtttttccagctgtcgattgagttgtcgccgaccttttgataaaacatgtagattgatgtgtcatcagcgtctttcgggcttcccgcaagagcaaacacaacgtgatagccgttgtattcagctactgttccgtcagcgttttgcagcggccagctgtcccacacatcaagtccttttgcagactcaatatttttaatcgttgattgatcgaattgaggcacttggtatttttcgttttgctgctgtttagggatctgcagcat

SEQ ID NO: 138718 - DNA, 3216 bp, Homo sapiens; identical to SEQ ID NO: 121216

SEQ ID NO: 138719 - DNA, 1446 bp, Homo sapiens
atgagttcttcagataaggatttcgatttcagcgtggccaatatggtcaacttcttcgcccccgttttccccatgggcaaatattatacgcaagccgacaaggtgctcatccccctggcgattcaggaacatgacggtatctgcgagatccatgttgctaaatatgctgaaatattcggattgacttctgcggaagccagtaaggatatacggcaggcattgaagagtttcgcggggaaggaagtggttttttatcgccctgaagaggatgccggcgatgaaaaaggctatgaatcttttccttggtttatcaaacgtgcgcacagtccatccagagggctttacagtgtacatatcaacccatatctcattcccttctttatcgggttacagaaccggtttacgcagtttcggcttagtgaaacaaaagaaatcaccaatccgtatgccatgcgtttatacgaatccctgtgtcagtatcgtaagccggatggctcaggcatcgtctctctgaaaatcccctggatcatagagcgttaccagctgcctcaaagttaccagcgtatgcatgacttccgccgccgcttcctgcaggtctgtgttaatgagatcaacagcagaactccaatgcgcctctcatacaccccaaaaagaaaggccgccagacgactcatagcggtgaggacacagccttcaaggcaccatcttagaaggagagacctggccctaaccaggcaccaagccctccggcaccttcatcttcgacttcccagcgtccaggactgtgagaaatcaatttctgctgttgataaattatccagtctcagtggtcgggatgtgaagtttactcttaaagtgttcgggggtgatagtgttgagaagacctctcgggtatggtcaggtaatgaacgtgaccaggagctgcttactgaggacgcactggatgatctcatcccttcttttctactgactggtcaacagacaccggcgttcggtcgaagagtatctggtgtcatagaaattgccgatgggagtcgccgtcgtaaagctgctgcacttaccgaaagtgattatcgtgttctggttggcgagctggatgatgagcagatggctgcattatccagattgggtaacgattatcgcccaacaagtgcttatgaacgtggtcagcgttatgcaagccgattgcagaatgaatttgctggaaatatttctgcgctggctgatgcggaaaatatttcacgtaagattattacccgctgtatcaacaccgccaaattgcctaaatcagttgttgctcttttttctcaccccggtgaactatctgcccggtcaggtgatgcacttcaaaaagcctttacagataaagaggaattacttaagcagcaggcatctaacttcatgagcagaaaaaaggtcaataagtttttccattattttccataa

SEQ ID NO: 138720 - DNA, 2601 bp, Homo sapiens
atggggacaggcaagaagcaagctgcaaacctcagctttgtgatgagtgctcagagacatatgagcactcatcacagtagaggagcaaaaatggcagctagggtcctgcgtggacagtcaggaaaggcccctctgccaagtccttgtgatgccccttcatcagaatatgttccttcaagggacccaggctttagtggttctcctcagagaggtgtggtcaaaacactggcaagacacacccttctcaggcatctccagaatggccccctgctcctgcccagtgtgcgctggcgagtttatgggaaggtgcctggagaggacactctgggaactggggctctgggaaagagaaagtggaaaaataaggcaacttctggaagcatgggcagcagggaggctaacgatagagcagggcttctcaacttcggctctgctgatattcagggcagggccactccttgctggggggactgcagctgtcgagcagcatccctaatctccaatcaggagtgcataaacgctggtcatgaaatgacgaaggctatcgccattgcacagtttaatgatgacagcccggaagcgaggaaaataaccgggcgctggagaataggtgaagcagcggatttagttggggtttcttctcaggctatcagagatgccgagaaagcagggcgactaccgcacccggatatggaaattcgaggacgggttgagcaacgtgttggttatacaattgaacaaattaatcatatgcgtgatgtgtttggtacgcgattgcgacgtgctgaagacgtatttccaccggtgatcggggttgctgcccataaaggtggcgtttacaaaacctcagtttctgttcatcttgctcaggatctggctctgaaggggctacgtgttttgctcgtggaaggtaacgacccccagggaacagcctcaatgtatcacggatgggtaccagatcttcatattcatgcagaagacactctcctgcctttctatcttggggaaaaggacgatgtcaattatgcaataaagcccacttgctggccggggcttgacattattccttcctgtctggctctgcaccgtattgaaactgagttaatgggcaaatttgatgaagagtggctgtgcacccccattgtgaataagacaccggcgttcggtcgaagagtatctggtgtcatagaaattgccgatgggagtcgccgtcgtaaagctgctgcacttaccgaaagtgattatcgtgttctggttggcgagctggatgatgagcagatggctgcattatccagattgggtaacgattatcgcccaacaagtgcttatgaacgtggtcagcgttatgcaagccgattgcagaatgaatttgctggaaatatttctgcgctggctgatgcggaaaatatttcacgtaagattattacccgctgtatcaacaccgccaaattgcctaaatcagttgttgctcttttttcttcaccccgaggtgtagtgagagaagcagctttcaaggtgatttctctgcatggaggttatgtccagatctggaaagcacccagccaggattccgtttctggatcaggtagtgcaatgtcaagagcagaaagaatccagtccaaaccctatgagatgagtaatgttatattcactttacagatggataaattgaggagcagagatgaaacggctgtcgcaagatcactcaggtcggcgccaactcaattgacagttggaaaaaacccgggccgtgtttttaaagacagcgataagttcgacgccaacgatccgatcctgaaagatcagacgcaagaatggtccggttctgcaacctttacatctgacggaaaaatccgtttattctacactgactattccggtaaacattacggcaaacaaagcctgacaacagcgcaggtaaatgtgtcaaaatctgatgacacactcaaaatcaacggagtggaagatcacaaaacgatttttgacggagacggaaaaacatatcagaacgttcagcagtttatcgatgaaggcaattatacatccggcgacaaccatacgctgagagaccctcactacgttgaagacaaaggccataaataccttgtattcgaagccaacacgggaacagaaaacggataccaaggcgaagaatctttatttaacaaagcgtactacggcggcggcacgaacttcttccgtaaagaaagccagaagcttcagcagagcgctaaaaaacgcgatgctgagttagcgaacggcgccctcggtatcatagagttaaataatgattacacattgaaaaaagtaatgaagccgctgatcacttcaaacacgggattttgccgatttcggaaccaccatcaaacaggattttcgcctgctggggcaaaccagcgtggaccgcttgctgcaactctctcagggccaggcggtgaagggcaatcagctgttgcccgtctcactggtgaaaagaaaaaccaccctggcgcccaatacgcaaaccgcctctccccgcgcgttggccgattcattaatgcagctggcacgacaggtttcccgactggaaagcgggcagtgagcgcaacgcaattaatgtga

SEQ ID NO: 138721 - DNA, 3069 bp, Homo sapiens; identical to SEQ ID NO: 121218

SEQ ID NO: 138722 - DNA, 1515 bp, Homo sapiens; identical to SEQ ID NO: 119297

SEQ ID NO: 138723 - DNA, 1206 bp, Homo sapiens
atgatagagcgtaagaccaaggatctggctctgaaggggctacgtgttttgctcgtggaaggtaacgacccccagggaacagcctcaatgtatcacggatgggtaccagatcttcatattcatgcagaagacactctcctgcctttctatcttggggaaaaggacgatgtcacttatgcaataaagcccacttgctggccggggcttgacattattccttcctgtctggctctgcaccgtattgaaactgagttaatgggcaaatttgatgaaggtaaactgcccaccgatccacacctgatgctccgactggccattgaaactgttgctcatgactatgatgtcatagttattgacagcgcgcctaacctgggtctcggcacgattaatgtcggattttgccgatttcggaaccaccatcaaacaggattttcgcctgctggggcaaaccagcgtggaccgcttgctgcaactctctcagggccaggcggtgaagggcaatcagctgttgcccgtctcactggtgaaaagaaaaaccaccctggcgcccaatacgcaaaccgcctctccccgcgcgttggccgattcattaatgcagctggcacgacaggatcggctctgaaggggctacgtgttttgctcgtggaaggtaacgacccccagggaacagcctcaatgtatcacggatgggtaccagatcttcatattcatgcagaagacactctcctgcctttctatcttggggaaaaggacgatgtcacttatgcaataaagcccacttgctggccggggcttgacattattccttcctgtctggctctgcaccgtattgaaactgagttaatgggcaaatttgatgaaggtaaactgcccaccgatccacacctgatgctccgactggccattgaaactgttgctcatgactatgatgtcatagttattgacagcgcgcctaacctgggtatcggcacgattaatgtcgtatgtgctgctgatgtgctgattgttcccacgcctgctgagttgtttgactacacctccgcactgcagtttttcgatatgcttcgtgatctgctcaagaacgttgatcttaaagggttcgagcctgatgtacgtattttgcttaccaaatacagcaatagtaatggctctcagtccccgtggatggaggagcaaattcgggatgctgagggaagcaggttctaa

SEQ ID NO: 138724 - DNA, 939 bp, Homo sapiens
atgttcacttatgcaataaagcccacttgctggccggggcttgacattattccttcctgtctggttctgcaccgtattgaaactgagttaatgggcaaatttgatgaaggtaaactgcccaccgatccacacctgatgctccgactggccattgaaactgttgctcatgactatgatgtcatagttattgacagcgcgcctaacctgggtatcggcacgattaatgtcgtatgtgctgctgatgtgctgattgttcccacgcctgctgagttgtttgactacacctccgcactgcagtttttcgatatgcttcgtgatctgctcaagaacgttgatcttaaagggttcgagcctgatgtacgtattttgcttaccaaatacagcaatagtaatggctctcagtccccgtggatggaggagcaaattcgggatgcctggggaagcatggttctaaaaaatgttgtacgtgagacggatgaagttggtaaagcaaccagggagcctaactggggtatcggcacgattaatgtcgtatgtgctgctgatgtgctgattgttcccacgcctgctgagttgtttgactacacctccgcaatgcagtttttcgatatgcttcgtgatgaactcaagaacgttgatcttaaagggttcgagcctgatgtacgtattttgcttaccaaatacagcaatagtaatggctctcagtccccgtggatggaggagcaaattcgggatgcctggggaagcatggttctaaaaaatgttgtacgtgaaacggatgaagttggtaaaggtcagatccggatgagaactgtttttgaacaggccattgatcaacgctcttcaactggtgcctggagaaatgctctttctatttgggaacctgtctgcaatgaaattttcgatcgtctgattaaaccacgctgggagattagataa

SEQ ID NO: 138725 - DNA, 1410 bp, Homo sapiens
  misc_feature (1)...(1410): n = a,t,c or g
ctatcctgtcgtcatggaagtgatatcgcggaaggaaaatacgatatgagtcgtctggcggcctttctttttctcaatgtatgagaggcgcattggagttctgctgttgatctcattaacacagacctgcaggaagcggcggcggaagtcaggcatacgctggtaactttgaggcagctggtaacgctctatgatccagtcgattttcagagagacgatgcctgagccatccggcttacgatactgacacagggattcgtataaacgcatggcatacggattggtgatttcttttgtttcactaagccgaaactgcgtaaaccggttctgtaacccgataaagaagggaatgagatatgggttgatatgtacactgtaaagccctctggatggactgtgcgcacgtttgataaaccaaggaaaagattcatagcctttttcatcgccggcatcctcttcagggcgataaaaaaccacttccttccccgcgaaactcttcaatgcctgccgtatatccttactggcttccgcagaggtcaatccgaatatttcagcatatttagcaacatggatctcgcagataccgtcatgttcctgtagggtgccatcagattttctgatctggtcaacgaacagatacagcatacgtttttgatcccgggagagactatatgccgcctcagtgaggtcgtttgactggacgattcgcgggctatttttacgtttcttgtgattgataaccgctgtttccgccatgacagatccatgtgaagtgtgacaagtttttagattgtcacanccagaagcctcatgaccggcagacagcgctttcacaccgcacacaaacgtttcacggtccgaccccagcaccaccgctcgctcatccagcgccgaccgtgtcaacgccagcgagtacccaacatccagcgaggagacatcaggtcgctcgtccagataggtcatcaacgccgttgcctgcgcggatagcgcttcgggtgttttgcccgacaccatccacggcaccaccggaacatccacgacagaacccgaacccggccccgcagactgactcggcactcccgggggctgttcgaggatgacgtgcgcgttagtaccactgatcccgaacgacgacacccccacccgacgaacacgaccactcctgggccagggcgtgttctccgtaaggagttgaaccgtccccgccgaccaatccacctccggcgacggcgattccacgtgcaacgtgcgtggcagctgcccgtgccgcatcgccatcaccatcttgatcacaccagccacacccgccgccgcttgcgtatgaccgatgttcgacttgaccgaccccaaccacaacggccggccaggatcacgatcacggccgtaggtggcgatcagcgccagcgcgac

SEQ ID NO: 138726 - DNA, 1215 bp, Homo sapiens
atgggtctctctctcaagggccctgaatctgctcccattcctaagacaccgcaatttaataaaatcctctttaagcccatcgcagtgtacaaccggtttacgcagtttcggcttagtgaaacaaaagaaatcaccaatccgtatgccatgcgtttatacgaatccctgtgtcagtatcagcgttaccagctgcctcaaagttaccagcgtatgcctgacttccgccgccgcttcctgcaggtctgtgttaatgagatcaacagcagaactccaatgcgcctctcatacattgagaaaaagaaaggccgccagacgactcatatcgctatcagagatgccgagaaagcagggcgactaccgcacccggatatggaaattcgaggacgggttgagcaacgtgttggttatacaattgaacaaattaatcatatgcgtgatgtgtttggtacgcgattgcgacgtgctgaagacgtatttccaccggtgatcggggttgctgcccataaaggtggcgtttacaaaacctcagtttctgttcatcttgctcaggatctggctctgaaggggctacgtgttttgctcgtggaaggtaacgacccccagggaacagcctcaatgtatcacggatgggtaccagatcttcatattcatgcagaagacactctcctgcctttctatcttggggaaaaggacgatgtcacttatgcaataaagcccacttgctggccggggcttgacattattccttcctgtctggctctgcaccgtattgaaactgagttaatgggcaaatttgatgaaggtaaactgcccaccgatccacacctgatgctccgactggccattgaaactgttgctcatgactatgatgtcatagttattgacagcgcgcctaacctgggtatcggcacgattaatgtcgtatgtgctgctgatgtgctgattgttcccacgcctgctgagttgtttgactacacctccgcactgcagtttttcgatatgcttcgtgatctgctcaagaacgttgatcttaaagggttcgagcctgatgtacgaacgggtctgtcctggtgtgaccagatgcctcgcacgtgtcagtccctgaggattcaaagacgaagtagatgctggtatgcacagctgggagacctgaagatggatcacatcacaggactctttgcagacattcaccagcaccagcctggagcccagtag

SEQ ID NO: 138727 - DNA, 3384 bp, Homo sapiens; identical to SEQ ID NO: 127568

SEQ ID NO: 138728 - DNA, 1464 bp, Homo sapiens
  misc_feature (1)...(1464): n = a,t,c or g
atggttggatgtcntgcaaaatngcntctnaggaggggcttgctcggtacgcgattgcgactttctgaagacgtatttccaccggtgctcggggttgctgcccataaaggtggcgtggacaaaacctcagtttctgttcatcttgctcaggatctggctctgaaggggctacgtgttttgctcgtggaaggtaacgacccccagggaacagcctcaatgtatcacggatgggtaccagagcttcatattcatgcagaagacactctcctgcctttctatcttggggaaaaggacgatgtcacttatgcaataaagcccacttgctggccggggcttgacattattccttcctgtctggctctgcaccgtattgaaactgagttaatgggcaaatttgatgaaggtaaactgcccaccgatccacacctgatgctccgactggccattgaaactgttgctcatgactatgatgtcatagttattgacagcgcgcctaacctgggtatcggcacgattaatgtcgtatgtgctgctgatgtgctgattgttcccacgcctgctgagttgtttgactacacctccgcactgcagtttttcgatatgcttcgtgatctgctcaagaacgttgatcttaaagggttcgagcctgatgtacgtattttgcttaccaaatacagcaatagtaatggctctcagtccccgtggatggaggagcaaattcgggatgcctgggggaagcatggttctaaaaaatgttgtggcgtttcaaaacctggagtttctgttcatcttgctcaggatctggctctgaaggggctacgtgttttgctcgtggaaggtaacgacccccagggaacagcctcaatgtatcacggatgggtaccagatcttcatattggtgcagaagacactctcctgcctttctatcttggggaaaaggacgatgtcacttatgcaataaagcccacttgctggccggggcttgacattattccttcctgtctggctctgcaccgtattgaaactgagttaatgggcaaatttgatgaagcgcctaacctgggtatcggcacgattaatgtcgtatgtgctgctgatgtgctgattgttcccacgcctgctgagttgtttgactacacctccgcactgcagtttttcgatatgcttcgtgatctgctcaagaacgttgatcttaaagggttcgagcctgatccgctgaacaaaacagggcttgtgctgttaatgggtcttgatccaaacgatgtgacattcagttggtgtcacttcgcagtgccgcaagccaaaggcaacaatgtggttatgacaagctacatgacaaacagaggcttcttcgaggataaaaaggcaacatttgcgccaagcttcttaatgaacatcaaaggcaataaaacatccgttgtcaaaaacagcatcctggagcaaggacagctgacagtcaactaa

SEQ ID NO: 138729 - DNA, 1248 bp, Homo sapiens
atgaagaacaagaggggagtggaagatcacaaaccgatttttgacggagacgaaaaaacatatcagaacgttcagcagtttatcgatgaaggcaattatacatccggcgacaaccatacgttgagagaccctcactacgttgaagacaaagcccataaataccttgtattcgaagccaacacgggaacagaaaacggataccaaggcgaagaatctttatttaacaaagcgtactacggcggcggcacgaacttctcccgtaaagaaagccagaagcttcagcagagcgctaaaaaaaaagatgctgagttagcgaacggcgccctcggtatcatagagttaaataatgattacacattgaaaaaagtaatgaagccgctgatcacttcaaacacgatgggtcggtttctccacctttacttgggaggaaaaaaccgtttattctacactgactattccggtaatcattccggcaaaaaaagcctgccaccagcgcaggtaaatgggtcaaattctgatgccacactcaaatccaccggaggggaagatcacaaaccgatttttgccggagacggaaaaacatatcagaacgttcagcagtttatcgatgaaggcaattatacatccggcgacaaccatacgttgagagaccctcactacgttgaagacaaaggccataaataccttgtattcgaagccaacacgggaacagaaaacggataccaaggcgaagaatctttatttaacaaagcgtactacggcggcggcacgaacttcttccgtaaagaaagccagaagcttcagcagagcgctaaaaaacgcccccctgagttagcgaacggcgccctcggtatcatagagttaaataatgattacacattgaaaaaagtaatgaagccgctgatcacttcaaacacggtaactgataaatcgagcgcgcgaatgtttcaaaatgaacggcaaatggactgttcacggatcttcggttcaaaaattcgtataatggattttgccgatttcggaacccccatcaaacaggattttcgcctgctggggcaaaccagcgtggaccgcttgctgcaactctctcagggccaggcggtgaagggcaatcagctgttgcccgtctcactggtgaaaagaaaaaccaccctggcgcccaatacgcaaaccgcctctccccgcgcgttggccgattcattaatgcagctggcacgacaggtttcccgactggaaagcgggcagtga

SEQ ID NO: 138730 - DNA, 1428 bp, Homo sapiens; identical to SEQ ID NO: 135993

SEQ ID NO: 138731 - DNA, 933 bp, Homo sapiens
gctttgcagaactttcagcggtataccggcatacagcatgtgcatcgcataggaatggcggaacgcaattatacatcgggcgacaaccatacgctgagagaccctcactacgttgaagacaaaggccataaatactttgtattcgaagccaacacgggaacagaaaacggataccaaggcgaagaatctttatttaacaaagcgtactacggcggcggcacgaacttcttctgtaaagaaagccagaagcttcagcagagcgctaaaaaacgcgatgctgagttagcgaacggcgccctcggtatcatagagttaaataatgattacacattgaaaaaagtaatgaagccgctgatcacttcaaacacggtaactgatgaaatcgagcgcgcgaatgttttcaaaatgaacggcaaatggtacttgttcactgattcacgcggttcaaaaatcacgatcgatggtattaactcaaacgatatttacatgcttggttatgtatcaaactctttaaccggcccttacaagccgctgaacaaaacagggcttgtgctgcaaatgggtcttgatccaaacgatgtgacattcacttactctcacttcgcagtgccgcaagccaaaggcaacaatgtatgtgacaatctaaaaacttgtcacacttcacatggatctgtcatggcggaaacagcggttatcaatcacaagaaacgtaaaaatagcccgcgaatcgtccagtcccacgacctcactgaggcggcatatagtctctcccgggatcaaaaacgtatgctgtatctgttcgttgaccagatcagaaaatctgatggcaccctacaggaacatgacggtatctgcgagatccatgttgctaaatatgctgaaacactcggagtgacctctgcggaagccacgtcagttgctgctctcctttaa

SEQ ID NO: 138732 - DNA, 2787 bp, Homo sapiens; identical to SEQ ID NO: 127569

SEQ ID NO: 138733 - DNA, 1812 bp, Homo sapiens; identical to SEQ ID NO: 119773

SEQ ID NO: 138734 - DNA, 855 bp, Homo sapiens
ctatcctgtcgtcatggaagtgatatcgcggaaggaaaatacgatatgagtcgtctggcggcctttctttttctcaatgtatgagaggcgcattggagttctgctgttgatctcattaacacagacctgcaggaagcggcggcggaagtcaggcatacgctggtaactttgaggcagctggtaacgctctatgatccagtcgattttcagagagacgatgcctgagccatccggcttacgatactgacacagggattcgtataaacgcatggcatacggattggtgatttcttttgtttcactaagccgaaactgcgtaaaccggttctgtaacccgataaagaagggaatgagatatgggttgatatgtacactgtaaagccctctggatggactgtgcgcacgtttgataaaccaaggaaaagattcatagcctttttcatcgccggcatcctcttcagggcgataaaaaaccacttccttccccgcgaaactcttcaatgcctgccgtatatccttactggcttccgcagaggtcaatccgaatattttagcatatttagcaacatggatctcgcagataccgtcatgttcctggtaggtggccataagattttcgtctttcattgccatacggaactccggatgagcattcatcaggcgggcaagaatgtgaataaaggccggataaaacttgtgcttatttttctttacggtctttaaaaaggccgtaatatccagctgaacggtctggttataggtacattgagcaactgactgaaatgcctcaaaatgttctttacgatgccattgggatatatcaacggtggtatatccagtgatttttttctccat

SEQ ID NO: 138735 - DNA, 1470 bp, Homo sapiens; identical to SEQ ID NO: 127570
  misc_feature (1)...(1470): n = a,t,c or g

SEQ ID NO: 138736 - DNA, 927 bp, Homo sapiens
  misc_feature (1)...(927): n = a,t,c or g
atggcggaaacagcggttatcaatcacaagaaacgtaaaaatagcccgcgaatcgtccagtcaaacgacctcactgaggcggcatatagtctctcccgggatcaaaaacgtatgctgtatctgttcgttgaccagatcagaaaatctgatggcaccctacaggaacatgacggtatctgcgagatccatgttgctaaatatgctgaaatattcggattgacctctgcggaagccatagctgaatacaacggctatcacgttgtgtttgctcttgcgggaagcccgaaagacgctgatgacacatcaatctacatgttttatcaaaaggtcggcgacaactcaatcgacagctggaaaaacgcgggccgtgtctttaaagacagcgataagttcgacgccaacgatccgatcctgaaagatcagacgcaagaatggtccggttctgcaacctttacatctgacggaaaaatccgtttattctacactgactattccggtaaacattacggcaaacaaagcctgacaacagcgcaggtaaatgtgtcaaaatctgatgacacactcaaaatcaacggagtggaagatcacaaaacgatttttgacggagacggaaaaacatatcagaacgttcagcagtttatcgatgaaggcaattatacatccggcgacaaccatacgctgagagaccctcactacgttgaagacaaaggccataaataccttgtattcgaagccaacacgggaacagaaaacggataccaaggcgaagaatctttatttaacanagcatatctaagaacgcaacagaaaggagttatatcggattctgcttctatgcagaatgacttgtatacttgggctgaaaagctttttaaacaccaggacaaaaattctgtgggccatttgagtgtaaaggctttgtcctaa

SEQ ID NO: 138737 - DNA, 1887 bp, Homo sapiens
atgaaactcatggaaacacttaaccagtgcataaacgctggtcatgaaatgacgaaggctatcgccattgcacagtttaatgatgacagcccggaagcgaggaaaataacccggcgctggagaataggtgaagcagcggatttagttggggtttcttctcaggctatcagagatgccgagaaagcagggcgactaccgcacccggatatggaaattcgaggacgggttgagcaacgtgttggttatacaattgaacaaattaatcatatgcgtgatgtgtttggtacgcgattgcgacgtgctgaagacgtatttccaccggtgatcggggttgctgcccataaaggtggcgtttacaaaacctcagtttctgttcatcttgctcaggatctggctctgaaggggctacgtgttttgctcgtggaaggtaacgacccccagggaacagcctcaatgtatcacggatgggtaccagatcttcatattcatgcagaagacactctcctgcctttctatcttggggaaaaggacgatgtcacttatgcaataaagcccacttgctggccggggcttgacattattccttcctgtctggctctgcaccgtattgaaactgagttaatgggcaaatttgatgaaggtaaactgcccaccgatccacacctgatgctccgactggccattgaaactgttgctcatgactatgatgtcatagttattgacagcgcgcctaacctgggtatcggcacgattaatgtcgtatgtgctgctgatgtgctgattgttcccacgcctgctgagttgtttgactacacctccgcactgcagtttttcgatatgcttcgtgatctgctcaagaacgttgatcttaaagggttcgagcctgatcacgagaacttcatgaagcatacacaagtatcaatagctgaatcaagtggaagaaagatatcacagattgaagatcaacttaatgaaataaagcatgaagacaaaattaaagaaaaaagaataaaaaggaatgaacaaagcctccaagaaatatgggactatatgaaaagaccaaatctatgtctgattggcatacctgaaagtgatggggagaataaaaccaagttggaaaacactcttcaggatattatccaggagaactcccccaacctagcaagacaggccaacattcaaattcaggaaatacagagaacaccacaagatactcttcaagaagagcaacccccaagacatataattgtcagattcaccaaggttgaaatgaaggaaaaaatcttaagggcagccagagagaaagaaatacaaactaccatcagagaatactttaaacacctctatgcaaataaactagaaaatctagaagaaatggataaattcctggacacatataccctcccaagtctacaccaggaagaagttgaatccctgaatagaccaataacaagttctgcaattcaggcagtaattaatagcctaccaaccaaaaaaattcaaggactagatggattcacagccaaattctaccagaggaacaaggaggtgcttgtactgttccttctgaaactattccaaacaaaagaaaaagaaggactcctccctaagtcattttatgaggccagcatcatcctgataccaaaacctggcagagacacaaccaaaaacgaaaatttcagcccaatatctctgatgaatattgatgtgaaaatcctcagtaaaacactggcaaaccaaatccagcagcacatcaaaaagcttttccaccatgatcaagctggcttcatccctgggatgcaaggctggttcaacacatgcaaatcaataaacataatccatcacataaacagaaccaatgacaaaaccacaggattatctcaatag

SEQ ID NO: 138738 - DNA, 1134 bp, Homo sapiens; identical to SEQ ID NO: 135856

SEQ ID NO: 138739 - DNA, 3300 bp, Homo sapiens; identical to SEQ ID NO: 135857
  misc_feature (1)...(3300): n = a,t,c or g

SEQ ID NO: 138740 - DNA, 1794 bp, Homo sapiens
atgcctgcaagcggtaacgaaaacgatttgaatatgccttcaggaacaatagaaatcttcgtgcggtgttacgttgaagtggagcggattatgtcagcatggacagaacaacctaatgaacacagaaccatgatgtggtctgtccttttacagccatgtgacaatctaaaaacttgtcacacttcacatggatctgtcatggcggaaacagcggttatcaatcacaagaaacgtaaaaatagcccgcgaatcgtccagtcaaacgacctcactgaggcggcatatagtctctcccgggatcaaaaacgtatgctgtatctgttcgttgaccagatcagaaaatctgatggcaccctacaggaacatgacggtatctgcgagatccatgttgctaaatatgctgaaatattcggattgacctctgcggaagccagtaaggatatacggcaggcattgaagagtttcgcggggaaggaagtggttttttatcgccctgaagaggatgccggcgatgaaaaaggctatgaatcttttccttggtttatcaaacgtgcgcacagtccatccagagggcttacagtgtacatatcaacccatatctcattcccttctttatcgggttacagaaccggtttacgcagtttcggcttagtgaaacaaaagaaatcaccaatccgtatgccatgcgtttatacgaatccctgtgtcagtatcgtaagtcttgaatcaaattatgttaatgttaaattgaggaacatggcagttaatttgcattatttagatgatacagaatgtttgcatttaatgtttgtggtaagggtaatggcttatacagtccatgctccacaatcagatgaagttaggtccggttactgcacctttacatctgacggaaaaatccgtttattctacactgactattccggtaaacattacggcaaacaaagcctgacaacagcgcaggtaaatgtgtcaaaatctgatgacacactcaaaatcaacggagtggaagatcacaaaacgatttttgacggagacggaaaaacatatcagaacgttcagcagtttatcgatgaaggcaattatacatccggcgacaaccatacgctgagagaccctcactacgttgaagacaaaggccataaataccttgtattcgaagccaacacgggaacagaaaacggataccaaggcgaagaatctttatttaacaaagcgtactacggcggcggcacgaacttcttccgtaaagaaagccagaagcttcagcagagcgctaaaaaacgcgatgctgagttagcgaacggcgccctcggtatcatagagttaaataatgattacacattgaaaaaagtaatgaagccgctgatcacttcaaacacggtaactgatgaaatcgagcgcgcgaatgttttcaaaatgaacggcaaatggtacttgttcactgattcacgcggttcaaaaatgacgatcgatggtattaactcaaacgatatttacatgcttggttatgtatcaaactctttaaccggcccttacaagccgctgaacaaaacagggcttgtgctgcaaatgggtcttgatccaaacgatgtgacattcacttactctcacttcgcagtgccgcaagccaaaggcaacaatgtggttatcacaagctacatgacaaacagaggcttcttcgaggataaaaaggcaacatttgcgccaagcttcttaatgaacatcaaaggcaataaaacatccgttgtcaaaaacagcatcctggagcaaggacagctgacagtcaactaa

SEQ ID NO: 138741 - DNA, 898 bp, Homo sapiens; identical to SEQ ID NO: 135858

SEQ ID NO: 138742 - DNA, 3288 bp, Homo sapiens; identical to SEQ ID NO: 127333

SEQ ID NO: 138743 - DNA, 1257 bp, Homo sapiens
atgacgcaactcaatcaagaaacagtcaaaatcactcagcaaaacaggctgaatgcaaaatccagcagtggggtttaccttctgcctggagcgaaaacaccggcaagactggaaagccagatcggtactttacgtatgtcgctggtgaatattacgcctgatgcagatggcaccacccttacactacgtattcagggtgagtcgaatgatcccttgcccgcattcagcggaactgttgaatatgggcaaattcagggaacaatagacaactttcaggaaatcaatgtgcagaatcaattgattaatgcccctgccagcgtcctcgcccccagcgatgttgatattccgttacagttaaaggggatttctgtggatcagttaggctttgtacaggatacccgtttattctacactgactattcctgtaaacattacggcaaacaaagcctcacaacagcgcaggtaaatgtgtcaaaatctgatgacacactcaaaatcaacggagtggaagatcacaaaacgatttttgacggagacggaaaaacatatcagaacgttcagcagtttatcgatgaaggcaattatacatccggcgacaaccatacgctgagagaccctcactacgttgaagacaaaggccataaataccttgtattcgaagccaacacgggaacagaaaacggataccaaggcgaagaatctttatttaacaaagcgtactacggcggcggcacgaacttcttccgtaaagaaagccagaagcttcagcagagcgctaaaaaacgcgatgctgagttagcgaacggcgccctcggtatcatagagttaaataatgattacacattgaaaaaagtaatgaagccgctgatcacttcaaacacggtaactgatgaaatcgagcgcgcgaatgttttcaaaatgaacggcaaatggtacttgttcactgattcacgcggttcaaaaatgacgatcgatggtattaactcaaacgatatttacatgcttggacgcgatatgttcgacgccaacgatccgatcctgaaagatcagacgcaagaatggtccggttctgcaacctttacatctgacggaaaaatccgtttattctacactgactattccggtaaacattacggcaaacaaagcctgacaccagcgccggtaaaatggtgtcaaaatctggtgacccccctcaaaaattgggggggagggaagaatccaaaacgatttttggccgggaccggaaaaactttttga

SEQ ID NO: 138744 - DNA, 1116 bp, Homo sapiens; identical to SEQ ID NO: 121484
  misc_feature (1)...(1116): n = a,t,c or g

SEQ ID NO: 138745 - DNA, 1176 bp, Homo sapiens; identical to SEQ ID NO: 121221

SEQ ID NO: 138746 - DNA, 1980 bp, Homo sapiens; identical to SEQ ID NO: 119299
  misc_feature (1)...(1980): n = a,t,c or g

SEQ ID NO: 138747 - DNA, 1932 bp, Homo sapiens; identical to SEQ ID NO: 119300
  misc_feature (1)...(1932): n = a,t,c or g

SEQ ID NO: 138748 - DNA, 837 bp, Homo sapiens
  misc_feature (1)...(837): n = a,t,c or g
atgggcaaatttgatgaaggtaaactgcccaccgatccacacctgatgctccgactggccattgaaactgttgctcatgactatgatgtcatagttattgacagcgcgcctaacctgggtatcggcacgattaatgtcgtatgtgctgctgatgtgctgattgttcccacgcctgctgagttgtttgactacacctccgcactgcagtttttcgatatgcttcgtgatctgctcaagaacgttgatcttaaagggttcgagcctgatgtacgtatggtgctccggggtgatagtgttgagaagacctctcgggtatggtcaggtaatgaacgtgaccaggagctgcttactgaggacgcactggatgatctcatcccttcttttctactgactggtcaacagacaccggcgttcggtcgaagagtatctggtgtcatagaaattgccgatgggagtcgccgtcgtaaagctgctgcacttaccgaaagtgattatcgtgttctggttggcgagctggatgatgagcagatggctgcattatccagattgggtaacgattatcgcccaacaagtgcttatgaacgtggtcagcgttatgcaagccgattgcagaatgaatttgctggaaatatttctgcgctggctgatgcggaaaatatttcacnagaatacctcttcatcgccggcatcctcttcagggcgataaaaaaccacttccttccccgcgaaactcttcaatgcctgccgtatatccttactggcttccgcagaggtcaatccgaatatttcagcatatttagcaacatggatctcgcagataccgtcatgttcctgtag

SEQ ID NO: 138749 - DNA, 1767 bp, Homo sapiens
  misc_feature (1)...(1767): n = a,t,c or g
atgggaaaaccgcatctggtngctacgtctnactcgggtcntanagnaacccccaatccgtatgccatgcgtttatacgaatccctgtgtcagtatcgtaagccggatggctcaggcatcgtctctctgaaaatcgactggatcatagagcgttaccagctgcctcaaagttaccagcgtatgcctgacttccgccgccgcttcctgcagtgtgacaatctaaaaacttgtcacacttcacatggatctgtcatggcggaaacagcggttatcaatcacaagaaacgtaaaaatagcccgcgaatcgtccagtcaaacgacctcactgaggcggcatatagtctctcccgggatcaaaaacgtatgctgtatctgttcgttgaccagatcagaaaatctgatggcaccctacaggaacatgacggtatctgcgagatccatgttgctaaatatgctgaaatattcggattgacctctgcggaagccactgctgtacttaccgaaagtgattatcgtgttctggttggcgagctggatgatgagcagatggctgcattatccagattgggtaacgattatcgcccaacaagtgcttatgaacgtggtcagcgttatgcaagccgattgcagaatgaatttgctggaaatatttctgcgctggctgatgcggaaaatatttcacaacattttgaggcatttcagtcagttgctcaatgtacctataaccagaccgttcagctggatattacggcctttttaaagaccgtaaagaaaaataagcacaagttttatccggcctttattcacattcttgcccgcctgatgaatgctcatccggagttccgtatggcaatgaaagacgggtttattgagaatatgtttttcgtctcagccaatccctgggtgagtttcaccagttttgatttaaacgtggccaatatggacaacttcttcgcccccgttttcaccatgggcaaatattatacgcaaggcgacaaggtgctgatgccgctggcgattcannagaaaccccctcctcgatatagggtcaccgtcgacagcgacacacttgcatcggatgcagcccggttaacgtgccggcacggcctgggtaaccagnagaaaaacatcaccaatccgtatgccatgcgtttatacgaatccctgtgtcagtatcgtaagccggatggctcaggcatcgtctctctgaaaatcgactggatcatagagcgttaccagctgcctcaaagttaccagcgtatgcctgacttccgccgccgcttcctgcagacaccggcgttcggtcgaagagtatctggtgtcatagaaattgccgatgggagtcgccgtcgtaaagctgctgcacttaccgaaagtgattatcgtgttctggttggcgagctggatgatgagcagatggctgcattatccagattgggtaacgattatcgcccaacaagtgcttatgaacgtggtcagcgttatgcaagccgattgcagaatgaatttgctggaaatatttctgcgctggctgatgcggaaaatatttcacgtaagattattacccgctgtatcaacaccgccaaattgcctaaatcagttgttgctcttttttctcaccccggtgaactatctgcccggtcagaccgacgatacgagtgggaccgtggtcccagtctgattatcagaccgacgatacgagtgggaccgtggtcccagactaataatcagaccgacgatacgagtgggaccgtggtcccagactaa

SEQ ID NO: 138750 - DNA, 1774 bp, Homo sapiens
ggattttgccgatttcggaaccaccatcaaacaggattttcgcctgctggggcaaaccagcgtggaccgcttgctgcaactctctcagggccaggcggtgaagggcaatcagctgttgcccgtctcactggtgaaaagaaaaaccaccctggcgcccaatacgcaaaccgcctctccccgcgcgttggccgattcattaatgcagctggcacgacaggtttcccgactggaaagcgggcagttgggggacaaattcaattgccagtgggaaaaacccgggccgtgttctttaaagccagccgataagtttgacgcccaacgatccggatctgaaaagatcagacgcaagaatggtccggtttctgcaacttttacatctgacggaaaaatcggtttattttacactgactatcccggtaaacattacggcaaacaaagcctgacaacagcgcaggtaaatgtgtcaaaatctgatgacacactcaaaatcaacggagtggaagatcacaaaacgatttttgacggagacggaaaaacatatcagaacgttcagcagtttatcgatgaaggcaattatacatccggcgacaaccatacgctgagagaccctcactacgttgaagacaaaggccataaataccttgtattcgaagccaacacgggaacagaaaacggataccaaggcgaagaatctttatttaacaaagcgtactacggcggcggcacgaacttcttccgtaaagaaagccagaagcttcagcagagcgctaaaaaacgcgatgctgagttagcgaacggcgccctcggtatcatagagttaaataatgattacacattgaaaaaagtaatgaagccgctgatcacttcaaacacggtaactgatgaaatcgagcgcgcgaatgttttcaaaatgaacggcaaatggttgttcaaatactgcatgctgctgctatttttcaaaattccttttgaatccatagatcccccttctgagttttcttgcagttcattgttaaaccaggttgcttgtgctgtacatcaatgcttcacacactttagcatagaaaagaaccccctgacaccggcgttcggtcgaagagtatctggtgtcatagaaattgccgatgggagtcgccgtcgtaaagctgctgcacttaccgaaagtgattatcgtgttctggttggcgagctggatgatgagcagatggctgcattatccagattgggtaacgattatcgcccaacaagtgcttatgaacgtggtcagcgttatgcaagccgattgcagaatgaatttgctggaaatatttctgcgctggctgatgcggaaaatatttcacgtaagattattacccgctgtatcaacaccgccaaattgcttaaatcagttgttgctcttttttctcaccccggtgaactatctgcccggtcaggtgatgcacttcaaaaagcctttacagataaagaggaattacttaagcagcaggcatctaaccttcatgagcagaaaaaagctggggtgatatttgaagctgaagaagttatcactcttttaacttctgtgcttaaaacgtcatctgcatcaagaactagtttaagctcacgacatcagtttgctcctggagcgacagtattgtataagggcgataaaatggtgcttaacctggacagttgctcatactatcctatgtatatcaccaatgtaacaacagctgtttttattgctgctgtcattgtgctggaaaagcgcaaacatgtttgtacagctttctaa

SEQ ID NO: 138751 - DNA, 1341 bp, Homo sapiens; identical to SEQ ID NO: 119089

SEQ ID NO: 138752 - DNA, 4289 bp, Homo sapiens; identical to SEQ ID NO: 135998
  misc_feature (1)...(4289): n = a,t,c or g

SEQ ID NO: 138753 - DNA, 2034 bp, Homo sapiens
  misc_feature (1)...(2034): n = a,t,c or g
atgaaactcatggaaacacttaaccagtgcataaacgctggtcatgaaatgacgaaggctatcgccattgcacagtttaatgatgacagcccggaagcgaggaaaataacccggcgctggagaataggtgaagcagcggatttagttggggtttcttctcaggctatcagagatgccgagaaagcagggcgactaccgcacccggatatggaaattcgaggacgggttgagcaacgtgttggttatacaattgaacaaattaatcatatgcgtgatgtgtttggtacgcgattgcgacgtgctgaagacgtatttccaccggtgatcggggttgctgcccataaagaaaacactctcctgcctttctatcttggggaaaagggcgatgtcacttatgccataaagccacttgctgggcggggcttgacatatttcttcctgtctggctctgcccggattgaaaatgagttaatgggcaaatttgttgaaaggaaactggccacccatacaaccttaagcttcgactggccattggaaacgaccccgcagctactcccaccgcacatcctctcgccggtcttcgcgtctgcgtctccctcccgctgttggcgcgttgcttcgggcaagtactgcaaggtgttccggggctctggattccaagcccagnagatcccccaacctacgctgagagaccctcactacgttgaagacaaaggccataaataccttgtattcgaagccaacacgggaacagaaaacggataccaaggcgaagaatctttatttaacaaagcgtactacggcggcggcacgaacttcttccgtaaagaaagccagaagcttcagcagagcgctaaaaaacgcgatgctgagttagcgaacggcgccctcggtatcatagagttaaataatgattacacattgaaaaaagtaatgaagccgctgatcacttcaaacacggtaactgatgaaatcgagcgcgcgaatgttttcaaaatgaacggcaaatggtacttgttcactgattcacgcggttcaaaaatgacgatcgatggtattaactcaaacgatatttacatgcttggttatgtatcaaactctttaaccggcccttacaagccgctgaacaaaacagggcttgtgctgcaaatgggtcttgatccaaacgatgtgacattcacttactctcacttcgcagtgccgcaagccaaaggcaacaatgtgaaccggtttacgcagtttcggcttagtgaaacaaaagaaatcaccaatccgtatgccatgcgtttatacgaatccctgtgtcagtatcgtaagccggatggctcaggcatcgtctctctgaaaatcgactggatcatagagcgttaccagctgcctcaaagttaccagcgtatgcctgacttccgccgccgcttcctgcagggccagtttgaccatgcggcgtcccctgtggaacggggtcacctccggaagatccccttcagaggaggaacaagagagtctcgggaaagaggactctcagaagcaggatacttgccacgtgaggcaggccaagcacaaaaacgcagaccttggactaaagggccgctggaaaaaatagggcttgaaaccttgcactgcgactctagaagatacccctgtcgttctaattgggtttggatttgcaccgttaaggaggggggaagagaaggaagaggcgggcgaggaaggcgagtccagctagcggctgttgcggggaccgtagccccagctgcagctccgaagaatcccccgccacggtttcggtggagcgtctgggcacgggatggagtgaaagagcgagtgcctctccaagcgggggtgggagggggtcaggctgtgcagaggagagagacagcgagaagaagccgcggctggctactgcgaatttgggattcgattgggagggaccgctcactcgggggaaatggattctttaccacggctgaccagcgttttgactttgctgttctctggcttgtggcatttaggattaacagcgacaaactgtga

SEQ ID NO: 138754 - DNA, 1041 bp, Homo sapiens; identical to SEQ ID NO: 121224

SEQ ID NO: 138755 - DNA, 1290 bp, Homo sapiens
  misc_feature (1)...(1290): n = a,t,c or g
atgcctgacttccgccgccgcttcctgcaggtctgtgttaatgagatcaacagcagaactccaatgcgcctctcatacattgagaaaaagaaaggccgccagacgactcatatcagttctggtgtcatagaaattgccgatgggagtcgccgtcgtaaagctgctgcacttaccgaaagtgattatcgtgttctggttggcgagctggatgatgagcagatggctgcattatccagattgggtaacgattatcgcccaacaagtgcttatgagcgtggtcagcgttatgcaagccgattgcagaatgaatttgctggaaatatttctgcgctggctgatgcggaaaatatttcacgtaagattattacccgctgtatcaacaccgccaaattgcctaaatcagttgttgctcttttttctcaccccggtgaactatctgcccggtcaggtgatgcacttcaaaaagcctttacagataaagaggaattacttaagcagcaggcatctaaccttcatgagcagaaaaaagctgggaatctctttgttccttgcatgctgcagagaattcggttttatgatccaatctggaagtcctttaaaaagtgggagaaacatgctaacaccaaacgaatgtgtaaaggaaccacagatgaaagaagtgaggtgggcaaaggcaagaacgttcagcagtgtatcgatgaaggcaattatacatccggcgacaaccatacgctgagagaccctcactacgttgaagacaaaggccataaataccttgtattcgaagccaacacgggaacagaaaacggataccaaggcgaagaatctttatttaacaaagcgtactacggcggcggcacgaacttcttccgtaaagaaagccagaagcttcagcagagcgctaaaaaacgcgatgctgagttagcgaacggcgccctcggtatcatagagttaaataatgattacacattgaaaaaagtaatgaagccgctgatcacttcaaacacggtaactgatgaaatcgagcgcgcgaatgttttcaaaatgaacggcaaatggtacttgttcactgattcacgcggttcaaaaatgacgatcgatggtattaactcaaacgatatttacatgcttggttatgtatcaaactctntaaccggcccttacaagccgctgaacaaaacagggcttgtgctgcaaatgggtcttgatccaaacgatgtgacattcacttactctcacttcgcagtgccgcaagccaaagcaacaatgtggttatcacaagctacatga

SEQ ID NO: 138756 - DNA, 1009 bp, Homo sapiens; identical to SEQ ID NO: 127578

SEQ ID NO: 138757 - DNA, 1206 bp, Homo sapiens
  misc_feature (1)...(1206): n = a,t,c or g
atgccgatggggagtcgccgtcgtanagctgctgcacttacngaaagtgattatcgtgttctggttggcgagctggatgatgagcagatggctgcattatccagattgggtaacgattatcgcccaacaagtgcttatgaacgtggtcagcgttatgcaagccgattgcagaatgaatttgctggaaatatttctgcgctggctgatgcggaaaatatttcacgtaagattattacccgctgtatcaacaccgccaaattgcctaaatcagttgttgctcttttttctcaccccggtgaactatctgcccggtcaggtgatgcacttcaaaaagcctttacagataaagaggaattacttaagcagcaggcatctaaccttcatgagcagaaaaaagctggggtgatatttgaagctgaagaagttatcactcttttaacttctgtgcttaaaacgtcatctgcatcaagaactagtttaagctcacgacatcagtttgctcctggagcgacagtattgtataagggcgatacaatggtgcttaacctggacagatcacaaacgatttttgacggagacggaaaaacatatcagaacgttcagcagtttatcgatgaaggcaattatacatccggcgacaaccatacgctgagagaccctcactacgttgaagacaaaggccataaataccttgtattcgaagccaacacgggaacagaaaacggataccaaggcgaagaatctttatttaacaaagcgtactacggcggcggcacgaacttcttccgtaaagaaagccagaagcttcagcagagcgctaaaaaacgcgatgctgagttagcgaacggcgccctcggtatcatagagttaaataatgattacacattgaaaaaagtaatgaagccgctgatcacttcaaacacggtaactgatgaaatcgagcgcgcgaatgttttcaaaatgaacggcaaatggtacttgttcactgattcacgcggttcaacaaccccgatcgatggtattaactcaaacgatatttacatgcttggttatgtatcaaactctttaaccggcccttacaagccgctgaacaaaacagggcttgtgctgcaaatgggtcttgatccaaacgatgtgacattcacttactctcacttcgcagtgccgcaagccaaaggcaacaatgtaaaatcacaagctacatga

SEQ ID NO: 138758 - DNA, 1477 bp, Homo sapiens; identical to SEQ ID NO: 135776
  misc_feature (1)...(1477): n = a,t,c or g

SEQ ID NO: 138759 - DNA, 1389 bp, Homo sapiens
  misc_feature (1)...(1389): n = a,t,c or g
atggaggaaataactgaagaagatgaaggagagaaagaaggagatgatngcttcttcgaggataaaaaggcaacatttgcgccaagcttctctatgaacatcaaaggcaataaaacatccgttgtcaaaacagcatcctggagcaaggacagcgggtaccgagctcgaattcgtaatcatgtctgggaccacgatcccactcgtgttgtcggtctgattctcggtctgggaccacggtccctcttgtcttgttcgtctgactgtccggcgtgggactgcggattccgtcagtggcctgtcctggtgcggggtgttggcgtggtcgtcggctccgtgttgaccgtgggttcccctcggtgtggcccgcccagcccgaaagacgctgatgacacatcaatctacatgttttatcaaaaggtcggcgacaactcaatcgacagctggaaaaacgcgggccgtgtctttaaagacagcgataagttttttgccaacttttcttttctgaaagatcagacgcaagagtggggggggtctgcaacctttacatctgacggaaaaatccgtttattctacactgactattccggtaaacattacggcaaacaaagcctgacaacagcgcaggtaaatgtgtcaaaatctgatgacacactcaaaatcaacggagtggaagatcacaaaacgatttttgacggagacggaaaaacatatcagaacgttcagcagtttatcgatgaaggcaattatacatccggcgacaaccatacgctgagagaccctcactacgacagcctcaatgcccacggatgggtaccagatcttcatattcatgcagaagacactctcctgcctttctatcttggggaaaaggacgatgtcacttatgcaataaagcccacttgctggccggggcttgacattattcctttctgtctggctctgcaccgtattgaaacggagttaatgggcaaatttgatgaaggtaaactgcccaccgatccacacctgatgctccgactggccattgaaactgttgctcatgactatgatgtcatagttattgacagcgcgcctaacctgggtatcggcacgattaatgtcgtatgtgctgctgatgtgctgattgttcccacgcctgctgagttgtttgactacacctccgcactgcagtttttcgatatgcttcgtgatctgctcaagaacgttgatcttaaagggttcgagcctgatgtacgtattttgcttaccaaatacagcaatagtaatggctctcagtccccggggatggaggagcaaattcgggatgcctggggaagcatggttctaaaaaatgttgtacgtgaaacggatgaagttggtaaaggcaaatccgatgagaactgtttttga

SEQ ID NO: 138760 - DNA, 2040 bp, Homo sapiens; identical to SEQ ID NO: 127579
  misc_feature (1)...(2040): n = a,t,c or g

SEQ ID NO: 138761 - DNA, 777 bp, Homo sapiens
atgcgtgttgagattacctctcgggtatggtcaggtaatgaacgtgaccaggagctgcttactgaggacgcactggatgatctcatcccttcttttctactgactggtcaacagacaccggcgctcggtcgaagaggatctgttgtcataaaaattgccgatgggagtcgccgtcgtcaagctgctgcacttaccgaaagtgattatcgtgatctggttggcgagctgcatgatgagccagatggctgcattatccagatcgggctacgatcatcgcccatcacaagacctctcctgcctttctatcttggggaaaaggacgatgtcacttatgcaataaagcccacttgctggccggggcttgacattattccttcctgtctggctctgcaccgtattgaaactgagttaatgggcaaatttgatgaaggtatactgcccaccgatccacacctgatgctccgactggccattgaaactgttgctcatgactatgatgtcatagttattgacagcgcgcctaacctgggtatcggcacgattaatgtcgtatgtgctgctgatgtgctgattgttcccacgcctgctgagttgtttgactacacctccgcactgcagtttttcgatatgcttcgtgatctgctcaaaaacgttgatcttgaaaggttcgagcctgatgtacgtattttgcttaccaaatacagcaatagtaatggctctcagtccccgtggatggacgaacatattcggtatgcctgggtgaaagcatggttctaa

SEQ ID NO: 138762 - DNA, 1947 bp, Homo sapiens
acggaaaaacaaattcagaacgttcagcagtttatcgatgaaggcaattatacatccggggacaaccaaacgttgagagaccctcactacgttgaagacaaaggccataaataccttgtattcgaagccaacacgggaacagaaaacggataccaaggcgaagaatctttatttaacaaagcgtactacggcggcggcacgaacttcttccgtaaagaaagccagaagcttcagcagagcgctaaaaaacgcgatgctgagttagcgaacggcgccctcggtatcatagagttaaataatgattacacattgaaaaaagtaatgaagccgctgatcacttcaaacacggtaactgatgaaatcgagcgcgcgaatgttttcaaaatgaacggcaaatgggattttgccgatttcggaaccaccatcaaacaggattttcgcctgctggggcaaaccagcgtggaccgcttgctgcaactctctcagggccaggcggtgaagggcaatcagctgttgcccgtctcactggtgaaaagaaaaaccaccctggcgcccaatacgcaaaccgcctctccccgcgcgttggccgattcattaatgcagctggcacgacaggtttcccgactggaaagcgggcaggattttgccgatttcggaaccaccatcaaacaggattttcgcctgctggggcaaaccagcgtggaccgcttgctgcaactctctcagggccaggcggtgaagggcaatcagctgttgcccgtctcactggtgaaaagaaaaaccaccctggcgcccaatacgcaaaccgcctctccccgcgcgttggccgattcattaatgcagctggcacgacaggtttcccgactggaaagcgggcagactgggcaacaaacaccggcgttgggtcgaagagaatgtggggtcatagcaaatgccgatggaagtacccgtcgtaaagatgctgcgctcaccgaaagtgataatcggacaccggcgttcggtcgaagagtatctggtgtcatagaaattgccgatgggagtcgccgtcgtaaagctgctgcacttaccgaaagtgattatcgtgttctggttggcgagctggatgatgagcagatggctgcattatccagattgggtaacgattatcgcccaacaagtgcttatgaacgtggtcagcgttatgcaagccgattgcagaatgaatttgctggaaatatttctgcgctggctgatgcggaaaatatttcacgtaagattattacccgctgtatcaacaccgccaaattgcctaaatcagttgttgctcttttttctcaccccggtgaactatctgcccggtcaggtgatgcacttcaaaaagcctttacagataaagaggaattacttaagcagcaggcatctaaccttcatgagcagaaaaaagctggggtgatatttgaagctgaagaagttatcactcttttaacttctgtgcttaaaacgctttttgccgatttcggaaccaccatcaaacaggattttcgcctgctggggcaaaccagcgtggaccgcttgctgcaactctctcagggccaggcggtgaagggcaatcagctgttgcccgtctcactggtgaaaagaaaaaccaccctggcgcccaatacgcaaaccgcctctccccgcgcgttggccgattcattaatgcagctggcacgacaggtttcccgactggaaagcgggcacgctctgctgaagcttctggctttcttccgggaagaagttcgtgccgccgccgtagtacgctttgttacacaaagattcttcgccttggtatccgttttctgttcccgtgttggcttcgaatacaaggtatacacggggggggaactaaccccaaaaacaaccacaaaaaaccaacaaaggccccagcgcgccagcggacaaccgcccggcacccaaccacgctag

SEQ ID NO: 138763 - DNA, 1137 bp, Homo sapiens
  misc_feature (1)...(1137): n = a,t,c or g
atgaaactcatggaaacacttaaccagtgcataaacgctggtcatgaaatgacgaaggctatcgccattgcacagtttaatgatgacagcccggaagcgaggaaaataacccggcgctggagaataggtgaagcagcggatttagttggggtttcttctcaggctatcagagatgccgagaaagcagggcgactaccgcacccggatatggaaattcgaggacgggttgagcaacgtgttggttatacaattgaacaaattaatcatatgcgtnatggattttgccgatttcggaaccaccatcaaacaggattttcgcctgctggggcaaaccagcgtggaccgcttgctgcaactctctcagggccaggcggtgaagggcaatcagctgttgcccgtctcactggtgaaaagaaaaaccaccctggcgcccaatacgcaaaccgcctctccccgcgcgttggccgattcattaatgcagctggcacgacaggtttcccgactggaaagcgggcaatcagaaaatctgatggcacctacagggaacatgacggtatctgcgagatccatgttgctaaatatgctgaaatattcggattgacctctgcggaagccagtaaggatatacggcaggcattgaagagtttcgcggggaaggaagtggttttttatcgccctgaagaggatgccggcgatganaaaggctatgaatcttttccttggtttatcaaacgtgcgcacagtccatccagagggctttacagtgtacatatcaacccatatctcattcccttctttatcgggttacagaaccggtttacgcagtttcggcttagtgaaacaaaagaaatcaccaatccgtatgccatgcgtttatacgaatccctgtgtcagtatcgtaagccggatggctcaggcatcgtctctctgaaaatcgactggatcatagagcgttaccagctgcctcaaagttaccagcgtatgcctgacttccgccgccgcttcctgcaggtctgtgttaatgagatcaacagcagaactccaatgcgcctctcatacattgagaaaaacaaaggccgccagacgactcatatcgtattttccttccgcgatatcacttccatgacgacaggatag

SEQ ID NO: 138764 - DNA, 1776 bp, Homo sapiens; identical to SEQ ID NO: 129900

SEQ ID NO: 138765 - DNA, 1512 bp, Homo sapiens
atggaagatgaaatgaatgaaatgaagcaagaagggaagtttagagaaaaaagaataaaaagaaatgagcaaagcctccaagaaatatgggactatgtgaaaagaccaaatctacgtctgattggtgtacctgaaagtgatggggagaatggaaccaagttggaaaacactctgcaggatgttatccaggagaacttccccaatctagcaaggcaggccaacgttcagattcaggaaacacagagaacgccacaaagatactcctcgagaagagcaactccaagacatataattgtcagattcaccaaagttgaaatgaaggaaaaaatgttaagggcagccagagagaaaggaggagcgactcaagccttcgcgaaagaaaataaccaaaaagcatacaaagaaacgtacggcgtctctcatattacacgccatgatatgctgcagatccctaaacagcagcaaaacgaaaaataccaagtgcctcaattcgatcaatcaacgattaaaaatattgagtctgcaaaaggacttgatgtgtgggacagctggccgctgcaaaacgctgacggaacagtagctgaatacaacggctatcacgtcggcgacaactcaatcgacagctggaaaaacgcgggccgtgtctttaaagacagcgataagttcgacgccaacgatccgatcctgaaagatcagacgcaagaatggtccggttctgcaacctttacatgtgacggaaaaatccgtttattctacactgactattccggtaaacattacggcaaacaaagcctgacaacagcgcaggtaaatgtgtcaaaatctgatgacacactcaaaatcaacggagtggaagatcacaaaacgatttttgacggagacggaaaaacatatcagaacgttcagcagtttatcgatgaaggcaattatacatccggcgacaaccatacgctgagagaccctcactacgttgaagacaaaggccataaataccttgtattcgaagccaacacgggaacagaaaacggataccaaggcgaagaatctttatttaacaaagcgtactacggcggcggcacgaacttcttccgtaaagaaagccagaagcttcagcagagcgctaaaaaacgcgatgctgagttagcgaacggcgccctcggtatcatagagttaaataatgattacacattgaaaaaagtaatgaagccgctgatcacttcaaacacgaatttacaaagccaaagacttgataacagcttcttagatgctaacgaattcacttcaaagaaactcagcagctcacagtcagaagataccaaaaatcaaggcttcttccaggaagaaagtatagtaacacaagaattagactctgaagatttacctaaggctctgaagacagcagcggacctcctagcacagtgctcgagctctgctaagggacagactgcctcctcaagtggatccctgacccctgtgcctcctgactgggagacacctcctagcagcagttga

SEQ ID NO: 138766 - DNA, 894 bp, Homo sapiens; identical to SEQ ID NO: 127582

SEQ ID NO: 138767 - DNA, 1077 bp, Homo sapiens
atggacaacttcttcgcccccgttttcaccatgggcaaatattatacgcaaggcgacaaggtgctgatgccgctggcgattcaggttcatcatgccgtttgtgatggcttccatgtcggcagaatgcttaatgaattacaacagtactgcgatgagtggcagggcggggcattgggtaccgattatcgcccaacaagggtttatgaacgtggtcagcgttatgcaagccgattgcagaatgaatttgctggaaatatttctgcgctggctgatgcggaaaatatttcacgtaagattattacccgctgtatcaacaccgccaaattgcctaaatcagttgttgctcttttttctcaccccggtgaactatctgcccggtcaggtgatgcacttcaaaaagcctttacagataaagaggaattacttaagcagcaggcatctaaccttcatgagcagaaaaaagctggggtgatatttgaagctgaagaagttatcactcttttaacttctgtgcttaaaacgtcatctgcatcaagaactagtttaagctcacgacatcagtttgctcctggagcgacagtattgtataagggcgataaaatggtgcttaacctggacagaatgaatttgttgaaaaatatttctgcgctggctgatgcggaaaatatttcacgtaagattattacccgctgtatcaacaccgccaaattgcataaatcagttgttgctcttttttctcaccccggtgaactatctgcccggtcaggtgatgcacttcaaaaagcctttacagataaagaggaattacttaagcagcaggcatctaaccttcatgagcagaaaaaagctggggtgatatttgaagctgaagaagttatcactcttttaacttctgtgcttaaaacgtcatctgcatcaagaactagtttaagctcacgacatcagtttgctcctggagcgacagtattgtataagggcgataaaatggtgcttaacctggacaggtctcgtgttccaactgagtgtatagagaaaattgaggccattcttaaggaacttgaaaagccagcaccctga

SEQ ID NO: 138768 - DNA, 1869 bp, Homo sapiens; identical to SEQ ID NO: 127584
  misc_feature (1)...(1869): n = a,t,c or g

SEQ ID NO: 138769 - DNA, 1101 bp, Homo sapiens; identical to SEQ ID NO: 127585

SEQ ID NO: 138770 - DNA, 1992 bp, Homo sapiens; identical to SEQ ID NO: 121234

SEQ ID NO: 138771 - DNA, 848 bp, Homo sapiens; identical to SEQ ID NO: 135870

SEQ ID NO: 138772 - DNA, 708 bp, Homo sapiens
aaccgctttacgcagtttcggcttagtgaaacaaaagaaatcaccaatccgtatgccatgcgtttatacgaatccctgtgtcagtatcgtaagccggatggctcaggcatcgtctctctgaaaatcgactggatcatagagcgttaccagctgcctcaggaggaccagcgtatgcctgacttccgccgccgcttcctgcaggacgatgtcacttatgcaataaagcccacttgctggccggggcttgacattattgggggctgtctggctctgcaccgtattgaaactgagttaatgggcaaattggatgaaggtaaactgcccaccgatccacacctgatgctccgactggccattgaaactgttgctcatgactatgatgtcatagttattgacagcgcgcctaacctgggtatcggcacgattaatgtcgtatgtgctgctgatgtgctgattgttcccacgcctgctgagttgtttgactacacctccgcactgcagtttttcgatatgcttcgtgatctgctcaagaacgttgatcttaaagggttcgagcctgatgtacgtattttgcttaccaaatacagcaatagtaatggctctcagtccccgtggatggaggagcaaattctggatgcctggggaagcatggttctaaaaaatgttgtacctgaaacggatgaagttggtaaggtcaaatccggatga

SEQ ID NO: 138773 - DNA, 542 bp, Homo sapiens
atcagaaaatctgatcgcaccctacaggaccatgacggtatctgcgagatccatgttgctaaatatgctgaaatattcgcattgacctctgcggaagccagtaaggatatacggcaggcattgaagagtttcgcggggaaggaagtggttttttatcgccctgaagaggatgccggcgatgaaaaaggctatgatcttttccttggtttatcaaacattattacccgctgtatcaacaccgccaaattgcctaaatcagttgttgctcttttttctcaccccggtgaactatctgcccggtcaggtgatgcacttcaaaaagcctttacagataaagaggaattacttaagcagcaggcatctaaccttcatgagcagaaaaaagctggggtgatatttgaagctgaagaagttatcactcttttaacttctgtgcttaaaacgtcatctgcatcaagaactagtttaagctcacgacatcagtttgctcctggagcgacagtattgtataagggcgataaaatggtgcttaacctggacag

SEQ ID NO: 138774 - DNA, 678 bp, Homo sapiens
atggcggaaacagcggttatcaatcacaagaaacgtaaaaatagcccgcgaatcgtccagtcaaacgacctcactgaggcggcatatagtctctcccgggatcaaaaacgtatgctgtatctgttcgttgaccagatcagaaaatctgatggcaccctacaggaacatgacggtatctgcgagatccatgttgctaaatatgctgaaatattcggattgacctctgcggaagccagtaaggatatacggcaggcattgaagagtttcgcggggaaggaagtggttttttatcgccctgatcctatgccggcgatgaaaaaggctatgaatcttttccttggtttatcaaacaaccggtttacgcagtttcggcttagtgaaacaaaagaaatcaccaatccgtatgccatgcgtttatacgaatccctgtgtcagtatcgtaagccggatggctcaggcatcgtctctctgaaaatcgactggatcatagagcgttaccagctgcctcaaagttaccagcgtatgcctgacttccgccgccgcttcctgcaggtctgtgttaatgagatcaacagcagaactccaatgcgcctctcatacattgagaaaaagaaaggccgccagacgactcatatcgtattttccttccgcgatatcacttccatgacgacaggatag

SEQ ID NO: 138775 - DNA, 1212 bp, Homo sapiens
  misc_feature (1)...(1212): n = a,t,c or g
atgaagatgccagaaaaacatgacctgttggccgccattctcgcggcaaaggaacaaggcatcggggcaatccttgcgtttgcaatggcgtaccttcgcggcagatataatggcgttctagaggctcgaagtctgaaatcaagatgtcagcagagccatgctcttgctgaaggctctaggggagggccacctgttactggtcgatttaagtcaacctttaccgctgattcgtggaacagatactctcttccatccttaaccggaggtgggaatatcctgcattcccgaacccatcgacgaactgtttcaaggcttcttggacgtcgctggcaggaactcctgcgtgatgtgtttggtacgcgattgcgacgtgctgaagacgtattcccaccggtgatcggggttgctgcccataaaggtggcgtttacaaaacctcagtttctgttcatcttgctcaggatctggctctgaaggggctacgtgttttgctcgtggaaggtaacgacccccagggaacagcctcaatgtatcacggatgggtaccagatcttcatattcatgcagaagacactctcctgcctttctatcttggggaaaaggacgatgtcacttatgcaataaagcccacttgctggccggngcttgacattattccttcctgtctggctctgcaccgtattgaaactgagttaatgggcaaatttgatgaaggtaaactgcccaccgatccacacctgatgctccgactggccattgaaactgttgctcatgactatgatgtcatagttattgacagcgcgcctaacctgggtatcggcacgattaatgtcgtatgtgctgctgatgtgctgattgttcccacgcctgctgagttgtttgactacacctncgcactgcagtttttcgatatgcttcgtgatctgctcaagaacgttgatcttaaagggttcgagcctgatgtacgtattttgcttaccaatacagcaatagtaatggctctcagtccccgtggatggaggagcaaaatccgggatgcctggggaagcatgggtctaaaaaatgttgacgtgaaacggatgaaattgggtaaaggtcaaatccggatgagaactgtttttgaaacagccatggataaacgccttttaactggtgcctgggaaaaagcttttttttttttggaacctggcttcgaagaaaaatccaaccgctga

SEQ ID NO: 138776 - DNA, 1044 bp, Homo sapiens; identical to SEQ ID NO: 127591
  misc_feature (1)...(1044): n = a,t,c or g

SEQ ID NO: 138777 - DNA, 1560 bp, Homo sapiens
ctatcctgtcgtcatggaagtgatatcgcggaaggaaaatacgatatgagtcgtctggcggcctttctttttctcaatgtatgagaggcgcattggagttctgctgttgatctcattaacacagacctgcaggaagcggcggcggaagtcaggcatacgctggtaactttgaggcagctggtaacgctctatgatccagtcgattttcagagagacgatgcctgagccatccggcttacgatactgacacagggattcgtataaacgcatggcatacggattggtgatttcttttgtttcactaagccgaaactgcgtaaaccggttctgtaacccgataaagaagggaatgagatatgggttgatatgtacactgtaaagccctctggatggactgtgcgcacgtttgataaaccaaggaaaagattcatagcctttttcatcgccggcatcctcttcagggcgataaaaaaccacttccttccccgcgaaactcttcaatgcctgccgtatatccttactggcttccgcagaggtcaatccgaatatttcagcatatttagcaacatggatctcgcagataccgtcatgttcctgtagggtgccatcagattttctgatctggtcaacgaacagatacagcatacgtttttgatcccgggagagactatatgccgcctcagtgaggtcgtttgactggacgattcgcgggctatttttacgtttcttgtgattgataaccgctgtttccgccatgacagatccatgtgaagtgtgacaagtttttagattgtcacactggcttgcagccccttccttcatcttcaaagccagcagtatagcaacttcatatttctctctgactctgacttcctgcctacctcttccgcatttaaaggaccatcgtgattgcgttgcacccacatagatagtccaggataatccttgacatcgccagaaactttccccagacttggcgtccatttgcaggagatgcccccgcaagtcccagaggtgggtgggtcctggggaggcctccaggaagggcggcccctcgggccctgagcggagaatggcgaggccgcatgcactggggccacatgggccaggtccaaagaccggggtcccagtaggagccccacgcgccagcgggtgacagccctggggggcggggggaggcggcccagggctcccgggaccgcctaggcgttggggccccgcccgcaggactgtccggcaggccgcgaggatgtggagggacccgtggtccccgccccgcagggcggcggctgccgggccgggagcgaggtggcggaacggggactgtggcccgggatgcatgcgggggatgcggccgaggtgggagagggcggggtcggcggggcggtgcggggtcggcgctgtcccggagggatatactaagcccgtgccatcctcggccgtccagaggcacccagagacaacgcggtagctggcaacgtcccctgcttgggtggccgtagggaagggtgtgctagtttcgagagctgccgtgtactgtaccggctgttcggcgcgcat

SEQ ID NO: 138778 - DNA, 1125 bp, Homo sapiens; identical to SEQ ID NO: 127598

SEQ ID NO: 138779 - DNA, 1218 bp, Homo sapiens
ttagttgactgttagctgtccttgctccaggatgctgtttttgacaacggatgttttattgcctttgatgttcattaagaagcttggcgcaaatgttgcctttttatcctcgaagaagcctctgtttgtcatgtagcttgtgataaccacattgttgcctttggcttgcggcactgcgaagtgagagttagttaatgtcacatcgtttggatcaagacccatttgcagcacaagccctgttttgttcagcggcttgtaagggccggttaaagagtttgatacataaccaagcatgttaatatcgtttgagttaataccatcgatcgtcatttttgaaccgcgtgaatcagtgaacaagtaccatttgccgttcattttgaaaacattcgcgcgctcgatttcatcagttaccgtgtttgaagtgatcagcggcttcattacttttttcaatgtgtaatcattatttaactctatgataccgagggcgccgttcgctaactcagcatcgcgttttttagcgctctgctgaagcttctggctttctttacggaagaagttcgtgccgccgccgtagtacgctttgttaaataaagattcttcgccttggtatccgttttctgttcccgtgttggcttcgaatacaaggtatttatggcctttgtcggaatagtcagtgtagaataaacggatttttccgtcagatgtaaaggttgcagaaccggaccattcttgcgtctgatctttcaggatcggatcgttggcgtcgaacttatcgctgtctttaaagacacggcccgcgtttttccagctgtcgattgagttgtcgccgaccttttgataaaacatgtagattgatgtgtcatcagcgtctttcgggcttcccgcaagagcaaacacaacgtgatagccgttgtattcagctactgttccgtcagcgttttgcagcggccagctgtcccacacatcaagtccttttgcagactcaatatttttaatcgttgattgatcgaattgaggcacttggtatttttcgttttgctgctgtttagggatctgcagcatatcatggcgtgtaatatgagagacgccgtacgtttctttgtatgctttttggttattttctttcgcgaaggcttgagtcgctcctcctgccagaagtgcagtcgtaaaagtcagaactgtggcttgttttacaatttttttgatgttcatgttcat

SEQ ID NO: 138780 - DNA, 1746 bp, Homo sapiens; identical to SEQ ID NO: 121214

SEQ ID NO: 138781 - DNA, 2694 bp, Homo sapiens
  misc_feature (1)...(2694): n = a,t,c or g
atgaaactcatggaaacacttaaccagtgcataaacgctggtcatgaaatgacgaaggctatcgccattgcacagtttaatgatgacagcccggaagcgaggaaaataacccggcgctggagaataggtgaagcagcggatttagttggggtttcttctcaggctatcagagatgccgagaaagcagggcgactaccgcacccggatatggaaattcgaggacgggttgagcaacgtgttggttatacaattgaacaaattaatcatatgcgtgatgtgtttggtacgcgattgcgacgtgctgaagacgtatttccaccggtgatcggggttgctgcccataaaggtggcgtttacaaaacctcagtttctgttcatcttgctcaggatctggctctgaaggggctacgtgttttgctcgtggaaggtaacgacccccagggaacagcctcaatgtatcacggatgggtaccagatcttcatattcatgcagaagacactctcctgcctttctatcttggggaaaaggacgatgtcacttatgcaataaagcccacttgctggccggggcttgacattattccttcctgtctggctctgcaccgtattgaaactgagttaatgggcaaatttgatgaaggtaaactgcccaccgatccacacctgatgctccgactggccattgaaactgttgctcatgactatgatgtcatagttattgacagcgcgcctaacctgggtatcggcacgattaatgtcgtatgtgctgctgatgtgctgattgttcccacgcctgctgagttgtttgactacacctccgcactgcagtttttcgatatgcttcgtgatctgctcaagaacgttgatcttaaagggttcgagcctgatgctttgcagaactttcagcggtataccggcatacagcatgtgcatcgcataggaatggcggaacgtatgtggtgtgaccggaacagagaacgtcacaccgtcagcagcagcggcggcaaccgcctccccaatccagaacattttgaggcatttcagtcagttgctcaatgtacctataaccagaccgttcagctggatattacggcctttttaaagaccgtaaagaaaaataagcacaagttttatccggcctttattcacattcttgcccgcctgatgaatgctcatccggagttccgtatggcaatgaaagacggtgagctggtgatatgggatagtgttcacccttgttacaccgttttccatgagcaaactgaaacgttttcatcgctctggagtgaataccacgacgatttccggcagtttctacacatatattcgcaagatgtggcgtgttacggtgaaaacctggcctatttccctaaagggtttattgagaatatgtttttcgtctcagccaatccctgggtgagtttcaccagttttgatttaaacgtggccaatatggacaacttcttcgcccccgttttcaccatgggcaaatattatacgcaaggcgacaaggtgctgatgccgctggcgattcaggttcatcatgccgtttgtgatggcttccatgtcggcagaatgcttaatgaattacaacagtactgcgatgagtggcagggcggggggtnaaaacatacgctcaatactcaaccggttgaagatacttcgttatcgacaccagctgccccgatggtggattcgttaattgcgcgcgtaggagtaatggctcgcggtaatgccattactttgcctgtatgtggtcgggatgtgaagtttactcttgaagtgctccggggtgatagtgttgagaagacctctcgggtatggtcaggtaatgaacgtgaccaggagctgcttactgaggacgcactggatgatctcatcccttcttttctactgactggtcaacagacaccggcgttcggtcgaagagtatctggtgtcatagaaattgccgatgggagtcgccgtcgtaaagctgctgcacttaccgaaagtgattatcgtgttctggttggcgagctggatgatgagcagatggctgcattatccagattgggtaacgattatcgcccaacaagtgcttatgaacgtggtcagcgttatgcaagccgattgcagaatgaatttgctggaaatatttctgcgctggctgatgcggaaaatatttcacgtaagattattacccgctgtatcaacaccgccaaattgcctaaatcagttgttgctcttttttctcaccccggtgaactatctgcccggtcaggtgatgcacttcaaaaagcctttacagataaagaggaattacttaagcagcaggcatctaaccttcatgagcagaaaaaagctggggtgatatttgaagctgaagaaggtccccggtcaggtgatgcacttcaaaaagcctttacagataaagaggaattatttaagcagcaggcatctaaccttcatgagcagaaaaaagctggggtgatatttgaagctgaagaagttatcactcttttaacttctgtgcttaaaacgtcatctgcatcaagaactagtttaagctcacgacatcagtttgctcctggagcgacagtattgtataagggcgataaaatggtgcttaacctggacaggtctcgtgttccaactgagtgtatagagaaaattgaggccattcttaaggaacttgaaaagccagcaccctga

SEQ ID NO: 138782 - DNA, 1866 bp, Homo sapiens
atggcggaaacagcggttatcaatcacaagaaacgtaaaaatagcccgcgaatcgtccagtcaaacgacctcactgaggcggcatatagtctctcccgggatcaaaaacgtatgctggatctgttcgttggccagatcaagaaatccttgcatagttgtatccctgcagattctgttcatcttgctcaagatctggctctgaaggggctacgtgttttgctcgtggaaggtaacgacccccagggaacagcctcaatgtatcacggatgggtaccagatcttcatattcatgcagaagacactctcctgcctttctatcttggggaaaaggacgatgtcacttatgcaataaagcccacttgctggccggggcttgacattattccttcctgtctggctctgcaccgtattgaaactgagttaatgggcaaatttgatgaaggtaaactgcccaccgatccacacctgatgctccgactggccattgaaactgttgctcatgactatgatgtcatagttattgacagcgcgcctaacctgggtatcggcacgattaatgtcgtatgtgctgctgatgtgctgattgttcccacgcctgctgagttgtttgactacacctccgcactgcagtttttcgatatgcttcgtgatctgctcaagaacgttgatcttaaagggttcgagcctgatgtacgtattttgcttaccaaatacagcaatagtaatggctctcagtccccgtggattgaggagcaaatatcggatgcctggggaagcatggttctaaaaaatgttcacgccatagtgactggcgatgctgtcggaatggacgatatcccgcaagaggcccggcagtaccggcataaccaagcctatgcctacagcatccagggtgacggtgccgaggatgacgatgagcgcattgttagatttcatacacgggtcaccgtcgacagcgacacacttgcatcggatgcagcccggttaacgtgccggcacggcctgggtaaccagcggaatggtggtgtcctgattgaagacaaattcgagtgcttcttctccctcactgcggtctttgctacaagagcctactatgctgtctatcatttgacgggtgccagacactcagacatcgtggtcgcacacgggtacgctggttgcaatgtcaggtttgttgcacttctgggcacaaataccaccttggagacctacttatctaatcaaggttctaatggcttttcttgtctgcattttggagaggatgtgggacaggagaggatccccatctgcgagatccatgttgctaaatatgctgaaatattcggattgacctctgcggaagccagtaaggatatacggcaggcattgaagagtttcgcggggaaggaagtggttttttatcgccctgaagaggatgccggcgatgaaaaaggctatgaatcttttccttggtttatcaaacgtgcgcacagtccatccagagggctttacagtgtacatatcaacccatatctcattcccttctttatcgggttacagaaccggtttacgcagtttcggcttagtgaaacaaaagaaatcaccaatccgtatgccatgcgtttatacgaatccctgtgtcagtatcgtaagccggatggctcaggcatcgtctctctgaaaatcgactggatcatagagcgttaccagctgcctcaaagttaccagcgtatgcctgacttccgccgccgcttcctgcaggtctgtgttaatgagatcaacagcagaactccaatgcgcctctcatacattgagaaaaagaaaggccgccagacgactcatatcgtattttccttccgcgatatcacttccatgacgacaggatag

SEQ ID NO: 138783 - DNA, 2625 bp, Homo sapiens
atgcagggcatgcaagccctagctaggacagttgatggtaaggaagaaagcctcaaccttgatcaagcttttcaatgggctggaaaaagttcttcttttgggacctgtcccaataaatttcgatcgtcgattaaccccgctggagatagaatattaagcggggcctgttatccaaaactacgtcaatactcaaccggtggagaaacttcgtattcgacaccagctgccccgatggtggattcgttaattgcgcgcgtaggagtaatggctcccggtaatgccattactttgcctgtatgtggtcgggatgtgaagtttactcttgaagtgctccggggtgatagtgttaagaagacctctcgggtatggtcaggtaatgaacgtgaccaggagctgcttactgaggacgcactggatgatctcatcccttcttttctactgactggtcaacagacaccggcgttcggtcgaagagtatctggtgtcatagaaattgccgatgggagtcgccgtcgtaaagctgctgcacttaccgaaagtgattatcgtgttctggttggcgagctggatgatgagcagatggctgcattatccagattgggtaacgattatcgcccaacaagtgcttatgaacgtggtcagcgttatgcaagccgattgcagaatgaatttgctggaaatatttctgcgctggctgatgcggaaaatatttcacgtaagattattacccgctgtatcaacaccgccaaattgcctaaatcagttgttgctcttttttctcaccccggtgaactatctgcccggtcaggtgatgcacttcaaaaagcctttacagataaagaggaattacttaagcagcaggggggatcctctagagtcggcgacaactcaatcgacagctggaaaacgcggggccgtgtctttaaagacagcgataagttcgacgccaacgatccgatcctgaaagatcagacgcaagaatggtccggttctgcaacctttacatctgacggaaaaatccgtttattctacactgactattccggtaaacattacggcaaacaaagcctgacaacagcgcaggtaaatgtgtcaaaatctgatgacacactcaaaatcaacggagtggaagatcacaaaacgatttttgacggagacggaaaaacatatcagaacgttcagcagtttatcgatgaaggcaattatacatccggcgacaaccatacgctgagagaccctcactacgttgaagacaaaggccataaataccttgtattcgaagccaacacgggaacagaaaacggataccaaggcgaagaatctttatttaacaaagcgtactacggcggcggcacgaacttcttccgtaaagaaagccagaagcttcagcagagcgctaaaaaacgcgatgctgagttagcgaacggcgccctcggtatcatagagttaaataatgattacacattgaaaaaagtaatgaagccgctgatgacttcaaacacggatctggctctgaaggggctacgtgttttgctcgtggaaggtaacgacccccagggaacagcctcaatgtatcacggatgggtaccagatcttcatattcatgcagaagacactctcctgcctttctatcttggggaaaaggacgatgtcacttatgcaataaagcccacttgctggccggggcttgacattattccttcctgtctggctctgcaccgtattgaaactgagttaatgggcaaatttgatgaaggtaaactgcccaccgatccacacctgatgctccgactggccattgaaactgttgctcatgactatgatgtcatagttattgacagcgcgcctaacctgggtatcggcacgattaatgtcgtatgtgctgctgatgtgctgattgttcccacgcctgctgagttgtttgactacacctccgcactgcagtttttcgatatgcttcgtgatctgctcaagaacaacgttcagcagtttatcgatgaaggcaattatacatccggcgacaaccatacgctgagagaccctcactacgttgaagacaaaggccataaataccttgtgtgcgaagccaacacgggaacagaaaacggataccaaggcgaagaatctttatttaacaaagcgtactacggcggcggcacgaacttcttccgtaaagaaagccagaagcttcagcagagcgctaaaaaacgcgatgctgagttagcgaacggcgccctcggtatcatagagttaaataatgattacacattgaaaaaagtaatgaagccgctgatcacttcaaacacggtaactgatgaaatcgagcgcgcgaatgttttcaaaatgaacggcaaatggtacttgttcactgattcacgcggttcaaaaatgacgatcgatggtattaactcaaacgatatttacatgcttggttatgtatcaaactctttaaccggcccttacaagccgctgaacaaaacagggcttgtgctgcaaatgggtcttgatccaaacgatgtgacattcacttactctcacttcgcagtggcgcaagccaaaggcaaacatggtggttatcacaagctacatgacaaacagaagcttctttcgagaagactttggtga

SEQ ID NO: 138784 - DNA, 1341 bp, Homo sapiens; identical to SEQ ID NO: 135874

SEQ ID NO: 138785 - DNA, 2124 bp, Homo sapiens
atgaacatgaacatcaaaaaaattgtaaaacaagccacagttctgacttttacgactgcacttctggcaggaggagcgactcaagccttcgcgaaagaaaataaccaaaaagcatacaaagaaacgtacggcgtctctcatattacacgccatgatatgctgcagatccctaaacagcagcaaaacgaaaaataccaagtgcctcaattcgatcaatcaacgattaaaaatattgagtctgcaaaaggacttgatgtgtgggacagctggccgctgcaaaacgctgacggaacagtagctgaatacaacggctatcacgttgtgtttgctcttgcgggaagcccgaaagacgctgatgacacatcaatctacatgttttatcaaaaggtcggcgacaactcaatcgacagctggaaaaacgcgggccgtgtctttaaagacagcgataagttcgacgccaacgatccgatcctgaaagatcagacgcaagaatggtccggttctgcaacctttacatctgacggaaaaatccgtttattctacactgactattccggtaaacattacggcaaacaaagcctgacaacagcgcaggtaaatgtgtcaaaatctgatgacacactcaaaatcaacggagtggaagatcacaaaacgatttttgacggagacggaaaaacatatcagaacgttcagcagtttatcgatgaaggcaattatacatccggcgacaaccatacgctgagagaccctcactacgttgaagacaaaggccataaataccttgtattcgaagccaacacgggaacagaaaacggataccaaggcgaagaatctttatttaacaaagcgtactacggcggcggcacgaacttcttccgtaaagaaagccagaagcttcagcagagcgctaaaaaacgcgatgctgagttagcgaacggcgccctcggtatcatagagttaaataatgattacacattgaaaaaagtaatgaagccgctgatcacttcaaacacggtatttattcgcgataagctcatggagcggcgtaaccgtcgcacaggaaggacagagaaagcgcggatctgggaagtgacggacagaacggtcaggacctggattggggaggcggttgccgccgctgctgctgacggtgtgacgttctctgttccggtcacaccacatacgttccgccattcctatgcgatgcacatgctgtatgccggtataccgctgaaagttctgcaaagcctgatgggacataagtccatcagttcaacggaagtctacacgaaggtttttgcgctggatgtggctgcccggcaccggtgtgacaatctaaaaacttgtcacacttcacatggatctgtcatggcggaaacagcggttatcaatcacaagaaacgtaaaaatagcccgcgaatcgtccagtcaaacgacctcactgaggcggcatatagtctctcccgggatcaaaaacgtatgctgtatctgttcgttgaccagatcagaaaatctgatggcaccctacaggaacatgacggtatctgcgagatccatgttgctaaatatgctgaaatattcggattgacctctgcggaagccagtaaggatatacggcaggcattgaagagtttcgcggggaaggaagtggttttttatcgccctgaagaggatgccggcgatgaaaaaggctatgaatcttttccttggtttatcaaacgtgcgcacagtccatccagagggctttacagtgtacatatcaacccatatctcattcccttctttatcgggttacagaaccggtttacgcagtttcggcttagtgaaacaaaagaaatcaccaatccgtatgccatgcgtttatacgaatccctgtgtcagtatcgtaagccggatggctcaggcatcgtctctctgaaaatcgactggatcatagagcgttaccagctgcctcaaagttaccagcgtatgcctgacttccgccgccgcttcgtgcaggtctgtgttaatgagatcaacagcagaactccaatgcgcctctcatacattgagaaaaagaaaggccgccagacgagtcatatcgtattttccttccgcgatatcacttccatgacgacaggatag

SEQ ID NO: 138786 - DNA, 2222 bp, Homo sapiens
atggtggattcgttaattgcgcgcgtaggagtaatggctcgcggtaatgccattactttgcctgtatgtggtcgggatgtgaagtttactcttgaagtgctccggggtgatagtgttgagaagacctctcgggtatggtcaggtaatgaacgtgaccaggagctgcttactgaggacgcactggatgatctcatcccttcttttctactgactggtcaacagacaccggcgttcggtcgaagagtatctggtgtcatagaaattgccgatgggagtcgccgtcgtaaagctgctgcacttaccgaaagtgattatcgtgttctggttggcgagctgcatgatgagcagatggctgcattatacagattgggtaacgattatcgcccaacaagtgcttatgaacgtggtcagcgttatgcaagccgattgcagaatgaatttgctggaaatatttctgcgctggctgatgcggaaaatatttcacatcttcatattcatgcagaagacactttcttgcctttctatcttgggaaaaaggacgatgtcacttatgcaataaagcccacttgttggccggggcttgacattattccttcttgtctggctctgcacggtattgaaattgagttaatgggcaaatttgatgaaggtaaactgcccaccgatccacacctgatgctcggactggccattgaaactgttgctcatgactatgatgtcatagttattgacagcgcgcctaacctgggtatcggcacgattaatgtcgtatgtgctgctgatgtgctgattgttcccacgcctgctgagttgtttgactacacctccgcactgcagtttttcgatatgcttcgtgatctgctcaagaacgttgatattaaagggttcgagcctgatgtacgtattttgcttaccaaatacagcaatagtaatggctctcagtccccgtggatggaggagcaaattcgggatgcctggggaagcatggttctaaaaaatgtggtacgtgaaacggatgaagttggtaaagcggttatcaatcacaagaaacgtaaaaatagcccgcgaatcgtccagtcaaacgacctcactgaggcggcatatagtctctcccgggatcaaaaacgtatgctgtatctgttcgttgaccagatcagaaaatctgatggcaccctacaggaacatgacggtatctgcgagatccatgttgctaaatatgctgaaatattcggattgacctctgcggaagccagtaaggatatacggcaggcattgaagagtttcgcggggaaggaagtggtttttcctcgccctgaagaggatgccggcgatgaaaaaggctatgaatcccttcacccgtttatcaaacgtgcgcacagtccatccagaggaatttacagtgtacatatcaacccatatctcattcccttctttatcgggttacagaaccggtttacgcagtttcggcttagtgacaaccaaagaaatcaccaatccgtatgccatgcgttctctacgaatccctgtgtcagtataataaaccggatggcacaggcatcgtctctctgaaaatcgactggatcatagagcgttaccagctgcctcaaagttaccagcgtatgcctgacttccccccccgcttcctgcaggctctgcaccgtattgaaactgagttaatgggcaaatttgatgaaggtaaactgcccaccgatccacacatgatgctccgactggccattgaaactgttgctcatgactatgatgtcatagttattgacagcgcgcctaacctgggtatcggcacgattaatgtcgtatgtgctgctgatgtgctgattgttcccacgcctgctgagttgtttgactacacctccgcactgcagtttttcgatatgcttcgtgatctgctcaagaacgttgatcttaaagggttcgagcctgatgtacgtattttgcttaccaaatacagcaatagtaatggctctcagtccgcgtggatggaggagcaaattcgggatgcctggggaagcatggttctaaaaaatgttgtacgtgaaacggatgaagttggtaaaggtcagacccggatgagaactgtttttgaacagaacaatgatcaacgctcttcaactggtgcctggagaaatgctctttctatttgggaacctgtctgcaatgaaattttcgatcgtctgattaaaccacgctgggagattagataa

SEQ ID NO: 138787 - DNA, 1702 bp, Homo sapiens
atgagggtagggagaaaggctgttggtgccatatggtggtcaagcaagcaagagctctttcagcagctcttcctcaggactgaacttgaggatattggtccaggtattgtgaagagagagctgggaagggaaggatctaaggatactgggtcatcagatgactgggagcaacttccagactggaagaccaagagagtaggtaatgaacgtgaccaggagctgcttattgaggacgcactggatgatctcatcccttcttttctactgactggtcaacagacaccggcgttcggtcgaagagtatctggtgtcatagaaattgccgatgggagtcgccgtcgtaaagctgctgcacttaccgaaagtgattatcgtgttctggttggcgagctggatgatgagcagatggctgcattatccagattgggtaacgattatcgcccaacaagtgcttatgaacgtggtcagcgttatgcaagccgattgcagaatgaatttgctggaaatatttctgcgctggctgatgcggaaaatatttcacgtaagattattacccgctgtatcaacaccgccaaattgcctaaatcagttgttgctcttttttctcaccccggtgaactatctgcccggtcaggtgatgcacttcaaaaagcctttacagataaagaggaattacttaagcagcaggcatctaaccttcatgagcagaaaaaagctggggtgatatttgaagctgaagaagttatcactcttttaacttctgtgcttaaaactgtgcaatctaaaaacttgtcacacttcacatggatctgtcatgcggaaacagcggttatcaatcacaagaaacgtaagaatagcccgcgaatcgtccagtcaaacgacctcactgaggcggcatatagtctctcccgggatcaaaaacgtatgctgtatctgttcgttgaccagatcagaaaatctgatggcaccctacaggaacatgacggtatctgcgagatccatgttgctaaatatgctgaaatattcggattgacctctgcggaagccagtaaggatatacggcaggcattgaagagtttcgcggggaaggaagtggttttttatcgccctgaagaggatgccggcgatgaaaaaggctatgaatcttttccttggtttatcaaacattgggtaacgatatcgccccaaacaagtgcttatgaacgtggtcagcgttatgcaagccgatgcaagaatgaatttgctggaaatatttctgcgctggctgatgcggaaaatatttcacgtaagattattacccgctgtatcaacaccgccaaattgcctaaatcagttgttgctcttttttctcaccccggtgaactatctgcccggtcaggtgatgcacttcaaaaagcctttacagataaagaggaattacttaagcagcaggcatctaaccttcatgagcagaaaaaagctggggtgatatttgaagctgaagaagttatcactcttttaacttctgtgcttaaaacgtcatctgcatcaagaactagtttaagctcacgacatcagtttgctcctggagcgacagtattgtataagggcgataaaatggtgcttaacctggacaggtctcgtgttccaactgagtgtaagagaaaattgaggccattcttaaggaacttgaaaagccaggggggtcctttagagtccacag

SEQ ID NO: 138788 - DNA, 2503 bp, Homo sapiens
ggattttgccgatttcggaaccaccatcaaacaggattttcgcctgctggggcaaaccagcgtggaccgcttgctgcaactctctcagggccaggcggtgaagggcaatcagctgttgcccgtctcactggtgaaaagaaaaaccaccctggcgcccaatacgcaaaccgcctctccccgcgcgttggccgattcattaatgcagctggcacgacaggtttcccgactggaaagcgggcaactagcgatatctggtagaatactctttctcccaatgctgaatagcatcaacaagctcgcagcacccagtcagccatgcacggagccgttctttagacgggatccgaccctacatccgaagtccgaggttcggttacccccaaaggtgacaacaattacggtcatttccaatcccattttaataactccacaagaaaagtcagttgctcaatgtacctataaccagaccgttcagctggatattacggcctttttaaagaccgtaaagaaaaataagcacaagttttatccggcctttattcacattcttgcccgcctgatgaatgctcatccggagttccgtatggcaatgaaagacggtgagctggtgatatgggatagtgttcacccttgttacaccgttttccatgagcaaactgaaacgttttcatcgctctggagtgaataccacgacgatttccggcagtttctacacatatattcgcaagatgtggcgtgttacggtgaaaacctggcctatttccctaaagggtttattgagaatatgtttttcgtctcagccaatccctgggtgagtttcaccagttttgatttaaacgtggccaatatggacaacttcttcgcccccgttttcaccatgggcaaatattatacgcaaggcgacaaggtgctgatgccgctggcgattcagatcagaaaatctgatggcaccctacaggaacatgacggtatctgcgagatccatgttgctaaatatgctgaaatattcggattgacctctgcggaagccagtaaggatatacggcaggcattgaagagtttcgcggggaaggaagtggttttttatcgccctgaagaggatgccggcgatgaaaaaggctatgaatcttttccttggtttatcaaacgtgcgcacagtccatccagagggctttacagtgtacatatcaacccatatctcattcccttctttatcgggttacagaaccggtttacgcagtttcggcttagtgaaacaaaagaaatcaccaatccgtatgccatgcgtttatacgaatccctgtgtcagtatcgtaagccggatggctcaggcatcgtctctctcccaatcgactggatcatagagcgttaccaactgcctcaaagttaccagcgtatgcctgacttccgccgccgcttcctgcaggtctgtgttaatgagatcaacagcagaactccaatgcgcctctcatacattgagaaaaagaaaggccgccagacgactcatatcatcagaatatctgatggcaccctacaggaacatgacggtatctgcgagatccatgttgctaaatatgctgaaatattcggattgacctctgcggaagccagtaaggatatacggcaggcattgaagagtttcgcggggaaggaagtggttttttatcgccctgaagaggatgccggcgatgaaagggggtatgaatcttttccttggtttatcaaacgtgcgcacagtccatccagagggctttacagtgtacatatcaacccatatctcattcccttctttatcgggttacagaaccggtttacgcagtttcggcttagtgaaacaaaagaaatcaccaatccgtatgccatgcgtttatacgaatccctgtgtcagtatcatttgtgtggcactttaagaaactcacggttctgcgagatccatgttgctaaatatgctgaaatattcggattgacctctgcggaagccagtaaggatatacggcaggcattgaagagtttcgcggggaaggaagtggttttttatcgccctgaagaggatgccggcgatgaaaaaggctatgaatcttttccttggtttatcaaacgtgcgcacagtccatccagagggctttacagtgtacatatcaacccatatctcattcccttctttatcgggttacagaaccggtttacgcagtttcggcttagtgaaacaaaagaaatcaccaatccgtatgccatgcgtttatacgaatccctgtgtcagtatcgtaagccggatggctcaggcatcgtctctctgaaaatcgactggatcatagagcgttaccagctgcctcaaagttaccagcgtatgcctgacttccgccgccgcttcctgcaggtctgtgttaatgagatcaacagcagaactccaatgcgcctctcatacattgagaaaaagaaaggccgccagacgactcatatcgtattttccttccgcgatatcacttccatgacgacaggatag

SEQ ID NO: 138789 - DNA, 2289 bp, Homo sapiens
atgttaactttgattttgctggacttgcaattcatggctcagcttgctgggtaccagatgagctttaacagcaccaagtcaaagcagacaaagaataactttgcagtgggctacaggactggggacttccagctgcacactaatgtcaatgatggggcagaatttggaggatcagtttatcaaaaagtttgtgaagaacttgatgctttaataaacctggcttggacatcaagtaccagctgcactcgttttggccttgcagctaaatttcaattgaaacccattgctttcatttctaccaaagtcaaccactggttgactggggtcagctacactccaccccttgaggctggtgtgaagctcaacctgtctgctctgtgtgacaatctaaaaacttgtcacacttcacatggatctgtcatggcggaaacagcggttatcaatcacaagaaacgtaaaaatagcccgcgaatcgtccagtcaaacgacctcactgaggcggcatatagtctctcccgggatcaaaaacgtatgctgtatctgttcgttgaccagatcagaaaatctgatggcaccctacaggaacatgacggtatctgcgagatccatgttgctaaatatgctgaaatattcggattgacctctgcggaagccagtaaggatatacggcaggcattgaagagtttcgcggggaaggaagtggttttttatcgccctgaagaggatgccggcgatgaaaaaggctatgaatcttttccttggtttatcaaacgtgcgcacagtccatccagagggctttacagtgtacatatcaacccatatctcattcccttctttatcgggttacagaaccggtttacgcagtttcggcttagtgaaacaaaagaaatcaccaatccgtatgccatgcgtttatacgaaatccctgttgtcagtatccgtaagcccgggatgggctcaggcatcgtctctctgaaaatcgactggatcatagagcgttaccagctgcctcaaagttaccagcgtatgcctgacttccgccgccgcttcctgcagtgcataaacgctggtcatgaaatgacgaaggctatcgccattgcacagtttaatgatgacagcccggaagcgaggaaaataacccggcgctggagaataggtgaagcagcggatttacttggggtttcttctcaggctatcagagatgccgagaaagcagggccactaccgcacccggatatggaaaatcgaggacgggttgagcaacggggtggttataccattgaaccaaataatcatatgcgtgatggtgttggtacgcgatggcgacgtgctgaagacgtattttccaccgctgatcgggggttgctggccataaaggggggcggttacaaaacctcagtttctgttcatcttgctcaggatctggctctgaaggggctacgtgttttgctcgtggaaggtaacgacccccagggaacagcctcaatgtatcacggatgggtaccagatcttcatattcatgcagaagacactctcctgcctttctatcttggggaaaaggacgatgtcacttatgcaataaagcccacttgctggccggggcttgacattattccttcctgtctggctctgcaccgtattgaaactgagttaatgggcaaatttgatgaaggtaaactgcccaccgatccacacctgatgctccgactggccattgaaactgttgctcatgactatgatgtcatagttattgacagcgcgcctaacctgggtatcggcacgattaatgtcgtatgtgctgctgatgtgctgattgttcccacgcctgctgagttgtttgactacacctccgcactgcagtttttcgatatgcttccggatctggtcaagaaccgcgatcttaaaggggtcgagcctgatgtatttattcgcgataagctcatggagcggcgtaaccgtcgcacaggaaggacagagaaagcgcggatctgggaagtgacggacagaacggtcaggacctggattggggaggcggttgccgccgctgctgctgacggtgtgacgttctctgttccggtcacaccacatacgttccgccattcctatgcgatgcacatgctgtatgccggtataccgctgaaagttctgcaaagcctgatgggacataagtccatcagttcaacggaagtctacacgaaggtttttgcgctggatgtggctgcccggcaccgggtgcagtttgcgatgccggagtctgatgcggttgcgatgctgaaacaattatcctga

SEQ ID NO: 138790 - DNA, 2442 bp, Homo sapiens
atggatgccaagatgcattcaggtggaacagctccccccgggacattgagtcagcgtcagccaagtagtaattccaaaaccaacggctcaaaactcaacccgttgaaagatactttgttatcgacaccaagctgccccgaaggggaattggttaatgcggcgcgtaggagtaatggttccggtaatgccattactttgcctgtatggggtcgggatgtaaagtttactcttgaagtgctccggggtgatagtgttgagaagacctctcgggtatggtcaggtaatgaacgtgaccaggagctgcttactgaggacgcactggatgatctcatcccttcttttctactgactggtcaacagacaccggcgttcggtcgaagagtatctggtgtcatagaaattgccgatgggagtcgccgtcgtaaagctgctgcacttaccgaaagtgattatcgtgttctggttggcgagctggatgatgagcagatggctgcattatccagattgggtaacgattatcgcccaacaagtgcttatgaacgtggtcagcgttatgcaagccgattgcagaatgaatttgctggaaatatttctgcgctggctgatgcggaaaatatttcacgtaagattattacccgctgtatcaacaccgccaaattgcctaaatcagttgttgctcttttttctcaccccggtgaactatctgcccggtcaggtgatgcacttcaaaaagcctttacagataaagaggaattacttaagcagcaggcatctaaccttcatgagcagaaaaaagctgggtgtgacaatctaaaaacttgtcacacttcacatggatctgtcatggcggaaacagcggttatcaatcacaagaaacgtaaaaatagcccgcgaatcgtccagtcaaacgacctcactgaggcggcatatagtctctcccgggatcaaaaacgtatgctgtatctgttcgttgaccagatcagaaaatctgatggcaccctacaggaacatgacggtatctgcgagatccatgttgctaaatatgctgaaatattcggattgacctctgcggaagccagtaaggatatacggcaggcattgaagagtttcgcggggaaagaagtggttttttatcgccctgaagaagatgccggcgatgaaaaaagctatgaacaacccagtaaggatatacggcaggcattgaagagtttcgcggggaaggaagtggttttttatcgccctgaagaggatgccggcgatgaaaaaggctatgaatcttttccttggtttatcaaacgtgcgcacagtccatccagagggctttacagtgtacatatcaacccatatctcattcccttctttatcgggttacagaaccggtttacgcagtttcggcttagtgaaacaaaagaaatcaccaatccgtatgccatgcgtttatacgaatccctgtgtcagtatcgtaagccggatggctcaggcatcgtctctctgaaaatcgactggatcatagagcgttaccagctgcctcaaagttaccagcgtatgcctgacttccgccgccgcttcctgcaggtctgtgttaatgagatcaacagcagaactccaatgcgcctctcatacattgagaaaaagaaaggccgccagacgactcatatctcccggaagtttactctgaagtggtccgggggtgatagtgttgagaagacttctcgggtatggtcaggtaatgaacgtgcccaggagctgcttactgaggacgcactgaatgatctcatcccttcttttctactgactggtcaacagacaccggcgttcggtcgaagagtatctggtgtcatagaaattgccgatgggagtcgccgtcgtaaagctgctgcacttaccgaaagtgattatcgtgttctggttggcgagctggatgatgagcagatggctgcattatccagattgggtaacgattatcgcccaacaagtgcttatgaacgtggtcagcgttatgcaagccgattgcagaatgaatttgctggacatatttctgcgctggctgatgcggaaaatatttcacgtaagattattacccgctgtatcaacaccgccaaattgcctaaatcagttgttgctcttttttctcaccccggtgaactatctgcccggtcaggtgatgcacttcaaaaagcctttacagataaagaggaattacttaagcagcaggcatctaaccttcatgagcagaaaaaagctggggtgatatttcaagctgaagaagttatcactcttttaacttctgtgcttaaaacgtcatctgcatcaagaactagtttaagctcacgacatcagtttgctcctggagcgacagtattgtataagggcgataaaatggtgcttaacctggacagttctcgtgtccaactgagttatagagaaaatgaggccaaataa

SEQ ID NO: 138791 - DNA, 2853 bp, Homo sapiens
atgctccacatcactaatgatcagggaaatgcaagtcaaaaccacaatgcaatgccaccttactcctgcaaaaatggacataatctaaaaacagtagatggtggcatggatgcagtgaacggggaacacttctacactgctggtctttctcaaggcccactgaagggctcttttcttctcttcttcaacattcttatcctcgtgtgtccacccattttcagagtgtcaggaaatgaggtatttattcgcgataagctcatggagcggcgtaaccgtcgcacaggaaggacagagaaagcgcggatctgggaagtgacggacagaacggtcaggacctggattggggaggcggttgcgccgctgctgctgacgtgtgacaatctaaaaacttgtcacacttcacatggatctgtcatggcggaaacagcggttatcaatcacaagaaacgtaagtttagcccgcgaatcgtccagtcaaacgacctcactgaggcggcatatagtctctcccgggatcaaaaacgtatgctgtatctgttcgttgaccagatcagaaaatctgatggcaccctacaggaacatgacggtatctgcgagatccatgttgctaaatatgctgaaatattcggattgacctctgcggaagccagtaaggatatacggcaggcattgaagagtttcgcggggaaggaagtggttttttatcgccctgaagaggatgccggcgatgaaaaaggctatgaatcttttccttggtttatcaaacgtgcgcacagtccatccagagggctttacagtgtacatatcaacccatatctcattcccttctttatcgggttacagaaccggtttacgcagtttcggcttagtgaaacaaaagaaatcaccaatccgtatgccatgcgtttatacgaatccctgtgtcagtatcgtaagccggatggctcaggcatcgtctctctgaaaatcgactggatcatagagcgttaccagctgcctcaaagttaccagcgtatgcctgacttccgccgccgcttcctgcaggtctgtgttaatgagatcaacagcagaactccaatgcgcctctcatacattgagaaaaagaaaggccgccagacgactcatatctgtgacaatctaaaaacttgtcacacttcacatggatctgtcatggcggaaacagcggttatcaatcacaagaaacgtaaaaatagcccgcgaatcgtccagtcaaacgacctcactgaggcggcatatagtctctcccgggatcaaaaacgtatgctgtatctgttcgttgaccagatcagaaaatctgatggcaccctacaggaacatgacggtatctgcgagatccatgttgctaaatatgctgaaatattcggattgacctctgcggaagccagtaaggatatacggcaggcattgaaaagtttcgcggggaaagaagtggttttttatcgccctgaagaggatgccggcgatgaaaaaggctatgaatcttttccttggtttatcaaacgtgcgcacagtccatccagagggctttacagtgtacatatcaacccatatctcattcccttctttatcgggttacagaaccggtttacacaatttcggcttattgaaacaaaagaaatcaccaatccgtatgccatgcgtttatacaaatccctgtgtcaatatcgtaaaccggatggctcaaggcatctctctttgaaaatcgactggatcatagagcggttccagctgccctcaaattaccaaccgatgcctgactttccccgccgtttcctgcagacaccggcgttcggtcgaagagtatctggtgtcatagaaattgccgatgggagtcgccgtcgtaaagctgctgcacttaccgaaagtgattatcgtgttctggttggcgagctggatgatgagcagatggctgcattatccagattgggtaacgattatcgcccaacaagtgcttatgaacgtggtcagcgttatgcaagccgattgcagaatgaatttgctggaaatatttctgcgctggctgatgcggaaaatatttcacgtaagattattacccgctgtatcaacaccgccaaattgcataaatcagttgttgctcttttttctcaccccggtgaactatctgcccggtcaggtgatgcacttcaaaaagcctttacagataaagaggaattacttaagcagcaggcatctaaccttcatgagcagaaaaaagctggggtgatatttgaagctaaagaagttatcactcttttaacttctgtgcttaaaacgtcatctgcatcaagaactagtttaaagctcaccacatcaaattggctccctggagcgacagtattgtataagggcgataaaatggtgcttaacctggacagaatgaatttgttgaaaaatatttctgcgctggctgatgcggaaaatatttcacgtaagattattacccgctgtatcaacaccgccaaattgcataaatcagttgttgctcttttttctcaccccggtgaactatctgcccggtcaggtgatgcacttcaaaaagcctttacagataaagaggaattacttaagcagcaggcatctaaccttcatgagcagaaaaaagctggggtgatatttgaagctgaagaagttatcactcttttaacttctgtgcttaaaacgtcatctgcatcaagaactagtttaagctcacgacatcagtttgctcctggagcgacagtattgtataagggcgataaaatggtgcttaacctggacaggtctcgtgttccaactgagtgtatagagaaaattgaggccattcttaaggaacttgaaaagccagcaccctga

SEQ ID NO: 138792 - DNA, 4126 bp, Homo sapiens
atggtggattcgttaattgcgcgcgtaggagtaatggctcgcggtaatgccattactttgcctgtatgtggtcgggatgtgaagtttactcttgaagtgctccggggtgatagtgttgagaagacctctcgggtatggtcaggtaatgaacgtgaccaggagctgcttactgaggacgcactggatgatctcatcccttcttttctactgactggtcaacagacaccggcgttcggtcgaagagtatctggtgtcatagaaattgccgatgggagtcgccgtcgtaaagctgctgcacttaccgaaagtgattatcgtgttctggttggcgagctggatgatgagcaaatggctgcattatccagattgggtaacgattatcgccccacaagtgcttatgaacgtgcgtctatgcaagccgattgcagaatgaatttgctggaaatatttctgcgctggctgatgcggaaaatatttcacaatgaatttgctggaaatatttctgcgctggctgatgcggaaaatatttcacgtaagattattacccgctgtatcaacaccgccaaattgcctaaatcagttgttgctcttttttctcaccccggtgaactatctgcccggtcaggcgataaaaaagactcccttccccgcgaaactcttcaatgcctgccgtatatccttactggcttccgcagaggtcaatccgaatatttcagcatatttagcaacatggatctcgcagataccgtcatgtttctactaataatcagaccgacgatacgagtgggaccgtggtcccagtctgattatcagaccgacgggtaccgagctcgaattcttaatcatggtcatagctgtttgatcagaaaatctgatggcaccctacaggaacatgacggtatctgcgagatccatgttgctaaatatgctgaaatattcggattgacctctgcggaagccagtaaggatatacggcaggcattgaagagtttcgcggggaaggaagtggttttttatcgccctgaagaggatgccggcgatgaaaaaggctatgaatcttttccttggtttatcaaacgtgcgcacagtccatccagagggctttacagtgtacatatcaacccatatctcattcccttctttatcgggttacagaaccggtttacgcagtttcggcttagtgaaacaaaagaaatcaccaatccgtatgccatgcgtttatacgaatccctgtgtcagtatcgtaagccggatggctcaggcatcgtctctctgaaaatcgactggatcatagagcgttaccagctgcctcaaagttaccagcgtatgcctgacttccggccgccgcttcctgcagatcagaatatctgatggcaccctacaggaacatgacggtatctgcgagatccatgttgctaaatatgctgaaatattcggattgacctctgcggaagccagtaaggatatacggcaggcattgaagagtttcgcggggaaggaagtggttttttatcgccctgaagaggatgccggcgatgaaaaaggctatgaatcttttccttggtttatcaaacgtgcgcacagtccatccagagggctttacagtgtacatatcaacccatatctcattcccttctttatcgggttacagaaccggtttacgcagtttcggcttagtgaaacaaaagaaatcaccaatccgtatgccatgcgtttatacgaatccctgtgtcagtatcgtaagccggatggctcaggcatcgtctctctgaaaatcgcctgggtcatagagcgttaccagctgcctcaaagttaccagcgtatgcctgacttccgccgtcgcttcctgcaggtatcagattttctgatggcaccctacaggaacatcgacggtatctgcgagatccatgttgctaaatatgctgaaatattcggattgacctctgcggaagccagtaaggatatacggcaggcattgaagagtttcgcggggaaggaagtggttttttatcgccctgaagaggatgccggcgatgaaaaaggctatgaatcttttccttggtttatcaaacgtgcgcacagtccatccagagggctttacagtgtacatatcaacccatatctcattcccttctttatcgggttacagaaccggtttacgcagtttcggcttagtgaaacaaaagaaatcaccaatccgtatgccatgcgtttatacgaatccctgtgtcagtatcgtaagccggatggctcaggcatcgtctctctgaaaatcgactggatcatagagcgttaccagctgcctcaaagttaccagcgtatgcctgacttccgccgccgcttcctgcaggtctgtgttaatgagatcaacagcagaactccaatgcgcctctcatacattgagaaaaagaaaggccgccagacgactcatatcgaacatgacggtatctgcgagatccatgttgctaaatatgctgaaatattcggattgacctctgcggaagccagtaaggatatacggcaggcattgaagagtttcgcggggaaggaagtggttttttatcgccctgaagaggatgccggcgatgaaagaggctatgaatcttttccttggtttatcaaacgtgcgcacagtccatccagagggctttacagtgtacatatcaacccatatctcattcccttctttatcgggttacagaaccggtttacgcagtttcggcttagtgaaacaaaagaaatcaccaatccgtatgccatgcgtttataccaatccctgtgtcagtatcgtaagccggatggctcaggcatcgtctctctgaaaatcgactggatcatagagcgttaccagctgcctcaaagttaccagcgtatgcctgacttccgccgccgcttcctgcagatcagaaaatctgatggcaccctacaggaacatgacggtatctgcgagatccatgttgctaaatatgctgaaatattcggattgacctctgcggaagccagtaaggatatacggcaggcattgaagagtttcgcggggaaggaagtggttttttatcgccctgaagaggatgccggcgatgaagaaggctatgaatcttttccttggtttatcaaacgtgcgcacagtccatccagagggctttacagtgtacatatcaacccatatctcattcccttctttatcgggttacagaaccggtttacgcagtttcggcttagtgaaacaaaagaaatcaccaatccgtatgccatgcgtttatacgaatccctgtgtcagtatcgtaagccggatggctcatgcatcgtctctctgaaaatcgactggatcatagagcgttaccagctgcctccacgttaccagcgtatgcctgacttccgccgccgcttcctgcgggtctgggttcaggagatcaacagcagaacccccatgccgcctcttctgccttgggaaaaagagaggccggcggacgactcatatgaagaacccctgttcgttgaccagatcagattatctgatggcaccctacaggaacatgacggtatctgcgagatccatgttgctaaatatgctgaaatattcggattgacctctgcggaagccagtaaggatatacggcaggcattgaagagtttcgcggggaaggaagtggttttttatcgccctgaagaggatgccggcgatgaaaaaggctatgaatcttttccttggtttatcaaacgtgcgcacagtccatccagagggctttacagtgtacatatcaacccatatctcattcccttctttatcgggttacagaaccggtttacgcagtttcggcttagtgaaacaaaagaaatcaccaatccgtatgccatgcgtttatacgaatccctgtgtcagtatcgtaagccggatggctcaggcatcgtctctctgaaaatcgactggatcatagagcgttaccagctgcctcaaagttaccagcgtatgcctgacttccgccgccgcttcctgcaggtctgtgttaatgagatcaacagcagaactccaatgcgcctctcatacattgagaaaaagaaaggccgccagacgactcatatcgtattttccttccgcgatatcacttccatgacgacaggatag

SEQ ID NO: 138793 - DNA, 3270 bp, Homo sapiens
atgaaactcatggaaacacttaacaagtgcataaacgctgttcatgaaatgacgaaggctatcgccattgcacagtttaatgatgacagcccggaagcgaggaaaataacccggcgctggagaataggtgaagcagcggatttagttggggtttcttctcaggctatcagagatgccgagaaagcagggcgactaccgcacccggatatggaaattcgaggacgggttgagcaacgtgttggttatacaattgaacaaattaatcatatgcgtgatgtgtttggtacgcgattgcgacgtgctgaagacgtatttccaccggtgatcggggttgctgcccataaaggtggcgtttacaaaacctcagtttctgttcatcttgctcaggatctggctctgaaggggctacgtcccccgctcgtggaagtggactcttgttccaaactggaacaacactcaaccctatctcgggctattcttttgatttataagggattttgccgatttcggaaccaccatcaaacaggattttcgcctgctggggcaaaccagcgtggaccgcttgctgcaactctctcagggccaggcggtgaagggcaatcagctgttgcccgtctcactggtgaaaagaaaaaccaccctggcgcccaatacgcaaaccgcctctccccgcgcgttggccgattcattaatgcagctggcacgacaggtttcccgactggaaagcgggcaatcctaaaacagcagcaaaacgaaaaataccaagtgcctcaattcgatcaatcaacgattaaaaatattgagtctgcaaaaggacttgatgtgtgggacagctggccgctgcaaaacgctgacggaacagtagctgaatacaacggctatcacgttgtgtttgctcttgcgggaagcccgaaagacgctgatgacacatcaatctacatgttttatcaaaaggtcggcgacaactcaatcgacagctggaaaaacgcgggccgtgtctttaaagacagcgataagttcgacgccaacgatccgatcctgaaagatcagacgcaagaatggtccggttctgcaacctttacatctgacggaaaaatccgtttattctacactgactattccggtacacattacggcaaacaaagcctgacaacagcgcagaacgttcagcagtttatcgatgaaggcaattatacatccggcgacaaccatacgctgagagaccctcactacgttgaagacaaaggccataaataccttgtattcgaagccaacacgggaacagaaaacggataccaaggcgaagaatctttatttaacaaagcgtactacggcggcggcacgaacttcttccgtaaagaaagccagaagcttcagcagagcgctaaaaaacgcgatgctgagttagcgaacggcgccctcggtatcatagagttaaataatgattacacattgaaaaaagtaatgaagccgctgatcacttcaaacacgtgtgacaatctaaaaacttgtcacacttcacatggatctgtcatggcggaaacagcggttatcaatcacaagaaacgtaaaaatagcccgcgaatcgtccagtcaaacgacctcactgaggcggcatatagtctctcccgggatcaaaaacgtatgctgtatctgttcgttgaccagatcagaaaatctgatggcaccctacaggaacatgacggtatctgcgagatccatgttgctaaatatgctgaaatattcggattgacctctgcggaagccagtaaggatatacggcaggcattgaagagtttcgcggggaaggaagtggttttttatcgccctgaagaggatgccggcgatgaaaaaggctatgaatcttttccttggtttatcaaacgtgcgcacagtccatccagagggctttacagtgtacatatcaacccatatctcattcccttctttatcgggttacagaacccggttaacgcagtttcggcttagtgaaacaaaagaaatcaccgatccgtatgccatgcgctatatacaaataccctgtgtcagtatcgggctttcgtaaatggggggggagaagaaaaggctcgcggaaagcccatactttgccggtatggggtcgggatgtgaagttaactctgaaagtgctccggggtgatagtgttgagaagacttttcgggtagggtcaggtaatgaacgtgcccagaagctgcttactgaggacgcactggatgatctcatcccttcttttctactgactggtcaacagacaccggcgttcggtcgaagagtatctggtgtcatagaaattgccgatgggagtcgccgtcgtaaagctgctgcacttaccgaaagtgattatcgtgttctggttggcgagctggatgatgagcagatggctgcattatccagattgggtaacgattatcgcccaacaagtgcttatgaacgtggtcagcgttatgcaagccgattgcagaatgaatttgctggaaatactctctgcgctggctgatgcggaaaatataatcacgtgcgcctttattccaaaacatacgcccaatatcaaccggttgaaagatatttcgttaacgacaccagttgccccgatggtggattcgttatttgcgcgcgtaggagtaatggctcgcggtaatgccaatactttgcctgtatgtggtcgggatgtgaagtttactcttaaagtgctccggggtgatagtgttgagaagacctctcgggtatggtcaggtaatgaacgtgaccaggagctgcttactgaggacgcactggatgatctcatcccttcttttctactgactggtcaacagacaccggcgttcggtcgaagagtatctggtgtcatagaaattgccgatgggagtcgccgtcgtaaagctgctgcacttaccgaaagtgattatcgtgttctggttggcgagctggatgatgagcagatggctgcattatccagattgggtaacgattatcgcccaacaagtgcttatgcacgtggtcagcgttatgcaagccgattgcagaatgaattcgccccccacatttctgcgctggctgatgcggaaaataaaaaacgtaaaaaaattacccgctgtatcaacaccgccaaattgcctaaatcagttgttgctcttttttctcaccccggtgaactatctgccccgtcaggaacgggaaaggaagtaattcttgaagtgcagctgattcacaatgtattccaatacaccttgcttgcttgttttgggacctga

SEQ ID NO: 138794 - DNA, 1767 bp, Homo sapiens
atggtggattcgttaattgcgcgcgtaggagtaatggctcgcggtaatgccattactttgcctgtatgtggtcgggatgtgaagtttactcttcaagtgctccggggtgatagtgttgagaagacctctcgggtaccgccaggtaatgaacgtgaccaggagatgcttactgaggacgcactggatgatctcatcccttcttttctactgactggtcaacagacaccggcgttcggtcgaagagtatctggtgtcatacacactgccgatgggagtcgccgtcgtaaagctgctgcacttaccgaaaaattttgtatcgttgataaccccccgggggagattagaaaaagagcgtgcctttttattccaacacatgcgctcaatctcaaccggtttgaagatatttgttatgcacaccagctgcccgatggtggtttgttaagtgcgcgcgtaggagtaatggctcgcggtaaccccattctttcccctgtatgtggtcggaatgtaaagttcactcttaaagtgctccggggtgatagtgttgagaacccctctcgggtatggtcgggtaatgaacgtgcccaggagctgcttactgagcacgcactggatgatctcaccctttcttttctactgactggtcaacagacaccggcgttcggtcgaagagtatctggtgtcatagaaattgccgatgggagtcgccgtcgtaaagctgctgcacttaccgaaagtgattatcgtgttctggttggcgagctggatgatgagcagatggctgcattatccagattgggtaacgattatcgcccaacaagcccttatgaacgtggtcagcgttatgcaagccgattgcagaatgaatttgctggaaatatttctgcgctggctgatgcggaaaatatttcacgtaagattattacccgctgtatcaacaccgccaaattgcctaaatcagttgttgctcttttttctcaccccggtgaactatctgcccggtcaggtaatgaacgtgaccaggagctgcttactgaggacgcactggatgatctcatcccttcttttctactgactggtcaacagacaccggcgttcggtcgaagagtatctggtgtcatagaaattgccgatgggagtcgccgtcgtaaagctgctgcacttaccgaaagtgattatcgtgttctggttggcgagctggatgatgagcagatggctgcattatccagattgggtaacgattatcgcccaacaagtgcttatgaacgtggtcagcgttatgcaagccgattgcagaatgaatttgctggaaatatttctgcgctggctgatgcggaaaatatttcacgtaagattattacccgctgtatcaacaccgccaaattgcctaaatcagttgttgctcttttttctcaccccggtgaactatctgcccggtcaggtgatgcacttcaaaaagcctttacagataaagaggaattacttaagcagcaggcatctaaccttcatgagcagaaaaaagctggggtgatatttgaagctgaagaagttatcactcttttaacttctgtgcttaaaacgtcatctgcatcaagaactagtttaagctcacgacatcagtttgctcctggagcgacagtattgtataagggcgataaaatggtgcttaacctggacaggtctcgtgttccaactgagtgtatagagaaaattgaggccattcttaaagaacttgaaaagccagcaccctggttgcgaacacccctttaa

SEQ ID NO: 138795 - DNA, 3942 bp, Homo sapiens
  misc_feature (1)...(3942): n = a,t,c or g
atgaacatgaacatcaaaaaaattgtaaaacaagccacagttctgacttttacgactgcacttctggcaggaggagcgactcaagccttcgcgaaagaaaataaccaaaaagcatacaaagaaacgtacggcgtctctcatattacacgccatgatatgctgcagatccctaaacagcagcaaaacgaaaaataccaagtgcctcaattcgatcaatcaacgattaaaaatattgagtctgcaaaaggacttgatgtgtgggacagctggccgctgcaaaacgctgacggaacagtagctgaatacaacggctatcacgttgtgtttgctcttgcgggaagcccgaaagacgctgatgacacatcaatctacatgttttatcaaaaggtcggcgacaactcaatcgacagctggaaaaacgcgggccgtgtctttaaagacagcgataagttcgacgccaacgatccgatcctgaaagatcagacgcaagaatggtccggttctgcaacctttacatctgacggaaaaatccgtttattctacacgggatccctaaacagcagcaaaacggaaaaataccaagtgcctcatatcgatcaatcaacgattaaaaatattgagtctgcaaaaggacttgatgtgtgggacagctggccgctgcaaaacgctgacggaacagtagctgaatacaacggctatcacgttgtgtttgctcttgcgggaagcccgaaagacgctgatgacacatcaatctacatgttttatcaaaaggtcggcgacaactcaatcgacagctggaaaaacgcgggccgtgtctttaaagacagcgataagttcgacgccaacgatccgatcctgaaagatcagacgcaagaatggtccggttctgcaacctttacatctgacggaaaaatccgtttattctacactgactattccggtaaacattacggcaaacaaagcctgacaacagcgcaggtaaatgtgtcaaaatctgatgacacactcaaaatcaacggagtggaagatcacaaaacgatttttgacggagacggaaaaacatatcagaacgttcagcagtttatcgatgaaggcaattatacatccggcgacaaccatacgctgagagaccctcactacgttgaagacaaaggccataaataccttgtattcgaagccaacacgggaacagaaaacggataccaaggcgaagaatctttatttaacaaagcgtactacggcggcggcacgaacttcttccgtaaagaaagccagaagcttcagcagagcgctaaaaaacgcgatgctgagttagcgaacggcgccctcggtatcatagagttaaataatgattacacattgaaaaaagtaatgaagccgctgatcacttcaaacacggtaactgatgaaatcgagcgcgcgaatgttttcaaaatgaacggcaaatgnaggaaccccctgcagatccctaaacagcagcaaaacgaaaaataccaagtgcctcaattcgatcaatcaacgattaaaaatattgagtctgcaaaaggacttgatgtgtgggacagctggccgctgcaaaacgctgacggaacagtagctgaatacaacggctatcacgttgtgtttgctcttgcgggaagcccgaaagacgctgatgacacatcaatctacatgttttatcaaaaggtcggcgacaactcaatcgacagctggaaaaacgcgggccgtgtctttaaagacagcgataagttcgacgccaacgatccgatcctgaaagatcagacgcaagaatggtccggttctgcaacctttacatctgacggaaaaatccgtttattctacactgactattccggtaaacattacggcaaacaaagcctgacaacagcgcagatattccagatgattacagtttttattaccagcctctgcaacactacctccagccacatctgtctccacatcagctgggtcaccacaatgcacggcgccatgcctcatcccggccacatccccacagcccctgcttctttacctgccaaggtgaaaggttccgggaaggtctgctggctggccttccctttatcagaactcaccccccccagtgccttacaggtaaatgtgtcaaaatctgatgacacactcaaaatcaacggagtggaagatcacaaaacgatttttgacggagacggaaaaacatatcagaacgttcagcattttatcgatgaaggcaattatacatgcggcgacaaccatacgctgagagaccctcactacgttgaagacaaaggccataaataccttgtattcgaagccaacacgggaacagaaaacggataccaaggcgaagaatctttatttaacaaagcgtactacggcggcggcacgaacttcttccgtaaagaaagccagaagcttcagcagagcgctaaaaaacgcgatgctgagttagcgaacggcgccctcggtatcatagagttaaataatgattacacattgaaaaaagtaatgaagccgctgatcacttcaaacacggtaactgatgaaatcgagcgcgcgaatgttttcaaaatgaacggcaaatggtacttgttcactgattcacgcggttcaaaaatgacgatcgatgtgccgcaagccaaaagcaccaatgtggttatcacaagctacatgacaaacagaggcttcttcgagcctgagggcagcaagggcagtatcactgcagcagtaatggcaaaagggctctcagttgcctctgggaactccaccccagagagacgcagagccactgccaatgagaatgttcagccaagggctatcagagatgccgagaaagcagggcgactaccgcacccggatatggaaattcgaggacgggttgagcaacgtgttggttatacaattgaacaaattaatcatatgcgtgatgtgtttggtacgcgattgcgacgtgctgaagacgtatttccaccggtgatcggggttgctgcccataaaggtggcgtttacaaaacctcagtttctgttcatcttgctcaggatctggctctgaaggggctacgtgttttgctcgtggaaggtaacgacccccagggaacagcctcaatgtatcacggatgggtaccagatcttcatattcatgcagaagacactctcctgcctttctatcttggggaaaaggacgatgtcacttatgcaataaagcccacttgctggccggggcttgacattattccttcctgtctggctctgcaccgtattgaaactgagttaatgcgcaaatttgatgaaggtaacctgcccaccgatccacacctgatgctccgactggccattgaaactgttgctcatgactatgatgtcatagttattgacagcgcgcctaacctgggtatcggcacgattaatgtcgtatgtgctgctgatgtgctgattgttcccacgcctgctgagcagttagatataagctgcgtcacgccagttttttgactattcttcgtgatctgctcaagaacgttgatcttaaagggttcgagcctgatgtacgtattttgcttaccaaatacagcaatagtaatggctctcagtccccgtggatggaggagcaaattcgggatgcctgggggaagcatggttctaaaaaatgttgtggcgtttcaaaacctggagtttctgttcatcttgctcaggatctggctctgaaggggctacgtgttttgctcgtggaaggtaacgacccccagggaacagcctcaatgtatcacggatgggtaccagatcttcatattggtgcagaagacactctcctgcctttctatcttggggaaaaggacgatgtcacttatgcaataaagcccacttgctggccggggcttgacattattccttcctgtctggctctgcaccgtattgaaactgagttaatgggcaaatttgatgaag

SEQ ID NO: 138796 - DNA, 3901 bp, Homo sapiens
atggtggattcgttaattgcgcccgtaggagtaatggctcgcggtaatgccattactttgcctgtacgcgccacgaatgtgaagtttactcttgaagagctccggggtgatagtgttgagaagacctctcgggtatggtcagaaaaaaaggatagaggagggcaggaggcagaagtgagcggggaagggtcgtcgcagaccaaatcactgcaaaagcggcaacactcaaatgggtcagatttcacagccaggggcttccacacgggccaggctttggtaagaagcaaagggacatactggaatccaacagggttgggactctcgcatgggacagaagaccctaacttgattggtgaggagttggatgctggggagtgggacaagaacacacgaaaggagttggcggttttaaatgtcagacgggattttgccgatttcggaaccaccatcaaacaggattttcgcctgctggggcaaaccagcgtggaccgcttgctgcaactctctcagggccaggcggtgaagggcaatcagctgttgcccgtctcactggtgaaaagaaaaaccaccctggcgcccaatacgcaaaccgcctctccccgcgcgttggccgattcattaatgcagctggcacgacaggtttcccgactggaaagcgggcagttttgggtttttgaagggggattacgtgttttggttcgtgaaagggtaaccacccccaagggaacaggcctcaatgtatcagggatggggtaccagatctttaatattcatgcagaagacactctcctgcttttctatcttggggaaaaggacgatgtcacttatgcaataaagcccacttgctggccggggcttgacattattccttcctgtctggctttgcaccgtattgaaactgagttaatgggcaaatttgatgaaggtaaactgcccaccgatccacacctgatgctccgactggccattgaaactgttgctcatgactatgatgtcatagttattgacagcgcgcctaacctgggtatcggcacgattaatgtcgtatgtgctgctgatgtcctgattgttcccacgcctggctgagttgtttgactacacctccgcactgcagtttttcgatatgcttcgtgatctgctcaagaccgttgatcttaaagggttcgagcctgatgtacgtattttgcttcccaaatacagcaatagtaatggctctcagtccccgtggatggaggagcaaattcgggatgcctggggaagcatggttctaaaaaatgttgtacgtgaaacggatgaagttggtaaaggtcagatccggatgagaactgtttttgaacaggcccccgatcccccctcttcaactggtgcctggagaaatgctcttgcagcgaaccggtttacgcagtttcggcttagtgaaacaaaagaaatcaccaatccgtatgccatgcgtttatacgaatccctgtgtcagtatcgtaagccggatggctcaggcatcgtctctctgaaaatcgactggatcatagagcgttaccagctgcctcaaagttaccagcgtatgcctgacttccgccgccgcttcctgcaggattttcgcctgttggggcaaaccagcgtggaccgcttgctccaactctctcagggccagtcggtgaagggcaatcagctgttgcccgtctcactggtgaaaagaaaaaccaccctggcgcccaatacgcaaaccgcctctccccgcgcgttggccgattcattaatgcagctggcacgacaggtttcccgactggaaagcgggcaggattttgccgatttcggaaccaccatcaaacaggattttcgcctgctggggcaaaccagcgtggaccgcttgctgcaactctctcagggccaggcggtgaagggcaatcagctgttgcccgtctcactggtgaaaagaaaaaccaccctggcgcccaatacgcaaaccgcctctccccgcgcgttggccgattcattaatgcagctggcacgacaggtttcccgactggaaagcgggcaggattttgccgatttcggaaccaccatcaaacaggattttcgcctgctggggcaaaccagcgtggaccgcttgctgcaactctctcagggccaggcggtgaagggcaatcagctgttgcccgtctcactggtgaaaagaaaaaccaccctggcgcccaatacgcaaaccgcctctccccgcgcgttggccgattcattaatgcagctggcacgacaggtttcccgactggaaagcgggcagtttcccatgaaatataagcctttcaagggcttcaaggaatccaaggtttgcacttccaggcatttccaggcttattctgctggaactctaattcctccatcctttcctaactgccacatctgggattttgccgatttcggaaccaccatcaaacaggattttcgcctgctggggcaaaccagcgtggaccgcttgctgcaactctctcagggccaggcggtgaagggcaatcagctgttgcccgtctcactggtgaaaagaaaaaccaccctggcgcccaatacgcaaaccgcctctccccgcgcgttggccgattcattaatgcagctggcacgacaggtttcccgactggaaagcgggcaaaaatttcgtaacggacaccagtgcgcccgaaggggggattggttaattgcgcgcgagggagaaaaggctcgcggaaaggccaatacttggctggtacgtggcggggatgtgaagtttactcttgaagtgctccggggtgaaagtgttaagaagacctttcgggtaaggccaggtaatgaacgtgaccaggagctgcttactgaggacgcactggatgatctcatcccttcttttctactgactggtcatcagacaccggcgttcggtcgaagagtatctggtgtcatagaaattgccgatgggagtcgccgtcgtaaagctgctgcacttaccgaaagtgattatcgtgttctggttggcgagctggatgatgagcagatggctgcattatccagattgggtaacgattatcgcccaacaagtgcttatgaacgtggtcagcgttatgcaagccgattgcagaatgaatttgctggaaatatttctgcgctggctgatgcggaaaatatttcacgtaagattattacccgctgtatcaacaccgccaaattgcctaaatcagttgttgctcttttttctcaccccggtgaactatctgcccggtcagggatttgccggatttcggaacccaccatcaaacaggattttcgcctgctggggcaaaccagcgtggaccgcttgctgcaactctctcagggccaggcggtgaagggcaatcagctgttgcccgtctcactggtgaaaagaaaaaccaccctggcgcccaatacgcaaaccgcctctccccgcgcgttggccgattcattaatgcagctggcacgacaggtttcccgactggaaagcgggcaggattttgccgatttcggaaccaccatcaaacaggattttcgcctgctggggcaaaccagcgtggaccgcttgctgcaactctctcagggccaggcggtgaagggcaatcagctgttgcccgtctcactgtcgctcctacgcgacgtcccgaccacccccccgtcctctggtcaccgccactcacaccatgggctccagttccgacaaccagaaattgacatgggcccccagctccccccgactcgtcacccgcttcgagcacgcctggggaagcaaagaaaaaaccacatgttgttcgtcacacggatcaagttggtaaagctgggcaggaagccacctgccacagcaacggtcactgctggggtcatactcttcgtgtgcattacatttccagatctgatttctgcgtga

SEQ ID NO: 138797 - DNA, 2618 bp, Homo sapiens
cccgggatatttcttctcggtgaggtagagcttctgcagacagtttcttgcttcctcggccaggtcgcctcgttaagctcgcgttacacggcctgcggcgagcgctagtgataataagtgactgaggtatgtgctcctcttatctcctttagtagtgttgctcttatattaaacaactttgcgggtttttgaaagacttgcggattttgttggtgctttccagtaaatggcaagatttaataaaaaaaccgcaaagcaaatgattaaaggatgttcagaatgaaactcatggaaaccctttacccagtgcataaacgctggtcatgaaatgacgaaggctatcgccattgcacagtttaatgatgacagcccggaagcgaggaaaataacccggcgctggagaataggtgaagcagcggatttagttggggtttcttctcaggctatcagagatgccgagaaagcagggcgactaccgcacccggatatggaaatttcaggacggggttaagcacggtgttggttataccattgaacaaatttatcttagcgcgtgatgtgtttggtacgcgattgccacgtgctgaagactgtatttccaccggtgatcggggttgctgcccataaaggtggcgtttacaaaacctcagtttctgttcatcttgctcaggatctggctctgaaggggctacgtgttttgctcgtggaaggtaacgacccccagggaacagcctcaatgtatcacggatgggtgccagatcttcatattcatgcagaagacactctcctgcctttctatcttggggaaaaggacgatgtcacttatgcaataaagcccacttgctggcctggggcttgacattattccttcctgtctggctctgcaccgtattgaaactgagttaatgggcaaatttgatgaaggtaaactgcccaccgatccacacctgatgctccgactggccattgaaactgttgctcatgactatgatgtcatagttattgacagcgcgcctaacctgggtatcggcacgattaatgtcgtatgtgctgctgatgtgctgattgttcccacgcctgctgagttgtttgactacacctccgcactgcagtttttcgatatgcttcgtgatctgctcaaaaccgttgatcttaaagggttcgagcctgatgtacgtattttgcttaccaaatacagcaatagtaatggctctcagtccccgtggatggaggagcaaattcgggatgcctggggaagcatggttctaaaaaatgttgtacgtgaaacggatgaagttggtaaaggtcagatccggatgagaactgtttttgaacaggccattgatcaacgctcttcaactgatacttcgttatcgacaccagctgccccgatggtggattcgttaattgcgcgcgtaggagtaatggctcgcggtaatgccattactttgcctgtatgtggtcgggatgtgaagtttactcttgaagtgctccggggtgatagtgttgagaagacctctcgggtatggtcaggtaatgaacgtgaccaggagctgcttactgaggacgcactggatgatctcatcccttcttttctactgactggtcaacagacaccggcgttcggtcgaagagtatctggtgtcatagaaattgccgatgggagtcgccgtcgtaaagctgctgcacttaccgaaagtgattatcgtgttctggttggcgagctggatgatgagcagatggctgcattatccagattgggtaacgattatcgcccaacaagtgcttatgaacgtggtcagcgttatgcaagccgattgcagaatgaatttgctggaaatatttctgcgctggctgatgcggaaaatatttcacgtaagattattacccgctgtatcaacaccgccaaattgcctaaatcagttgttgctcttttttctcaccccggtgaactatctgcccggtcaggtgatgcacttcaaaaagcctttacagataaagaggaattacttaagcagcaggcatctaaccttcatgagcagaaaaaagctggggtgatatttgaagctgaagaagttatcactcttttaacttctgtgcttaaaacgtcatctgcatcaagaactagtttaagctcacgacatcagtttgctcctggagcgacagtattgtataagggcgataaaatggcccttaacctggacaggtctcgtgttccagcatacattatacgaagttatattcgatgcggccgcaaggggttcgcgtcagcgggtgttggcgggtgtcggggctggcttaactatgcggcatcagagcagattgtactgagagtgcaccatatgcggtgtgaaataccgcacagatgcgtaaggagaaaataccgcatcaggcgccattcgccattcaggctgcgcaactgttgggaagggcgatcggtgcgggcctcttcgctattacgccagctggcgaaagggggatgtgctgcaaggcgattaagttgggtgaacattaaacaagaagtcagtcagtgtgcaactcagaagataagagaatcctcatcagaaataaacaatgctggcatcctgattcccaacttgcagacttcagaactgtga

SEQ ID NO: 138798 - DNA, 2626 bp, Homo sapiens
atgactccacagaagagaggttacctttgcaaagctggtgctaggaacctagatgtcttacttgagggctgtgaaatctttctcctgattcccatggggatgagaagtgaatcaggagtgtctgatgcagatactgtgtctgctccccggaaaaagcactcactggagcaggggatttttagagcccaagtcgaggctagtaaacctagttccgttcccgcttgtatagtggttggaaatgtaagcggttaccaatttcccccaggaaccagctatggccctgattccgaatccgagctcggttaccgggagaagttcatgtcctttgtagggaccatgaatgaagctggaaaccctccattctcagcaaactattcaaaggccaaaaaaccaaaaccccgcatgttctcactcatagagagaatgtctccttcccccagggtggggtcacaatcagttcaatcttcatgcttcagagacatcccctttgaacaagatcagatgtttccccacccctccctggtgctccgctcaaaggagcagcagccccttctcactcagagtattggcgtcaactcagccagaaaggcaatggcaaaaagaaggagacaccggcgtcgtcgaagagtatctggtgtcctaccaattgccgatgggagtcccgtcgtaaagtgtgcacttaccgaaagtattatcgtgttctggtgcgagctggatatagcagagctgcatatccagattgggacgattatcgcccacaaggcttatgaacgtggcagcgtaacgacccccagggaacagcctcaatgtatcacggatgggtacagattcttcatattcatgcagaagacactctcctgctttctatctggggaaaaggacgatgtcacttatgcaataaagcccacttgctggccggggcttgacattattccttcctgtctggctctgcaccgtattgaaactgagttaatgggcaaatttgatgaaggtaaactgcccaccgatccacacctgatgctccgactggccattgaaactgttgctcatgactatgatgtcatagttattgacagcgcgcctaacctgggtatcggcacgattaatgtcgtatgtgctgctgatgtgctgattgttcccacgcctgctgagttgtttgactacacctccgcactgcagtttttcgatatgcttcgtgatctgctcaagaacgttgatcttaaagggttcgagcctgatgtacgtattttgcttaccaaatacagcaatagtaatggctctcagtccccgtggatggaggagcaaattcgggatgcctgggcaagcatggtctaaaaaaaataatgtgcgtaacgccaatgaagttggtaaagacaccttaaaaggcttttacagtttaaaagagcggcctttggggaatcactttttaggacccaacaacagaccttttggcaaaataatgaagcacaagacaccggcgttcggtcgaagagtatctggtgtcatagaaattgccgatgggagtcgccgtcgtaaagctgctgcacttaccgaaagtgattatcgtgttctggttggcgagctggatgatgagcagatggctgcattatccagattgggtaacgattatcgcccaacaagtgcttatgaacgtggtcagcgttatgcaagccgattgcagaatgaatttgctggaaatatttctgcgctggctgatgcggaaaatatttcacgtaagattattacccgctgtatcaacaccgccaaattgcctaaatcagttgttgctcttttttctcaccccggtgaactatctgcccggtcaggtgatgcacttcaaaaagcctttacagataaagaggaattacttaagcagcaggcatctaaccttcatgagcagaaaaaagctgggggattttgccgatttcggaaccaccatcaaacaggattttcgcctgctggggcaaaccagcgtggaccgcttgctgcaactctctcagggccaggcggtgaagggcaatcagctgttgcccgtctcactggtgaaaagaaaaaccaccctggcgcccaatacgcaaaccgcctctccccgcgcgttggccgattcattaatgcagctggcacgacaggaaacagctatgaccatgattacgaattcgagctcggtaccctcccgcaagaggcccggcagtaccggcataaccaagcctatgcctacagcatccagggtgacggtgccgaggatgacgatgagcgcattgttagatttcatacacgggtcaccgtcgacagcgacacacttgcatcggatgcagcccggttaacgtgccggcacggcctgggtaaccaggtattttgtccacataaccgtgcgcaaaatgttgtggataagcaggacacagcagcaatccacagcaggcatacaaccgcacaccgaggttactccggtctacagtgtctttcagatgcagggatggtgctcaggataggccaagcctgtgtgaaaaccctgcagacagccattctcagggcagttgggctgccctgcactgccaaggtggtcttcccggggccttatgtccacaactgtatgggctccagggctcgcctagtttcatctggttga

SEQ ID NO: 138799 - DNA, 993 bp, Homo sapiens
atgtggcaggcaatcagtcgtcttttgagcgagcagttaggtgaaggcgaaatcgaactgcgtaatgaactgcctggcggagaagtccatgccgcatggcatttgcgctatgcaggacatgattttttcgtcaaatgtgatgaaagggaactgcttcccggttttaccgccgaagccgaccaactggagttactgtcgcgtagtaaaaccgtcaccgtgcctaagcgcatttattcttggtcagcaaattgcgcgtttacatcaatggagcgaccatgcagtcttgaagatagttaccaccggcgttttataaggggcttatgtgggggccccatcgatatggaaatgtccggaacgaataactttgccgggttatcaccagtgatgaacttgcttgatgtccatttcctgttccgcgataccgctcacgcgcataaaacgctcgacggcaaagtcggtgatgatctgaaagcctcacttgaaggtaaaggactgaaagtactggcctactgggaaaacggctggcgcgatgtcaccaactcgcgcgcaccggttaaaacccccgccgacctgaaagggctgaaaatccgcaccaacaatagcccgatgaatatcgccgcattcaaagtctttggcgctaacccgatcccgatgccgtttgccgaagtctataccgggctggaaacccgcactatcgacgctcaggaacacccgatcaacgtcgtctggtcagcaaaatttttcgaagtgcagaagttcctttctcggccgcacttcgcctattccgcctgtctggtggtgatcaaaatagggctgctgcaagaattatgccgccaagtgatcaaacaccgccgttacatccggcgggaagacgctctgatgcccttccccccctttcactgccgggttggcccaccacaagaaatgacgcggcgtggcgttcccgttatagacgcggctggcgatttccagcgcccccggtcagggcgcagg

SEQ ID NO: 138800 - DNA, 1209 bp, Homo sapiens
atgtggcaggcaatcagtcgtcttttgagcgagcagttaggtgaaggcgaaatcgaactgcgtaatgaactgcctggcggagaagtccatgccgcatggcatttgcgctatgcaggacatgattttttcgtcaaatgtgatgaaagggaactgcttcccggttttaccgccgaagccgaccaactggagttactgtcgcgtagtaaactgcagatgggcgaccagattgaaattatcacccagaaacagccgaaccccagccgtgactggttaaacccaaacctcggttacgtcacaaccagccgtgggcgttcgaaaattcacgcctggttccgtaaacaggaccgtgacaaaaacattctggctgggcggcaaatccttgacgacgagctggaacatctggggatcagcctgaaagaagcagaaaaacatctgctgccgcgttacaacttcaatgatgtcgacgagttgctggcggcgattggtggcggggatatccgtctcaatcagatggtgaacttcctgcaatcgcaatttaataagccgagtgccgaagagcaggacgccgccgcgctgaagcaacttcagcaaaaaagctacacgccgcaaaaccgcagtaaagataacggtcgcgtggtagtcgaagtatggcgaaaacgggtgttttcttcgtcgcgcagaatatgcgatccttcccgcctgatttccgccttgcgcgtgctggcactgctgacacttctctttgctgtcgccttctgggcgggggcgcacgtagcgtggctgatgctggtgatgattggctttaacctctttttctcaccactggtaccgttgaccgatgcactggcgaatacgtggcaaaagcagttcccgcttgattacggcaaagtgcgactgtggggctcggtggcgtttgtcattggctcggcgctgacgggcaaactggtcactatgtttgattatcgggtgatcctcgcgctgttgacgttgggcgtggcatccatgctgctcggctttctcatccgtccgacgattcagccacaaggggcaagtcgccagcaggagagcaccggttggtctgcgtggttggcgctggttcgccagaactggcgctttctggcctgcgtttgtttattgcagggggcacatgcggcctattacggttttagcgccatttactggcaggcagctggctactcggcctcggcg

SEQ ID NO: 138801 - DNA, 1023 bp, Homo sapiens
atgcatgcctgcaggtccgagctgttaggtgaaggcgaaatcgaactgcgtaatgaactgcctggcggagaagtccatgccgcatggcatttgcgctatgcaggacatgattttttcgtcaaatgtgatgaaagggaactgcttcccggttttaccgccgaagccgaccaactggagttactgtcgcgtagtaaaaccgtcaaccgtgccctaaaggtttgggcaagttggcgctgaccgtgaactaacagttttcctggtgaatggattatctcccacctcgtccgctggatgcgcatagcgcatttattcttggtcagcaaattgcgcgtttacatcaatggagcgaccaaccacaatttggccttgatttcgataacgcgctctccacaactccacagcccaacacctggcaacgtcgctggtcaacgttttttgctgaacaacggattggctggcagttggaactggctgcagaaaaagggatcgctttcggcaatatcgacgccatcgtcgagcatattcagcagcgtctggcctcacatcaaccgcagccttctctgttgcacggcgatttatggtccggcaactgtgcactgggtccggatggcccgtacattttcgacccggcctgctactggggtgaccgagagtgcgacctggcgatgttaccgctgcatactgaacagccgccacaaatctatgacggctatcagtcagtatccccgctacctgccgatttccttgaacgtcaaccggtttaccaactctacacgctgttaaatcgtgcaaggttatttggcggtcagcatttggttattgctcagcagtcattggatagattattagcagcatgatatgggttgaggataatggccgctccgtgcggccttttgattaaataaacccaagcagagaaaagaacacataacctgcagcaatacaaataaccggcaggatatacagtgagaaaaactgcaggaaaatagtatggtgcggaacaacaatacgggtctcatgtgg

SEQ ID NO: 138802 - DNA, 2097 bp, Homo sapiens
atgtttggtggtgatctcacccgtcgttatgggcaaaaggtgcataagctgacgctgcacggcggttttagctgccctaaccgtgacggtaccatcgggcgtggtggctgcacattctgtaatgttgcctcgtttgccgatgaagcgcagcagcatcgttccattgccgagcaactggcgcaccaggcgaatttagttaaccgcgctaaacgctatctggcctactttcaggcgtataccagcacctttgcggaagttcaggtgctgcgttctatgtatcagcaggcggtgagccaggccaatattgtcggtttgtgtgtgggtacccgcccggactgcgtgccggatgcggtgctggatctgctttgcgaatataaggaccagggttacgaagtgtggctggagctggggctacaaaccgcccacgacaaaacactgcatcgcatcaaccgcggccatgattttgcctacagtgatattactgaattcagcagtaagcgccgtcagaccagaaaagagattttcttgtcccgcatggagcagattctgccatggcaaaacatggtggaagtcatcgagccgttttaccccaaggctggtaatggccggcgaccttatccgctggaaaccatgctacgcattcactgcatgcagcattggtacaacctgagcgatggcgcgatggaagatgctctgtacgaaatcgcctccatgcgtctgtttgcccggttatccctggatagcgccttgccggaccgcaccaccatcatgaatttccgccacctgctggagcagcatcaactggcccgccaattgttcaagaccatcaatcgctggctggccgaagcaggcgtcatgatgactcaaggcaccttggtcgatgccaccatcattgaggcacccagctcgaccaagaacaaagagcagcaacgcgatccggagatgcatcagaccaagaaaggcaatcagtggcactttggcatgaaggcccacattggtgtcgatgccaagagtggcctgacccacagcctggtcaccaccgcggccaacgagcatgacctcaatcagctgggtaatctgctgcatggagaggagcaatttgtctcagccgatgccggctaccaaggggcgccacagcgcgaggagctgtccgaggtggatgtggactggctgatcgccgagcgccccggcaaggtaagaaccttgaaacagcatccacgcaagaacaaaacggccatcaacatcgaatacatgaaagccagcatccgggccagggtggagcacccatttcgcatcatcaagcgacagttcggcttcgtgaaagccagatacaaggggttgctgaaaaacgataaccaactggcgatgttattcacgctggccaacctgtttcgggcggaccaaatgatacgtcaccgggagccccagctgcagaattctcaacccaccgtcaatggattaccggcccgaactatggtcggaactgctgccagccccacgcagcccaaacgccaccagcaggctggtgtgcgcattctgctcaataatgccattgaacatgtggtcgatggtgaaaaagtagaactgacgctgcaaagtggggaaacgcttcaggctgatgtggtgatttacggtattggtatcagcgccaacgagcaactggctcgcgaggccaaccttgatactgccaatggcattgtcattgatgaggcttgccgcacctgcgatcccgcgatctttgccggtggcgatgtggcaatcactcgtcttgataatggtgcactacaccgctgcgaaagctgggaaaacgccaataaccaggcgcaaattgccgctgccgcaatgttagggctaccgctaccgctactgccgccgccgtggttctggagcgatcagtacagtgataacttacagtttattggcgatatgcgtggcgatgactggctttgtcgtggcaacccggaaactcagaaggcgatttggtttaatctgcaaaacggcgtgcttatcggtgcggtcacgctgaatcaggggcgtgagattcgcccaattcgcaaatggatccagagcggcaaacgtttgatgcgaaactgctga

SEQ ID NO: 138803 - DNA, 1730 bp, Homo sapiens
atggtacgggaagatctatacacttattattcttgtaatacttcgcgagagcaacaacaacttgaaaatccgatggaaagccccctgtgctctaaagagattaatcagggcggcgtttttatgctggccgggaaagccagtgatacgttgcttgctggtggcaccatgaataatctcggtggtgaagactctgacactattgttgagaatggatccatttatcgtctggggacggatggccttcagctctacagttccggtaagacgcaaaacctgtccgtgaatgtgggtggtcgggctgaagtgcatgccggtacgctggaaaacgcggtaatacaaggtgggacagtgatcctgttgtcacccaccagcgcggacgaaaattttgtcgtagaggaagatcgcgcaccggttgaactgaccgggagtgttgcattactggacggcgcttcaatgattattggttatggcgcagagctgcaacaatcaacgattactgtacagcagggcgcgccacccgtgaagttgcgctttgctttatacgggagaccagggtttacgaagtgtggctggatgctggggtacaaacccgcccacgacaaaaccttgcttcgcatcacccgcggccatgattttgcttgttatcagcgtacaacccagctggcacgtcagcgcgggctgaaggtgtgttcccacttaattgtcggcctgcctggcgaagggcaggctgaatgtttgcaaacgctggagcgagtggttgaaaccggcgtggacggcataaagctgcatccgctgcatattgtgaaaggcagcattatggcgaaagcctgggaagcggggcgtttgaacggtattgaactggaggattacacgctcactgccggagaaatgattcgccatacgccaccggaagtgatctaccaccgcatttccgccagcgcccgtcgcccgacgctgcttgctccgctgtggtgcgaaaatcgatggacgggaatggtcgagctggatcgctatctgaatgaacatggcgtacagggatcggcgctgggacgtccgtggctacctccaacggagaattccctaatgaagcaaattcgtctgctggcgcagtattatgttgacctgatgatgaagttaggtctggtgcgcttctcaatgttgctggcgctggccctcgtcgttcttgccattgtggtacaaatggcggtaaccatggtgctgcatggtcaggtcgaaagcattgatgttattcgttctatcttctttggtttgctgattacgccgtgggcggtctactttctatcggtggtcgtcgagcaactggaggagtcacgacaacgtctgtcacggctggtgcaaaaactggaggagatgcgcgagcgcgatttgagcctcaacgttcagttaaaagataatattgcccagctaaatcaggaaattgccgttcgtgaaaaagcggaagcagaactgcaggaaaccttcggccaactgaaaattgaaatcaaagagcgcgaagagacacaaattcagctcgagcagcaatcctcattcttacgttccttccttgatgcttcacccgacctggttttttatcgtaacgaagataaagagttttccggctgtaaccgcgcgatggagctgctgaccggaaaaagcgaaaaaaaactgcttcaccttgaacctgctgatgttactcacccgagccgacgcaaagtcattgaaccgatgaa

SEQ ID NO: 138804 - DNA, 2286 bp, Homo sapiens
atggcagtgtatgacatcgagggccctgtgtgcgtgctgcgcggccgttgtgcggtcagtactagccacagagagtcgcacctatatgtcgtgctagtgcaataccgtcaccagatgaggaaggagaacattaccgcatctggcacctttgcgccatctcagccagcgacccctgtttcgaatacgggcgatgcgatgacggcccttcttacgactattagcgccatctgggcaattatctccccaacaagtctccactgttccctacgcgtgcccacgaaccagtggcccgtcctctctgtatgcttaaaacttggcgcggaattgtatgcttgcgtctaccgcgccaacgcaatacccattcgtgttcaccacacgccgtcaaaatctggtatagtgtcattgactatgacggtgaccgctttacatcatctgccgcatgagcacgcaaatgcacccataccagatgccagtatcaaagatatcgagctcgagttgatactggcctgccgaattaataaacgagaaattcatccgcctatccgcttcttggcctgcgccactagcgtttccagttcagacactttcttcattgccgcttctgcatcaaacttatcttgcgatatcaggttattaatttcctggtaccggctgtggacttgggctacaaaccgccacgacaaaacactgcatcgcatcaaccgcggccatgattttgcctgttatcagcgtacaacccagctggcacgtcagcgcgggcgtgaagggcaggctgaatgtttgcaaacgctggagcgagtggttgaaaccggcgtggacggcataaagctgcatccgctgcatattgtgaaaggcagcattatggcgaaagcctgggaagcggggcgtttgaacggtattgaactggaggattacacgctcactgccggagaaatgattcgccatacgccaccggaagtgatctaccaccgcatttccgccagcgcccgtcgcccgacgctgcttgctccgctgtggtgcgaaaatcgatggacgggaatggtcgagctggatcgctatctgaatgaacatggctattatgttgacctgatgatgaagttaggtctggtgcgcttctcaatgttgctggcgctggccctcgtcgttcttgccattgtggtacaaatggcggtaaccatggtgctgcatggtcaggtcgaaagcattgatgttattcgttctatcttctttggtttgctgattacgccgtgggcggtctactttctatcggtggtcgtcgagcaactggaggagtcacgacaacgtctgtcacggctggtgcaaaaactggaggagatgcgcgagcgcgatttgagcctcaacgttcagttaaaagataatattgcccagctaaatcagccagataccggatcgcaacaaggctattttcttgccggacgttcactaaaagcgccggttattgccgcttcgttaatgctaaccaacctttccacggaacaactggtcggcctttccgggcaggcctacaaaagcggcatgtcggtgatgggctgggaagtgacttcagcggtgacgctgatcttcctcgcgctaatctttttaccgcgctatctgaagcgcggcattgccaccatccccgattttctggaggaacgttatgataaaacgacgcgtattatcatcgacttctgcttcctaattgccaccggcgtctgctttctgccgattgttctctactccggcgcgttggcgctcaacagcctgtttcacgtcggggaatcgctacagatttctcacggtgcggctatctggctactggtaattttgcttggtctggcgggaattttgtatgcggtgatcggcggactgcgcgcaatggcagtggcggactccatcaacggtattgggctggttatcggcgggttgatggtgcggtgttttccccgggggaagaaccccaataggggtgtatatcgcgttactagcgccaaccagtttccaggaggcaaagccttcatcggcttaggaccaccctcttgcgtcttaaaccggaggtttatcccccttttcggggccccttcttttggcggtgaaattgcccactggttttatcgcctttcgaatcaatctgccgattattgggacgcagaaatgtccgactctaacagtcgtctacgccctgagacgagcgtagcaaagaggtgtctgcgcaccgaagcgttgagtacatcagggctgagaggccagggtccaaggcggtctcaaaggcaagacacaatggtgtaa

SEQ ID NO: 138805 - DNA, 4401 bp, Homo sapiens; identical to SEQ ID NO: 132327

SEQ ID NO: 138806 - DNA, 2203 bp, Homo sapiens
atgtttggtggtgatctcacccgtcgttatgggcaaaaggtgcataagctgacgctgcacggcggttttagctgccctaaccgtgacggtacttttgggcgtggtggctgcacattctgtaatgttgcctcgtttgccgatgaagcgcagcagcatcgttccattgccgagcaactggcgcaccaggcgaatttagttaaccgcgctaaacgctatctggcctactttcaggcgtataccagcacctttgcggaagttcaggtgctgcgttctatgtatcagcaggcggtgagccaggccaatattgtcggtttgtgtgtgggtacccgcccggactgcgtgccggatgcggtgctggatctgctttgcgaatataaggaccagggttacgaagtgtggctggagctggggctacaaaccgcccacgacaaaacactgcatcgcatcaaccgcggccatgattttgcctgttatcagcgtacaacccagctggcacgtcagcgcgggctgaaggtgtgttcccacttaattgtcggcctgcctggcgaagggcaggctgaatgtttgcaaacgctggagcgagtggttgaaaccggcgtggacggcataaagctgcatccgctgcatattgtgaaaggcagcattatggcgaaagcctgggaagcggggcgtttgaacggtattgaactggaggattacacgctcactgccggagaaatgatatcgccatacgccaccggaagtgatctaccaccgcatttccgccagcgcccgtcgcccgacgctgcttgctccgctgtggaacgcgaagctgaaaaatacgcgaatcccatccctagtcgggaatttatcctcgaacatttaactaaacgtgaaaaaccggccagccgtgatgagctggcggtagaactgcacattgaaggcgaagagcagcttgaaggcctgcgtcgccgcctgcgcgcgatggagcgcgatggtcaactggtcttcactcgtcgtacagtgctatgcgctgccggaacgcctcgacctgtgcggaagattcacaacttagcgaccgctcgccaggcttcggttgccagtggtccgtaccgcgttacgtcttggaaattggggcaaaatattgtctattgccgtgtgaaagattactggccagcaaccttaacggtaaaccgtggacgctggaatttcgacaccattcgttccgattattacctcgatgataatgtcgcctttgaagcgtttaaagcaggtgcctttgatttgcgtatggaaaacgacgccaaaaaactgggccacgcgttataccgcgatcgccgggtccgggaagctatcactctcgcctttgactttgaatggatgaacaaggcgttgttttacaatgcctggagtcgcacgaacagttattttcagaataccgaatacgcggccagaaattcccccccacccccggaacttggtgcttctgcccccaataaaaaaagttctcccgtcagaagtcttccccacaaatctaccagccgccggtatccaaaggcgatggttacgatcgtgacaacctgttaaaagccgacaaacttctcaacgaagcgggctgggtgctgaagggtcagcaacgcgttaatgccacaacgggtcagccactcagctttgaattattgcttcccgcaagcagcaatagtcagtgggtattgccgttccagcacagcctgcaacggctgggtatcaacatggacattcgcaaggtggataactcgcaaatcactaaccgcatgcgcagtcgcgactatgacatgatgccgcgcgtatggcgggcgatgccgtggcccagttccgatttacagatttcctggtcatcggaatatatcaattccacttataatgcccccggcgtgcaaagcccggttatcgactcgctgatcaaccaaattattgccgcgcagggaaataaagaaaaattcctgccgttggggcgagcactggatcgcgtattaacgtggaattattacatgctgccaatgtggtacatggcggaagaccgtctcgcctggtgggataaattctcccagccggccgtgcgccccatctatagcctcggtatcgatacctggtggtatgacgtcaataaaacggccaaactgccgtccgccagcaaacagggagagtagatgggcgcatacctgattcgccgtctgttgctggt

SEQ ID NO: 138807 - DNA, 450 bp, Homo sapiens
gcattatgggtacaccgatggccattaatctggcgcgtgccggtcatcaattacatgtcacgaccattggaccggttgctgatgaattactgtcactgggtgccgtcagtgttgaaactgctcgccaggtaacggaagcatcggacatcatttttattatggtgccggacacacctcaggttgaagaagttctgttcggtgaaaatggttgtaccaaagcctcgctgaagggcaaaaccattgttgatatgagctccatttccccgattgaaactaagcgtttcgctcgtcagcgccagtctccggcggtgaaatcggtgcgcgtgaagggacgttgtcgattatggttggcggtcatgaagcggtatttgaacgtgttaaaccgctgtttgaactgctcggtaaaaatatcaccctcgtgggcggtaacggcgatggtcaacctgcaaa

SEQ ID NO: 138808 - DNA, 698 bp, Homo sapiens
tccattgccagacgcagctaggtacctacgccgtcagtgccagaaaccagcacgggttcacgatatttttgcggcaatgcacacagcgcaccgaagccgcccagaccgcccatcactaccggacgacgcgttttcttcactacgcctttgattcttccaaccagagcattacccgcgtcaatatcaacaccggcatctttgtagctaagagagatatcagcaccaagcgctttcgcgaactcgcttccgaagtgggtagcctgctgacttacgaagcgaccgccgacctcgaaacggaaaaagtaactatcgaaggctggaacggcccggtagaaatcgaccagatcaaaggtaagaaaattaccgttgtgccaattctgcgtgcgggtcttggtatgatggacggtgtgctggaaaacgttccgagcgcgcgcatcagcgttgtcggtatgtaccgtaatgaagacacgctggagccggtaccgtacttccagaaactggtttctaacatcgatgagcgtatggcgctgatcgttgacccaatgctggcaaccggtggttccgttatcgcgaccatcgacctgctgaaaaaagcgggctgcagcagcatcaaagttctggtgctggtagctgcgccagaaggtatcgctgcgctggaaaaagcgcacccggacgtcgaactgtataccgcatcgatt

SEQ ID NO: 138809 - DNA, 1440 bp, Homo sapiens
atggagaaaaaaatcactggatataccaccgttgatatatcccaatggcatcgtaaagaacattttgaggcattgcagtcagttgctcaatgtacctataaccagaccgttcagctggatattacggtcttgttaaagaccgctaagaaaaataagcacaagttctatccggcctttattcacattcttgcccgactgatgaatgctcatccggagttccgcatggcaatgaaagacaattttgtcaccggcatcgccgaggcccggaataatgtatccgtgctcgttcagtccctgatcaatcgatgcggtatacagttcgacgtccgggtgcgctttttccagcgcagcgataccttctggcgcagctaccagcaccagaactttgatgctgctgcagcccgcttttttcagcaggtcgatggtcgcgataacggaaccaccggttgccagcattgggtcaacgatcagcgccatacgctcatcgatgttagaaaccagtttctggaaaacgttttccagcacaccgtccatcataccaagacccgcacgcagaagttgcacaacggtaatggtcttacctttgatctggtcgatttctaccgggccgatccagccttcgatagttacgttttccgtttcgaggtcggcggtcgcttccccgctatccagcgcaacgacgctggcgcgtttgcccggtttaagcgatcccagaacaccatcaacacccagcattcgcgccggatgcagcgacgccatatggatggcttccgcaggcgttacgcccgtcaactcgaccatattgcgcactgccgcatcaacagacagcgtactgcccgccagcccaccagacgcgccaccgtatactcctatgcttgggtccctgccgttgatttctttatgggtgatcttcatctgatcgccatgctgcacaggtgcaaaccaacagatctgcagaatgaatacatctggggaaccctgactggtgtgagagtatactggacgagcattttgactgattcggaaaatatttcacgtaagattattacccgctgtatcaacaccgccaaattgcctaaatcatttgttgctcttttttctcaccccggtgaactatctgcccggtcaggtgatgcacttcaaaaagcctttacagataaagaggaattacttaagcagcaggcatctaaccttcatgagcagaaaaaagctggggtgatatttgaagctgaagaagttatcactcttttaacttctgtgcttaaaacgtcatctgcatcaagaactagtttaagctcacgacatcagtttgctcctggagcgacagtattgtataagggcgataaaatggtgcttaacctgtacaggtctcgtgttccaactgagtgtatagagaaaattgaagccattcttaaagaacttgaaaagccagcaccctga

SEQ ID NO: 138810 - DNA, 2529 bp, Homo sapiens
ctactggttttcatcaatcaggaagaagctgacttccacacccagcgaggcggcccagttttccagcaggctacatttacgttgtagcaattggcgctcttcgctatcgagccaggattgatgacagacccagatatccaggtcagaggaacaactttgccctacggacgaggtgctgcccatggtgtatacaccagtaattggaagctcacctttcggcggatcctgtactgacattccacgatacagttcaagctcgttcaggtagtggcgttgagtttcatcaggcgtgtaaaggcaaatgcctttgggaacgttaccatcaaggtaacccggcattagcggatggtgatagtgcaacaatgtcggcagtagactgtagacctgttggaatgcaggccccatagcagcaagcgcgcgatccacacgcaattgatttatggcatccagtctctgtttcagagtctcaatatagaggtacaagacgtatcgcctggccaggtgtcgatgacccgagtaaatcggacagcgtttaatgttagaatggagcaaccattgctggcggcctatcccaccgtttggcacggcgataaggtaggaccgcggtattacgggcacggagactgcagcaaaatcggtccccggaccagcatcacatttaccgcccggcgggccaatccagtacagcgtattgccgcgcggatcttgctgcgggatcacctgatctgccggatgtcgtgtaccgcagcgcgtcacgcgaatacctttgatttgatccaagggtacatccggaacgttaatattaagaatacgcccggtgcgcagcggctcgccgaaagtagggcatttcgtcattcgatcccacgggttatcgatagattttccttcgcctaatagctcctgagcgacagtttccagcgagaatgaagagaaattccagaacgcggatttcagcgcctcgataccgtcgataattagccgacctttagcctgggcaaaaaagacgccgtttttaaagccgtgctcgcgccactccagctcgctattatcgcgcccaagacgcagcggaagacggtaacgctcggcatgtttttgcagcattcgcagatcgaactgcaccacgttccaaccgatgatcacatcaggatcgtagttggcaaaccaggcgttgagtttttccagcaactgcgggcggctggcgacgtattccagttcgaaatcaagcgaggaggcgtcgccattctccggccccagcatataaacgatgcgctgcccgcagccttccaggccgatgcagtacagctcaccgtggcgggtggtttcaatatctatagaaacccacttgagcggcggacgatagtcgggatgcggtttcagacgggcattaacgatagtgccattgtgcatatcaccctcgacccacaccggtgaggtgataaaccgctccatcagatagcgttctggcggacgcacatcggcctcgtagacggtaacgccaccttcacgcaggcgcttttcgtaattcatcaattggcgatgggcgcgacagtaaaggccatacaccggctggcggtgaaaatcctttaacgccagcggtgtcaggcgaaagccttgttcaccctgcaaaatatgctgagcgcggggaacctgatcggcgggaataaacgccacggactcttgcggtgcaagcgtaacccgatactttttccatgcttccagcaacgagatttcttcctccgttgcaatttccagatctgcagcatcctgaagcggcgcaatatgctcactggctacctgcatcaggttgttttttgtttcttccgcctcccggatccggaacagtttttctgcttccgtatccttcacccaggctgtgccgttccacttctgaaactccccttccggcgataaccaggtaacattttccggtaacggaccgagttcagaaataaataacgcgtcgccggaagccacgtcataaaccgttttaccccgatgatcttcaacgagatgcacgatgaccctctggaaaccctgcgtaccactattgctgtgaatccctctcattggtaagaaagcgccgatgctccaatcggcaatggagggaccgatactcccacagtcacaggacgcaccctcgtagccccacaccggttgtatccacgagaaggttaaaactttctctctggctgcccttaacattttttccttcatttcaactttggtgaatctgacaagtatgtgtcttggagttgcttttctcgaggagtatctttgtggcattgtctgtatttcctgaatttgaatgttggcctgccttgctagattggggaagttctcctggataatatcctgcagagtgttttccaagttgcttccattatctccatcactttcaggtacaccaattagacgtagatttggtctttttacatagtcccatatttcttggaggctttgttcgtttctttttattcttttttctctaaacttctcttcacacttcatttctttcatttcgtcttccat

SEQ ID NO: 138811 - DNA, 1951 bp, Homo sapiens
atggatttgtcaaccccggagcgaggttctccctacccgaggctgctgccgtgtggagatcccctgggtgaaaccattgtcgccattgaccaggaggcaaaaccttcaactgaggacttagggaataagaaggaaacaaaatacattaaactcaaagtcattagatgggataacagtgacttcaatttcctgtattctaattatgagaggattcgggcacgcacaacaaagaaagaggactctgcgactaatgtcccggtgacgtttgaaaaacacggttcccacgccgtcgtatatgcacggcgcagcgccacggtgctgaccgaccggaacaaggaggccccaagagtgccccaaggcggttatatggtttcttttgtggatatccctgaagcgttgacccagggcgaaactgtcgctgaagcgatggaagcggcaaaagatgctttactgaccgcatttgatttttattttgaagataacgagcttatccctttaccttcgccattaaatagtcacgatcactttattgaagtacctttgagcgtcgcctctaaggtattgctgttaaatgcttttttacagtcagaaatcactcagcaagagttagccaggcgaattggcaaacctaaacaggagattactcgcctatttaacttgcatcatgcgacaaaaatcgacgccgtccagctcgcggcaaaggcgcttggcaaagagttatcgctggagtgccttatggacattctcaatcttaataaacatatttccggacagttcaacgccgaactggaaagtatccgcacgcaggtgatgaccctgggcggcatggtggacaagcagctttctgatgcaatcaccgcgatacataaccaggacagcgatctggcgaagcgcgtcatcgaaggccacaagaacctcaacatgatggaagtggcgatcgatgaagcccgcgttgagccatcatcgccaaacatcagtcagacggcgagcgacactgagactggttatggtgatcataaaaccatcgccgagatggagcgtattggtcgacgtaggtcggaacaaaatctgccgtacagcgctggagaaattatcccaacagcatcagccgtaggtggtaagtgctggagtacgttggaccgtcataccatccagatgctgcacgacgtagtgaaagcgttcgcgcggatggacattgacgaaacggccaagtgccagatctttgttgagtatgtgctgaagcccaaagtgatctggctgctgtgcttcgccaacattttcctctatgtggtacgtattggtatcgaccagtggtcaaccgtatacgcgttccaggaactgaaactctttaaagcggtggcgattcagggctttacgctgtttgaagctggtgcgctggtcggtacgctgctgtggggctggctctctgacctggcgaacggtcgccgtggcctggtggcctgcatcgcgctggcgctgattatcgccacgctcggtgtgtatcaacatgccagtaacgaatatatctatctggcttctctctttgcgttgggtttcctggtctttggcccgcaattgttgattggtgtggctgctgttggctttgtacctaaaaaagcgattggcgctgccgatggtattaaaggcacctttgcttacctgattggtgacagctttgccaagttaggtctgggaatgattgccgatgggacgccggtattcggccttaccggctgggcaggcaccttcgccgcgctggatatcgccgcgattggttgtatctgcctgatggcgatagtggcggtaatggaagaacgcaaaatccgccgggagaaaaaaattcaccagttgacagtggcataaacggaactggtgacttttgccccggaatgacgcccggctttttttaatatatcggggacttccagcgtagtggagggaaactttttgc

SEQ ID NO: 138812 - DNA, 3102 bp, Homo sapiens
tcaacatgatttcgcctccagatacgttgttaaccagtcaggaatgcgtgactccagccacatttgcggatgaagtaatgtaccgccaataaagccaacatgaccgccatgttcagtcagttgatactccacctgcggggggagactttccggtttcgggatcacctgatgatccataaacggatcgtctttggcgtgaataatcagcgtcggtttggcgatccggttcagcatcggcatggcgctacactgacgataatagtcgatagcgtcggcgtagccgtgaattctggcggtgatgagatcgtcaaattcacggatgcgacgtaccgattttaactgcgcgagattaatcggcagcgttccggggtaggctgccagcttgcgcgcggcattgttttgccaacttgcggatacttgcaatctgcactggaacctattctggcagacaagtacttccccgtacttccgctggcggcggcctgtgcgcgtacgccattgtcgaattttaatgttggcgcaattgcgcgcggtgtgagcggaacctggtatttcggtgccaatatggaatttattggtgcgacaatgcagcaaaccgttcatgccgaacaaagcgcgatcagccacgcctggttgagtggtgaaaaagcgcttgcagccatcaccgttaactacacgccttgtggtcactgccgtcagtttatgaatgaactgaacagcggtctggatctgcgtattcatctgccgggccgcgaggcacacgcgctgcgtgactatctgccagatgcctttgggccgaaagatctggagattaaaacgctgctgatggacgaacaggatcacggctatgcgctgacgggtgatgcgctttctcaggcagcgattgcggcggcaaaccgttcgcacatgccttacagtaagtcgccaagcggtgtcgcgctggaatgtaaagacggtcgtattttcagtggcagctacgctgaaaacgccgcattcaacccgactcagatctgtggacaaccctggtcgatgcacagacgtgcacttacatcgaaattcggcgcacacggcgaccggcggacgagtgcgggatttaggcgtaattagaggcagactcattaccagcgttccctcggcgttcacatgcacatcagactgacgacttaagtgatctgcccgcctcggactcccaaagtgctgggaatacaagtcgcaagttaccgcctgacagccgagaactttcagcgtgctggctacgtccatcgcgacatcaccgccgccgataattaatgcgctttgtggaatgctgatatcgccttgcgcctgtcgtgcacgttgcaagaagtcgacggcaatctcaacgtcactatgctcaaacagcggtagcccggaaccgcttgataaccccacggtgaccagtaccgcgcggttttctgctttcagctgctcaagggtgagtgtgttaccgacttcgttgttgcacttaatggtcacgcccattttttcaatacgggcgatctctgcatccagcactgattgcggtaaccggaattgcggaataccgttacgcaaccagccaccggggtgcgcttctttctcataaatcgtgacgtcataaccctggtttgtcagtgtcacactggcctgcaatccggcaggacctgcgccaataatcgcgactttgccgagcgttttagtaccgggctgataaatttccattccggtttgttgttcaaaatcagtaacaaaacgctgtaagcggccgatatcaatgggagcatcaacaccggcacgggtacaaccgctttggcataatttctccgtcgggcacactctgagagagttggttagtggggggcgctgggccatgccaggaacactcagtgtatcactggggaccgttgaccatggaattggcgggtgcgcgtcactcgtaacactttccagagagcttcgatttcgaccgtggatacgagttggattcctgccgtagaggagatcatcgctggctgtggaactggaacatccgtggttgtcagaccctgctaggacactcgggctgctggggatagctcggaccccgaagtgaagccgtaaccgaagcagctgcgtcagcgcacggaagaccgccggacgcggcactacctggcgcaatccttcgcgcagtattcgctccggcagtgggcgtttcactttctgctcgacaatatcacgcccgatatccagcaaattgtgatagcgcacaccagaaggacaggtggtttcacaattacggcaagtgaggcagcgatcgagatgctcctgtttaatcagatagatgcgcccgcgcggcccgtccagttcatcgcccagaagctgataggttgggcaggttgcggtacaaaatccgcagtgaacacaggcgcgcaggatgctgtcggcttccagcgcgcgcgcgttctgccgcatctcttcagttaattgggtttgcatagcctgctcctcaaagttccgcgtacatgcgaccggggttaaacacgccgcaagggtcgagctgctgtttaagctgcattgcgtgccaactcccacgctgtttaaccagtctgaaaccacatcttgcgcgctatgcgcagttaaatccacatgcagcggcgtgatggagacatagccctcatctaccgcagcaaaatcggtccccggaccagcatcacatttaccgcccggcgggccaatccagtacagcgtattgccgcgcggatcttgctgcgggatcacctgatctgccggatgtcgtgtaccgcagcgcgtcacgcgaatacctttgatttgatccaagggtaaatccggaacgttaatattaagaatacgcccggtgcgcagcggctctttacacagtgcgcgcaaaattccaccacccttgctaactctcttttcggactcagcccgcctgcggggggcgcagcgatgcgatgagaggagccgtacaactagatagagacgccgacggagtaacagctggattcttctgacgtggtagaggacgcaccacgcagcaaaggaaggaggaagtgtactcccccgctgatgaccaggcgccttttctaccaccacacctgtcttcat

SEQ ID NO: 138813 - DNA, 872 bp, Homo sapiens
cgatagcggaatattccatcgcgttccgaaagtgggtttcgctttcggaaatgtgtttgcgttccgcacgaaaggcatacatcaccatggtcatgatgttggcgggcagcaggatcagcaaaaacggtagccacggcatatggctcatcaggtacgtacgcggcgtagcaagcagggaaggatccgcggccatcatcagcgacaccatcatcaccggggtaaggaagatcaaaaaagcttcattcgtggcagacgcacggcgcttcacatcaacagcacaataatgaaaggtaaaaggccacggcagatacagcatcgaaagccagcttacgtcagtgtgatggctcaggttgaagaagttctgttcggtgaaaatggttgtaccaaagcctcgctgaagggcaaaaccattgttgatatgagctccatttccccgattgaaactaagcgtttcgctcgtcaggtgaatgaactgggcggcgattatctcgatgcgccagtctccggcggtgaaatcggtgcgcgtgaagggacgttgtcgattatggttggcggtgatgaagcggtatttgaacgtgttaaaccgctgtttgaactgctcggtaaaaatatcaccctcgtgggcggtaacggcgatggtcaaacctgcaaagtggcaaatcagattatcgtggcgctcaatattgaagcggtttctgaagcccctgctatttgcttcaaaagccggtgcggacccggtacgttgtgcgccaggcgctgatgggcggcttttgcttccgtgccgcgaaccttttccgtggcttgcggacctcacggtaccagcgcgggtgatgtttcttcgcccaggcgctggtaacccatccttccaccat

SEQ ID NO: 138814 - DNA, 1233 bp, Homo sapiens
atggttaaaaccggcgacaacctgttgtgtgtgcgcgtgatgcagtgggcggactctacctacgtggaagaccaggatatgtggtggtcagcggggatcttccgcgatgtttatctggtcggaaaacacctaacgcatattaacgatttcactgtgcgtaccgactttgacgaagcctattgcgatgccacgctttcctgcgaagtggtgctggaaaatctcgccgcctcccctgtcgtcacgacgctggaatataccctgtttgatggcgaacgcgtggtgcacagcagcgccattgatcatttggcaattgaaaaactgaccagcgccagctttgcttttactgtcgaacagccgcagcaatggtcagcagaatccccttatctttaccatctggtcatgacgctgaaagacgccaacggcaacgttctggaagtggtgccacaacgcgttggcttccgtgatatcaaagtgcgcgacggtctgttctggatcaataaccgttatgtgatgctgcacggcgtcaaccgtcacgacaacgatcatcgcaaaggccgcgccgttggaatggatcgcgtcgagaaagatctccagttgatgaaggagcccaatatcagctcccgtttacgcgctctgtgtgacgagcacgggatcatgctgattgccgataaagtgcagagcggcgcggggcgtcccggcacgctgtttgcgatggaccagatgggcgttgcgccggatcttaccacctttgcgaaatcgatcgcgggcggcttcccgctggcgggcgtccccgggcgcgcggaagtaatggatgccgtcgctccaggcggtctgggcggcacctatgcgggtaacccgattgcctgcgtggctgcgctggaagtgttgaaggtgtttgagcaggaaaatctgctgcaaaaagccaacgatctggggcagaagttgaaagacggattgctggcgatagccgaaaaacacccggagatcggcgacgtacgcgggctgggggcgatgatcgccattgagctgtttgaagacggcgatcacaacaagccggacgccaaactcaccgccgagatcgtggctcgcgcccgcgataaaggcctgattcttctctcctgcggcccgtattacaacgtgctgcgcatccttgtaccgctcaccattgaagacgctcagatccgtcagggtctggagatcatcagccagtgttttgatgaggcgaagcagtag

SEQ ID NO: 138815 - DNA, 2503 bp, Homo sapiens
atgcagcggcgtgatggagacatagccctcatctaccgcagcaaaatcggtccccggaccagcatcacatttaccgcccggcgggccaatccagtacagcgtattgccgcgcggatcttgctgcgggatcacctgatctgccggatgtcgtgtaccgcagcgcgtcacgcgaatacctttgatttgatccaagggtcaggggcagacaatttcgcagccatatatggtggcgcgaatgaccgaattactcgagctgacgccgcagtcgcgggtgctggaaattggcaccggttcgggatatcaaacggcaaactgtcgccgcgttctatcaccaggacatccagcccggctcgtgccatgaccaaaatgccctataatccacaggcttctggcgggagcaatctggcggtcagtaaccctgagctggataaactaatagccgcacgcgttgctgcattacgggccgctaacccggatgccagcgcgagcgttccggttgaactggtgacggcatcggcaagttacccaaggagcttgatgagatgtaacaggattctatctccaggaagtgcacgtggacaaatgattataacagcactgtttatctatgcgggtaacccgattgcctgcgtggctgcgctggaagtgttgaaggtgtttgagcaggaaaatctgctgcaaaaagccaacgatctggggcagaagttgaaagacggattgctggcgatatcattctggcgtgctaaatggctgaaaatattcgtcgtttgcggagccgagatctttgttgagtatgtgctgaaaaacaaagtgatctggctgctgtgcttcgccaacattttcctctatgtggtacgtattggtatcgaccagtggtcaaccgtatacgcgttccaggaactgaaactctctaaagcggtggcgattcagggctttacgctgtttgaagctggtgcgctggtcggtacgctgctgtggggctggctctctgacctggcgaacggtcgccgtggcctggtggcctgcatcgcgctggcgctgattatcgccacgctcgtcatcccttttcatatggtattccatccaaacgaacaatatgcgtattgcgtcaatgagttaaacagctcagtggatgtctgggaactgaaagatccgcacggtaatatcgaatgtgtccagacgctggatatgatgccggaaaacttctccgacacccgttgggcggctgatattcatatcaccccggatggtcgccaatttatacgcctgcgaccgtaccgccagcctgattaccgttttcagcgtttcggaagatggcagcgtgttgagtaaagaaggcttccagccaacggaaacccagccgcgcggcttcaatgttgatcacagcggcaagtatctgattgccgccgggcaaaaatctcaccacatctcggtatacgaaattgttggcgagcaggggctactgcatgaaaaaggccgctatgcggtcgggcagggaccagatgtgggtggtttgaccatcgccgttaccgcccacgagggtgatatttttaccgagcagttcaaacagcggtttaacacgttcaaataccgcttcatcaccgccaaccataatcgacaagaggctccaccgcgcagccgcaaaaagagcggacgggtctgcgccgccgcaggaggagcaggcgccgccgccatcatgctgctgcctgtgttcaccctgaaactgcgccacaaaatcagcccccgaatggtggccatagggcgctacgacgggactcacccgtgcctggcggccgccacccaaacgggcaagtccctgatcaatcgatgcggtatacagttcgacgtccgggtgcgctttttccagcgcagcgataccttctggcgcagctaccagcaccagaactttgatgctgctgcagcccgcttttttcagcaggtcgatggtcgcgataacggaaccaccggttgccagcattgggtcaacgatcagcgccatacgctcatcgatgttagaaaccagtttctggaagatccgctgaagtttgaaaaggacaaaataaaaggggcgattcgtaccgattttatattgtctgcggaaatcgtcgccatcacgctggggattgtggatgccaaagctggaagaaaagaaattatgatgtccaccacgttatttaaagatttcaccttcgaagccgctcaccgcttaccacacgtcccggaagggcataaatgtggtcgcctgcacgggcattcctttatggtgcgactggaaattaccggggaagtcgatccgcatacgggctggattatcgatttcgctgaactaaaagcggcgtttaaaccaacctacgagcgcctcgatcaccattatctcaatgatattccaggtctggctggtgctctcgcgactgaatatgcgccagggcgcgacgccaggcgatacgccgcgccgctacgcttaagccacgcagtaccgtctggtacagcaggttccagatga

SEQ ID NO: 138816 - DNA, 486 bp, Homo sapiens
tggcttgtcgtcgcgctctgaaagacgacgggtgtagaagctgatgaagtgctggaagtggtgatggtgggcggttctactcgcgtgccgctggtgcgtgaacgggtaggcgaatttttcggtcgtccaccgctgacttccatcgacccggataaagtcgtcgctattggcgcggcgattcaggcggatattctggtgggtaacaagccagacagcgaaatgctgttgcttgatgtgatcccactgtcgctgggcctcgaaacgatgggcggcctggtggagaaagtgattccgcgtaataccactattccggtggcccgcgctcaggatttcaccacctttaaagatggtcagacggcgatgtcggctggcggtgcgcatattcgcgtgacgttccaggtcgatgccgacggtcttttgagcgtgacggcgatggagaaatccaccggcgttgaggcgtctattcaggtcaaaccgtcttacggt

SEQ ID NO: 138817 - DNA, 2469 bp, Homo sapiens
  misc_feature (1)...(2469): n = a,t,c or g
atggtgggcggatctacccgcgtgccgctggtgcgtgaacggttaggcgaatatttcggtcgtccaccgttgacttccatcgacccggataaagtcgtcgctattggcgcggcgattcaggcggatattctggtgggtaacaagccagacagcgaaatgctgttgcttgatgtgatcccactgtcgctgggcctcgaaacgatgggcggcctggtggagaaagtgattccgcgtaataccactattccggtggcccgcgctcaggatttcaccacctttaaagatggtcagacggcgatgtctatccatgtaatgcagggtgagcgcgaactggtgcaggactgccgctcactggcgcgttttgcgctgcgtggtattccggcgctaccggctggcggtgcgcatattcgcgtgacgttccaggtcgatgccgacggtcttttgagcgtgacggcgatggagaaatccaccggcgttgaggcgtctattcaggtcaacgcgtcttacggtctgaccgatagcgaaatcgcttcgatgatcaaagactcaatgagctatgccgagcaggacgtaaaagcccgaatgctggcagaacaaaaagtagaagcggcgcgtgtgctgaaaagtctgcacggcgcgctggctgctgatgccgcgctngaatcagtcccacctggcggtattggtccggcgatgatgtgtgaaatgattaagcgtaacgatctgctgcgcctgtctgaaacagtcatcaaaccgttttactaccagcgtgttcaggaaactatcgccatcattcgccgctatttaccggaaaatcgctgcctgattcataaaccggaaggagccattttcctctggctatggtttaaggatttgcccattacgaccaagcagctctatcagcgcctgaaagcacgcggcgtgctgatggtgccggggcacaacttcttcccagggctggataaaccgtggccgcatacgcatcaatgtatgcgcatgaactacgtaccagagccggagaaaattgaggcgggggttatgaccaatacccgccagcgtgtaggcttcgctgtggttgccgaaccaggagagcgcgaacagcgtcatgttagcgatagagtgctcgtagccggacgcgataaatgccagcagacaccaccagatagcgataaatttcgccgccccttcagtgcgcagcgccatccagattgccaggcaaaccagccagttacacaatgcacctttgaagaagagtaccattgccggtgcagtggttttagccagcgcgacggagtgaacgatgctggtatctaccggcagcaggctaccgccgccccagctatagagcatggcaacgaagacggaaccgaccaggttacccagccaggtttgcggcaggattgcccacatttgcccgtggctgatgctgcccgcttttaccccaaagagatcctgcgtatcgaaaaagcctgtggtcgtgaacccggcagcaccggcctgctggcggttattgaatctccgctggggattacccgcgcagtggaaatcgctcacgcttccgagcgtttgatcggtatcgccctcggtgcagaagactatgtgcgcaacctgcgtacagaacgctccccggaaggaactgaactgctgttcgcacgctgttccattttgcaggccgcgcgctctgcgggtattcaggcgttcgataccgtctattccgacgctaacaacgaagccggatttctgcaagaagccgcccacatcaaacagctgggctttgacggcaaatcgctgatcaacccgcgtcagattgatctgctgcacaacctctacgcaccgacccagaaagaagtggatcacgcccgccgcgtcgtagaagccgctgaagccgccgctcgcgaaggcctcggcgtggtttccctgaacggcaagatggtggacggtccggttatcgatcgcgcccgtctgaactttccggcatccgcgaagaataaggcaatcaaaatgacgcagaaaattgaacaatctcaacgacaagaacgggattgccggggccgccttggcggtattggtccggcgatgatgtgtgaaatgattaagcgtaacgatctgctgcgcctgtctgaaacagtcatcaaaccgttttactaccagcgtgttcaggaaactatcgccatcattcgccgctatttaccggaaaatcgctgcctgattcataaaccggaaggagccattttcctctggctatggtttaaggatttgcccattacgaccaagcagctctatcagcgcctgaaagcacgcggcgtgctgatggtgccggggcacaacttcttcccagggctggataaaccgtggccgcatacgcatcaatgtatgcgcatgaactacgtaccagagccggagaaaattgaggcgggggtgaagattctggcggaagagatagaaagagcctgggctgaaagtcactaa

SEQ ID NO: 138818 - DNA, 3294 bp, Homo sapiens
ttaaattgcataacgatttaaatagtcgagttgcgcattcatttccttattgtttaacttgtaagcctgagcaaaaagttcaggagggaggtaaacgtcataatgattgccagtgttcattaaataaccatactcaagatcttcatctgttgaaaaggattcattccccaaggagattgatgccacattactattaacaataaataatgagcaaatgctatctgaaagaacaacaagaaaattcttcaccgctttaatcctatccgacgtgtcggtatctaaagcaagcaagttcttgttatcattaaatataaactcgggtaaatgcaggatacatttttcgttattcaagcaactatcaatgaattgttttttaaaaaacagaaagctccatgacataagactactctgcccctgaatttggttgtcagattgtagatcaacgccaaataacgtctttacatcttccctgagattatagaatgccgtatcaacaagagcctcgatcgtttttttatcaaccattttaatgaattcgttgtaaacttccttttgcatcttataactgaccagcgcccatgaataatcatgttgttttaaaaccagtatagctcttaacagacaatatccatcgccatctacaggagcatattttaatcctaatgcctggttagtttcacgctgaataaaagatatcccagacaaatcaatgtcagaatccaaatcagatattcccggcgtatttatccgctctggctggacacttatattttcatcatcaaaacaatactcagaaaaaacatcatcacacgcattaatgttttcaatatactccataaagttataccaataataacctttaaaattggcaaaggcggcgtcaaagtcacggcggctcactgttttaccgtaattatccgcaaggaattttccgcgttcgctctctttaatttcttgattcaggcgtaccatcgtaccgaagtatgcgtccggatcaaaaccaaagcaggcaccgtgtttggcatattcgtagcgttccaggcaggaacgtccgccagctcctggcatgacttcacttagtttagcggccgtttccagtgataatccggtttccggcgatgaacacattcggtggcgcgcgcttgatgcagaaataaccggcagcatggttgcgatgtgcgcagacaggctggcatacaggtagtgtgcaaagtagaacaccagaaccagtacaatcaccgttgcgtttggtgagaatccttccaggtgcgtactcatggtaccggcgaaccagtcaataaaaccagaacgagtcaggccgttagccatcacaaccagagttgccaggttgaccagtgtgttccatgcgctgttatagcgggtaatgtctttccaaggcacaacgtgcagggccagcattagcgaaactgccagcagaccaaccgcagtagcattaatgacttcactaagctgagcaatacaaggccaatcagtgtccactctctggggatcaagcagagtcgaccggacaggcatgcaaaggcgtcgccagttgtgaccgcagtaaaagcgtgcgagcaggtcatagcagccgtaaatcagatagctgacgaccaccagcccgaccgcactaagcagcgcaacgcgattgtagtcgcggatgaccttccagacctcttcccagtccacttttttggcgtagaccaccagcaacacaatcaccgcgataaaaaacagccaggtgaggatcttctttgctgctgacaatcctgcggcaataatgccgttcagattatcgcgcagcgtctggttaaaatgacgatcgtggatgatgacatttgcttcgagattcagtgacaaactgagcggatcgagattactggaccctactgtcgcccagtgatcgtccatcaatgccactttgccgtggagcgggcggcggcggtactcaaaaacctgaacgccgcctttaaccagatagtatccagaaaggcgaccgaatctgacaacggcatatccgttcgcctgcgcttctcccggctggcggttctcttccgctttgtgatgacgtcgccaccagcgtcgtgccgcgctctgtccaggcaggttttccagctcaaactggagaatatcttcgacaatcggcccttcaaggcgtaccgcgtaatcctgtttagcctctggaccgtagctggacatatgctcggcggagtaattcagcccgccaataaaggctatacgcgcgtcgatcaccacaattttgcgatgcatccggcgaaacacattggtgcgcataccaaaaaggcgagggcggggatcgtagtagcggaacactacgccagctgccgtcagttcattgacaaactcatcgctgagatccggcgaaccgtagccatccagcaagacttccgctttaaccccgcgttgcgctgctgccagtagtgccgcatgcagttgtttgccgacgtcatcctcaaaccagataaacgtttcaagaatgatgcgttcttgtgcctcgccaatcgccttaaacaccgcgggataatattgctcgccgttttccagcaactggatcttattgccttcgcgccagctacatttcataaatgaatctccgcacggaaacgtgcgcgccgggcgtccgtgggcgcgggtaaaaatctcatccagtccggcctgcacttttaacggatgattagctttttgccgccagtcattgaaatcacccgccaccaataccggttcgccgtccggtagctcattcacccattcggcgagcatcgcaagtgcgatcacatgaatcgcttttccggtcatcggcggcacaatgcggcagtagagcacgccgcgcttttccgcaccatcgaccgaaacatcgcgattctcataatgttcaatgggataaaaaattgtagaatggtcaatgtgccaattgggagatcttatccggacaatttcgtgcgtattcagggtccggtgaatctcttcctgcgccttgggaaagtgaatatcagccgccgtaccagcttcgattcgccgctgccggtacaggtactggaagctagcccgaaaggtcacaaaaccgccgttgctcatcaccagaatatggtcgccaggctgagcggttttcaccaccatatctgccagcgtatccacatcgccactccagtgtgcaggctgaacgcaggcttctgccacttctgccacctgccacggaatatgcgccggttgcagcaggaagacttcatcggcacgacctaatgaaggtgccagatcgtctttgcagatccccat

SEQ ID NO: 138819 - DNA, 3144 bp, Homo sapiens
atgcacgtgcgcctcaacgtccacgattcacatttgcggtatgctgcgtccacatgcactgcgtcttacccatgtctggagcacaaccgttggtctgtagcactagactgccatttaaattgcacatctgagccccaactgctgctgtgtggcagcatgctgtgtatttgcgtgtcattttgtgtgctgcatcatataccagcataccatacagcctacaccatgaccgtctgccattgccgcatccgggatcgactcagtgcctggcttgccgacgctcggtacttccagcatctacattcaatgtgtggggacactatccgaggatccccgaactggttaatctcagctcagcgtcaggcgcttgtgtgggtgaactctgatggccatgacgatgagcgcgatgtaggaatagggcggcttctccggggccggatgccggcgttggtcttcttggccttggacgggccggacgacgccttaattgccgttattggtagcgatggttcaggcaagtcaacggtgtgtgacatcttattaccgtggtcgaaaaatatggtgctgccgaaagagttcattaggaaaacaggccggaaatgtcggtcgtgcagtgacaaaattaccgttatgggaaaatccttacataaaacaattgaacgaaatcagctcctgctgcgggtcactctagaggatccctgcacatgcaacggcatgcacaagtatttcaatcatggcattcctgtcggcattgcgaactttaaatgccgctatgcactatggccggttggtcgtcgcgtggtatcggtagaacagcgcaagctgcgcgtgaagccaatgcaccggcttcattttgctcggcgctctggttcaacgtatgcaaccattgccttcggtgcattgctgatcgccatttacactatgtgggaacatcactgtatgagcactggtatcagcagccgatgtatctgctgccggtgccgtctggtacaacgtcctgacacttattggtcatctgctgttccggtccgcccgctgcaggacaacctggcgcgttgctatgaacaactgggcgttatcttgagctcaagtcgcgcatgtttgatcctgatattgaagataaagccaggcaccgctgtacgatttggctctcgccaacggtctgctgatgcgacattgaatcagacgaaactctcgctgctgacccgcttacgtggcgtcgtggtcaacggggaacgcgtcgcacgctgcattattactttgtcgcaaggatattcacgagcgtgccagctcttctcatattcagtatcaaacattcgtgaacattttcgccacagcgacgtgctgttccgttttcagcggctgagtcgatgcagggccaggcgtgccagcaactgtcacgctgtattttgttgtcaccgtgattcgttggcggcaataaacgctgattcacccggtttaagctgtaacgctgagaacctttccacaacgttgcatcgccttcgacgcagaacaaaatgcggcactctgctggctaatggtggtttctttatcactaagcatggggacgaccggcactatcaccgggtctcacgctttatgcgcgaacaatccaaaccggtgaccattgtcggccgcaaccggaagagggcagcagcattcccggcattcgccgctggcctacgaatatctgccggggattttcaacgcttctctgctttccggtggcaccaccggcacaccgaaactgatcccgcgcactataacgactactactacagcgtgcgtcgtagcgtcgagatttgtcagttacacaacagacacgctacctgtgcgcgatcccggcggctcataactacgcatgagttcgccaggatcgctgggcgtctttcttgccggaggaacggttttctggcggccgatcccagcgccacgctctgtttcccattgattgaaaacatcaggttaacgttaccgcgctggtgccacccgcagtcagcctgtggtgcaggcgctgatcgaaggcgaaagccgggcgcagcttgcctcgctgaaatgttacagagggttcacatcaccgtgcaggggcgcgagcaaagtcagattaaccgtgccggcgagaagatccctgccgaagagcatccgcaacctgctgctgcgccacccgccggtgatctacgccgcactggtgagcatgaagatgagctgatgggcgacaaaagctgcgcttatctggtggtaaaagaccgctgcgcccggtgcagatataaccgttcacatccagcgcgataccttcctgataacgtggcggcgcgcttcgctacccaccagcagggaagagaggtagttaccccggctttgccgccgtcgggatggtgtttggtgctgcgcggttccaggagaaaccatcgcatcgatcccctgctccagcgcttctgcgcccagatacgtccccacgggaaagcagcgataatcacgtcggttgagtatcccgctggcggtttactcccatgccaacatcaccgacgaagatcagcggacggatatagcgctgaccaaatacgccgccatccgtggaatacctgcaccgatccgccggtaaatttcaactctttgctgcgacgaagacgtaatcggtaccgagctcgagttcgtatccgtattacaatcgagctcggtaccggaagtatcgagccgtttaccccaaggctgtatggccggcgaccttatccgctggaaaccatgctacgcattcactgctgcagcattgaccatcaatcgctggctggccgaagcggcgtcatgatgactcaaggcaccttggtcgatgccaccatcattgaggacccagctcgaccaagaacaaagagcagcaacgcgatccggagatgcatagaccaagaaaggcaatcagtggcactttggcatgaaggcccacattgggtcgatgccaagagtggcctgacccacagcctggtcaccaccgcggccacgagcatgacctcaatcagctgggtaatctgctgcatggagaggagcaattgtctcagccgatgccggctaccaaggggcgccacagcgcgaggagctgccgaggtggatgtggactggctgatcgccgagcgccccggcaaggtaaaaccttga

SEQ ID NO: 138820 - DNA, 3969 bp, Homo sapiens; identical to SEQ ID NO: 115214

SEQ ID NO: 138821 - DNA, 2829 bp, Homo sapiens
  misc_feature (1)...(2829): n = a,t,c or g
atgttctctggcgagaagatcaaccgcactgaaaaccgcgccgtgctgcacgtagcgctgcgtaaccgtagcaataccccgattttggttgatggcaaagacgtaatgccggaagtcaacgcggtgctggagaagatgaaaaccttctcagaagcgattatttccggtgagtggaaaggttataccggcaaagcaatcactgacgtagtgaacatcgggatcggcggttctgacctcggcccatacatggtgaccgaagctctgcgtccgtacaaaaaccacctgaacatgcactttgtttctaacgtcgatgggactcacatcgcggaagtgctgaaaaaagtaaacccggaaaccacgctgttcttggtagcatctaaaaccttcaccactcaggaaactatgaccaacgcccatagcgcgcgtgactggttcctgaaagcggcaggtgatgaaaaacacgttgcaaaacactttgcggcgctttccaccaatgccaaagccgttggcgagtttggtattgatactgccaacatgttcgagttctgggactgggttggcggccgttactctttgtggtcagcgattggcctgtcgattgttctctccatcggctttgataacttcgttgaactgctttncggcgcacacgcgatggacaagcatttctccaccacgcctgccgagaaaaacctgcctgtactgctggcgctgattggcatctggtacaacaatttctttgataaaaatgatgccctggtgatggtagacgacttcccacgccggtcgggtttgtcgtggaaaattgtcgtggttccccatgaatactgggtgggcggttctactcgcgtgccgctggtgcgtgaacgggtaggcgaatttttcggtcgtccaccgctgacttccatcgacccggataaagtcgtcgctattggcgcggcgattcaggcggatattctggtgggtaacaagccagacagcgaaatgctgttgcttgatgtgatcccactgtcgctgggcctcgaaacgatgggcggcctggtggagaaagtgattccgcgtaataccactattccggtggcccgcgctcaggatttcaccacctttaaagatggtcagacggcgatgtctatccatgtaatgcagggtgagcgcgaactggtgcaggactgccgctcactggcgcgttttgcgctgcgtggtattccggcgctaccggctggcggtgcgcatattcgcgtgacgttccaggtcgatgccgacggtcttttgagcgtgacggcgatggagaaatccaccggcgttgaggcgtctattcaggtcaaaccgtcttacggtctgaccgatagcgaaatcgcttcgatgatcaaagactcaatgagctatgccgagcaggacgtaaaagcccgaatgctggcagaacaaaaacctgggcaacaggaagcaaaactcgcgttaaaaaccttccattggcagcaggccatagccgacaaacgggtgatcggcgcgggtatcacgggcgtgaccgctggcacggaccatcgggccgacgttactgaagtcgcgagcgatttccgggtccagacgaccaatgccgacagtgcgctgttccatgttcggagtgctcagcagcacatccaccagctcctgcacttcacgacgcatctgttgtgccagctggcgggtctggatcatgtcgtctttcagcagatcgcgacgaatcccgccgatcaagttcaggccgtaggttttacgcgcaccggtaaggatctctgccattttcatggaggtttcacgcacgcggaagaactgcataaagccggagtcgaagccggtaaagtgacaggccaggccaaggttgagcagatgcgagtgcaagcgttctacctccagcagaatggcgcggatcatctgcgcacgttctggcacctgaatacccatcgcgttttccaccgacgtggtgtaggcggtgctgtgggcaaagccgcagatcccgcacacacggtcagagaggaaggtcacttcgttataacccatacgggtttccgccagtttttccatgccgcgatggacgtagaacagacngtagtcggcgtcgattatggtttccgcatcgacgaacagacggaagtggcccgggtcatcagaagtgacgtgcagcggaccaatcggcacgacgttggttttcttgtcggccaattcggtgatggactcgtaggtttcaacatcgggggtcggggccgacgcctgaccatattcctgctgtctttaccccacgggataagttcattccggccgtcattccggaggaaccggacgacgttattccgcagaacaaccggaattaaaccgccatattgggcacttacggctggccgtccggtaaacgagcggtcaattgcccgctattttctggccgcgggggctattggcgcgctgtataaaatgaacgcctccatctctggcgcggaagtcggctgtcagggggagattggcgtggcctgttcaatggcggcggcagggttaactgaactactgggcggcagtccggcgcaggtatgcaatgcggcggaaatcgcgatggagcataaccttgggctgacctgcgatccggttgccggacaggtacaaatcccgtgcattgaacgtaatgccattaatgccgtgaaagcagtaaacgccgcgcggatggcgatgcgccgcacctcggcaccgcgtgtttcactcgataaagtgatcgagacgatgtatgaaaccggcaaagatatgaacgataaataccgcgaaacatcacgcggaggactggccattaaagtggtctgcggctga

SEQ ID NO: 138822 - DNA, 1102 bp, Homo sapiens
atggccgagcgtcgccgtctcaaccggatggcagaacgtgatgttggtgactggttatacgcacgcttcctgaaagacaaagccgggaccgacacccgtttcgcagcggaaattgtcgatatcagccgtggcggcatgcgtgttcgtttggttgataacggcgctatcgcctttattccggcacctttcttacacgctgtgcgcgatgaactggtttgcagccaggaaaacggcactgtacaaattaaaggtgaaacggtttacaaagtgactgacgttattgacgtcactattgccgaagtccgcatggaaacccgcagcattattgcgcgcccgcatggggacgaccggcactatcaccggcgtctcacgctttatgcgcgaacaatccaaaccggtgaccattgtcggcctgcaaccggaagagggcagcagcattcccggcattcgccgctggcctacggaatatctgccggggattttcaacgcttctctggtggatgaaggtgcctggatattcatccagcgcgatgcggaaaacaccatgcgcgaactggcggtgccgggaaggaatattctgtggcgtcagctccggcggcgcggttgccggagcactgcgggtggcaaaagctaaccctgacgcggtggtggtagaaagatcatctgcgatcgtggcgatcgctacctttctaccggggtggaagatatcagcttcgaatggattgttgtcgatggcggttccaacgacggcacccgtgagtatctggaaaatctcaatggtatctttaacctacgctttgtcagcgagccagataacggtatctacgacgccatgaacaaaggcattgcgatggcacaaggcaagttcgcgttgtttctcaattcgggcgatatttttcatcagaatgccgcaaattttgtccgtaagttaaaaatgccaaaagataacgtgatgatcaccggcgatgcgctgctggattttggcgacgggcataaaattaaacgtagcgccaaaccggtgctggtatatttatcacagcctgcccgccagtcatcaggcgatatttttgcctgtatccggcttgaaaaaatggcgttatga

SEQ ID NO: 138823 - DNA, 2347 bp, Homo sapiens
atgttcatgattggcgcgttggtgcttgccctggtcatgacgctgataacatttatggtgctacgtcggatcgtcattcgtccactgcaacatgccgcacaacggattgaaaaaatcgccagtggcgatctgacgatgaatgatgaaccggcgggtcgtaatgaaatcggtcgcttaagtcgtcatttacagcaaatgcagcattcactggggatgacagtagggactgttcgacagggcgcggaagagatttatcgtggcaccagcgaaatttcagctggcaatgcggacctgtcatctcgcaccgaagaacaagcggcggctatcgaacaaactgccgccagcatggagcaactcactgcgacggtgaaacagaatgcggataacgcgcatcatgccagcaaactggcgcaagaggcttctattaaagccagcgagggcgggcagacggtgaacggtgtagtaaaaacgatgggcgctatgtccacgagttcgaagaaaatttctgagatcaccggccgtcatcaacaggggattcgaacccctgttaccgccgtgaaagggcggtgtcctgggcctctagacgaaggggacacggatactgcttattacgcgttacgcgacattttcgccctcaccccaaatcgtaaacgccttgctattcccgtgtcaacagacaatcctggtaagccctgcaaagacccttctttaagcaaggatgtatccaaccgagttccccaacgggtaccctgttacgactcaccccgttcatcatcggtaaatgggaaccgcctccccggtaaagattttcacgatgacgagaggtctatggggcggagcggttcgtatgtcttggcactcgcgtacccacccaaaatcgcgctgagcgatgcggactccgtgaccgttaacgttgcgggctggcagggcgaaatcagccgtgaacaattcaatgaactgatcgcgccactggtaaaacgaaccttactggcttgtcgtcgcgctctgaaagacgacgggtgtagaagctgatgaagtgctggaagtggtgatggtgggcggttctactcgcgtgccgctggtgcgtgaacgggtaggcgaatttttcggtcgtccaccgctgacttccatcgacccggataaagtcgtcgctattggcgcggcgattcaggcggatattctggtgggtaacaagccagacagcgaaatgctgttgcttgatgtgatcccactgtcgctgggcctcgaaacgatgggcggcctggtggagaaagtgattccgcgtaataccactattccggtggcccgcgctcaggatttcaccacctttaaagatggtcagacggcgatgtctatccatgtaatgcagggtgagcgcgaactggtgcaggactgccgctcactggcgcgttttgcctgcgtggtattccggcgctaccggctggcggggccggtggatctcttcctgcgcccttgggaagtggatatcagccgccgtaccagcctcgattcgccgctgccggtacaggtactggaagccagcccgaaaggtcactacacccaattagtggtgcagccgctggggtggtacaacgaaccgctgacggtcgtgatgcatggcgacgatgccccgcagcgtggcgagcgtttattcgttggtctgcaacatgcgcggctgtataacggcgacgagcgcgcttcccgcgatccgggctttttaatggcaaggtttgtaacctgtagacctgataagacgcgcaagcttcgcatcaggcaacaccacgtatggatagagatcgtgagtacattagaacaaacaataggcaatacgcctctggtgaagttgcagcgaatggggccggataacggcagtgaagtgtggttaaaactggaaggcaataacccggcaggttcggtgaaagatcgtgcggcactttcgatgatcgtcgaggcggaaaagcgcggggaaattaaaccgggtgatgtcttaatcgaagccaccagtggtaacaccggcattgcgctggcaatgattgccgcgctgaaaagctatcgcatgaaattgctgatgcccgacaacatgagccaggaacgccgtgcggcgatgcgtgcttatggtgcggaactgattcttgtcaccaaagagcagggcatggaaggtgcgcgcgatctggcgctggagatggcgaatcgtggcgaaggaaagctgctcgatcagttcaataatcccgataacccttatgcgcattacaccaccactgggccggaaatctggcagcattcccggcattcgccgctggcctacggaatatctgccggggattttcaacgcttctctggtggatga

SEQ ID NO: 138824 - DNA, 679 bp, Homo sapiens
  misc_feature (1)...(679): n = a,t,c or g
aatctcatgtccgtcgccgtacatcggagcgatctgctaccgccctggtgatacccagcttgatctgcatgttgacccgtacggctttgaatggctggtggtggatgacaaagaacgctcggtgctgatctttgtgcgtcgcgataaagagggtaacgaaatcatcgttgccagtaactttacgccggtaccgcgtcatgattatcgcttcggcataaaccagccgggcaaatggcgtgaaatcctcaataccgattccatgcactatcacggcagtaatgcaggcaatggcggcacggtacacagcgatgagattgccagccacggtcgtcagcattcactaagcctgacgctaccaccgctggccactatctggctggttcgggaggcagaatgacacaactcgccattggcaaacccgcttcccttggggcgcatttagaaagggaagggggggaaaatttcacatttttttccttaaatgccgacggggaaaaattgtggtctttgacgccaatggccaggacatcgttatgacttgccagggcacagtggcgacatttggcacgttattgccggatgcccgcccggntttgcgtatggtatcgcgtcatggccctgcaacccgccgggggcatgcttaccccggcagtggtgatgatcttgccgcggaaatgag

SEQ ID NO: 138825 - DNA, 2487 bp, Homo sapiens
ttaatcattattacgcataccgccaacagtcaggttatcgactttcaacgttggctggcccacgccaaccggcaaactttgcccttctttaccgcagacacccacgccgttatccagtttcaggtcgttgccaaccatcgaaatctgctgcatggtttcgataccggaaccaatcaacgttgcgcctttcaccggcttcgttactttaccgttttcaatcagatatgcttctgaagtggagaaaacgaatttgccggaggtgatatccacctgaccgccaccaaagttcggtgcatagataccgtactcaacggattcaataatttcctgcggggtcgatttacccggcagcatataggtgttggtcatacgcggcatgggcagatgggcgtaggattcacggcgaccgttgccagtcggcgtcatccccatcaaacgcgcgttgagtttatcctgcatgtagcctttcagaatgccgttctcaatcagcacgttgtactggcctggcgtaccttcgtcatcaatcgccaccgaacctcggcgatcgaccatcgtgccatcatcaaccacggtacacagttctgaagccaccagctccccgacctgtccactaaatactgaagtgccacggcggttgaagtcgccttccagaccgtgaccaaccgcttcatgcaacagcacgcccggccaacctgcgccaagtactaccggcatggtgcccgctggtgcagcaacggcagaaagattgaccagcgccatacgcactgcttcttttgcccatgcatccgcacggacttcgccgtcgagatcggcaaggaagaattcataaccaaaacgaccgccgccgccactggcaccgcgttcgcgtttgccatcttcttcgacgagaacgctcacggaaagacgcaccagcggacggacatccgccgctagcgtgccgtcggtggccgcaaccaaaattaattcatagacaccactgaggctggcagtcacttcctgtacgcgcttgctctcgcgggcaaccgttgtcatcgtagatgcaatcagtttacccacttcagcgtacccgccagagagcaaacttcgtgggagatgccttccatcaatgcagccgtcgcccatgaaggcgtaggtgtagtggtcgacaatgtcgtggcccggacggttaaactgcgccgccagcgttttttctgcaatcgccataccgactgcgttggcaataccctgacccagcggaccggtggtggtttccacaccagcggtgtaacccacttccgggtgacccggagttttagagtgcagctgacggaagtttttcagttcttccatcggcagatcgtaaccggtgaggtgcagcaggctgtagatcagcatggagccgtggccgttggacagcacgaagcggtcacggtcagcccaggacggattctgcgggttgtgtttcaggaaatcacgccacaggacttcggcaatgtcagccatacccataggggcacccgggtgaccggatttggctttctgtactgcgtccatgctcagcgcacgaatagcattggcaagctctttacgtgaggacattttgactccagatcggatgatgaagggcacgcccttaacgacttgacgacagcgcgttttggtaaattcgatgctggagcctttcgggataaacatcacgtcgcctgctttggcgatcatggtttggccttcgtggcgaacatgcagctcccattccagcaccatgtcgatttcgtcgtagttcagggtccacgggaagaatgcgttctcccactgaataaaaccggcggccatgctgctgccgtcgtctccggtcacaagatcagtcaagcccacgcaatgcggctctgcgccgtcgaaacgaccaaacttgacgctactgccatcaatcactttgatgccgcctttgccggtcaccgatttgaagctcggctgcattgcgccctgctccagcgactgtttttccttcatcactttttccatcagctgtgcgaccaggctttcggtaaactggcttccggcagctgggcaatgatggtttcgcggatgcgctggctttcggttttgtcggctggcacgctggccggtaaacaaccccggagcgacattttcctttagcgagtgatgccgcgtttttttgcggctgcgtaagccgataaacagtgccagtaaaaaaccgatggcagcgatggcggtatcgaaccacataatatcggcaatacttctttgggacagatgagccgtaatcaacggaatagtaaaggtcgcaatactgcccgcactgtaatagatccctgtagctttacctttagcgtaagggaaacgttcagccattaacgtcaggccaatttgcacaacacctccagcagaggtaaaaccaatgacaaaagcaaatattatcaccacataaaatgtgggatgcaggcagacggtaaacagagcaataaatgagataaaggtgtacagcat

SEQ ID NO: 138826 - DNA, 732 bp, Homo sapiens
ttaatcagccacagaatcaggtcgaccggggaagttgttcgcggtacagcgcagataactcggtatcgcgaacgcactttcgcccacgccgggcagatccacgatggtcataaagtgttctccatccatgatgccgatcactggctcgtagtgggttaatgatttatctgctgcaatatacgtcagatacccatagcggtagaccggaagggagttctgtagtggctgcagaacttcaaaatttttcatcaccactctcggcttcaggtaagtcatcagcacgggaacatgttgatgcccattgagcaaattgcctgcaggtcggcatcgcgcttcctgtttcgccacacccaggagcccttgcacttccggtggcactcctcgaatgtgcccgggttggcaggcagccgcagcccaatcctcggcggcccctgaggcgctggcggttgagccccgggggtccgttccgaacttcgactcgtactggtgccggcgcccggctgcctcccagcggcggcacgtgaagccggcgcgagggcggaggtggggcacccacgagggccggcgcagggcgggttggcggccctgcggcggcggctggcagccaacacgttccccatggtcgcctgcagacgctgacaccgtggtgccagttatcgccgccttccaacagatgccagtcgaggtggcgtcatggttccactcgcggccctgggcaaattcgttacccat

SEQ ID NO: 138827 - DNA, 1494 bp, Homo sapiens
atgaaagagaagagcttggaagcattacaacctacaaccgctgccacatgtcggctggataaggcgttcaaaatgggacgggagtggatgatgaaagagatggatcaattcccgacgcgtccgcaggaccgctttgctatcagcgaagatgataaacgtatctaccgtgaagagttgttcccgtactgggaaaaacgttcgatgaaagatttcatcaacgggcagatgacagatgaagtaaaagccgcgaccaacacgcagattttcagcatcaaccagacggataaaggccaggggcacattattattgattacccacgcctgttgaatcacgggctggcctgtaaagaggcttgcgcggcagcgaatgtactgctgaaagtgatcatcgaaaccggcgaactgaaagacgaagcgctgatccgtaaagcgtctgaaatctccatcaaagcgggtgcggacttcatcaaaacctctaccggtaaagtggctgtgaacgcgacgccggaaagcgcgcgcatcatgatggaagtgatccgtgatatgggcgtagaaaaaaccgttggtttcaaaccggcggcggcgtgcttactggtggagattgaagaactgctcaacaccaaagcgcaaagcggctcgcacgaggcgcgttacgccactattggcagcgccaaaaagcatatcccggaaagtaacctggcggtgatttcggtcaacggtctgtttgccgctcgcgaagcgcgtcaggcgctgcaaaacgatctcaacgtgatgctgttttccgataacgtctcagttgaagatgaactggcgctcaagcaactggcccacgaaaaagggctgctgatgatggggccagactgtggcacggcgattatcaacggcgcggcgctctgttttggtaacgccgtgcgtcgcggcaacatcggtattgttggcgcatccggcaccggcagtcaggagttgagcgtccgcattcatgaatttgccgtcggcgtttcgcaactgattggcagcggggcgcgcgacctgagcgagaaaaccggcggcgtctatgatgctatgaggccatctgggatgctggaaaacgatccgcatcctggaatcattgcgcttatctccgcgccgcctgcgcctccggtggccctcaagcagttctttttcatacgcaccggaacgtccgccaacgatatcgcggataccggcaaagaaatcacggacgaatccggcaaattgaatacaggtttcttatcagaacgcttcaccgctttacagtcaggggaggtggatttgctctcccgtaatacgacctggacttcatctcgcgatgccgggatgggaatggcatttaccggcgtcacttattacgacggcattggcttcgtagccagggcgctttggttgcaaccaccagggcgacgcgggtcacaggaacacgcgcggatctcctacctaaacaatggatcaaataaacaaagcactggagaaatctga

SEQ ID NO: 138828 - DNA, 5631 bp, Homo sapiens
ctaccaagaaaaacattgaattcttcgaagctcgtcgcgctgaactggagctaaactggctgaagttctggcagctgctaatgctcgcgctgagaaaacaatgcactggaaactgttaccatcgcgtctaaagctggcgacgaaggtaactgttcggttccatcggtactcgcgacatcgctgacgctgtaactgcgctggcgttgaagtggctaagagcgaagttcgtctgccgaacggcgttcgcgtaccactggcgaacacgaagtgagcttccaggttcacagcgaagtatcgcgaaagtgatcgtaaacgtagtagtgacgtcattggcggcagcatttcgacctcacagaccgttgtgcagtcgattaagattaatcttattcgaagttgtaagacgcacacgggaataatcgggacgcccgccgcaattgccgcgtgaaagctccagtcttgaacggtagcaggccgcgaccacggcctcgtcagtgtggatttatgaaaaaacgtctcgaaaacggtgacgattactttgccgttaaccctaggggcaggtgcctgcattgctgctggatgacggtactttgctgacggaagcgtagcgattatgcagtatcttgccgacagcgtccccgaccgccagttctggcaccggtaaacagtatttcccgctctgtttcgccctatacaccggaagagtacaaaccgacagttcgcgcgcagctggagaagaactgcaatatgtgaacgaggcactgaaggattgagcactgggatctgcggcaaagatttacaattgctgatgcctatctgtttacggttctgcgctgggatacgcggtgaaactgaatcggctggcgcataccaaaatccaccagcggacggctgtatgccaggcttcatcggcggtgaccagcagcatttcaaaacggtcacgctgtagccagctcgcgccaggtgtttaacaacacaatttgtggccttgccaatgattcgagcggatccaatttcgggatagggtacaaggcacccagtatccactggggtcatccggcgatgaaactgccgccggaagtgaacctgattgcgtagcgcactacctgagcgcctgatgtacatcaagtctttcatcgacaaactgagcgactttgtgagcaggtttataaggttgataccgcagttattgccgcgttctacccgaatggctgacacgcggtaaaggtgcggtgaactacctgagcgtgccggattcccgaccgacagtaaaaacggcagcttccgttcactgctgtgaattgcaggaatcctgcaaaaccaatacagtgcactgatcaccaatatcgccaaaggcgtcacaccacctttgtgaagccgaacattccggcaacgggtgaattcaaagtgttggcttcctcgaagcgccgcgcggtatgctctctcagagcagcgctggtgggtacaccggttgccgatccgaataaaccgctggaagtggtcgtaccattcactcctttgacccgtgcatggcctgtgcggtacacgtagggatgctggatcgcgctgcgatttatccatttcactcgctgatgctggtttttggcttcgcaatgtacggtgcctggctggccccttgacgattcgtcgcttgctggcgaagcgttttctgcgtttacaacagacgctgccgtctggagtttgatcagtgccactgcaatgctcgccgttcaggcgggttgatgggaacgggatggacagatgtattttcgccaaacatttgcaggctgttttgcaaacgcagtttggtggcatctggttatggcaaattttctcgccctcgtaacgttgatcgtcgccccgttctgttttgccgatattggcccgctgctggcaactgcgctgcagaccatccgcgcctgcgtgagatgaacgtacagtttccggcgcaaaccggcgcgccacggtgattggcgcgggcgcgcataccctttcgctctctggcgcacaatctggcttgagggcgtacaactgccgctgcgcaatttgccggtgcgatcccgattgatgaaacggatctggtgggggcgtgctggcgcttccgcctcgctgcctgtgcgttacgccgcggtactgacggtcatcaacgcttggtcgatttcgtcgcgcgttttccgaatccgcatcccctgctggtggggccgggcaggactttggtaaagctctgggcatgttgttgcgcccacagtacaacaactcccgttggcagtcattgacgaagtgattgtccgcgcggggactatatcgacattggtacgcctctttttggcggatcggttgtgccgggacggtgaaatcactcgcatttccttccgtggcggttattgctctctgcggcttgtcaaaaccatggttcgaccggcgcttcgagggcttgcaacggttgggtgtcgtattggcaacgagcgtcacggcgtggaaaggatcggcttccactaatgtaccgtgaaaatctgcgtcatgtcgtagtcgcgccccatgcgcgatgcttcgcaaaatcggcacaatgccgcccatgatttttgttccgttgccagcattttcatcaagcagcgtgtccaggcgggaaatctcgattttattcactttttgccgtcgcgaactcagcaccgcgccaatctctttgagattcagctcttcctggtaatagaggttaataccagtttttcgcgctccggcaacgtttcgatggcttccatcaccgctggcgcagattactgtccagtagttgttgtagcgggttttctcgctatgatcatcagtaaccagttcgatgctatcgccgtgctcttcgcgccaccatcgtaggagaagagctgggctgcgcggcacccagtcacggctgcgaagttctccagcatagcgccacggatacgctgcactgcgtaagttgtaaatgccgtccttgtagggcgtcatagcgttcgacggcattaagtaacccaatgccgccgcctgtagcagatcgtcaagttccacgctcgcgggcagtcgaacctgaggcgcaatgcttcgtgacgcaccagcgggacataacgcaccaggacgtaatgcatgaaaggcgctgtcgataagctcccgtgtgtagctgcgatttcctgattgctttctggtgaccagttttttagcgctcgggatctttacgcaccacgccttcgccagagcagggagcgtccagcaaatggcatcgaacatttctggcaccggaggcgtggcgaaggcgatgccgccacggataaactggttaaagtgccggttttcactacgccgcccgtcagaatggctggacctatgagtatacggtacgccaaccgccgctggtgtagctagcaggcgcgagcatggctgactccagtacagtgttacaacaaaatcctcgttggcgttgaagttaaccgccagggcgtttccggcattttctcgccgattatgaacgaaacaccactgtgcccgtgtcgcgtgtagaaacttattcaaccagcacccggaacaggattcaattacggttaacgtcctcatcattttttcttcatgattttcaggtgttggctcatcgacatcttcatcctccggctcagtttcactttcgtcaaaagcatccgggtgacaatggcctctaatggatagcatctccgccttccagccggaagttatctcaaaaaaccgcttggtccggtagttcgtcgtggcgatgatgaatggttctcgatgtacgctggacgcttttcgccatgctgaatggccagcgacggtgaatcgtagcgtaagtacgatgatcaagggtattgcggcaatccggttccgagcagtagtggcggaaaactgatgctgtactggtccaaaatgttgagctcggtccatatcctggcttgcagcggacgctaattctccggtgatgcactggtacgtgaaacctatcagcgctctccgatgagcaagttcacatcgaaagcgtaggtcattactggacactgctgatgaactgctgaaagaaattccggcgaagtaattatttgatttgctgccgatggcgtttaatcgccttccggcagtttcatccttcattatccttcgataaagccatccctgtaaatgtccgtcgcgggttgccacgttcaatctacgattccgaacaggttgcttcttcttcttccggcgactgattactgttgtgcgtgaaggtgcgtcgatcatcggcctgttcatctgatgttctattacagttggcaactgtcgatcattttgattgtgctggcccgattgtttcgattgcgattcgcgttgtatcgaagcgttttcgcaacacagtaaaaacatgcagaacaccatggggcaggtgaccaccagcgcagtataatgctgaagggccacaaagaagtattgattttcggtggtcaggaagtgaaacgaaacgctgccgattccggtgaccagtcccaagaaataccgaaccggcgctggtgatgctatcgaccagttcacggggttgcgggtctgaatgatcaggtgctccgggccgtactggttggagatcccacgcactgcgctaaatctgacgttcgcttcggtgacaaaggcgttacccggcccgaagattttgtccactttggcacagattccgtaccaaacgccagtgcggcaatggcctgtgcgccgcgacgttaaacacgtcctgcacaccgcacagctgcgccgcataaaggatccatcggcaatcggcggcggtgagcacagcaccacttttttacagcccgcatactcgccggagtcgccagcattaataccgttgagaagagcggggcgggccgccaggaatatacaacccaactgaagcgacgttgcgcggtgcgcgttcgtggagatcaggctaaagtcgattttgcgctcgtccatattaaccgcttcacgcgaacctggattgccgtcagtgcagcgggtgattgccgtgccgggtaagttgacattgatgtctgatgatccactaacgttaccgtaaaacgtgagctgtacgaggttgagcgtgacggtacaccattgagtacgatggtatgacgatggagcgtgtggatcgcccgacgcagagtgtgccgacgcgtttatgcttttcaggtcgtaatcggcataccagccttgttgatcgttccacaggttttttcgatccctttttgacgggcatttgccagcgtttcgtactggtttccatcgcgttatctccggcagctttgctggcgcgggcgaggattttttcattttaaacatcaggctgttcagatcgaccggtacgatgctggtggtgctaaggtatttaactgctgcgggttgtccatccagcgcgagctgaaatccagccagacgcagcggcagagcgcaggtcgcggtaaatttcagtggcaggcgattcggattgcttttggcggtggcaatatcttccacccatgactctgtcgtggcgtatcgcgatcgtcccagtagcggttgagaagggtaccatccgaagtttgacaacgcgtttttcctgttgtccggcttgcaggttttcaacccgtccatccagtaagcatattctttttgcat

SEQ ID NO: 138829 - DNA, 1049 bp, Homo sapiens
atggcagttggggttatcagccaaccggcctgtatgcgccaacccgccgctggtctgaacgtgattctcgactgggtgcaagcccacttcccgactgatgactttgcgcttgccgaatttgatggcacgaacttgtatgaacacagcgatccgcgtgaaggctatcatcaggactggaacacgctgatctacaactatggtcgccgtgaagtcagtaacttcctcgtcggtaacgcgctttactggattgaacgttttggtattgatgcgctgcgcgtcgatgcggtggcgtcaatgatttatcgcgactacagccgtaaagagggggagtggatcccgaacgaatttggcgggcgcgagaatcttgaagcgattgaattcttgcgtaataccaaccgtattcttggtgagcaggtttccggtgcggtgacaatggctgaggagtctaccgatttccctggcgtttctcgtccgcaggatatgggcggtctgggcttctggtacaagtggaacctcggctggatgcatgacaccctggactacatgaagctcgacccggtttatcgtcagtatcatcacgataaactgaccttcgggattctctacaactacactgaaaacttcgtcctgccgttgtcgcatgatgaagtggtccacggtaaaaaatcgattctcgaccgcatgccgggcgacgcatggcagaaattcgcgaacctgcgcgcctactatggctggatgtgggcattcccgggcaagaaactactgttcatggcggccaagattgccggtctctacaatgactcggagccaccccggaagaccatgcgcagaggggtgctgatgaccctgctgcagcagtcggccatgaccctgcccctgtggatcgggaagcctggtgacaagcccccacccctctgtggggccatccctgcctcaggagactacgtggccagacctggagacaaggtggctgcccgggtgaaggccgtggatggggacgagcagtggatcctggccgaggtggtcagttacagccatgccaccaacaa

SEQ ID NO: 138830 - DNA, 1482 bp, Homo sapiens
ttaacgtttggagaactgcggacgacgacgtgctttacgcagaccgactttcttacgttcaacctgacgagcgtcacgagtaacgaagccagctttacgcagttcagaacgcagggactcgtcgtattccatcagagcgcgggtgataccgtgacggatcgcaccagcctgaccagagataccaccacctttaacggtgatgtacaggtccagtttctcaaccatgtcgaccagttccagcggctgacgaactaccatgcgggcagtttcacgaccgaagtactgttccagagaacgttggttgattacgattttaccgttgcccggtttgatgaaaacgcgagctgcggaacttttgcggcgaccagtgccgtagtattgattttcagccattgcttgcggttgctgtgccgcgtggttgtgctcgttacccgcgtaaactttcagtttacggaacatagcacgacccagcgggccttttggcaacatgcctttaaccgcgatttcaatcacacgctcaggacggcgagcaatcatctcttcaaaggtcgcttgtttgataccaccgatgtggccggtgtggtgatagtacactttgtcagtacgcttgttgccggttacagcaactttgtcagcgttcagaacgatgatgtaatcaccggtatctacgtgcggagtgtattccgctttgtgcttaccgcgcaggcgacgagccagttcagtagccagacggcccagagttttaccggtcgcgtcaacaacataccagtcgcgttttacggtttctggtttagctgcgccaagtactaccggcatggtgcccgctggtgcagcaacggcagaaagattgaccagcgccatacgcactgcttcttttgcccatgcatccgcacggacttcgccgtcgagatcggcaaggaagaattcataacctaaacgaccgccgccgccactggcaccgcgttcgcgtttgccatcttcttcgacgagaacgctcacggaaagacgcaccagcggacggacatccgccgctagcgtgccgtcggtggccgcaaccaaaattaattcatagacaccactgaggctggcagtcacttcctgtacgcgcttgtccgcttcgcgggcaacctgatcgacgcgacgcaggatatccagcttctcttcacggctcatgctttgcagcggatgatggtgcgcccgcttgcgcactctgttccagcgccagcaggctgatttggtcagcgtaagcaaatccgttttttcaccgctgattgcacgcacaccaacgccctgatcgatgttgtaagaaccatctttaataatgcggtcttctaaaacccaggattcgtgatagctcgactgaaaatagagatcgccataatcaaggcgacgttcggccagttgaccgaggatcgcgaacaagtcctgatgtttcaggccgttcgccgctagcaattgttcacttaccaggttaagactcat

SEQ ID NO: 138831 - DNA, 3444 bp, Homo sapiens
atggtggtggatgaccaagaacgctcggtgctgatctttgtgcgtcgcgataaagagggtaacgaaatcatcgttgccagtaactttacgccggtaccgcgtcatgattatcgcttcggcataaaccagccgggcaaatggcgtgaaatcctcaataccgattccatgcactatcacggcagtaatgcaggcaatggcggcacggtacacagcgatgagattgccagccacggtcgtcagcattcactaagcctgacgctaccaccgctggccactatctggctgggcacagtggcgacatttggcacggttatctgccggatgcgcgcccgggtttgcgttatggttatcgcgttcatggcccatggcaacccgccgaggggcatcgctttaacccggcgaagattgttgattgatccttgcgcgcggcaaattgacggggagtttaaagataacccgctgctgcacgccggtcataatgaacctgactatcgcgacaacgccgccattgcgccgaaatgcgtagtggtggttgatcactatgactgggaagatgatgccccgccgcgcacgccgtggggcagcaccatcatttatgaagcccatgtcaaaggattaacgtacttgcacccggagatcccggtcgagatccgtggcacttataaagccctcgggcatccggtgatgatcaactatttgaaacaattgggcattaccgcgctggaactgctgccagtggcgcagtttgccagtgaaccacgtctgcaacgcatggggctaagtaactactggggttacaacccggtggcgatgtttgcgctgcatccggcgtatgcctgctcgccagaaacggcgctggatgagtttcgcgatgcaatcaaagcactgcataaagcgggtatcgaagtcattcttgatatcgtgctcaaccatagtgcggaactggacctcgacggcccgttattctcgctgcgtgggatcgataaccgtagctattattggataagagaagacggcgattatcacaactggaccggttgcggcaacacgctcaatttgagtcatccggcggtggtggattatgccagcgcctgcctgcgttattgggtagaaacctgccacgtcgatggtttccgctttgatctggcggcagtcatgggccgtacgccagagttccgtcaggatgcgccgttgtttaccgctatccagaactgcccggtgctctcgcagcccgttgaattaagggtggcaccattactgacatttacgattatcggtggcaatgccaccggtatcggaaccctgaatgtgcaggatcaagactctgtcatcacggtacgcagactctataatggatatttcggtaatggcacagtcaatatttccaataatggactgattaataacaaagaatattcattggtgggcgttcaggacggttcccacggtgtcgtcaacgtgaccgataaagggcattggaatttcctcggaacgggcgaagctttccgctatatctatatcggtgatgctggcgacggtgaacttaatgtctcgagtgaaggcaaagtagattcgggaattatcactgcggggatgaaagaaacaggcacaggcaacattactgttaaggataagaactccgttatcactaatctcggaactaatcttggttatgacggccacggcgaaatgaatatcagtaatcaggggcttgttgtcagcaacggaggaagttcactcggttatggagaaaccggcgtcgggaatgtcagcatcaccacggggggaatgtgggaggtcaataagaatgtctataccaccattggtgttgcgggcgtcggaaacctcaatattagcgatggcggtaagttcgtatcgcaaaatattacttttttgggcgataaagcaagcggtatcggcacactgaacctgatggatgcgacatcatcgttcgatactgtgggtatcaatgtcggtaattttggtagcggtatcgtaaatgtcagtaatggtgccacccttaattcaacgggctatggatttatcggaggaaatgcctccggtaaggggatagttaatatttcaacggacagtctctggaatttaaagacatcatctactaacgcacaattgctacaggtcggtgtattaggcacgggtgaactgaatattaccaccggaggtatagttaaagcgcgtgatacacagatagctctcaatgacaaaagtaagggcgacgtgagggtggatgggcagaactctcttcttgaaacattcaatatgtacgtagggacatctggtacgggtacgttaaccctgacgaataacggtacgctgaatgtcgaaggtggagaagtttacttaggtgtttttgagcctgctgtaggaacgctaaacattggtgctgctcacggtgaggcggcggcagatgccggatttatcaccaatgcgacgaaagtggagtttggtcttggcgaaggcgtttttgtctttaatcataccaataacagtgatgccggctaccaggtcgatatgctgattacaggtgacgataaagacggaaaagtgatccatgatgcaggccatacggtgttcaatgcagggaatacttatagcggtaaaacgctggtcaatgacggcctcctgacccttgcgtctcatacggcagatgggcattcgcgttctcgaaaaacttggatatcccgcatactttcgtttctacccgacttcaatacagtcgcgctagatgttaagacgttcggcatcaaagcgaatgacgacaaagccaagctcaaagcgctgggggaaatcgcgcacgcatgtgtcgacgcaacgatcatttattgcaagtcaccaactgttgcgggcctggtggcgcgcgagctgatcaggcttgggcatggcactccgactgagaatccccatgtcgactgggtcagcgaagagttcgatgccgactgggattacacagtcgcccttagaaacggtattggcttgcattttggcgcgctaccgagggcactgcagcaatacactgccgaccaattcaatgctggaaaactgcgctttttgctctgcacctccacgatcattgaaggagtcaacactatcgctaagaacgttgtgatctacgacaaccgcgatggaactcgcagcattgacaaattcacccatgggaacatcaaaggtcgcgccgggcgcatgggcgttcacttcgtcggcaaaatcttttgcctggaggaaatcccggaagacaatctcaatcaagaggtggatattccgctcggtattcagggcattgataccccaatcaacctgttagccagcgttcaaccagaccacttgtccgagttttcacaggatcgctttgatgaggttttcataaacgaccgtgtttccatcgaccttgtgaagaagcattcgtacttccgtgtggccggctga

SEQ ID NO: 138832 - DNA, 1183 bp, Homo sapiens
ttataaaaatgacatataaataagtacatcccatttaattttcagcgggctttctgaacctacgttacgctcaaaaatttccgagtagttacccacctgtttgatgatgttataggcccatttattatccagcttcagatccttgccgtaatcgccttctttacccagcagatgtgccatatcaggcgttgctggattagccgctttttcatcgacgttctgggaattgatgcccatctcttcagcattcagcatggcgaaaagcgtccagcgtacaatcgagaaccattcatcatcgccacgacgaactaccggaccaagcggttcttttgagataacttccggtaagacaatccattcagctgggttgcttaatttgatgcgcagggcatacagttgtgattgatccgaggccagcgtatcgcagcgaccagattccagtgccttcgctgattcgtcagagcgatcgaaagtcaccggtgtgtacttcatattgtttgccttgaagtagtcggcgacgttgagttcggtatcagtacccgcctgaatacagacggtagcgccatccagttctttcgcgctttttagccccgctttatcgtgcgtcaggaagcccaatgccgtcgtaataagtgacgccggtaaatgccattcccatcccggcatcgcgagatgaagtccaggtcgtattacgggagagcaaatccacctcccctgactgtaaagcggtgaagcgttcttttgcagtgagcggggtatatttcactttcgtgtcgtcaccaaatacagcagcggcaacaccacgacaaatatcaacatcaatacctgaaaacttaccgtcagcatcggcataagagaacccaggtaatccatcactgatcccgcattgcacaaaaccttttttctgaacggcatcaagcgtcgcgccagcagcgcctgatttgcaacggcaagcagcacgctggcggcagccagtgtggctatcatcatcgtctattatgcgtctttgcttcggagtccagtttgccgctggtccgtgtgtttcccctgtctgcgttgccggcctcgatttttccttttgtcggtgctgcagcaagcttgtcgcgtcagtcaaggcgctttgtgcctctttgatttgcgcgatggcttccagtcgctgttcctgcaacacgcgagtatccat

SEQ ID NO: 138833 - DNA, 1557 bp, Homo sapiens
tttgtgcgtcgcgataaagagggtaacgaaatcatcgttgccagtaactttacgccggtaccgcgtcatgattatcgcttcggcataaaccagccgggcaaatggcgtgaaatcctcaataccgattccatgcactatcacggcagtaatgcaggcaatggcggcacggtacacagcgatgagattgccagccgacggtcgtcagcattcactaagcctgacgctaccaccgctggccactatctggctggttcgggaggcagaatgacacaactcgccattggcaaacccgctcccctcggcgcgcattacgacggtcagggcgtcaacttcacacttttctccgctcatgccgagcgggtagaactgtgtgtctttgacgccaatggccaggaacatcgctatgacttgccagggcacagtggcgacatttggcacggttatctgccggatgcgcgcccgggtttgcgttatggttatcgcgttcatggcccctggcaacccgccgaggggcatcgctttaacccggcgaagttgttgattgatccttgcgcgcggcaaattgacggggagtttaaagataacccgctgctgcacgccggtcataatgaacctgactatcgcgacaacgccgccattgcgccgaaatgcgtagtggtggttgatcactatgactgggaagatgatgccccgccgcgcacgccgtggggcagcaccatcatttatgaagcccatgtcaaaggattaacgtacttgcacccggagatcccggtcgagatccgtggcacttataaagccctcgggcatccggtgatgatcaactatttgaaaccattgggcattaccgcgctggaactgctgccagtggcgcagtttgccagtgaaccacgtctgcaacgcatggggctaagtaactactggggttacaacccggtggcgatgtttgcgctgcatccggcgtatgcctgctcgccagaaacggcgctggatgagtttcgcgatgcaatcaaagcactgcataaagcgggtatcgaagtcattcttgatatcgtgctcaaccatagtgcggaactggacctcgacggcccgttattctcgctgcgtgggatcgataaccgtagctattattggataagagaagacggcgattatcacaactggaccggttgcggcaacacgctcaatttgagtcatccggcggtggtggattatgccagcgcctgcctgcgttattgggtagaaacctgccacgtcgatggtttccgctttgatctggcggcagtcatgggccgtacgccagagttccgtcaggatgcgccgttgtttaccgctatccagaactgcccggtgctctcgcaggtgaagttaattgctgaaccgtgggatatcgctcctggtggttatcaggtgggaaatttcccgccgctgtttgccgagtggaacgatcatttccgcgatgctgaccgtcgtttctggctacattatgatttgcctctgggggcgtttgccgggcgtttagctgactccagcgatgtccgaaacgtaatggtcgtatga

SEQ ID NO: 138834 - DNA, 2808 bp, Homo sapiens
  misc_feature (1)...(2808): n = a,t,c or g
gcctacaaacggaacataaccgtaggtcggataaggcgtttacgccgcatccggcagccgttgcctgatgcgacgctgtgcgtcttatcaggcctacaaacggaacataaccgtaggctgaacggcctgaaacatcaggacttgttcgcgatcctcggtcaactggccgaacgtcgccttgattatggcgatctctattttcagtcgagctatcacgaatcctgggttttagaagaccgcattattaaagatggttcttacaacatcgatcagggcgtaggtgtgcgtgcaatcagcggtgaaaaaaccggatttgcttacgctgaccaaatcagcctgctggcgctggaacagagtgcgcaaacggcgcgcaccatcgtccgtgatagtggtgatggttgccgcgaagcggacaagcgcgtacaggaagtgactgccagcctcagtggtgtctatgaattaattttggttgcggccaccgacggcacgctagcggcggatgtccgtccgctggtgcgtctttccgtgagcgttctcgtcgaagaagatggcaaacgcgaacgcggtgccagtggcggcggcggtcgttttggttatgaattcttccttgccgatctcgacggcgaagtccgtgcggatgcatgggcaaaagaagcagtgcgtatggcgctggtcaatctttctgccgttgctgcaccagcgggcaccatgccggtagtacttggcgcaggttggccgggcgtgctgttgcatgaagcggttggtcacggtctggaaggcgacttcaaccgccgtggcacttcagtatttagtggatcaaaggttttcgcgttagcgggatgcgtcgtgttgatgacgaccatgcccgacagttgcaattcgtggcaaaaatgcaggaataaaacaatgaacaagaagattcattccctggccttgttggtcaatctggggatttatggggtagcgcaggcacaagagccgaccgatactcctgtttcacatgacgatactattgtcgttaccgccgccgagcagaacttacaggcgcctggcgtttcgaccatcaccgcagatgaaatccgcaaaaacccggttgcccgcgatgtgtcgaagatcatccgtaccatgccaggcgttaacctgaccggtaactccaccagtggtcagcgtgggaataaccgacagattgatattcgcggtatgggtccggaaaacacgctgattttgattgacggcaagccggtaagcagccgtaactcggtgcgtcagggctggcgtggcgagcgcgatacccgtggtgatacttcctgggtgccacctgaaatgattgaacgtattgaagttctgcgtggtccggcnagtgcgcgttatggcaacggcgcggcgggcggcgtggttaacatcattaccaaaaaaggcagcggcgagtggcacggctcctgggacgcatatttcaatgcgccagaacataaagaggaaggtgccaccaaacgcactaactttagcctgaccggtccgctgggcgacgaattcagcttccgtttgtatggcaacctcgacaaaacccaggtgacgcgtgggatatcaaccagggccatcagtccgcgcgtgccggaacgtatgccacgacgttaccagccggcgcgaaggggtaatcaattcttccatattcatactaagatcctcggaaaatggacgatatttgcgcattacctggcacaggtccgggacaaaatctcagcggctgcaaagcgttgcggccgttctccagaagaaattacgctgcttgcagtcagtaaaacaaaacctgcgagcgccatcgcagaagccattgatgccgggcagcgtcaatttgagcatttcgactggtgtcataccatcgaccgtttgcgcatcgctacccgtctcaacgaccagcgcccggcagaacttccccctcttaacgttctgattcaaattaacattagtgatgaaaacagtaagtccgggattcaactggctgaactggacgagctggcagctgcggtcgctgaactaccgcgtttacgtctgcgcgggttgatggcaatccctgcgcctgagtcagaatatgtaaggcagtttgaagttgcacgccaaatggctgtagcatttgccggactgaaaacgcgctacccgcatatcgacacgctctctctgggaatgtcggacgatatggaagccgccattgcggcaggtagcacgatgtttgtagtgaaggtaacgcagccaattatcgggccactgcgccgcgttattccggcaatggggccaattgacagcgcctcgctgctggttgcctatattctcagttttatcaaagccatcgtgctgtttaaagtggtgaccttcctgccaatcatctggattgccggtttactgattctgctgaaaaccatcggcctgctgattttctgggtcctgctggtgatggcgattatgagctggtgcaagacagaattaattatctttcgcgatcttccggcgctcggtaaactgttcagccagtcgccgccggtcgcgctggatcaacgcttctttggtgacttcattctcgaagccagcgccaaatatgctgatgttgcgctgatatatggcctggaagacgggcgagaatatcgtgataagcagcaaacgctgggtgaaattgtccagcagttgttaggcgcggcaccggttgtcggtgaccaggtagagtttgccgggatgatctggacggtggccgagaaagaagataatgaagtgttgaagattggcgtacgggtggctgaagaggaagctgaatcttaa

SEQ ID NO: 138835 - DNA, 1051 bp, Homo sapiens
atggcgattacgcccgataacaccattatggcgctggcagaagattttctttcccgacgccagtacggcattcgttttcgtaatctggaaactggtaactggtacccggaactgctggataacgttgaacccagctttgtctgggcaaatgactcctggattttctactatgttcgcaagcatccgatatttatcgacctgaccacggaagaactggctgcgtcgagctatcacgaatcctgggttttagaagaccgcattattaaagatggttcttacaacatcgatcagggcgttggtgtgcgtgcaatcagcggtgaaaaaaccggatttgcttacgctgaccaaatcagcctgctggcgctggaacagagtgcgcaagcggcgcgcaccatcgtccgtgatagtggtgatggtaaagtacagacgctgggcgcggtagagcatagcccgttgtatacctcgggtagatccggctggcaaagcatgagccgtgaagagaagctggatatcctgcgtcgcgtcgataaggttgcccgcgaagcggacaagcgcgtacaggaagtgactgccagcctcagtggtgtctatgaattaattttggttgcggccaccgacggcacgctagcggcggatgtccgtccgctgggcaaagtgctgctggttgggcagtcaccaaatgctgaactttcggctcgcgccaaacagattgctatgggcgtagacggtgccaacgaagtgtataacgagattcgtcagggccagccgattggtctgggcgaagcatctaacgatacgtggatcaccaccaaagtgcgttcgcagctcttaaccagcgacctggtgaaatcgtccaacgtgaaagtgaccaccgaaaacggtgaagtgttcctgatggggctggtgactgaacgtgaagcgaaagcggcggcagatattgccagccgggtgagcggcgtgaagcgggtaaatcgcacgctgtttctcggctatgcggtgatgttctccgagctgatcctcgcacctgtaacaccgtccaactcggcgcgtg

SEQ ID NO: 138836 - DNA, 2079 bp, Homo sapiens
atgatccccctggccagtgcatatcagggacagtgtgactggcggactgcgatcttcaagctggaacagctcccacaacttcgaatcagcctccagctctatcagatcaagctgttcctccgggagtcgatcagcgaatttaacgccgacgccgacaaagttcatcagatgcgcctgcgtaaagagagcggcatctgggaactgtttatccctggggcgcataacggtcagctctataaatacgagatgattgatgccaatggcaacttgcgtctgaagtccgacccttatgcctttgaagcgcaaatgcgcccggaaaccgcgtctcttatttgcgggctgccggaaaaggttgtacagactgaagagcgcaaaaaagcgaatcagtttgatgcgccaatctctatttatgaagttcacctgggttcctggcgtcgccacaccgacaacaatttctggttgagctaccgcgagctggccgatcaactggtgccttatgctaaatggatgggctttacccacctcgaactactgcacattaacgagcatcccttcgatggcagttggggttatcagccaaccggcctgtatgcgccaacccgccgttttggtactcgcgacgacttccgttatttcattgatgccgcacacgcagctggtctgaacgtgattctcgactgggtgccaggccacttcccgactgatgactttgcgcttgccgaatttgatggcacgaacttgtatgaacacagcgattcgcgtgaaagctatcatcaggactggaacacgctgatctacaactatggtcgccgtgaagtcagttactttctcgtcggtaacgcgctttactggatgaaccgttttggtattgatgcccgtaaagagggggagtggatcccgaacgaatttggcgggcgcgagaatcttgaagcgattgaattcttgcgtaataccaaccgtattcttggtgagcaggtttccggtgcggtgacaatggctgaggagtctaccgatttccctggcgtttctcgtccgcaggatatgggcggtctgggcttctggtacaagtggaacctcggctggatgcatgacaccctggactacatgaagctcgacccggtttatcgtcagtatcatcacgataaactgaccttcgggattctctacaactacactgaaaacttcgtcctgccgttgtcgcatgatgaagtggtccacggtaaaaaatcgattctcgaccgcatgccgggcgacgcatggcagaaattcgcgaacctgcgcgcctactatggctggatgtgggcattcccgggcaagaaactactgttcatgggtaacgaatttgcccagggccgcgagtggaaccatgacgccagcctcgactggcatctgttggaaggcggcgataactggcaccacggtgtccagcgtctggtgcgcgatctgaacctcacctaccgccaccataaagcaatgcatgaactggattttgacccgtacggctttgaatggctggtggtggatgacaaagaacgctcggtgctgatctttgtgcgtcgcgataaagagggtaacgaaatcatcgttgccagtaactttacgccggtaccgcgtcatgattatcgcttcggcataaaccagccgggcaaatggcgtgaaatcctcaataccgattccatgcactatcacggcagtaatgcaggcaatggcggcacggtacacagcgatgagattgccagccacgttcgtcagcattcactaagcctgacgctaccaccgctggccactatctggctgggcacagtggcgacatttggcacggttatctgccggatgcgcgcccgggtttgcgttatggttatcgcgttcatggccctgcaacccgccgaggggcatcgcttaacccgcgaagagcgtctaacagtcgccatctctaaggccttcagattcaggcaacgctattcgaagcggagtagactctccattcgcactcggcaagacgttagtgtcatcattgtccacggcttaccattgcatgacaaggctaaaccacatgacggcaacgtgaacgactcttaa

SEQ ID NO: 138837 - DNA, 3215 bp, Homo sapiens
atgggggctgagaagcagctcatcccagatggctgcggggtcagttacatccccagtagtggccctctggacaagtggcgggccctgctcttcatacagccggactacagagctgacccggtttatcgtcagatcatcacgataactgaccttcggattctttacgactacactgaaaacttcgtcctgccgttgtcgcatgatgaagtggtccacggtaaaaaatcgattctcgaccgcatgccgggcgacgcatggcagaaattcgcgaacctgcgcgcctactatggctggatgtgggcattcccgggcaagaaactactgttcatgggtaacgaatttgcccagggccgcgagtggaaccatgacgccagcctcgactggcatctgttggaaggcggcgataactggcaccacggtgtccagcgtctggtgcgcgatctgaacctcacctaccgccaccataaagcaatgcatgaactggattttgacccgtacggctttgaatggctggtggtggatgacaaagaacgctcggtgctgatctttgtgcgtcgcgataaagagggtaacgaaatcatcgttgccagtaactttacgccggtaccgcgtcatgattatcgcttcggcataaaccagccgggcaaatggcgtgaaatcctcaataccgattccatgcactatcacggcagtaatgcaggcaatggcggcacggtacacagcgatgagattgccagccacggtcgtcagcattcactaagcctgacgctaccaccgctggccactatctggctgggcgtcaacttcacacttttctccgctcatgccgagcgggtagaactgtgtgtctttgacgccaatggccaggaacatcgctatgacttgccagggcacagtggcgacatttggcacggttatctgccggatgcgcgcccgggtttgcgttatggttatcgcgttcatggccccctggcaacccgccgaggggcatcgctttaacccggcgaagttgttgattgatccttgcgcgcggcaaattgacggggagtttaaagataacccgctgctgcacgccggtcataatgaacctgactatcgcgacaacgccgccattgcgccgaaatgcgtagtggtggttgatcactatgactgggaagatgatgccccgccgcgcacgccgtggggcagcaccatcatttatgaagcccatgtcaaaggattaacaaacttgcacccggagatcccggtcgagatccgtggcacttataaagccctcgggcatccggtgatgatcaactatttgatacaattgggcattaccgcgctggaactgctgccagtggcgcagtttgccagtgaaccacgtctgcaacgcatggggctaagtaactactggggttacaaggccggtggcgatgtttgcgctgcatccggcgtatgcctgctcgccagaaacggcgctggatgagtttcgcgatgcaatcaaagcactgcataaagcgggtatcgaagtcattcttgatatcgtgctcaaccatagtgcggaactggacctcgacggcccgttattctcgctgcgtgggatcgataaccgtattgatgttgatatttgtcgtggtgttgccgctgctgtatttggtgacgacacgaaagtgaaatataccccgctcactgcaaaagaacgcttcaccgctttacagtcaggggaggtggatttgctctcccgtaatacgacctggacttcatctcgcgatgccgggatgggaatggcatttaccggcgtcacttattacgacggcattggcttcctgacgcacgataaagcggggctaaaaagcgcgaaagaactggatggcgctaccgtctgtattcaggcgggtactgataccgaactcaacgtcgccgactacttcaaggcaaacaatatgaagtacacaccggtgactttcgatcgctctgacgaatcagcgaaggcactggaatctggtcgctgcgatacgctggcctcggatcaatcacaactgtatgccctgcgcatcaaattaagcaacccagctgaatggattgtcttaccggaagttatctcaaaagaaccgcttggtccggtagttcgtcgtggcgatgatgaatggttctcgattgcctacaaacggaacataaccgtaggtcggataaggcgtttacgccgcatccggcagccgttgcctgatgcgacgctgtgcgtcttatcaggcctacaaacggaacataaccgtagcctgctggcgctggaacagagtgcgcaagcggcgcgcaccatcgtccgtgatagtggtgatggtaaagtacagacgctgggcgcggtagagcatagcccgttgtatacctcggtagatccgctgcaaagcatgagccgtgaagagaagctggatatcctgcgtcgcgtcgataaggttgcccgcgaagcggacaagcgcgtacaggaagtgactgccagcctcagtggtgtctatgaattaattttggttgcggccaccgacggcacgctagcggcggatgtccgtccgctggtgcgtctttccgtgagcgttctcgtcgaagaagatggcaaacgcgaacgcggtgccagtggcggcggcggtcgttttggttatgaattcttccttgccgatctcgacggcgaagtccgtgcggatgcatgggcaaaagaagcagtgcgtatggcgctggtcaatctttctgccgttgctgcaccagcgggcaccatgccggtagtacttggcgcaggttggccgggcgtgctgttgcatgaagcggttggtcacggtctggaaggcgacttcaaccgccgtggcacttcagtatttagtggacaggtcggggagctggtggcttcagaactgtgtaccgtggttgatgatggcacgatggtcgatcggcgaagatcgggggggatggagagaaagtaccccagcagtaaagtgctgatgttttttttaaaggagtctcgctctgtcatcagcctggagtgcagtggcaggataaaggtggtaccgagctcgattgtaatcatgtcatataagtggcagagcaagaaaccaaacccaacactatccactttcaatgctgttaccgtccagctgtggccccagctcaaatcaccactaagaaaacagttttatttcagcaaacagcaaaaatacattgggaagaacgccggcctagttcccaagtag

SEQ ID NO: 138838 - DNA, 1272 bp, Homo sapiens
atgaagcagattaaagaactccagcgcctgctcggcaagaaaacatggaaaatgaactcgtcaaagaagccgttgaatatggacgggccaaaagtggatagcgcacgcgcccttattggccggggatggggaacccacaaattctaccgatgcgactgcataaagccaactatcaagacgaacacgtcttccagaggcaatgaaaaaaatccagatggtagccacaacaacattcacaacagctggtttcgtctacttacaagccaaaacatgtgcaaagtgcctgagagcccagccattttggtggatgtgggccagtcagcagagactgtgcaatctgttctgactgttaaggtggagcatcccatcttgcgcattgccgtcgccggttatgcatgccagcgccagagttgcttactcgccatgcggcatccccagtacgcgattaactcttcaaaggtggttaagccttgctctacggccaggcagccgtttcaaaaagcgtacgcatacccgcctgtcgtgcgtgcgtttccagcgatcaacgtcggtattagcggaaataagctgacgaatgaccggcgttatgggagaacttcaaataaggcctggggcagcggcgatggccatacattgtctgaatgtggatgggctccccttgctgccggcgacaatgtgggcaaagtttcgtaccagacgctgggctattaccagcgcatcctgggctacatcttctatccgattgcatggggatgggtgttccttccagtgaagcactgcaagtgggcagtatcatggcgccaaactggtttccaacgagttcgttgcgatgatggatctgcagaaaatgcttccacgctctctccgcgtgctgaaggcatcatctctgtgttcctggttccttcgctaacttctcttcaatcgggattatcgcagcggctgcggaatgccgcgactggtttggcatacttgccgcacaaacacttgctgtacgcgccgcattacgggttgtacaagcggaaagagattgcgtcttgtcgatggaacagcatcagtgcgcccgggggcggcagcgctgaatggcgactacatatgggattgatcctcatacctaacgctgaacggctggaccgatttgcgcaaacggcagacgagatacgcatgctgaccggggattcgtgtcgatctgctgtttttccaccgccgtttacgtgcctgctaatcgtcgatctaaaagtgggcaaattcagctatagcgatgcggacagatga

SEQ ID NO: 138839 - DNA, 312 bp, Homo sapiens
tgagcggatacattcgggaccgaaccgaatccccggtcagcaatgcgtatctcgtctgccgtttgcgcaatcggtccagccgttcagcgtctctgctgtcggttagctcaaaatcagtaactgacagagccccggcattactgccgaagtatccagttcttcgggcttaccaatatgggccagaattgctaccagttatcgtgagagtaattcatcggcacgttaaatcatatcaggcgaataccacaacccttaagttagcgcttatgggggtcagccccccgcctgccagccgtgccgtccgggagggag

SEQ ID NO: 138840 - DNA, 504 bp, Homo sapiens
tggggcagcggcgatggccatacattgtctgaatgtggatgggctccccttgctgccggcgacaatgtgggcaaagtttcgtaccagacgctgggctattaccagcgcatcctgggctacatcttctatccgattgcatggggatgggtgttccttccagtgaagcactgcaagtgggcagtatcatggcgccaaactggtttccaacgagttcgttgcgatgatggatctgcagaaaatgcttccacgctctctccgcgtgctgaaggcatcatctctgtgttcctggttccttcgctaacttctcttcaatcgggattatcgcagcggctgcggaatgccgcgactggtttggcatacttgccgcacaaacacttgctgtacgcgccgcattacgggttgtacaagcggaaagagattgcgtcttgtcgatggaacagcatcagtgcgcccgggggcggcagcgctgaatggcgactacatatgggattgatcctcatacct

SEQ ID NO: 138841 - DNA, 1623 bp, Homo sapiens
ctacaatgcaggccctacaggggtgggtggtaagtccaacaaacaggatttcatcttctggagctcctggatttcatcgtcccatgggccacagtgcagcgacagaacctcctcagctttctgtattgtgctcagggcttcgggtactgcaaacaggaagctctcggcgtcacgctggcaccccgacagccgctgaacagctcgctcgcaatccagcccgcgcagaaaacccatcatgtcaaagcgcattccttctgcagttaaccagcgcaatcctcgccagtgaacccggacgatataatcagcttctccaaaagcaagtgagcggatacattcgggacgcgaaccgaatccccggtcagcaatgcgtatctcgtctgccgtttgcgcaaatcggtccagccgttcagcgtctctgctgtcggttagctcaaaatcagtgaaagcaagtgtttgtgcggcaagtatgccaaaccagtcggcggcattccgcagccgcttcaggagagccacgtcagataatgttgcaacgtcatggagctgcctgctgtcggtaacgatgctccctttaggtcctgtgtgttgtatggtggtcatcgcctgagcgttacactgaagctgtaacatgtgtctcagcatcgccactccccaaatagtcacgtcaggacacaattcaggtgtcactgctgctttaagctgattgttgctttcacgtaaacagatgtccttgttactaatcttatcacaaagcttcgttatgattttgcgaacatcctcaaatcccaccaaaagagtcaacctcagggcaatgtggcaaaagacacccagtgtgagaagcagccctcccagaggacattctgtcctgtggtagagctcccaggcctgctgcaaacactcctggctgcaatacttggcataactgcatccgtcacacggaactgtggccaaagtgtgcttcaaacatcggtgacaatagaggtccccattggtgactctggtgtcccatttgctgtctaggccgtgatgcggtggtggcagttctcctgggttgagaacactcacaaaagcatcctcctgcaccaggagctctcctgggagaatatcttttgtggcaacgagacagcgaccttttaaaggatctacgcataagccgatggatgatgaggcattggaaagttgttcattctcctccctcagcgctgcatcctcaagggttttggccagagctgctgggaagctttctgtgagactgtccttttcttgcatcttcattttcagacgatggaggtttctctgcagagtctgagggaggacatctgctagggctggtgtggctgtgaagttcctttcaagatcactgatggtctggcttgcctcctgcagtctccccagggccaccagacattctgctttacgtaacataatcttgggttgcaacctttctggatacccatgtgtctgtgctctgttaatgtctttaagacacgtctcatactgacccaggtggaagagggctgccgagcggttagcatgacacagtgacatgtcctcagtgttaggccttgaatgtgacactccctgcaaaacaatgaactggttaaaagtataaatggacaccagcat

SEQ ID NO: 138842 - DNA, 1143 bp, Homo sapiens
tcacaggtagaagaagagcccaaacttgaactcagggctgttgggttgaacactgccctttttactgtagcgcaccaccttcatctttgacctctcatctggttggcctttcattctctggcaggtgttgtctccaaactgaaggtgtctgcaggttgggctgtttgcacagattcccactggcaggatgggctgtttgcacagattcctcacctgcaggatgggcgtttgcacagattcctcacctgcaggatgggccgtgactctcataagaatgtctccaatttttccagccagttccaaatcaaccctgtcagcagcccttttgaacacctcctgcctgcactccagggacttggagcctccaggggctttcagaagcggtggccctgttttgctgtgaggagcaaactcctcagcctgctctccatcgaggccccatttctgtactgaggcctccagagctgagcaagaccaaagccctgtaagctccagatgaccatttttgttatctccacaacgagttagttcttcttttcggatccggcacttcgaatccccggtcagcaatgcgtatctcgtctgccgtttgcgcaatcggtccagccgttcagcgtctctgctgtcggttagctcaaaatcaggaaaggtatgaggatcatatcccatatgtagtcgccattcagcgtgccgcccccgggcgcactgattgctgttccatcgacaagacgcaatcttttccgcttgtacaacccgtaactgcggcgcgtacagcaagtgtttgtgggcaagtatgccaaaccagtcggcggcattccgcagccggtaatgacatccccccggggccgtaagccagccccagacgtagcaagttgcagcatcacgaatttcgcggcggcgggttagagccccggcattagtgccgaagtatccagttcttcgggcagaaacaccaattcttgggacccagcccaaacttgctgaatcgaaattctgggggcggagcccagcgatctgcattctaagagccctcaagtgattctgacacgcgttcaggtttgggaacactgcttttcctgcccaggctggtttcacttcttgactttctgccagggctgaaggtgtttccccgctccaccgcat

SEQ ID NO: 138843 - DNA, 1947 bp, Homo sapiens
ttaaggccgtttaacttgggtgtaaagtccttgtgacaagttttgctttccaactggtttcccggggcgcttttttccagcctcaacctctttcttgaaccggggaggctttcggattgttattgaacgatcggcttcgcttaggggggccccggaagcccttactggaaaataaccgcgcatgcaaaacgcgggcccttgttttacccggttttccctggcaccgttggtataccgtgggccccgtttgtgtggcttccaccacttgatctccctgtttcgcttgccgggtttagtccccccgttgaagtgtcctgatggatgaatccgatatttacagaaacaatcgtgagaggtttttttgtgtttttcttttggtgggtgtgccggcacgtggggcttgtttgggtggtggtggcgggtgcgggctttgtgttcggtaccttcggtcggctggctggggttgtgggcgccggttcccgtgtgtcggtgataactggtcagcaattctggcccatattggtaagcccgaagaactggatacttcggcacgtaatgccggggctctaacccgccgccgcgaaattcgtgatgctgcaactctgctacgtctggggctggcttacggccccggggggatgtcattacgtgaagtcactgcatgggctcagctccatgacgttgcaacattatctgacgtggctcttctgaagcggctgccgaaatgccgccactggtttggcatacttgccggacaaacacttgctcacattcgcgtgttgccggtgatcatccgcgcaattggtttcctgctctccaaagtcaacggcatgggcaaactggaatcctttaacgccgtcagctccctgattctgggtcagtctgaaaactttattgcctataaagatatcctcggcaaaatctcccgtaatcgtatgtacaccatggctgccacggcaatgtccaccgtgtcgatgtccatcgttggtgcatacatgaccatgctggaaccgaaatacgtcgttgctgcgctggtactgaacatgttcagcacctttatcgtgctgtcgctgatcaatccttaccgtgttgatgccagtgaagaaaacatccagatgtccaacctgttcgaaggtcagagcttcttcgaaatgctgggtgaatacattctggcaggtttcaaagttgccattatcgttgccgcgatgctgattggctttatcgccctgatcgccgcgctgaacgcactgtttgccaccgttactggctggtttggctacagcatctccttccagggcatcctgggctacatcttctatccgattgcatgggtgatgggtgttccttccagtgaagcactgcaagtgggcagtatcatggcgaccaaactggtttccaacgagttcgttgcgatgatggatctgcagaaaattgcttccacgctctctccgtgtgctgaaggcatcatctctgtgctcctggattccttcgctaacttctcttcaatcgggattatcgcacgtgcagttaaaggcctgaatgaagagcaaggtaacgagggttctcgcttcggtctgaagctggtttaccggtctaccctggtgagctgtgctgtctgcgtcaatcgcagcactggtgctgtctgaccatacttaaaaaagccggggataatttccataagcgctaacttaagggttgtggtatgacgcctgatatgatataacgtgccgatgaattactctcacgataactggtcaggaattctggcccatatgggtaatcccgaagaactggattattcggcacgtaatgccggggctctaaaccgccgccgccgatatagactgtctttgaaggtttcaagttccttccctgcaaccgtctgtctgctgctgtgaagaggacaagcccagcatcttctgggcatcctctgtcacacagcgtcat

SEQ ID NO: 138844 - DNA, 2649 bp, Homo sapiens
ttaaggagataattcgttgtttatatttaaatttagagctctcagttccccttttaaaatatcctctggcaacgtgaatgtataatggcccaacatattgatatgcccgtgcatcaggggagatagccgagcgatatcttcatctataatttcttcgccattacggcgcatccagctcaacgcttcctccatatagagcgtgttccacagaaccactgcattagtaaccaggcccagcgcccccagttgatcttcctgcccttcacgataacgctttctgatctctccgcgttgtccgtaacaaatcgcacgagccacagcgtggcggccttctcctcgattaagctgcgtcaggatccgccgacgataatcttcatcatcaatataattgaggagatatagcgttttgtttacacgccctacttccataattgcctgtgccagtcctgcatcggcaagccggggggaaaactgataccccagtagacaaaacagaccgaaaataatatcgctgctacccgcagtgtctgtcatgatatcaactggatacagccctgtctgctgctcaagaagtccttccagtacaaaaatcgaatcccgtaatgtaccgggtaccacaatgccatggaacccagagtactgatcagatacgaagttataccaggtgatgcctcgtccagaaccaaaatattttctgttagatcctgagttgatggtcttcactggtgtgacaaagcgcatgccgtcagctgatgccacttctccacctccccaacgaccagcaagctccagtgtggactgaaaatcaaccaggcgggcattggcgctgaccagcgtttctgcacgaaggtaattctgtttcacccaactgagccgatggcgggtcagtgctggtatattgtgctttatcagcggttccagtccgatattacaggcttcagccatcaataccgcacataaactgatgtgcaaatcttgcgctcgagcaccagattcactgacatgcgcaaactcatgtgtaaatcctgtctgggcatctatctcaagtaacagttccgttaaatctaccggtgggagtagctgtttgatccgattatttagacgaagcaatgatggtggctcttcctgtttctccagacaactgatagtcagggatggatatttaccttcattacagatatgaacttccgcattcttttcaaatcgtgatgccacggctttccaggtctcatccagctgaatagccagttgttgcacacctttacgtccatcgacaggatgtcccagtgcccgacagacaggaatacgctgagtctgccactcttcaccttgcaacaacttctcgcgaggatctccccagcgatcactgcacgctgtatccgtccctccgcatcgtatacgaggcgtttcccagggaccggtgataatatgttcaggcgcatcatcaaggatgcgctttttcgaaccattcagttctgccagataatgaatcgcagccagtacatgttcacctgccggtgccgcacggaaatgcaggtcccgcaacaccgccggaagaaaacgtttaacccgaccgtactgctcaaccatttcgtcatggaaattattgttctgtggacgagcaagttcattaaccttgcttacagattctgccagtctgtttttgggtacgcacttgaagataacctgcctgagatctgggacatctgtattatcatccagcaacaatgcacatgcccgcgccagtaacaatgcggcctgatcaagatctttcagtgtcctgagtctttttttttgcccggttttctttgcttcgcggataatgtccagaattagcatatcaagcacatcaacggcatcgtctaatgccgttatttcctgtgctttaacgaatgcagtaagtacagcaagctttctctgctgtggcattcgagcgatatattttaccgacgccatgccagcataacgagccagattacgcagttgaatggcaggcagaccggaaaagttcagtcgggaaaactcaagacttcgtaatcggatatatcgttccagcgcttcattaaacgcaggtccactgactgtaacagggccttttttcaactgttccagtgctgatacacgctgaccttccggaatgaccagaagctccatcacttgagctgcctgccatttgttcggcagtgcggccagctttttccacagccgctgatttgccctttcacgaatttcactgatgagacgtactagtgtggttgctccgggcagtaataccttattttgaagcaaccatgcagtggcaaaatcaaacatcagacccggtcgctcattactgagccacgcccgggtatatagcagacgcttcaggcggaaagaccatggaaaatcaccaaattcatgatagccgtaatattccttaattaatgcagtatgttctctaagggtagtgtcccgttcagcatagcgggagagaacttctggacggtggatattaagctgtaccgcgacaaaatgttgaacaccaggcagaacctgagttaaatccgtcagaaatgttcccagaaaacgggctgtggtgagctgaagcgcaatgcccagcctattatgtgtgccccgtcgttggttaatgataggccagatcccgttcat

SEQ ID NO: 138845 - DNA, 3707 bp, Homo sapiens; identical to SEQ ID NO: 127949

SEQ ID NO: 138846 - DNA, 275 bp, Homo sapiens
gaatccaatggaaagaccaggacattgagaatctgtaccaaaacctggggattaagctaagcggcgtttatcaggataaaggcatccctgcgctggaagaatggctgacatcggcgctaaccacgccgtttgaactggaaacccgcttaatcctgcaggtcttggctcgccatcgccagacgatgcgccacttgtacagcgacctcaccgttacctgccatcagcatgtcggctttcgaatccaccagcacggaacggcgcacggtatcggacca

SEQ ID NO: 138847 - DNA, 551 bp, Homo sapiens
tggcgtcgattcccgcacagctggaccagtggcgcgaggtatcgcaggacccacctgtctggctggatatcgaaatcactactgatgagtatctgcatgatattcagcgcaaaatccaggcattaaccgaatcattgcctgtcgaagtattgctggtacgtcggagtcgtgaacagcgcgagcgtgtgttagccagccaacagcgtgaaaccctcagcgaactcagcgtcgaagaggtgttcaatcgccgtctggcactggaagaactggatgaatcgcagcagcaacgtctgcagcatcttttcaccacgacgttgcataccctcgccggagaacacgaagcatgaaaattctcagcctgcgcctgaaaaacctgagctcattaaaaggcgaatggaagattgatttcacccgcgagccgttcgccagcaacgggctgtttgctattaccggcccaacaggtgcggggaaaaccaccctgctggacgccatttgtctggcgctgtatcacgaaactagggttctgatctaacgtttcacaatcgcaaaat

SEQ ID NO: 138848 - DNA, 2203 bp, Homo sapiens
atgaacgggatctggcctatcattaaccaacgacggggcacacataataggctgggcattgcgcttcagctcaccacagcccgttttctgggaacatttctgacggatttaactcaggttctgcctggtgttcaacattttgtcgcggtacagcttaatatccaccgtccagaagttctctcccgctatgctgaacgggacactacccttagagaacatactgcattaattaaggaatattacggctatcatgaatttggtgattttccatggtctttccgcctgaagcgtctgctatatacccgggcgtggctcagtaatgagcgaccgggtctgatgtttgattttgccactgcatggttgcttcaaaataaggtattactgcccggagcaaccacactagtacgtctcatcagtgaaattcgtgaaagggcaaatcagcggctgtggaaaaagctggccgcactgccgaacaaatggcaggcagctcaagtgatggagcttctggtcattccggaaggtcagcgtgtatcagcactggaacagttgaaaaaaggccctgttacagtcagtggacctgcgtttaatgaagcgctggaacgatatatccgattacgaagtcttgagttttcccgactgaacttttccggtctgcctgccattcaactgcgtaatctggctcgttatgctggcatggcgtcggtaaaatatatcgctcgaatgccacagcagagaaagcttgctgtacttactgcattcgttaaagcacaggaaataacggcattagacgatgccgttgatgtgcttgatatgctaattctggacattatccgcgaagcaaagaaaaccgggcaaaaaaaaagactcaggacactgaaagatcttgatcaggccgcattgttactggcgcgggcatgtgcattgttgctggatgataatacagatgtcccagatctcaggcaggttatcttcaagtgcgtacccaaaaacagactggcagaatctgtaagcaaggttaatgaacttgctcgtccacagaacaataatttccatgacgaaatggttgagcagtacggtcgggttaaacgttttcttccggcggtgttgcgggacctgcatttccgtgcggcaccggcaggtgaacatgtactggctgcgattcattatctggcagaactgaatggttcgaaaaagcgcatccttgatgatgcgcctgaacatattatcaccggtccctgggaaacgcctcgtatacgatgcggagggacggatacagcgtgcagtgatcgctggggagatcctcgcgagaagttgttgcaaggtgaagagtggcagactcagcgtattcctgtctgtcgggcactgggacatcctgtcgatggacgtaaaggtgtgcaacaactggctattcagctggatgagacctggaaagccgtggcatcacgatttgaaaagaatgcggaagttcatatctgtaatgaaggtaaatatccatccctgactatcagttgtctggagaaacaggaagagccaccatcattgcttcgtctaaataatcggatcaaacagctactcccaccggtagatttaacggaactgttacttgagatagatgcccagacaggatttacacatgagtttgcgcatgtcagtgaatctggtgctcgagcgcaagatttgcacatcagtttatgtgcggtattgatggctgaagcctgtaatatcggactggaaccgctgataaagcacaatataccagcactgacccgccatcggctcagttgggtgaaacagaattaccttcgtgcagaaacgctggtcagcgccaatgcccgcctggttgattttcagtccacactggagcttgctggtcgttggggaggtggagaagtggcatcagctgacggcatgcgctttgtcacaccagtgaagaccatcaactcaggatctaacagaaaatattttggttctggacgaggcatcacctggtataacttcgtatctgatcagtactctgggttccatggcattgtggtacccggtacattacgggattcgatttttgtactggaaggacttcttgagcagcagacagggctgtatccagttgatatcatgacagacactgcgggtagcagcgatattattttcggtctgttttgtctactggggtatcagttttccccccggcttgccgatgcag

SEQ ID NO: 138849 - DNA, 2600 bp, Homo sapiens
atgcctgtcgactttctaacctctgaccaaaaacagaattacggttgttatgctgcagaacctaatgacgtgcaactggcgcgctattttcatcttgatgaacgggatctggccttcattaaccaacgacggggcaaacataataggctgggcattgcgcttcagctcaccacagcccgttttctgggaacatttctgacggatttaactcaggttctgcctggtgttcaacattttgtcgcggtacagcttaatatccaccgtccagaagttctctcccgctatgctgaacgggacactacccttagagaacatactgcattaattaaggaatattacggctatcatgaatttggtgattttccatggtctttccgcctgaagcgtctgctatatacccgggcgtggctcagtaatgagcgaccgggtctgatgtttgattttgccactgcatggttgcttcaaaataaggtattactgcccggagcaaccacactagtacgtctcatcagtgaaattcgtgaaagggcaaatcagcggctgtggaaaaagctggccgcactgccgaacaaatggcaggcagctcaagtgatggagcttctggtcattccggaaggtcagcgtgtatcagcactggaacagttgaaaaaaggccctgttacagtcagtggacctgcgtttaatgaagcgctggaacgatatatccgattacgaagtcttgagttttcccgactgaacttttccggtctgcctgccattcaactgcgtaatctggctcgttatgctggcatggcgtcgaacaataatttccatgacgaaatggttgagcagtacggtcgggttaaacgttttcttccggcggtgttgcgggacctgcatttccgtgcggcaccggcaggtgaacatgtactggctgcgattcattatctggcagaactgaatggttcgaaaaagcgcatccttgatgatgcgcctgaacatattatcaccggtccctggaaacgcctcgtatacgatgcggagggacggatacagcgtgcaggttattcactatgtttgctggaacgccttcaggatgcactgcgccgccgggacatctggcttgaaaacagtgatcgctggggagatcctcgcgagaagttgttgcaaggtgaagagtggcagactcagcgtattcctgtctgtcgggcactgggacatcctgtcgatggacgtaaaggtgtgcaacaactggctattcagctggatgagacctggaaagccgtggcatcacgatttgaaaagaatgcggaagttcatatctgtaatgaaggtaaatatccatccctgactatcagttgtctggagaaacaggaagagccaccatcattgcttcgtctaaataatcggatcaaacagctactcccaccggtagatttaacggaactgttacttgagatagatgcccagacaggaattacacatgagtttgcgcatgtcagtgaatctggtgctcgagcgcaagatttgcacatcagtttatgtgcggtattgatggctgaagcctgtaatatcggactggaaccgctgataaagcacaatataccagcactgacccgccatcggctcagttgggtgaaacagaattaccttcgtgcagaaacgctggtcagcgccaatgcccgcctggttgattttcagtccacactggagcttgctggtcgttggggaggtggagaagtggcatcagctgacggcatgcgctttgtcacaccagtgaagaccatcaactcaggatctaacagaaaatattttggttctggacgaggcatcacctggtataacttcgtatctgatcagtactctgggttccatggcattgtggtacccggtacattacgggattcgatttttgtactggaaggacttcttgagcagcagacagggctgaatccagttgaaatcatgacagacactgcgggtagcagcgatattattttcggtctgttctggctactggggtatcagttttccccccggcttgccgatgcaggtgaggcggtgttctggcgggtgaataaatcggcaaactacggagtactggataagttggcccgaggatatgcagatctgtcaaaagcggagagtcagtgggatgagatgatgcgaaccgctggttcgctgaagttgggtacaattcatgcgtcagaactcattcgctctttactgaaaagctcgcgcccatcaggactggcacaggcaattatggaagtagggcgtgtaaacaaaacgctatatctcctcaattatattgatgatgaagattatcgtcggcggatcctgacgcagcttaatcgaggagaaggccgccacgctgtggctcgtgcgatttgttacggacaacgcggagagatcagaaagcgttatcgtgaagggcaggaagatcaactgggggcgctgggcctggttactaatgcagtggttctgtggaacacgctctatatggaggaagcgttgagctggatgcgccgtaatggcgaagaaattatagatgaagatatcgctcggctatctcccctgatgcacgggcatatcaatatgttgggccattatacattcac

SEQ ID NO: 138850 - DNA, 2358 bp, Homo sapiens
atgaccctcaagactcctgatgcccggcaatcagtaggagccaacagcctaagggatattccctgcacccgccgggccggccttgcatcagagagtcgggacgccgcactcacgattttgcaggtcctgggggacggcgggcccagcgtgcaggtcctggctctgcggagctggccacggttcctagtgagaggctggctgggctttttctcacatgtccttgtcacacggcgatgtggccgggctgggatcacccttccctctcttcggaagagccctccggtctggtgtggagcagaaagtcccacagacaaccccagacacacactgattgcagtcggtagatcgactctgaggatccccgactgtgcccgagtggtgcacgttaaggtggctgtcatggtcaattttacgttctgtgtattttacaataaaaaccccaagcaggaggacggaagtccaatggcttctaaggatataaccctcaccttcgttctaccagctacaagcagaccatcatcatccctcccacggtccctgtccccacacgtcccacggggctacgttggtgcggtcaccgtccccacgcgttcccacggggcaagaccacgccatgggagggagctgggtgcggtgggaaagccccaccctgggagtccaggatctgggtcactgaaagaccttgagcgggcttacaaaaacttcttccggaagcgggctgcttttccccgattcaaaaagcggggacagaatgatgcattccgctacccgcagctggggtggggcgttggtgggatcgaagcagaagccgcaatgttaggccagccggtttccatgcttatcccggatgtagtgggcttcaaacttaccggaaaattacgtgaagctcccccagggaagctctgccctctccccagcgcagtttcgtcaggctgttccactctggagcgagtggtttaccgtcctgacatcaaccaggggaactatctgaccgctaacgacgtatccaaaatacgtgttggcatgacgcaacaacaagttgcgtacgcattgggtacaccgctgatgtccgatccatttggtacgaatacctggttctatgtcttccgccagcaaccaggtcatgaaggtgtaactcagcaaacgctgacgctgacctttaacagtagcggggacccgaagctgagagagcctcaagtggctcaggctacagcagcaggggtggcttttgtccctgacgtgggccccccacccccttcttccatgtctgggagtggcagcaacggcccctttctgtgtgggaagcagaccacgtttgaaggagggatgagggagcctgccctcgcatggtggccagggcacgtaactgcaggccaaagctgctggaactgcgggcggaaagccagtgagacgtgcagcggctgcaacgcggcacgctactgcgggtccttctgccagcatcgggactgggagaagcatcaccacgtgtgtggccagagcctgcagggccccacagccgtggtggccgacccgcgcgttatgaaaaagatcctgacaaccccgatcaaagctgaagatctgcaagatattcgcgtcggcgatgtgatctacctgaccggtacgctggtgacctgccgcgacgtttgtcaccgccgtttgatcgaactgaaacgtccgatcccttacgatctcaacggcaaagcgattttccacgctggccccatcgtgaaggcggaccggcagagttatccaagtgcttcaggtcagcagcagctcccccggctcgcgttaggaatgcagattccgggtgcgccccggggatcctctagagtggtgcgcgggcaggcgagggcgagcaggccgccggaaggaccaggcacccggggcaaggctgtgaggacaccagccctgtgggatcctataaacctgctgatcattaaagataatcagattgtgtatcgcaaagcctggggagcggcgaaaaagtacgatggcagcgtgttgatggaacagcctgtcaaagccaccaccgggacgctgtatgacctggcctcaaacaccaaaatgtacgccacgaacttcgccctgcaaaagctgatgagcgaaggcaaactgcatcctgacgatcggattgcgaaatatattccggggtttgccgataatccgcccagtggacgggaggggccccgccatccagcctttaacctgggtggtccctggaccgaccagcctgtggggggtgtggcgggcaccggtgtgcccagcagcttgttttgtgtaactggggcctccaatctgctccccgtggtccccctgggacggcgcttccagttgggggggctgttggctcctcagtga

SEQ ID NO: 138851 - DNA, 2172 bp, Homo sapiens
atgctgagtatgctgcgttccagcgacgtgctggcgcgactcggtggggatgaatttggtctgctgctaccagactgtaatgttgaaagcgcgcgttttatcgctacacgcattatcagtgccgtgaatgactatcactttatatgggaaggccgtgtgcatcgggtaggtgccagtgccgggattaccttgattgatgacaacaatcatcaggcggcagaagtgatgtcgcaggctgatatcgcctgttatgcctccaaaaatggtggccggggccgggtgacggtttacgaaccgcagcaagctgccgcacatagcgaacgggcggcgatgtcgcttgatgaacagtggcggatgattaaagagaatcagttgatgatgctcgcccacggtgtcgcttcgccacggatcccggaagcgcgtaatttgtggctgatttcacttaagctctggagttgcgaaggcgagattattgatgaacaaacatttcgtcgtagcttcagcgatccggcgcttagccatgctcttgaccgccgggtattccacgaatttttccagcaggccgcaaaagcgggttgccacgcgcggttctggcagagtcgggttgaatgcggcgttttcagcgtagctgccactgaaaatacgaccgtctttacattccagcgcgacaccgcttggcgacttactcttaatatccaccgtccagaagttctctcccgctatgctgaacgggacactacccttagagaacatactgcattaattaaggaatattacggctatcatgaatttggtgattttccatggtctttccgcctgaagcgtctgctatatacccgggcgtggctcagtaatgagcgaccgggtctgatgtttgattttgccactgcatggttgcttcaaaataaggtattactgcccggagcaaccacactagtacgtctcatcagtgaaattcgtgaaagggcaaatcaccggctgtggaaaaagctggccgcactgccgaacaaatggcaggcagctcaagtgatggagcttctggtcattccggaaggtcagcgtgtatcagcactggaacagttgaaaaaaggccctgttacagtcagtggacctgcgtttaatgaaacgctggaacgatatatccgattacgaagtcttgagttttcccgactgaacttttccgggatgagaaggcatgaggatagtaaaaattgtacgatcgttagctcggtaccccagatccgccaatttgtagccgataaatgccacaacaccggaccagacgatcgtaatggcgatgctttccagctgtaccagcaactgatggcccatcgtcacaccttcagcgaagcccacgccgcccagcgagctggcggcaaaaatcccggtcatgatacagccgacaatgccacaaacgccgtgcacaccgaagacatcgcagggatcatccacccgcagcaagcgtttgagcatggaaaggaaatcagtagacgggctgatctgcagctcagcagtcgcccttggaggatccccgcgatccgcgcttccggcagccagctggtgacactggcgatgaaacgtgtcgacttgcgccagcacaacgacgctatcctcgaaccgcttatcgcggcgggtgtgaccctgctgccaaatacatccggggcgaaaacagcggaagaagccattttcgccgcccatctggctcgtgaagcgttaggcacaaactggttaaaattagagattcaccctgacgcccgctggctgttgcccgatcccatcgaaaccctgaaagccgccgaaacgctggtacaacagggatttgtcgtgctgccttactgcggggccgatccggtattgtgtaaacgtctggaagaagtcggctgtgcagcggtgatgccgctcggcgcgccgattggctcgaatcagggactggaaacccgcgccatgctggagattattatccagcaggccacagtgccggtggttgtcgatgctggcatcggcgttcccagccatgccgcgcaggcgctggaaatgggggccgacgcggtgttagtgaatacggcgattgccgtcgcggacgatcccgtcaacatgccgaaggcatttcgtctggcggtagaagcaggcctactggcacttgaaacgactatgagctcggtacctagataa

SEQ ID NO: 138852 - DNA, 717 bp, Homo sapiens; identical to SEQ ID NO: 130170

SEQ ID NO: 138853 - DNA, 5052 bp, Homo sapiens
ctattctggaccgttattgtattccaccatgcggttgtagttagtgtcattcagattgcgctgtatttcgtcgttatcatctacgctgccggtattacccgcaaacggacgattagagatcaccgcatcggcccacggtttagccgtgttaaaaccttcgttgatggcgctatcacggatcaccacctgaccgttggtattggcatcaacatccagcgagcggcccagttgcgccacaccatcaccgaaagcattgaaacggctgtttacggcgaggaaaccgtagtaaatgttggacagcgtagccggtgcaaacacatacgcttcttgctgagtacgtgagttcaccacgcggaattcggtgttatcgaacaccactgcgccgcgaccagaaacgatatccacatccccttcaatgtagctgttggtcaccagcgtacgcggctgacgattcgtttccagacggttctggtcaccatcagtacgcagtgccaccgccggatggttacctgcatctacgtatcgcccagcgtgttttcgatggtcagattttgcagacacgttgatgacagcattcaggtcaatcagcaaaagtgtattggctgtaaatcctgcgtggtggcctgtcctgcccgcagcataaccatataccgcagtggaatgaactggtgaaagccggaaacactcgacgccgccgtcgagctttctcaccagaccaacaacctgccgcatattaccggacgcgtctgcccgcaagaccgtttgtgtgaaggcgcctgtactattcgcgatgagcacggcgcggtaactatcgtcaacattgaacgataagctcatgtcaccaaagtggacaatcgggtgacgattatcgtagcaggtccggcagggctggcctgtgcggatgttttgacccgctatggcgtgggggtgacgatgtacgatcgccatccagaaatcggtggcttgctcactatcggcataccttctttcaaactggataaatccctgttggcacgccgtcgggaaatcttcagcgcgatggggattcacttcgaactcaattgtgatgtgggtaaagatgtctctttggattcgcttttggaacaatacgacgcggtcttcgttggcgtaggcatttacctttccatgaaagcgggttttcccaatgaagatgcccgagcgtttatgttgcctacattgccatataggtggcggtggcactggcaatataaagctgttcttcattgtgtaattcaacgcgggcgacggcgactttattgcctgcacgcaacaggctactagtagcagtaaaacgctcgcccctgcctgggcgcagataatcaacgcgaagatcaatggtccccatccgcgataccgctggcgtagttcatcttcactgatggtttcgtggcgggttaaggtacttcccacgcacaccagaccggcggcgacatccagcgccgacgcaatgaccccgccgtgcaaaatgctttgcgcccagttgcccaccatcattggctgatttttaaaggccagctgtgcgactctttttcgtaacgctccagttccatccccaatgcgcggtctcgtcatcacttcaagttgctgttcgcgggtttgcgtcgagttaaggcacgccgccgccacgccgttggcttgcagttgatccacctgatctttcatcaacgaaatcagcggtgaaacaaccacggtaaggccgtttagcaataaggcagggatttgatagcaaagggattttccgccaccagtgggcatgacgacgaggcaatcgcggccggaaagcacagtgtcgataatttcttcctggccggggcgaaactgttggtagccaaaggtttcttgtaaaacctgtttagctccggactccagattcaacacttccgcctgcgccacattcaccccgattgcaagacgataaggcagctcactccccatcgggaagagatccagcaacgcgccgcgcgtggcgtattcgccgtgctccatcacctggtcaacatggcgataaccggcgctgtccagttgggttcgtaatgcatctcgtgacaggcgctgaccttttttcatcaccagcgcatgaccgtggagaaaactgtgtgggcaaacgcgctgcataagcgtattcaccggaacaatcagtacgccacgctgcatcgtcggtagctggtaaagggtggaaaggcgcgaggagataatgtcctgatgaggcgaaaaactgtcgtagggaagagtttcccagtccgccagattcatcaccatttgatcggtaaactggctgatttcatcatgcaaacgcagagcattttgcatatctggtgcaatgagtaccaccggaccggcgtgacgttcggcaatttccgctaccagcgttgcacaagctgcgccggttaactcgcccagcagacgctgctcacccgatgcctgcaggtcccaggttgggaacacatgataatcacacaggctatattgtttcaacacaggatacgcatagcggctcaccgacttgaggccatcatcaaaggtaatcaccaccgctcgcgcagggagattgatcttattcttcacgtagccttccagctgcaccatgctcagtgtcgcgtatcccctgtcacgcagccaggccatctggttattgaaagcgcgtaccgatgtggtcgtcgaagtatggcgaaaacgggtgttttcttcgtcgcgcagaatatggtgataggttagcaccgacaggccattatcgggttgggcatccagtgcgctgatataggccagtcgatcgccaatacggatctgataccaggtttgatttaacctgtctttcagtttatgcaaaatcgggtagcgcaaattgtccgccagtaccccaaatggcgcacttcccgcactcggcgcgttatagaccggcgtatctttccaggtaactaagttctgattactcagcggcttgttgaggtcgcccaaaccgtcttcaactttttgtcgcccctgaaccggctcgagatgacctttatcgataaaacctttgccaaagccaaaattaaatgcgtaataacttgcggcagtgggctccacggcaatgatttgtccggcccgaatattccccacggtcaccatcttgtcaccaatttgcgcccagaccgcagcattttcgatggtttgcatataacgggcaggtaacgcggcactgacacttgcggtaaacagcatcagcaggagaataacagcttgtttgtacatgaaaaaataaccgagggtgaaacaacgcgcgctcaacaatcggtttgcccgcgcagcgttcgccagtggtttatcttcaatacgtacgtcatagtagaactgggtagtcgggtcgaacatacaggtgttgatgtagtccgcgagctgctgtgccaactggcgatagcgtttggcctcttctggcttaccgaggatggttgccatctccgccagataatggttatcgctgtacatatagctggcctgatccaccgactcctgcaatagcgagtagcccagcaacgttccgtcctgactgccgttttcggcgatttcaccgtccagtcgccggcgattgctatttctgacgttagtcatatttcctgcgtcggtaatgatttcggtttcaatgatattttctcccgctacgttgaagcggtaggtcgcgaaggcgatgtactgctggggatctccacctccggtaactctgcaaacgtgatcaaagcgatcgcagcggcgcgtgagaagggaatgaaagtgatcaccctgaccggtaaagacggcggcaaaatggctggcacggcggatatcgaaattcgcgtaccgcactttggttatgccgaccgcattcaggagattcacattaaagtgatccatatcctgatccagttgattgaaaaagagatggttaagtaagtcctgctttaatttcataagacgccccagcgtcgccatagtgcgttcaccgaatacgtgcgcaacaaccgtcttccggagactgtcatacgcgtaaaacagccagcgctggcgcgatttagccccgacatagccccactgttcgtccatttccgcgcagacgatgacgtcactgcccggcgggttgagaagcggtgtaagtgaactgcagttgccatgttttacggcagtgagagcagagatagcgctgatgtccggcggtgcttttgccgttacgcaccaccccgtcagtagctgaacaggagggacagccgcggttttaagcgaatcgatggagactgcgccgacaaacttattaccgcgttcgataacgtagccatattcgcgatcttcatcctgcaataatttcagtgccgaacgtgggccgaagccaggggttttacgaattaagccattcggtgtccggcgggcaatatctttcgcactgaatacctgactaatatcaacgccacggaagaaggtacggacataatcattcgccggattattgagaatttcatccggtgtgccgacctgtaccacttcaccattttgcataatggcaattcggtcgccaatacgcatggcttcatcaagatcgtgggaaataaagacaatggtgcgctgatgtttcgcctgtaattttaccagctcatcctgcatctcggtgcgaattaatggatcgagcgccgagaaggcttcgtccattaataatatatccggattaatggcgcgggctaatcccacacgttgacgcatcccgccagagagttcatccgggtagctgtgggcataattttccagcccgacctgacgcagtgcatcaagggctttttcccggcgttcttcggcattaattccggccaattccataccgaacgcagtattgtccagcacggtcatatgcggcattaaggcaaaggactggaagaccatcgcaatcttttttctgcgcacctcacggagttcggcgtcggatattttggcaatatccacaccatcaatcagcacttgcccgcgggtgggttcaatcaggcgattgagaaggcgtaccattgtggatttacccgagccggataatcccat

SEQ ID NO: 138854 - DNA, 3009 bp, Homo sapiens
atgcctgtcgactttctaacctctgaccaaaaacagaattacggttgttatgctgcagaacctaatgacgtgcaactggcgcgctattttcatcttgatgaacgggatctggccttcattaaccaacgacggggcaaacataataggctgggcattgcgcttcagctcaccacagcccgttttctgggaacatttctgacggatttaactcaggttctgcctggtgttcaacattttgtcgcggtacagcttaatatccaccgtccagaagttctctcccgctatgctgaacgggacactacccttagagaacatactgcattaattaaggaatattacggctatcatgaatttggtgattttccatggtctttccgcctgaagcgtctgctatatacccgggcgtggctcagtaatgagcgaccgggtctgatgtttgattttgccactgcatggttgcttcaaaataaggtattactgcccggagcaaccacactagtacgtctcatcagtgaaattcgtgaaagggcaaatcagcggctgtggaaaaagctggccgcactgccgaacaaatggcaggcagctcaagtgatggagcttctggtcattccggaaggtcagcgtgtatcagcactggaacagttgaaaaaaggccctgttacagtcagtggacctgcgtttaatgaagcgctggaacgatatatccgattacgaagtcttgagttttcccgactgaacttttccggtctgcctgccattcaactgcgtaatctggctcgttatgctggcatggcgtcggtaaaatatatcgctcgaatgccacagcagagaaagcttgctgtacttactgcattcgttaaagcacaggaaataacggcattagacgatgccgttgatgtgcttgatatgctaattctggacattatccgcgaagcaaagaaaaccgggcaaaaaaaaagactcaggacactgaaagatcttgatcaggccgcattgttactggcgcgggcatgtgcattgttgctggatgataatacagatgtcccagatctcaggcaggttatcttcaagtgcgtacccaaaaacagactggcagaatctgtaagcaaggttaatgaacttgctcgtccacagaacaataatttccatgacgaaatggttgagcagtacggtcgggttaaacgttttcttccggcggtgttgcgggacctgcatttccgtgcggcaccggcaggtgaacatgtactggctgcgattcattatctggcagaactgaatggttcgaaaaagcgcatccttgatgatgcgcctgaacatattatcaccggtccctggaaacgcctcgtatacgatgcggagggacggatacagcgtgcaggttattcactatgtttgctggaacgccttcaggatgcactgcgccgccgggacatctggcttgaaaacagtgatcgctggggagatcctcgcgagaagttgttgcaaggtgaagagtggcagactcagcgtattcctgtctgtcgggcactgggacatcctgtcgatggacgtaaaggtgtgcaacaactggctattcagctggatgagacctggaaagccgtggcatcacgatttgaaaagaatgcggaagttcatatctgtaatgaaggtaaatatccatccctgactatcagttgtctggagaaacaggaagagccaccatcattgcttcgtctaaataatcggatcaaacagctactcccaccggtagatttaacggaactgttacttgagatagatgcccagacaggatttacacatgagtttgcgcatgtcagtgaatctggtgctcgagcgcaagatttgcacatcagtttatgtgcggtattgatggctgaagcctgtaatatcggactggaaccgctgataaagcacaatataccagcactgaccgcccatcggctcagttgggtgaaacagaattaccttcgtgcagaaacgctggtcagcgccaatgcccgcctggttgattttcagtccacactggagcttgctggtcgttggggaggtggagaagtggcatcagctgacggcatgcgctttgtcacaccagtgaagaccatcaactcaggatctaacagaaaatattttggttctggacgaggcatcacctggtataacttcgtatctgatcagtactctgggttccatggcattgtggtacccggtacattacgggattcgatttttgtactggaaggacttcttgagcagcagacagggctgaatccagttgaaatcatgacagacactgcgggtagcagcgatattattttcggtctgttctggctactggggtatcagttttccccccggcttgccgatgcaggtgaggcggtgttctggcgggtgaataaatcggcaaactacggagtactggataagttggcccgaggatatgcagatctgtcaaaagcggagagtcagtgggatgagatgatgcgaaccgctggttcgctgaagttgggtacaattcatgcgtcagaactcattcgctctttactgaaaagctcgcgcccatcaggactggcacaggcaattatggaagtagggcgtgtaaacaaaacgctatatctcctcaattatattgatgatgaagattatcgtcggcggatcctgacgcagcttaatcgaggagaaggccgccacgctgtggctcgtgcgatttgttacggacaacgcggagagatcagaaagcgttatcgtgaagggcaggaagatcaactgggggcgctgggcctggttactaatgcagtggttctgtggaacacgctctatatggaggaagcgttgagctggatgcgccgtaatggcgaagaaattatagatgaagatatcgctcggctatctcccctgatgcacgggcatatcaatatgttgggccattatacattcacgttgccagaggatattttaaaaggggaactgagagctctaaatttaaatataaacaacgaattatctccttaa

SEQ ID NO: 138855 - DNA, 1186 bp, Homo sapiens
atgattgatgtcttagggccggagaaacgcagacggcgtaccacacaggaaaagatcgcaattgttcagcagagctttgaaccggggatgacggtctccctcgttgcccggcaacatggtgtagcagccagccagttatttctctggcgtaagcaataccaggaaggaagtcttactgctgtcgccgccggagaacaggttgttcctgcctctgaacttgctgccgccatgaagcagattaaagaactccagcgcctgctcggcaagaaaacgatggaaaatgaactcctcaaagaagccgttgaatatggacgggcaaaaaagtggatagcgcacgcgcccttattgcccggggatggggattgcacgtcattctcagacgaacgcctgcaggtcctgtcaggtagtacgcctgatatgcctgtcgactttctaacctctgaccaaaaacagaattacggttgttatgctgcagaacctaatgacgtgcaactggcgcgctattttcatcttgatgaacgggatctggccttcattaaccaacgacggggcaaacataataggctgggcattgcgcttcagctcaccacagcccgttttctgggaacatttctgacggatttaactcaggttctgcctggtgttcaacattttgtcgcggtacagcttaatatccaccgtccagaagttctctcccgctatgctgaacgggacactacccttagagaacatactgcattaattaaggaatattacggctatcatgaatttggtgattttccatggtctttcccgcctgaagcgtctgctatatacccgggcgtggctcagtaatgagcgaccgggtctgatgtttgattttgccactgcatggttgcttcaaaataaggtattactgcccggagcaaccacactagtacgtctcatcagtgaaattcgtgaaagggcaaatcagcggctgtggaaaaagctggccgcactgccgaacaaatggcaggcagctcaaactattatcataggtaggccaaatgaggataaccggatgaaaaaatgggcagtaataatttctgcagtcggactggcgtttgctgtttccgggtgttccagtgattacgtcatggcgaccaaagatggccgtatgattttgaccgatggaaaacctgaaattgatgatgataccgggctg

SEQ ID NO: 138856 - DNA, 4707 bp, Homo sapiens
ctgcaaactcgctgtcagcgattgcacttgttccggcgtgaaagcgtgacgccgctggctgcgcttgcagcttctccagctctgtgcgggccgatttgtgctgctcaaaaaccatcgccgagatttgcccgtagatttcagtgccggttaactcctcgagcaattccgcgcgttctttgggtttggcattcaggaaggcagcaaattgcccctgcaaattaccgtcgggttggttacgcgcccgattctggctccagaatgcacggtacgcttcacctttcacttcaaactccacctccgccagacattcggcggtatcgcgggtcatgagatcattttgcgattgtgaaacgttagagagacgcggagtttcgtgatacagcgccagacaaatggcgtccagcagggtggttttccccgcacctgttgggccggtaatagcaaacagcccgttgctggcgaacggctcgcgggtgaaatcaatctcgcgctgttcacgactccgacgtaccagcaatacttcgacaggcaatgattcggttaatgcctggattttgcgctgaatatcatgcagatactcatcagtagtgatttcgatatccagccagacaggtggctcctgcgatacatcgcgccactgttccagctgtgcggtaatcgacgccagatcgcctttcagcactgccatgggttgcgttaccggtacgttcaggttttccacgctctctaatttgccgtttgaaaatgtcacgcgatggacatatttagacctgcaggaaacactacggtcatcagtgtgagcggatccattgcttcgtcgagacgcaatccttcgacataaggatatttcagcccacgcccgataaagcggtcctgctgccctggcatttcgcattgctgttaggttcgcaagcgccagcaatttgtgcagcggaaaaccaatccacggcaccaccatcgaccacgcttccacgcagcgcatacgataaatacgctcttccagcgggaagcgacgggttaagtcatcatgatcgagggtcaatggttttgccacttcgccgctgattttcagtgtccatggatcggttttcaggctaccagcattagcggcgggatcggctttatccagcccgaattcatagaagttattataaccggaaactttatctgctggcgtcagtggcaggttattttgccaggcggcaggcttgctgaactccagcgcttttccggcgggggcgggcgggcgatcgttccctttaaaccagctaagcagatcggcatgcgcagcgtgaggcaaagaaagtgcagttgcactgatgcccagtgcttttaacacctgccgacgcttcataaagaataccgactcggccgtaacatctgattcttttaaaaattgatgacctgcaggcatgaagggagtctgggtgatgacccgggtattaatggacagctgtgggacgtcaaccgtattgatgtcaccgcgcacgaaggaacgtgggaacgctggacggtacgcgcggacgagccgcaagcgttccatattgaaggcgtaatgttccagatccgtaacgtgaatggcgcgatgccgttcccggaagacagaggctggaaagataccgtttgggttgacggacaagtggagctgcttgtttatttcggtcagccttcctgggcgcacttcccgttctacttcaacagtcagacgctgttctcctggccgcagtactgggccgcctgttttggaccggcaccgtttttgccgatgtctcgtgaagagatggatcaacttggctgggatagctgcgacatcattttggttactggcgacgcgtatgtcgatcacccaagcttcgggatggcgatttgcggtcgtatgctggaagcgcagggctttcgcgtcgggatcatcgcccagccggactggagcagcaaagacgactttatgcgtctgggtaaaccgaatctgtttttcggtgttactgctggcaacatggattcgatgatcaaccgttataccgccgatcgccgtttacgtcatgacgatgcctacacgccggataacgtcgcgggtaagcgcccggatcgcgccacactggtttatacccagcgttgtaaagaggcgtggaaagatgtaccggtgatcctcggcggtattgaggctagtctgcgccgtaccgcgcattatgattactggtccgataccgtgcgccgttccgtgctggtggattcgaaagccgacatgctgatgtttggtaacggtgagcgtccgctggtggaagtggcgcatcgtctggcgatgggcgagccaattagtgaaatccgcgatgtgcgtaataccgcgattatcgtgaaagaggcgctgcctggctggagcggcgtggattccacccgtcttgatacccctggaaaaatcgacccaatcccgcatccgtatggtgaagatttgccgtgcgcggataacaaaccggtggcaccgaaaaagcaggaagccaaagccgtaaccgtgcagccaccgcgcccgaaaccgtgggaaaaaacctacgtgttgctgccttctttcgagaaagtgaagggcgataaagtgctgtacgcccatgcttcgcgtattctgcaccacgaaaccaacccaggctgtgcccgcgcattgatgcaaaaacacggcgaccgctatgtgtggatcaacccgcctgctattccgctttctaccgaagagatggacagcgtttttgcgctgccatacaagcgcgtgccacatccggcctatggcaatgcccgtattccggcttacgaaatgaattacggttgttatgctgcagaacctaatgacgtgcaactggcgcgctattttcatcttgatgaacgggatctgggcttcattaaccaacgacggggcaaacataataggctgggcattgcgcttcagctcaccacagcccgttttctgggaacatttctgacggatttaactcaggttctgcctggtgttcaacattttgtcgcggtacagcttaatatccaccgtccagaagttctctcccgctatgctgaacgggacactacccttagagaacatactgcattaattaaggaatattacggctatcatgaatttggtgattttccatggtctttccgcctgaagcgtctgctatatacccgggcgtggctcagtaatgagcgaccgggtctgatgtttgattttgccactgcatggttgcttcaaaataaggtattactgcccggagcaaccacactagtacgtctcatcagtgaaattcgtgaaagggcaaatcagcggctgtggaaaaagctggccgcactgccgaacaaatggcaggcagctcaagtgatggagcttctggtcattccggaaggctgttccactctggagcgagtggtttcccgtcctgacatcacccaggggaactatctgaccgctaacgacgtatccaaaatacgtgttggcatgacgcaacaacaagttgcgtacgcattgggtacaccgctgatgtccgatccatttggtacgaatacctggttctatgtcttccgccagcaaccaggtcatgaaggtgtaactcagcaaacgctgacgctgacctttaacagtagcggtgtgttgaccaatattgataacaaacctgcgctgagtgcattgcttatcagagatatgcccccatatgttgaggcatatcctaacgagaatctgacaaccgttatgcctgaacaatatcgttatacgctgcccgtcaaagcgggtgagcagcgtctgctgggcgagttaaccggcgcagcctgtgcaacgctggtagcggaaattgccgaacgtcacgccggtccggtggtactcattgcaccagatatgcaaaatgctctgcgtttgcatgatgaaatcagccagtttaccgatcaaatggtgatgaatctggcggactgggaaacatcttccctacgacagtttttcgcctcatcaggacattatctcctcgcgcctttccaccctttaccagctaccgacgaatccaggggggggtactgattgttccggtgaatacgcttatgcagcgcgtttgcccacacagttttctccacggtcatgcgctggtgatgaaaaaaggtcagcgcctgtcccgagatgcattacgaacccaactggaccgcgcccgttatcgccatgttgaccagccagcgcacgctggcggcaaagtgctggagatgatcgtggtggggatcgccacctggctggggttcttgctcttcgggctgaactattcgctgctgctggcagtgctggtcggcttctcggttcttattccgtacattggcgcatttgtggtgaccattccggtggttggcgtggcgctattccagtttggcgcaggtactgaattctggagctgcttcgcggtgtatctgattattcaggcgctggacggcaacctgttagtgccggtgttgttctccgaagcggttaacctgcatccgctgcatcaccgggagcagattggcggtaataaaatggctgaccgtcagtgccggaaaattgtctgcgctactgtgcgccagctgccagaaggggggaggggcgaaatggcgaatggcaatggcgaacggaatcacaaacaaattggcgatacagtgctcaaagccactgggagcaaacagggtgatgggcaaaatcatggcgacgattttgtcgcgtaa

SEQ ID NO: 138857 - DNA, 2634 bp, Homo sapiens
  misc_feature (1)...(2634): n = a,t,c or g
atgcaggaaaagcaggtcctagcagcctatgtgcagccctccagtgaaggccaaagtcggtctcgccgcgctcgccgggtgtcccagtgtcaccaacactcggccgccgccgccagcttggcgcgcaccgccgcctccgccaccgccgacagcgcgcatcctccgtgtccccgctccgccgcccgagcaggtgccactatgcacgtgaagaagtacctgctgaagggcctgcatcggctgcagaagggccccggctacacgtacaaggagctgctggtgtggtactgcgacaacaccaacacccacggccccaagcgcatcatctgtgaggggcccaagaagaaagccatgtggttcctgctcaccctgctcttcgccgccctcgtctgctggcagtggggcatcttcatcaggacctacttgagctgggaggtcagcgtctccctctccgtaggcttcaagaccatggacttccccgccgtcaccatctgcaatgctagccccttcaagtattccaaaatcaagcatttgctgaaggacctggatgagctgatggaagctgtcctggagagaatcctggctcctgagctaagccatgccaatgccaccaggaacctaagcttttcaattgtgaaccccacaccccatggtccttattgatgaacggaacccccaccaccccatggtccttgatctctttggagacaaccacaatggcttaacaagcagctcagcatcagaaaagatctgtaatgcccacgggtgcaaaatggccatgagactatgtagcctcaacaggacccagtgtaccttccggaacttcaccagtgctacccaggcattgacagagtggtacatcctgcaggccaccaacatctttgcacaggtgccacagcaggagctagtagagatgagctaccccggcgagcagatgatcctggcctgcctattcggagctgagccctgcaactaccggaacttcacgtccatcttctaccctcactatggcaactgttacatcttcaactggggcatgacagagaaggcacttccttcggccaaccctggaactgaattcggcctgaagttgatcctggacataggccaggaagactacgtccccttccttgcgtccacggccggggtcaggctgatgcttcacgagcagaggtcataccccttcatcagagatgagggcatctaccccatgtcggggacagagacgtccatcggggtactcgtggacaagcttcagcgcatgggggagccctacagcccgtgcaccgtgaatggttctgaggtccccgtccaaaacttctacagtgactacaacacgacctactccatccaggcctgtcttcgctcctgcttccaagaccacatgatccgtaactgcaactgtggccactacctgtacccactcccccgtggggagaaatactgcaacaaccgggacttcccagactgggcccattgctactcagatctacagatgagcgtggcgcagagagagacctgcattggcatgtgcaaggagtcctgcaatgacacccagtacaagatgaccatctccatggctgactggccttctgaggcctccgaggactggattttccacgtcttgtctcaggagcgggaccaaagcaccaatatcaccctgagcaggaagggaattgtcaagctcaacatcttcttccaagaatttaactatcgcaccattgaagaatcagcagccaataacatcgtctggctgctctcgaatctgggtggccagtttggcttctggatggggggctctgtgctgtgcctcatcgagtttggggagatcatcatcgactttgtgtggatcaccatcatcaagctggtggccttggccaagagcctacggcagcggcgagcccaagccagttacgctggcccaccgcccaccgtggccgagctggtggaggcccacaccaactttggcttccagccctgacacggccccccgcagccccaacattgggcccctacccaggtgagcaggccctgcccaatccagggcacccgccccccccaactatgactcctggcgtctgcagccgctggacgtcaccgagtctgccagtgagggtgatgccatctaaccctgcccctgcccaccccgggcgggctgaaactcactgagcagccaagactgttgcccgaggcctcactgtatggtgccctctccaaagggtcgggagggtagctctccaggccagagcttgtgtccttcaacagagaggccagcgggcaactggtccgttactggccaagggctctgaagaatcaacggtgctggtacaggatacaggaataaattgtatcttcacctggttcctacccttcgtccctacctgtcctgattccntggtcctgaagaccccctcggaacacccttctcctggtggcaggccacttccctcccagtgccagtctccatccaccccagagaggaaacaggcgggtgggccatgtggttttctccttcctggccttggctggcctctggggcaggggtggtggagagatggaagggcatcaggtgtagggaccctgccaagtggcacctgatttactctagaaaataaaagtagaaaatactgagaaaaa

SEQ ID NO: 138858 - DNA, 2427 bp, Homo sapiens
ctacctctttccctttcgcgggaggattattttgctgctcggtactggcctgaaagcctttttgcacatctcataggcggattcccggtccacctcatcctcatatttgccatacaccggagagtgattaatcaagccattacgctcatcttccgtcaccggccccatccgcgaacaaggcgcgatcaccatcgcacgctccaccacagaagggcttcctttcgcatccagaaaagagatcaacgcctcgccggtgcccagttcctgaatcgccttttcggtatcaaacgccggattggcccgcatggtttgcgccgctgccttcactgctttctgaccttttggcgtaaaagcccgcaaagcatgttgaacgcgattaccgagctgcccgagcacattatccggaatatcagacgggttttgcgaaacgaaccagacgcccacgccttttgagcgaataagccttatcacctgctcaatcttatccagcagtacctgcggggcatcgttaaacagcagatgtgcctcgtcgaagaaaaacaccagttttggtttctccagatcgcccgcttccggcaattgttcatacaactctgaaagcatccacagcaggctggcggcgtacagtttcggcatctgataaagtttctcggcgctgaggatattgataacgcctttaccgttggcatcggtgcgcatccagtcgtactgattctggaaggatttggcgttatcgccgatgtactgggtaattgcccgcagatctttaaagtcgagcagtaacagcccctgatcgtcagcaatgcggaagatgatattcagcacgccagattgcacatcgttgagattcaacagtcgtgccagggttttacccgtccccgttgcgccggtaatcagcccatgacggttagccattcccggcagtaaaaacagttctgtgtccggcgtgcgggcatttaacaggggttcactcatgagatatcctccagtttcctgcctggagtataggcaacgtccggcaaagagaatacgtgtaatgaagagaaaataacctaaagcgtgttgccgtgataaatccatcgcaatatcgtcattggtgcaaaatacaccgtctaaatccgggtttgcgctaagggcatcacgcattaactgcattcctaaatgaatggatgagatggcgcgtggattcatgcgtaatggggaaagattatgcagcatcatcgcatcgcaatacccctgataacgctgttcatcgcgggtgtcatctatctccttcatcttatccatcctcttatccttcctcttcccctccttatcttcatcctcctccgtttcctcggtttcctccgtttcctccgtctccttcttcttcttcttcttcttattattcttcttcttcctcttcttcttcctcttcttcttcttcctcttctttttctttctttctctttcgttctttttctctttactttccttcctccctcccacttgcagcatctggaaataatttttcacaatagtttcagccttttctttctttttaactttgtcttcatctaccctggtttggttcttcttgttcttcttgttcttcttcttcttcttcttcttcttcttcttcttcttcttcttcttcttcttcttcttcttcttcttgttcttcttcttcttcttcttcttcttcttcttcttcttccttcttcttcttcttcttcttcttcttcttcttcttcttcttcttctcttcttcttcttcttcttcttcttccttctctcttcctcttcctcttcttcttcgtcttccttcttcttatcttcatcttttcttcttcttcttcttttcttcttattttcttcttcttctttcttcttcttccttcttctggatctcttcgagactctcataattttaattgatttttttttatgtttttgatgaacgccaagttgatgcctttttttttcccactgggccctgaatatatctccatcaccttcctgaatgcactggggtaaccatctggttttgtaacaagctgagaggagcctggcatgtagtgggcactcgatgaatatggtgagaataacaaagcattcctttgcaatgcagggctcagttgttatggctttcaaagaaggcaatgtaactgacatactgagatcattaaacagcacaggaactgtgcctctattgcagtgactgtcatttggcaagcttgtacccagctgcagcgacaccgagctcctcacagcttcccaaagtgggctggcccctctcacgacagggtcatcgcacaggctccctctgtgagtgagaacatgcgatagttcttgagacagtttgctcagaatgatggtttccagcttcttccatgtccctgcaaaggacatgaactcatccttttttatggatgcatagtattccat

SEQ ID NO: 138859 - DNA, 1260 bp, Homo sapiens
atggcgtttggtctgaagatgcaaaaaatcgccaaagaggtgattgatgagcgggtgaactgggcggcgcaaattctcggcctgcgtgagtacctgaaacgtaagccgggggcgctttccggcgggcaacgtcagcgagtggcgcttgggcgggcgattgtacgcgaagcgggcgtgtttttaatggatgaaccgctctctaaccttgatgccaagctgcgcgtgcaaatgcgcgcagagatcagcaagctgcatcagaaactgaacaccaccatgatctacgtgacccacgatcagaccgaagcgatgaccatggcgacgcggattgtgattatgaaagacgggattgttcagcaagtaggtgcgccgaaaaccgtttataaccaacccgcgaatatgtttgtttccggatttattggatcaccagcgatgaattttattcgcggcacgatcgatggcgataaattcgttacggaaacgcttaaattaaccattcccgaagagaaattagcggttctgaaaacacaggaaagtttgcataagcccatcgtgatgggaatacgaccggaagatattcatccggacgcgcaagaggaaaataacatttccgccaaaattagcgtggcagaattaaccggtgcggaatttatgctctacaccacggtggtcattcctgtggtgtctgtgcaaatgatcaaaaaacacaagatggcacggctccttcccaatggactggccatcaccaccaacaccagccagaagggcaaagagagagataataaaaagaatatgaaaagacaccaggaacaggagaaatcagacagcagtataggggaagtaaaagccacttatgtgaaggggttctcagtggtgaccctagcaagggatttcattaacagaggtgccgacttcctggtgacggaggtggaaaatggtggctccttgggcagcaagaagggtgtgaaccttcctggggctgctgtggacttgcctgctgtgtcggagaaggacatccaggatctgaagtttggggtcgagcaggatgttgatatggtgtttgcgtcattcatccgcaaggcatctgatgtccatgaagttaggaaggtcctgggagagaagggaaagaacatcaagattatcagcaaaatcgagaatcatgagggggttcggaggcaagtccccgttgtccctgctccagtcccagcgcagctctccgaagggcatggtccatcctgtgaatgtctgattcccagcccctag

SEQ ID NO: 138860 - DNA, 3300 bp, Homo sapiens
atgcccatcattactcttcccgacggcagtcaacgttccttcgatcacccggtctccgtggccgaggtggcccaatccatcggcgcgggcctggccaaggcgaccctcgccggcaaggtcgacggccgcctgatcatcacgcccaaggacgaggaaggactggagatcatccgccactcctgcgcccacctggtcggccatgcggtcaagcagctctatccgaccgcgaagatggtcatcggcccggtgatcgaggaaggcttctactacgacattttcttcgagcgccccttcacccccgaggacatggcggcgatccagcagcgcatgcgcgagctgatcgacaaggactacgacgtgatcaagaagatgaccccgcgcgccgaggtcatcgagctgttcaaactacaagctgcgcctgatcgacgacatgccggacgagaaggccatgggctgtacttccatgaggagtacgtggacatgtgccgcggcccgcatgtgccgaacacccgcttcctcaaggcgttccaactgaccaagatttccggcgcctactggcgcggcgactcgaagaacgagcagttgcaacgcatctacggcaccgcctgggccgacaagaagcaactggcggcctacatccagcgcatcgaagaggccgagaagcgcgaccatcgccgcatcggcaagcagctcgacctgttccacctgcaggaagaagcgccgggcatggtgttctggcacccgaatggctggagcgtctaccaggtgctcgagcagtacatgcgcaaggtccagcgcgaccatggctatgtcgaagtgcgtaccccgcaggtggtcgaccgcatcctctgggagcgttcgggccactggtcgaactacgccgagaacattgttcacactccttcggaaatcgcgactaccggtcaaaccgatgaactgcccctatccatgctgccggtcgactctagacgctccccccacgcgaagaaaatgaccgatctcttttccagccctgaccacacactcgacgcgcttggcctgcgctgcccggaaccggtgatgatggtgcgcaaaaccgtgcgcaatatgcagcctggcgaaacgttgctgcttatcgccgacgacccggccactacccgcgatattcctgggttttgtccatttatggactacgaactggttgctaaagagacggatggactgccttatcgtcatttgattagtaaaggctccttacagccctaccactatgccagtgaagcaagcctctctcagttctcagagcatgtgaggacaggagtcgatcataatcggcacgcgaacgatatccggttcaccggcaatcagattgagaaaacgcaccatcgccgcttcggcatcgagcatcccttcatccatgttgatatcgataatctgcgcgccgttttccacctattgacgcgcgacatccaacgcctcgctatatttctcttctttgatcagacgcttgaacttaacggaaccggtgacgttggccggacaaacggcaggctacgggaatttccggcaatttacgcggcgctaatccttctactgcacgactcatcgctgcaatatattgtggcgtggtgcacagcaaccgccgacgatattgagaaaacccgcttgcgcccattcacgtatctattttgccatcgtatcggcgtcgagatcactttccctgaaaaactttcgacccgaaaggttcaggtaatggttcccggaaaatctttaatcgggaaatttaaaacgccaaggctgtcaaacatccgttgttaccggaaattccacgccgctttccctcgggtcgagaagatcaccctgaacatgggtgttggtgaagcgatcgctgacaaaaaactgctggataacgcagcagcagacctggcagcaatctccggtcaaaaaccgctgatcaccaaagcacgcaaatctgttgcaggcttcaaaatccgtcagggctatccgatcggctgtaaatctttcgacggtcgtggtaactacagcatgggtgtccgtgagcagatcatcttcccagaaatcgactacgataaagtcgaccgcgttcgtggtttggatattaccattaccactactgcgaaatctgacgaagaaggccgcgctctgctggctgcctttgacttcccgttccgcaataaggtacgttcccatccctcggataccctgcgcctgtggttcaccgactaccgcccggcgcgccgtccgccacgcggtttccgcatccgccgggtgcataccgaggaggactgggcggcgatcaaccgcctgtacctggcgcgcggcatgcttccggtgcagaccgagcgcctcagcccgcgacaccagggcgggccgatctactggctggccgaggacgccgacactggcgtcgcggtaggcacggtgatgggcctcaaccacgccaaggcgttccaggatccggagggcggctccagcctctggtgcctggcggtggacccgcaatgcagccggccgggcgtcggcgaggcgctggtacggcacctggtcgagcacttcatgagccgcgaactggcttacctcgacctctcggtgctgcacaacaaccagcaggccaaggcgctctaccgcaagctcggcttccgcgaactggcgaccttcaccatcaagcgcaagaacggcatcaaccagtcgctgttcctcggccccggcccggaggaagacctcaacccctacgcccggatcatcgtcgacgaagcccaccggcgcggcatcgaggtgcgcgtcgacgacgccgagggcggcctgttcaccctgacccagggcggccggcagatccgctgccgtgaatcgctctccgacctgaccacggcggtgagcatgaccctctgccaggacaaggtcctcacccaccgcgccctgcagcacgccggcctgcgtcagctacagcagcgcctggccggcagcgcggaggaaaacgccgcgttcctcgccgagcacggttcgctggtggtcaagccggtggacggcgagcagggccagggcgtggcggtggacctgcgcacccggaagaggtcgaggaggcatcgaggccgccccatttcattcgggtgctctgagactacacgcggcacgactggcgtctggtattgctacgagtgtgcgcgcatcgtctccgcgcgtatcgcacgctgccacatcgctactatgagccagacgcgcgcagcgcacggggaaacgatcgtgacagaacacgacctcgcgcgctatgtgacacttgcacggaactgctcggaccactaa

SEQ ID NO: 138861 - DNA, 4590 bp, Homo sapiens
ttactgccggaaaacgttgagtttatccacggtccggggtgcccggtgtgcgtactgccgatgggtagaatcgacacctgcgtggagattgccagccatccggaagtcatcttctgtacctttggcgacgccatgcgcgtgccggggaaacagggatcgctgttgcaggcaaaagcacgcggtgccgatgtgcgcatcgtttactcgccgatggatgcgttgaaattcttctgccagcacattacgcttatcccgacgttgcgcagtttgctggaacagccggataacggtatcgatgcgttcctcgcgccgggtcacgtcagtatggtatcggcaccgacgccgagcctgaccgccgttcaggcggcagatggtggtttgcagcatggtgagatcgcctttcaggcataaaaactgcttgggataaagtacgcgggaaagcggccataagcggctaccggagccacctgccatcacaactggatagagtttcgagttctctttatcgagcgtgcgttcggcatattcacgtgccaccgtgttgtgtttgggcagcaggagcgcctgacggatccccgccaccagcgcctcgaccgattccggttcaacgcaaaccgcaatgcccggaaaggtttcgcaaagctgccccagttctgtgtaggcttcagcagtaatcaccgcgttaccgcctactgccagaatattggtcagtttcgacggcaatacggcatctgccgcgccgcgtttttgcaccaccagatggcaatcgcccatcttcagcagtgcgggtaaagcgtcatacgattgcagcgggaaaaattgcatgttgcgcagtccacgctgctgcgccattttttccagccgcgctttgccgccgccctggccgacaatggcaaaattcaccggttcatcgcccagacgatcggcagcttcaataacgttttccagcccctgcttttcaccaatattgccggagtaaagaatgatttttttgttatccggcaggtcaagctggttacgaagggcatcaacatcggcatctgcaacatgctgaaaacgggcaatttccgaccagttggggaagaagatgacgttttccgccgccacgcctttttcgatggctttattcatcatcgaacgcgaaatcgtggagacgttatcgacgttatgcagtccgctacgttcgaacgccgttgccagctgtgccactttgccgcctttgccttttccggcaaggcccagccccagcatggcgtccacttcgtaatcctgaatatgcagcacggtacgcgcaccagagagtttcgccagcaggcgcattcccggcgcgcaaaacagcgttggcaccacgccaataatgcgatccggcttccagcgacgttgcgccatcagcggaaagaaactgctgacggcaaaactgcccagatgcaacaggcgtttcagggtgctcggctgttttggcacatacagcgggcagcgccacaccgtggcggccccctcttctcgtttgtagcgccaggcggaatagttctcgcccacctgccattgcgggtagtaaggcggtgcggtaatgacccgcacctcatgacttgtgccgcagccattacaccatgtcggtaccgctacattgttggcccacagcgctgcggcaaagcagccgccaaacataccgaggatcatcatcccgtcgatgcgggttaatggcgatccttccagatggataattttaaagtaaccccactcttcagcatggacgccgaacagttgcaggagctggccgccccaacgggtaaattcacccgtgacagcccaaaaggtgccagtaatgccaaaatagtaagtagagagaatacccgccgcgatgaccgcagggatgggggcccagaatttaatcaaccaggcgtgtttgaattgctgccatgacatgaatgtagcctcttgaaaggctggcgacatcagggctttaatgccacaatcctcttttcttctcatgcaggacgaatgatgaaaaaactcgcaattgcaggcgcgctcttgttgctggcgggctgtgccgaagtcgaaaactataacaatgtcgtgaaaacccccgcgccggactggctggcgggctactggcagaccaaagggccgcaacgtgcgctggtcagcccggaagcgataggcagcctgattgtcactaaagagggcgataccctggattgccgtcagtggcagcgggtgattgccgtgccgtgtaagttgacattgatgtctgatgatctcactaacgttaccgtaaaacgtgagctgtaccaagctgagcgtgacggttacaccattgactccactggtttccaattggcttgtgatgccgaaagaaaggtgcgcgcgctggaaaaggcgaaagagccgagctttggccaaaaccggtcggttcaaaggttcccgcacccacctgtggccgttcttcgtctccggagatttcttctttccgggcgcaagataattcgcctggtggcgtttatggcaaaatctgcggagtgctgttcgtcgccgggggccgctgttctggtcacccgcatgatgctgggcgataacgctgaagcggttaaccagcatatcgtctggttcccgccagtgagcattaatctcctgcttactattttgctcgcggtcgttgccggtacagtgggatgcctgctgcgtcttccttccggcacgatgctcatcccgatgcatcgaactaccggaatggctgctggcgatggcgtatatggcaattggctggcggattggtcttggtttcgataaacaaatcttactgcgggcactacgcccgctaccgcaaatcctgctgtcgatttttgctctgctggctatttgtgcgggtatggcgtgggggggttcgccatctcgatgaaaaaccttaaagcgaaacagcgccccatgatgcttattctcatccacctgcccccgcgtagcgtaggaaaatcgaggaatctccagtaacgcgtgtgcgagtgcatccagttgcgccgcattgagatctttcgctttatgatttccagtcaacccaacctgccagaggatctccaaccgcaaattattgccaagcctgcgcgctgcattttcgacagctggcgctgctgtatgccgatgtgttgcatgagctggcgcagccgtttcaatgcactgctggcaggcgatgatgtttccggttttgaaaacccggaaggttcgctgaccggggggattcaggccacaggcaattatccgggcaaagcgcgtaatgccagtgaggacagcattcgccagttctggattgatcactgcaaagccagccgtcgcgtttcggcctattttggcgagcaactcggcacaccatcggtgatgaacatctggatcccggatggtatgaaagatatcaccgttgaccgtctcgccccgcgtcagcgtctgctggcagcactggatgaggtgatcaggcgagaagctaaacccaatatcgacgccgttgagagccaattgtttggcattggcgcagagagctacacggttggctccaatgagttttacatggggtatgccaaccagccagccagactgcgctgtgcctggacgccgggcacttccacccgagttgctttgcttgcaacgttcaagccagtccaggttcgctgggacagcgatcacgtagtgctgctggatgatgaaacccaggcaattgccagtgagattgtgcgtcacgatctgtttgaccgggtgcatatcggccttgacttcttcgatgcctcgctgagctgcgcaagctggaagcggcgggcgattacactgcgcgtctggcactgctggaagagcagaaatcgttgccgtggcaggcggtctgggaaatgtattgccaacgtcacgatacgccagcaggtagcgaatgggtatcatttggtccgcccgaaacaggttggccagcgtgaataacatcgccagttggttatcgtttttcagcaaccccttgtatctggctttcacgaagccgaactgtcgcttgatgatgcgaaatgggtgctccaccctggcccggatgctggctttcatgtattcgatgttgatggccgttttgttcttgcgtggatgctgtttcaaggttcttaccttgccggggcgctcggcgatcagccagtccacatccacctcggccagctcctcgcgctgtggcgccccttggtagccggcatcggctgagacaaattgctcctctccatgcagcagattacccagctgattgaggtcatgctcgttggccgcggtggtgaccaggctgtgggtcaggccactcttggcatcgacaccaatgtgggccttcatgccaaagtgccactgattgcctttcttggtctgatgcatctccggatcgcgttgctgctctttgttcttggtcgagctgggtgcctcaatgatggtggcatcgaccaaggtgccttgagtcatcatgacgcctgcttcggccagccagcgattgatggtcttgaacaattggcgggccagttgatgctgctccagcaggtggcggaaattcatgatggtggtgcggtccggcaaggcgctatccag

SEQ ID NO: 138862 - DNA, 1188 bp, Homo sapiens
atgttcaataatcatataatccgtcgacgttgtttcacgatagatgacaacgtcgtgcttaacaaaggtgacgttttacaagtcagcggcgatgcccgccgcgtaaaaaccatcgccgatcgcatcggctttatctcgattcacagccaggtcactgacctgctggcattctgcgccttctttgttattgggctgatgatcgggatgatcaccttccagttcagcacattcagtttcggcatggggaacgctgccgggttgttattcgccggaattatgctgggctttatgcgtgctaaccacccgaccttcggttacattccgcagggtgcattaagcatggtgaaagagttcggcttgatggtgtttatggcaggcgttggtctgagcgccggtagcggtattaataacggcctgggcgcgattggcggtcagatgttgattgccggattaattgtcagtggtataaaagtgttcctattttttcacattctctccacaattgttgtttctgactttttaatgcctttactggcaaatacaccgtttattgtcaccggctcgggcaaattcttccgtaacgtccagcttgatcctgcggctaacttaggcatcgtaaaagtcgacagcgacggcgcgggctaccacattctttgggggttaaccaacgaagccgtccccacttccgaacttccggctcacttcctttcccactgcgagcgcattaaagccaccaacggcaaagatcgggtgatcatgcaaggaacgactctagctcgactgacatcaatcgtaaacccacatttctcaccgcatacaaaaatcaaatcaaaatggattagagacttaaatctaagacctcatactctgaaactactgaaagaaaacattggaacaactctccaggacattggtttgggcaaaaatttcttgacaaatatccgacaagcacaggcaaccaaagcaaaaacggacaaatatgataatattgagttaaaaagtttctgcacagcaaaggaaacaatcaacaagagtcttggaattcagccagagagccttgtgaagacacggacacagagatacacacagggaaaacatattgtgaagaccgaggcaatgcagctggaattcaaggaatgtcaagaattactggcaaccaccggaagcttggagagaggcaaggaatag

SEQ ID NO: 138863 - DNA, 5992 bp, Homo sapiens
ctatgcgtatgtgaacgcggaaatccgcgagaaaggcgacacctacggcaatctggtaccattctccccgaaacataaaggcacgctgggcgtggactacaagccaggaaactggacgttcaatctgaacagcgatttccagtccagccagtttgcggataacgccaatacggtgaaagagagcgccgacggcagtaccggccgcattcccggcttcatgctctggggcgcacgcgtggcgtatgactttggcccgcagatggcagatctgaacctggcattcggtgtgaaaaacatcttcgaccaggactacttcatccgctcttatgacgacaacaacaaaggcatctatgcaggccagccgcgcacgctgtatatgcagggctggaatgtgattatgttggcatttatccgttttctttttgcaggcctgctgctggtgatcagccacgcctttgccgccacggttcaggacgaacacggcacgtttacactcgaaaaaacgccacaacggattgtggtgctggaactctcgttcgccgatgcgctggccggcgtggacgtcatcccgatcggtattgccgacgatacactgtcaaaggcatcctggcccaattgtgtggcacctgaaaccgtgggatccggggaaacagacggcacgatgcttgaaaacacatgggcaaccagcagccaggcaggattgaccgcagcagttgctcccagccgatggacggatggagcaaccggcatcgaagggaacgttcagcccagagaggcaaagctgccgtccagtcccgatttcacgtggattgctgtccgtgaatggcaaggcctgttcctttgtggtcgtcgtgggggctgcgcacctcttatttgccaaagccgctctcggttaacccatcgcgtaacgatggatccgcgttgcgggaacccatccgcttggggtgacccgggggactctggcagggcctgcctttgtgcgtctgtcgctcgtcttcttgctccgccgcgtgctcgctggttcatcgcttctgccattgctgatggggtaacagaaacagaggttttacttcctgacggcgcttcagaacatgattattcactgcgcccatcggatgtaaaacgcttacagaacgcggacttagtcgtttgggttggcccggagatggaagcgtttatgcaagaaaccggtaagcaaattaccaggagcgaagtcagcccgctctgtcgccgcgtggcgtttaataagtttaaccgcgacccacaaccgcgttatgattggggtcgactcaccgttctttactctggctcgtcgctgtctggcggccgttatgttgttatcatccgtgagtgccactgccaattgtcaaaaccattgagactggaacagaacgaaattcgttcgctcttacctgaagccagtgagccgattgatcaagctgcacaagaagatgaagccattccccaggacgaactggatgacaaaatcgccggtgaagcgggcgtgcatgaatatgttgtttccactggcgatacgctaagcagcattctcaatcagtatggtattgatatgggtgatatcacccaatctgctgcgccgacaaagaattgcgtattacaagttgaagttagcggccgtctgggcggcagcggaaatcgcacgtaccgaatgatcgaagcagcacgtcgtgctatgacccgtgcagttaagcgtcaagacggtgatgtaatgaaagcaaaagagctgcgtgagaagagcgttgaagagctgaacaccgagctgctgaacctgctgcgtgagcagttcaacctgcgtatgcaggctgcaagtggccagctgcaacagtctcacctgttgaagcaagtgcgtcgcgatgtcgcacgcgttaagactttactgaacgagaaggcgggtcgcgttgttagcgacaaaatggagaaatccattgttgttgctatcgaacgttttgtgaaacacccgatctacggtaaattcatcaagcgtacgaccaaactgcacagaaagcggttcctgagcatcactttccgcgatgctaaagctcgtgatgaagccattgcgtatctgagcaagcgccatccggagctggtgattagcagccacggcagcaatccagctgaccgcgtgaatatgtcggtgcagcagaacattaatatcctgcgtaaccgtgtaaaccaacttggacgtggctggagccggtggttcacgcgtcagggtgctgaccgtatcgttgttgtaaactgccagtgtattcaggacactgcgcagcgctggtgtgtaacgatcatgtctaacttcactaaggacaacatcggcaaaccgatggcaaccctgtttgtggagtacaaagacagcggtaagaaagatgcaaatggtcgtgcggttctggtgaaacaggaagaggtgattaacatcgccaacatccagtctcgtctgggtaacagcttccgtatcaccggcatcaacaacccgaacgaagcccgtcagctgtcactgcctgctgcgtgccggcgcaacgctgagtatgccaggtatcgcgggtatcgtcttaacccttgcggtggcggtcgatgcgaacaagcaagcctgacaggtgcaggtgcaaccttccctgcgccggtgtatgccaaatgggctgacacttaccagaaagaaaccgctacctgcgaaagtgaacgaagagtggaaaaacaacgttggtactggctctaccgtaaatgccgatcggtctgggcggtaaagctggaactctttcgggtaaagccgctggatatcccacagcaacgggttgggcagcaacacgttttgctgaaagcgtttaatcgcagactggcaatgcagtttatccagctcatcgccaccgacgtgacggaaatcctgccccttcacgtagtagaagatggtaccgacagcctttattgcctggcgctgtcccatctgcgttgtgggcgtttgtcactccggtggcggcgtgagcttcctcgcgggctgggcgttaatgttagttggtgctatccgtttaaagcgcaagggcagtgcgccgcagaaattaccgataaagccggccagcgggaaattttcggttttgcccgcgtgaaagagaatgcgggttatgtcatttatgaatgttatcaacctgatgatggcgataagttaatccgtgagctgccgttcagttcattaatttttgcccgccagtggtttgtggtgggggaactcctgcagcatttgccgccagaagatcgtattacccccattgtcggcatgttacagggcgtagtagagaagggcggtgaactgcgtgttgaagttgccgataccaacgaaagcaaagagttactgaaattctgccgtaaatttactgttccgctacgcgctgccttgcgcgatgccggggtgctggcgaactatgaaacgccgaagcgtccggttgtgcatgtattctttattgcaccaggctgctgctataccggttactcatacagcaacaataattcgccgttctatatgggcattccgcgcctgaaatttccggcagatgcgccgagtcgttccacgctcaaactggaagaggcatttcatgtgtttattcctgcggatgagtgggatgaacgcctggcgaacgggatgtgggcggtggatttaggcgcttgccctggcggctggaccttccaactggtgaagcgcacatggtcggttattccgtcgaccacggctcgatggtccaatcctctggattacgacagggacctgctggggaacacggttccattccgcccgaggccagaaatttccggaagtgttacaggggtcccagaccttacccgctgctacggatcctccaggtatgcaatggctggcatccggcgtgctggaatggaagctcgtctgatcgcgcctggcgcggatggcgtaaaaatgcagtgtgatttattgtcgtgtcagaacgctggctggcaaggagtgacgcttaataccacgcgggggcatttctatcgcgcggcgctggaagggttaactgcgcaattacagcgcaatctacagatgctggaaaaaatcgggcactttaaggcctctgaattattgttagtcggtggaggaagtcgcaacacattgtggaatcagattaaagccaatatgcttgatattccggtaaaagttctcgacgacgccgaaacgaccgtcgcaggagctgcgctgttcggttggtatggcgtaggggaatttaacagcccggaagaagcccgcgcacagattcattatcagtaccgttatttctacccgcaaactgaacctgaatttatagaggaagtgatccgcgctgatggcctgttggtgagcgacttgctccaggcgattatcccgttatttgaactggacagttatgcaccgccgctggtgatgatggcggcggtagaaggtgacactctcgatcctgaagtagaacgacgttaccgtaatgcgctttcactacaagccccgtgtcctgacatcatccgcatcaatcgttttgcgttttatgaacgggcgcaaaaagcctttgcgatcgttatcacaggcgaacgagcgaagtacgggaatattcttttaaaaaaaggggcctacaactgttgccgacccgtaggccggataaggcgctcgcgccgcatccggcagtgtttacccgcggacgactcaaaatatctttctcataagcccgcacgctctccagccattcgctacctgctggcgtatcgtgacgttggcaatacatttcccagaccgcctgccacggaaacgatttcatgctctaccagacagtgccagacgcgcagatgtaatcgcccgaccgcattccagacattgcgcagctacagcggaacagaccaacgtgggtcatgcgcgtcggcaagccacgttgaaacgctgtgtaatactttttcatcacaaattgagtggcataacctgcgcactgaccgcaagggcaacgccaaaagcgcccttgcgctgattggcaccgatacgctggcgggcgataactgccagttactgatttccggggccgacgaacaggaagcgcaccagcgtttaagccaatggctgcgcgatgaattcccccactgcgatgcgccgctggcggaagttaaatctgacgaactggaaccactgccggtttcactgaccaatctgaatccgcaaattatccgcgcccgcaccgtgtgcagcggtagtgcaggcggcattctgacgccgatctcttctttagatctcaatgcgctgggtaatcttcccgcagccaaaggcgttgacgccgagcaatccgcactggaaaacggcctgacgctggtactgaaaaacattgagtttcgtctgctggatagcgacggtgctaccagcgcgattctggaagctcaccgatccctggctggcgatacttccctgcgcgaacatttactggcaggcgtcagcgccggattaagctgcgccgaagcaattgttgccagcgcgaatcacttttgcgaagagttttcccgttccagcagcagctacctgcaagaacgtgccctggacgtacgcgacgtctgcttccagttactccagcaaatctacggtgagcaacgcttcccggcaccgggcaaactgacgcagcccgccatttgtatggctgatgaactgacccccagccagttcctcgaactggataaaaatcacctcaaaggattgttgctcaaaagcggcggcaccacctcacatacggtgatccttgcccgttcgttcaacattccacgctggttgcaacaaacgatttatatcgacggcaacgccggggcgattgtggttgagccaggggaagccgtagctcgttattatcagcaagaagcccgcgtacaggacgccctgcgtgacccacagcgtgtctggctgacccaacaagcccgtaccgctgacggtatccgcattgaaattgccgctaacatcgaggctcgactctag

SEQ ID NO: 138864 - DNA, 2586 bp, Homo sapiens
ttatggctctcggtgttcggcaatagcgcgctgtatgaaatcatccacggcggcgcggcatttgccgaggaagcgatggtccatccggagcgcggcttctacagcctgctggcgcagtatccggcgtttacctttagcgcctccgtcgccaccattactggcctgctgttttatgtgacctcggcggactccggggcgctggtgctggggaatttcacctcgcagcttaaagatatcaacagcgacgcccccggctggctgcgcgtcttctggtcggtggcgattggcctgctgacgctcggcatgctgatgactaacgggatatccgcgctgcaaaacaccacggtgattatggggctgccgttcagctttgtgatcttcttcgtgatggcggggttgtataaatctctgaaggtagaagattaccgccgtgaaagtgccaaccgcgataccgcaccgcgaccgctggggcttcaggatcgcctgagctggaaaaaacgtctctcgcgcctgatgaattatccgggcacgcgttacatcgacgcgcttggcctgcgctgcccggaaccggtgatgatggtgcgcaaaaccgtgcgcaatatgcagcctggcgaaacgttgctgattatcgccgacgatccggccactacccgcgatattcctgggttttgtacctttatggaacacgaactggttgctaaagagacggatggactgccttatcgttatttgattcgtaaaggcggttgataggggctgattggcttcgatgccgccttttcccctcaccctaaccctctccccagaggggcgaggggaccgatcgcgctcaatgttgcgatcggtttgccttatctcctgcgcaacaatcttaacgcattcgctgtcaccagcaccgtcgcccccgtatctgccagcactgccagccacaacccggtcatccagcgtggtgacgaggaagatccctttcagccccagcgcaatagtgatgttctggcggatattggcgtgagtggcgcgtgccagttcaatcatttgcaccaggccgcgcaggtggttatgggttaatgctgcgtcggcggtttccagcgccacgtctgtgccgctacccattgcaatcccgatggcggcagctttcatcgctggcgcgtcgttataccggcaccgagcatcgccaaggggctgttgatccgctcggcaccggttgactgtataacaaatggtcggagtgccgcgatgaaactgcgcaaaatcctgaaaagtatgttcaataactattgcaagacgttcaaagacgtaccgccaggcaatatgttccgataacaaaaaacctgctccggcaggtttttttgtgtccaagaatttgagcacggttgtcgccctagaacgtcgtttaggcttcccatgatttatgccccgttgttttctcaagaagctttgtgtgaagctaccagaattttcagccaccgttgtgttgcctagtggacacactttttgaagccacacaagtgtgtgttgcctccctgtgttttgccgttgtggcgctcgttggtagtcgcgctgggtttttagccccggtgttgtggctcttttgacacgcccgtgtggtgttctgtcgtatttttggtcgctctggttttcttccttgtggcgagcgtgtgagtttgccccctgttgttgtgcggcgcggtgttgttgccttctatgagtatgttttgtaggcatctccgcctgtgtttttcccccggttttggttttcctttggcgcctgggtgttggttctcctgaggttgttttttgcgctgtgtgtctgctctgcggagtgcctgtctgtttgtgtcgcttctcgcattgtggtcggtgtggttgtgtggttctcctcgttgtgcttgcggtgtggtcctttcgcgcatttttttctctcgggtcgtggtgttcgcctggtgctcgtggggggggcgggccgcgacgctggtttggtctgctctgtcgttgtgctctgtctagctgttcttgtttgggttgtgtctttgtggcgtgttgttggagtgcttttgggtcgtgtacgagtggtggcgttgatgcggtagcgctctgcgcgtgtggtgggccgcgggtgtgggtgcgcggtgcgtggggcagcgtcttggaggggccgtaggtgtgtgttgctcgtccggttgtgggttcgttgtggggcggctgggttgatcgacgtccttcttcctgattacgaccataggcaggccagtcctgatcggctacgggggagatagcttcagcaggtgtggcatcggcgcttaaggtgccgttgatctcctgcggatcgttaaatccggcccaggtcaggataccaccgctaatcagcagtgcgaccaccagtgcggcaactgcgccgctggcaggaatgaccaggcgacgccagacaaacggcaggatcagccagatgccgaagaagaccagaatgtcgctgcgcggagtcagcgcccagaagtcgaaaccaacttcccagacgccccaaatcatggtgccgagcagcagggctgcgtatagccaaagcgcggcgcgtttactgcgccacagcat

SEQ ID NO: 138865 - DNA, 2196 bp, Homo sapiens
atgtcccttaatcaggctgctgctcactttatgcttgctggtagtggttctgtagccaggtggctgaaggtctatgaagagcgcggagaagctggtttacgcgcgctcaagattggcaccaaaagaaacattgcaatatcagttgatccagaaaaagcggcatcagcattggagctgtcaaaagaccgacgcattgaggatcttgaaaggcaagttcgatttcttgaaacgcggcttatgtatctaaaaaagctgaaagccttagctcatcccacgaaaaaggctgcggagataccgcgcagtacgttttattatcatctaaaggctctcagcaagcctgacaagtatgcggacgttaaaaagcgtattagtgagatttatcacgagaatagaggccgatacggataccgtagggtaacgctgtctcttcatcgagaagggaaacagattaaccataaagctgttcagcgcctgatgggaaccctctcacttaaagcagcgattaaggtcaagcgataccgctcttacagaggagaggtagggcaaaccgcccctaatgttctccaaagagatttcaaggctacgcggccaaacgagaagtgggttaccgatgttactgaatttgcagtcaatgggcgcaagctgtatttgtctccagttatagatctctttcaacaacgaagttatttcttacaggctttcgggaaagaaccagtgattgaacctgggttgagaaatatggctcgaatcaggggctttcaaaaaggctttatccccacagaaacatccgggtctggaaccctctgtgtgtacgcccacgcctacattggtgccggatcggtagaccggataaggcgttcacgccgcatccggcaagtggttaaacccgctcaaacaccgtcgcaataccctgacccagaccgatacacatcgtcgccagaccaaactgaacgtctttgcgttccatcagattcagcagcgtgtgcagagcgctacatgcacacagtgctgagcaatcgacatgacagcaggtcccgcagaaaggccccgggcgagcaaagaggcacttgcatgctgcaggatggcactggcaccagcgggataggtgcccagaagaaaaaaatgtacgccaataacggcgctatagaccgaaagctgctttttgaagcgacgttcgtcacgattgaaaaatgttgtgataccaatcagaaaggcgatgacacccacgccctgggccagccaatacgcggtcatgataaatccttagcaggggggaaggcccatccccccgggggggagtcacagacccgcaaaaagggggagggagtttcttttttccccaaaaagaccccgtttgtgggggcctacaactgttgccgacccgtaggccggataaggcgctcgcgccgcatccggcagtgtttacccgcggcgactcaaaatttctttctcataagcccgcacgctctccagccattcgctacctgctggcgtatcgtgacgttggcaatacatttcccagaccgcctgccacggcaacgatttctgctcttccagcagtgccagacgcgcagtgtaatcgcccgccgcttccagcttgcgcagctcagcggtaggttccagcaacgcacgcagcagggcttttttcatattgcgtgtaccaatgacccacgcggcaatgcggttgatagaggcatcgaagaagtcaaggccgatatgcacccggtcaaacagatcgtgacgcacaatctcactggcaattgcctgggtttcatcatccagcagcactacgtgatcgctgtcccagcgaaccggacggctgacgtgcagcagcaactgcggcacatacagcatggcggcggaaatctggtcggaatcaactcgtcgggtgaaatgccgggtccagcaaggcagctggggtccattggcacagtccagcagtccatcatcaaccacccttactggcagtgcacaggcaacaactccccatattaccgtagccgtagcaacattgtccatagggccatatgcagcaccccagccacatcgtcacaatccccacaccgcaggccagtgcacaaaaaaacagcacaacagcaacaacacacaacaactactttcgtgtacaactggtattaccaagggtggtatcatacggaaacagcctgcatttttccaccttgggacgcttcttaa

SEQ ID NO: 138866 - DNA, 2034 bp, Homo sapiens; identical to SEQ ID NO: 123283

SEQ ID NO: 138867 - DNA, 1500 bp, Homo sapiens
ttaactcgcctgcaaagcgtagatttcggatttatctgccagtcttttcaacagcatattgagtaatacgccatacattggcaggaagaaaacgatactgattaacactttgaaacagtaatcgaccagcgcgatttccatccagtgttcagccataaaggcatccgggctacgccagaaggcaatgaagaaaaaggccagcgtgtcgctgacgttaccgaacagtgtggacgctgtcggtgccagccaccagcggcgactctgacgcaggcggttaaaaacgtgcacgtcgaggatttgccccagcgcgtaggccatgaaactggcggtggcgatacgggcgacaaacaggttgaagtgggcgagtgcgccgaatcccacacactcgacgcgcttggcctgcgctgcccggaaccggtgatgatggtgcgcaaaaccgtgcgcaatatgcagcctggcgaaacgttgctgattatcgccgacgatccggccactacccgcgatattcctgggttttgtacctttatggaacacgaactggttgctaaagagacggatggactgccttatcgttatttgattcgtaaaggcggttgataggggctgattggcttcgatgccgccttttcccctcaccctaaccctctccccagaggggcgaggggaccgatcgcgctcaatgttgcgatcggtttgccttatctcctgcgcaacaatcttaacgcattcgctgtcaccagcaccgtcgcccccgtatctgccagcactgccagccacaacccggtcatccagcgtggtgacgaggaagatccctttcagccccagcgcaatagtgatgttctggcggatattggcgtgagtggcgcgtgccagttcaatcatttgcaccaggccgcgcaggtggttatgggttaatgctgcgtcggcggtttccagcgccacgtctgtgccgctacccattgcaatcccgatggcggcagctttcatcgctggcgcgtcgttaataccgtcaccgaccatcgccagcggcgcatgttgattcagctcggtcaccgctttgactttatcttccggcaacaggcccgctttaaactccagccccagctccccggcaattgccgccgctgcgcgtggattatcgccggtgaggatcacccctttgacgcccagcgcgttcagttcactgatggcagttgcagcatcggcgcgcagggtatcccaggtaccttcttcccaggctttacgtttggcgtcgagcctctcctgattacaaattccgcgaccgttaattacttcgttaaactcctgccagtcgatctcaccaaagcggtagtgaccgctttcagtgtcaaaatgcagatccgggtcaggaacggtcataccgagcatttcaacatccaggccatggtgatacaagggctgggctcctaatgccttgggcatctccacccctgtggctttgcaggttacagcttctgtggctgctttcatgggccacat

SEQ ID NO: 138868 - DNA, 1497 bp, Homo sapiens
atgcagaaactgacgctgacctacgcggaaacccgccgtctgtatggtaaagaggtttaccatcgcccgtcgcgctttatcggcgagctgccggaagagtgtgtggaagaggtgcgcctgcgcgccacggtaagccgcccggtcagccatcagcggatgggtacgccgatggtcgagaacgacagcggctacaagctcggccagcgcgtacgccacgctaagtttggtgaaggcaccattgtcaatatggaaggcagcgggatcgcggccttatgccactgtcgcgtactcattgcgacagcagccctcatggatcctgacgatgcagtagagctgtcggttaccacgatgatgtttgcgctatgtaacacgcgaaacccccgggtggcttgggacactgctccctgtgtcccagccactacagctgcatccatggctaaaagggccccagatatgtctcagtcagctgctccagaggctggaagccagaagccaccaaggctttcatgtggtgaaagcttgcaccctctgccagccaccaagcgtgcctacaactattgccgacctgtaggccggataaggcacttgtgccgcatccggcaatcaatgcctgatgcgacgctgtcgcgtcttatcaggcctacaactgttgccgacccgccggataaggcgctcgcgccgcatccggcagtgtttacccgcggcgactcaaaatttctttctcataagcccgcacgctctccagccattcgctacctgctggcgtcggtctggggcccagtcggcatgatggcgatgatgctggcgatgactggctttgtcgtggcaacccggaaactcagaaggcgatttgggtttaaatcttgcaaaaacggggtgctttatcggatctcgtcatcttcaatcaccaccagcccagccagccccatcgccacctgtcgcccggttttgccgtgctggatgcggatggacccgatgctcgatatgatggggatgcagatgctaatggagaaatatggcgatcaggcgatggccgggatggatcacagccagatgatgggccatatgttcctcggtcacaaagtgattcgcgcaaaccacgtcggcgactggggcactcagttcggtatgctttttcgcatcgcggtagaaaccttcaaggaagactgggaagccgtctgggatcagctcgacgacctgaaccttgaaggtaaaattgttgcgctgtatgggcttggcgatcaactgggatacggcgagtggttcctcgatgcgctcggtatgctgcatgacaaactctcgaccaaaggcgtgaagttcgtcggctactggccaacggaaggatatgaatttaccagcccgaaaccggtgattgctgacgggcaactgttcgtgggtctggcgctggatgaaactaaccagtatgaccttagcgacgagcgtattcagagctggtgcgagcaaatcctcaacgaaatggcagagcattacgcctga

SEQ ID NO: 138869 - DNA, 1626 bp, Homo sapiens
gtggctgtaccctgggcccagtcaagtccttttcgctcagggtggcttggttgtcctggccgcagtacttctatattatcgagagagcctgttccccgtgttgtggccccctggcacctggggaggcaccacacgtaaatttatttcattctacccattctgaaaacaaaaaacaaccacacaactcaccatatcacaacgacatccaacccacactcaactacctccccacaaaccaaaaaaaacaaacacaacaagaacaatcacacaacataacaaaacaaggcagtcagctccatgatgtgacacaagtgccttatcaggcctacaggtcggcaatagttgtaggcctgataagacgcgacagcgtcgcatcaggcattgattgccggatgcggcgcgagcgccttatccggcctacgggtcgtgcatccgacaacaccgaatttacaggaacacagaacatgcaaaacattactcattcctggtttgtccaggtaatgatcaaagccaccaccgacgcctggctgaaaggctgggcatgagcgcaacggcggcaacctgacgctacgcctggatgacgccgatatcgcaccatatcacgacaatttccagcaacaagcgtgctatatcccgctcagccagcccatgcctttactggcaaatacaccgtatattgtcaccggctcgggcaaattcttccgtaacgtccagcttgatcctgcggctaacttaggcatcgtaaaagtcgacagcgacggcgcgggctaccacattctttgggggttaaccatcgaagccgtccccacttccgatcttccggctcacttcctttcccactgcgagcgcattaaagtcaccaacggcaaagatcgggtgatcatgcactgtctagccaccaatctgatcggcctcatctatgtacttgacaatgacaccgcggtcttcactcgccaactgtgggaaggcaggcaccgagtgtctgtgggaccgcacaaatattcaaacatcgtgggttgtggcctgccaggatatggcaggaacaagctgataaactcattaagaaccggaaatcgcaattatgaggttcaggcggcgataaccaagcgaattaaaggcggaatgttaccaccgggcgagtggagctcgacggcgattaccgatcgtccaacggtgaatatgctggggggatattactcgcagcagcaatttttgcgtaacctggatgtccgttcaaacatggcttctgccgaccaaccatcggtcatggacgaagcctataaagagtttgttatgcaactggcctcgtgggatacccgcagagagttctggctgcaaaccgactattacaaacagcggatggtgggcaacagcaaagccgatgcggcgttgctggatgaaatgattaacaacatccagtttatccccggagactttacccgcgcggtcaatgacagcgtgaagcttattgccgaaaccgcgcctgacgctaataacctgttacgtcagtatgttgcttttgccagccagcgtgcagccagccatctgaatgatgagctgaaaggcgccatgggccggcgcgtacccatcccagaattgaaaaagccgtttccccaacggttgtaa

SEQ ID NO: 138870 - DNA, 1340 bp, Homo sapiens
gaagcgtgtcggccagtttcaaaccaatatcacgcagcagttttttcgccggattggtaccggaaaacagatcgcggaatccctgcataccagccagcatcaacgccgcactgtgcttgcggctacgctcatagcgacgcagataaatgtactgcccgatgtctttcccctgacgatgcaaccgtttcagttcggcaatcagctctgcagcatccataaagccgagatttaccccctgccccgccagcgggtgaatggtatgtgcggcgtcgcccaccagcgccagacggtgcatgtggtgaaggacttcaacctggaaattgccgataaagagttcatcgtgtttgtcggcccgtcgggctgcggtaagtcgaccaccctgcgcatgattgccgggcttgaggagatcagcggcggcgatctgttgatcgacggcaaacgaatgaatgacgttccagccaaagcacgcaatatagcgatggtgttccagaactacgcgttgtatccgcatatgacggtttacgacaacatggcgtttggtctgaagatgcaaaaaatcgccaaagaggtgattgatgagcgggtgaactgggcggcgcaaattctcggcctgcgtgagtacctgaaacagatcagcaagctgcatcagaaactgaacaccaccatgatctacgtgacccacgatcagaccgaagcgatgaccatggcgacgcggattgtgattatgaaagacgggattgttcagcaatcgatgaattttattcgcggcacgatcgatggcgataaattcgttacggaaacgcttaaattaaccattcccgaagagaaattagcggttctgacaacacaggaaagtttgcataagcccatcgtgatgggaatacgaccggaagatattcatccggacgcgcaagaggaaaataacatttccgccaaaattagcgtggcagaattaaccggcctcgtggatcgcattaactgcggtgcgcacaaagatatggcgctggaagatttccaccgcagcgcgctggcgattcagggctggctaccccgtttcattgaatttggtgcctgtagtgcggaaatggcaccagaagcggtactccacggattacgcccaattggtatggcttgcgaaggtgatatgttccgcgccactgcgggcgtaaacacgcataaaggcagcattttttctttagggctgctatgtgcggcaattggccgtttgcttcaactcaaccaaccggtaacgccaacaaccgtttgttctacggcggcaagtttctgccgtggcctgaccgatcgcgaactgcgtaccaataattcacaactgacggcag

SEQ ID NO: 138871 - DNA, 3441 bp, Homo sapiens
atggtggagtggttgcatcaccgcgggttgacgctggcgacggcgcaaagtgacgatttgcaggcattactggcagaacggctggagggcgggtataaagccaccagctcagcgcgtttgctgagtgcagtgcgccgattgttccagtatctttatcgcgaaaagtttcgtgaagacgatcccagtgcgcatctcgcttcaccgaaattgccccagcgtttgccaaaagatttaagcgaagcgcaggtcgaacgtttattacaggcaccattaatcgatcagccactggagctacgcgataaagccatgcttgaagtgttgtatgctaccgggctgcgtgtctctgaactggtcggactgacaatgagtgatatcagcctgcgtcagggcgtggtacgggtcattggtaaaggcaacaaagagcgtctggtgccgttaggtgaagaggcggtttactggctggaaaccatacggaaaaagggtcaagcacccacaacctggttggctgcacctcgagcagcgttgattgggtttaaccagcaggcccaccagttggcttcgattccggtgttcatgcgcatcaaacaacagctgttgtttatttcaaagatgaacgtgcagcttttagcagcctggcaagagctgtgtcaaagtgacctatccctggaccggcagcttaccggactctatgatgccttgcttggtgcttggcacacacaaatccagtgggctacacagggtttcaggcatggctgtaagcggaacaccattaaaccggacgtcgtgatcgtgttgaatacccccgaagcgggagatgttccgggcattgataccattaaatacccgctaaacttgggccaggggcggggcttgatgctgtttgacaagcgctacttccccaaccagaaattggtagcagcgttaaaaagctgtgccgcacataacgatttaccgctgcaattttccaccatgaaaaccggtgcgacggatggcgggcgctacaacgtgatgggcggcgggcgtccggttgtcgcgctgtgtctgccaactcgttatctgcacgccaacagcggtatgatttcaaaagccgattacgaagctctgctcacgctgatacggggttttctgacgaccttaactgcggagaaagtcaacgcgtttagccagttccgtcagattgtcgatctgctggagcaacagccgcgcacgcctggcgagctggcgcaacagactggcgtttcaggcaggaccatcctgcgtgatattgactatctcaacttcacccttaacggcaaagcccgcattttcgccagtggcagtgcgggctatcagctggaaatcttcgagcgccgcagcttttttcagttgctgcaaaagcacgatagggtacaccacttaaaacgatacccattgtacatgtggaaattaccccttatagaaacgcaggggaaaagcaccaatgtgttacagccgggcgcgatgtttgttctaatccggcgtatgtttgttagcggagaagacggcgattatcacaactggaccggttgcggcaacacgctcaatttgagtcatccggcggtggtggattacgccagcgcctgcctgcgttattgggtagtaacctgccacgtcgatggtttccgctttgatctggcggcagtcatgggccgtacgccagagttccgtcaggatgcgccgttgtttaccgctatccagaactgcccggtgctctcgcaggtgaagttaattgctcacccgtgggatatcgctcctggtggtaatcaggcctacaactgttgccgacccgtaggccggataaggcgctcgcgccgcatccggcagtgtttacccgcggcgactcaaaatttctttctcataagcccgcacgctctccagccattcgctacctgctggcgtatcgtgacgttggcaatacatttcccagaccgcctgccacggcaacgatttctgctcttccagcagtgccagacgcgcagtgtaatcgcccgccgcttccagcttgcgcagctcagcggtaggttccagcaacgcacgcagcagggcttttttcatattgcgtgtaccaatgacccacgcggcaatgcggttgatagaggcatcgaagaagtcaaggccgatatgcacccggtcaaacagatcgtgacgcacaatctcactggcaattgcctgggtttcatcatccagcagcactacgtgatcgctgtcccagcgaaccggacggctgacgtgcagcagcaactgcggcacatacagcatggcggcggaaatcttgtcggaaatcacttcagtcgggtggaagtgcccggcgtccaggcacagcgcagtctggcggctggtggcataccccatgtaaaactcattggagccaaccgtgtagctctctgcgccaatgccaaacaatttgctctcaacggcgtcgatatggtgcgcagggtttagcttctcgctgatcacctcatccagtgctgccagcagacgctgacgcggggcgagacggtcaacggtgatatctttcataccatccgggatccagatgttcatcaccgatggtgtgccgagttgctcgccaaaataggccgaaacgcgacggctggctttgcagtgatcaatccagaactggcgaatgctgtcgtcggcatgggaaagcgtaaagccatcggcgcttagcggatgcgaaaagcaggaggggttaaaatccagaccgagctgattggctttcgcccattcaacccagtttttgaagtgctctggtttgatcccgtcagccgacgtggctatcggtacatcgtgatcaccggtgacgatttgccggaagccaggctggcagtgccgcgtgtttcctgggccgaacatcagataatcgcattccgatgtgtgccggacagccgcagcatgaatctgtccaatgcggtgtcggtagtggtgtatgaagccgttgaaatgctggtccatatccattgatggcttatcgctgtctggtttaccgacaatacgagccggaacgccagcggcggtggtatgcggcggcaccggttgcagcaccacggaacctgcgccaatcttcgcgccgcgcccaacttcaatattgccgaggattttcgcgcccgcgccaatcatcacaccttcacgaattttcgggtgacggtcaccaccagatttacccgtaccgccaagcgtcacagattgcagaatcgatacgtcgttttcaatcaccgccgtttcaccaacgacgatgcctgtcgcgtggtcaagcatgataccgcgaccaatttttgctgccgggtgaatatcgacctggaacgtcacagaaaccgtttcgaactcatccagacgcaggtcgaagcccgccgtgatgttaaccagcacgccgcgcgcgccagacaggtcgatatcttccagcagcggagaagagatagccat

SEQ ID NO: 138872 - DNA, 2317 bp, Homo sapiens
atgtcaccgtccgcgttatcgccttctggcaaatcgttagcaaaggaatcaacaggctcacttgtcgttccacatagtcgagatatctacgataaccaggtgcatttggtaaggaactgcaacctggaaatgcccgatcaagagttcatcgtgttgtacggcccgtcggactgcggtaagtcgaccaccctgcgcatgatcgccgggcttgaggagatcagcggcggcgatctgttgatcgacggcaaacgaatgaatgacgttccagccaaagcacgcaatatagcgatggtgttccagaactacgcgttgtatccgcatatgacggtttacgacaacatggcgtttggtctgaagatgcaaaaaatcgccaaagaggtgattgatgagcgggtgaactgggcggcgcaaattctcggcctgcgtgagtacctgaaacgtaagccgggggcgctttccggcgggcaacgtcagcgagtggcgcttgggcgggcgattgtacgcgaagcgggcgtgtttttaatggatgaaccgctctctaaccttgatgccaagctgcgcgtgcaaatgcgcgcagagatcagcaagctgcatcagaaactgaacaccaccatgatctacgtgacccacgatcagaccgaagcgatgaccatggcgacgcggattgtgattatgaaagacgggattgttcagcaagtaggtgcgccgaaaaccgtttataaccaacccgcgaatatgtttgtttccggatttattggatcaccagcgatgaattttattcgcggcacgatcgatggcgataaattcgttacggaaacgcttaaattaaccattcccgaagagaaattagcggttctgaaaacacaggaagtgtgccctgaccacacactcgacgcgcttggcctgcgctgcccggaaccggtgatgatggtgcgcaaaaccgtgcgcaatatgcagcctggcgaaacgttgctgattatcgccgacgatccggccactacccgcgatattcctgggttttgtacctttatggaacacgaactggttgctaaagagacggatggactgccttatcgttatttgattcgtaaacgtggtgacgaggaagatccctttcagccccagcgcaatagtgatattctggcggatattggcgtgagtggcgagagccagttgcggatctgcgtgctggcagatcagaaagcagtgaaggcagcggcgcaaaccatgcgggccaatccggcgtttgataccgaaaaggcgattcaggaactgggcaccggcgaggcgttgatctcttttctggatgcgaaaggaagcccttctgtggtggagcgtgcgatggtgatcgcgccttgttcgcggatggggccggtgacggaagatgagcgtaatgggcttgattaatcacttcttccggtgtatggcaaatatgaggggatgaggttggaccgggaatccgcctatgagatgttgcaaaaagggctttttcaggccagttaccgagcaggcaaaataaatccttcccgcgaaaaggggaaagaggttagcggtggatgaacgggcattcttggtggatttgaaggatattttgttcgggcactaccgggaccacgcggccggggaaagaaagatgtttatcactggcagtctcctttgagttcccggccagaccgctgcaacaaagagtgggcgcggggcgccgcggcaggggcgcggggagatcagcggccgcgccggcgcgtcgtggctgggcggggagaacggagaacaagacagaagggcacagagggaccgcccgggacgggtgaaccctatgccgacgtggcggaaccgcgcccgatagggccaccgccaggcggcggcggctccccgataataggcgtggatgtgagccaggcatgcccggagttggcgtccaatcgtttgaccggtgcaatcggcctgacttcttcgagcctctatcaccgcctgcccgcgtgggtcattggtacacgcaatatgaaaaaagccctgctgcgtgcgttgctggaacctaccgctgagctgcgcaagctggaagcggcgggcgattacactgcgcgtctggcactgctggaagagcagaaatcgttgccgtggcaggcggtctgggaaatgtattgccaacgtcacgatacgccagcaggtagcgaatggctggagagcgtgcgggcttatgagaaagaaattttgagtcgccgcgggtcggcaatagttgtaggcctgataagacgcgacagcgtcgcatcaggcattgattgccggatgcggcacaagtgccttatccggcctacag

SEQ ID NO: 138873 - DNA, 879 bp, Homo sapiens
ttaggcaacattggcgcgctggcaggcaaaccggtgatggaaggcaagggcgttctgatcgtcgtggaataccggaatattcatccgctcgcgcagtttctgttcaatatagaaacattctggcgctttaatgtcttcgaggttgatgccgccgaaggttggttcgagcgcggcgacaacttcaataaatttgtccgggtcgagttcgtcaacttcaatgtcaaatacatcaattttctttgcatgagtggctgctacgtgctgttgcttgcttaatgtgcttttggtggggcctgctttgtggacgtgaattgatttttgcaacgatggattgatggtgcgatgtgtgtgcccctgcgtgattgaaattgattgttgttgtagaataatgaatagatgatcacctgctggctgatgtgctttgtggtgaacgtttatcactgtggctgcatgtgatttgctgatgatgtattctgtgttgcagtcttctgtctgacccattggaggaaaccattgctgcgtgttggatccattgttggtgtcctccttctctttggtatcttggcctttcaaggacacttctgcagcttcagatcccatttgtcctcccagtccgttaatatcaagggcgcggtattggccagcgaacaggcattgcgggaagcaggcattgaactgagcgattttgtccgtggcaatgaaaaagcgcgtgagcggatgaaagcacaatatagcattgcgggtatgaccactggttgctgtgatatagaagacgaatgcgattgagatgaaaacaccggcggtaatcgccagatagaaagtcttaagcggatgtttcgttgctttatagacacccgcctcttcggccactttggccat

SEQ ID NO: 138874 - DNA, 1467 bp, Homo sapiens
ttactttgtccagaaatcatcgaaaacggtaattggcggacggcgtttatgttcggttttcagataccagttctctattgttctggcgacctgttgaggtacgtttttcccttccagatagtcgtcgatattgtcataggtcacgccgagtgccacttcatctggcagagaagggcgatcatcttccagatcggccgttggcgctttcttataaaggtgttccgggcaagctaatgccgccagtaactgtttaccctgacgtttgttgagacgatacagcggattaatgtccgtaccgccgtcagcatatgtagtgaagaatcggtaatggcttctgagtgcactgctgatgtagatcgccgcaacaataatcatgctgataaacaccagtgccgaaatctgatagttacgctggctttgcgcactggcggcttccagcacatgggtgatctccagctgccaggcctcaaagttaacgtcaaacgcattctgtgatccctgcaccggcgcagggaggaaatccgaaagttgattactttcaagccaggtcgcctgatgttcgagatcgttgtgccagcgggcaaaacttttctccgtctctttttgcaatcccctgacgtgctcgttgcccgcagtcatcgccataaaacttttaaacagcgtggtggattgcgtcagactggcgcgcgccgtcgtcatcaacgttttaatgtcatccgccggatagctaagtgccgtcagagtgcccgctttgttcaacgcggtactggcctgtaacattaccgcccgagtttgcgctaatgccgcacgttgctgattgctctgctcgacctgattcagtcggtgcaaatcgtcgcgaaatgcccaaaaagacatgccgctactgccaatcctaagcagtgaatgctggataaagcgaaaatggggtaaggcctgaatgaagaccgggtcttcaaccacgcgacacagactgtcattgcggcgaaaagtctcctgcaaaggctgaatcagatggatttcatcaagtgtgaatacggcgatatgcccttcgtgttcagccaccagataccaggtctgctggtggatgagtaaccggcagggagctaggcgctcacagcgtcgcccctctgcaatcagcgtcacccgcctgcgcccggtaatggcctgaatcagtctccacaaagacaatgctcctgaaggcgaaagaaccggattggctggtgctatcacgcagggagactcatcgcacatcagcagtgcattcaccagacgggggtcaaggccgggaaaaagcccggccagcccgctgcggtgggcaaagataagcacgtcgggcaccatctgcatctcactgccagcagtgcgtaagcggcagtatccggactgatactccaggtccagatacatcagtcgttcacgaaaatcacgccgcagcgtgcgcactgacacgccaaactcagccggcat

SEQ ID NO: 138875 - DNA, 1011 bp, Homo sapiens
ttactttttccagaaatcatcgaaaacggtaattggcggacggcgtttatgttcggttttcagataccagttctctattgttctggcgacctgttgaggtacgtttttcccttccagatagtcgacgatattgtcataggtcacgcagagtgccacttcatctggcagagaagggcgatcatcatccagatctttgaacggacgcttcatgttttcgatagcgtcgatgatgtcgtggtgaaccagctgttcgttctggatacctacacaacgaccgccgtaacctgccagcagcagatcgatagcgtaagcgcccatacgggaagccagaatacggtcgtaaggcaccggagaaccaccgcgctggatgtggcccagcacagttgcgcgggtttcacgaccggtttctttctcgatgaaatgcgccagttcgtcaacatcacacatatgttcggtaatcgccacgatcgcgtgttttttacctttcgcgatacccgctttgatttcgtttaccaggtcttcacggctgaattcaacagctcgagtcgtatctgtctcttcccgtatacccgaatcgtctttgctcatggcttttatgccagcgcaattcatgagatttcgcactggtgtattgccgggaaagcgcgccgtgagctggttgatttcggctactggtattgcccggacggacgcgatgcccaaacgcaaagccagtttgaagatgttgaagtgaagccgcaggcgctcgactggttgttctgtgtggcggcgggatatccgtttaacgtcagttgcgacaatctggaaggggatttcgaaccggatcgtgtggtgtttcaacggcgagtacatgcgcaggtgatggattatctgacaaatggcattccggaacgtccggcacgcttcattaaagcaggcggaacagttcccgtggccggaagcgctcaactgaagccagcgccacgttttacaatgaggaaagaagatgatcgcggagtttgaatcacgcat

SEQ ID NO: 138876 - DNA, 1146 bp, Homo sapiens
atggcacatacacgggcgatggaaaaatgccgtccgggaatgttcgagtaccatctggaaggcgaaattcaccacgaatttaaccgccacggtgcgcgctatccgtcctataacaccattgtcggcagcggtgaaaacggctgcattctgcactacaccgaaaacgagtgtgaaatgcgcgacggcgacctggtgttgattgacgcgggttgtgaatacaaaggttacgctggcgatattacccgcaccttcccggtcaacggcaaattcacccaggcccagcgtgaaatctacgacattgtgctggagtctctcgaaaccagcctgcgcctgtatcgtccgggaacttccattctggaagtcactggtgaagtggtgcgcatcatggttagcggcctggtaaaactcggcatcctgaaaggtgatgttgatgaactgatcgctcagaacgcccatcgtcctttctttatgcatggccttagccactggttaggactggatgtccatgacgtgggtgtttatggtcaggatcgctcgcgcattctggaaccgggcatggtactgaccgtagagccagggctgtatattgcgccggatgcagaagtgccagaacaatatcgcggtatcggcattcgtattgaagacgacattgtgattaccgaaaccgccggaagaaatcgaagcgttgatggttgctgcgagaaagcaatgagcgtaatcatcgtcggtggcggcatggcgggcgcgacgctggcgctggctatttcccggttaagtcacggggcgctgccggtacatttgattgaagcgactgcgccagagtcacatgctcatccgggctttgatggacgagcgatagcgctggcggcgggtacctgtcagcaactggcgcgcatcggcgtctggcaatctctggcggattgcgcaactgccatcaccaccgtgcatttccaacggcagcccgtccggatcgttaaagaaggtgaagcgtttttgcgtgtatggatcgacacggatggtttcacacttcacgttatggctttcaaggtgcgccactgccgcatcgatgtcatcaacgctaaaagccagatgacgcagaccgcaagcttccggtcggctgggtcgttccggcgggaacggaaatga

SEQ ID NO: 138877 - DNA, 2311 bp, Homo sapiens
aaatgaagcaggggacgactcccgctgaggacgatcgccaaaaacaacgtgcgtagcagctgcccaatgatctctctcgctgcctgaatgcccgcgaggatcactaccaaggaggcccgcttgaacacaatgtgcgtgcccgttttatcgggatgaggggtttacattgaggcttccttgcgactttttgtataaagggtagcgggagacacgccagcaatattctgattcttactgctgattttcacgtcagcacgtggtaaaaatgaaacactgttgtaaaaatgtggtgatcctcatgcccgaacccgtagccgaacccgcgctaaacggattgcgcctgaatttgcgcattgtctctatagtcatgtttaacttcgccagctacctcaccatcgggttgccgctcgctgtattaccgggctatgtccatgatgtgatgggctttagcgccttctgggcaggattggttatcagcctgcaatatttcgccaccttgctgagccgccctcatgccggacgttacgccgattcgctgggacccaaaaagattgtcgtcttcggtttatgcgggtgctttttgagcggcctggggtatctgacggcaggattaacggcagtctgcctgtcatcagccgttattctttgccggggggtgcagctgcatcctgtcagtgatctaaggatcccgcgtggtgaaaaagccggaagaaatcgaagcgttgatggttgctgcgagaaagcaatgagcgtaatcatcgtcggtggcggcatggcgggcgcgacgctggcgctggctatttcccggttaagtcacggggcgctgccggtacatttgattgaagcgactgcgccagagtcacatgctcatccgggctttgatggacgagcgatagcgctggcggcgggtacctgtcagcaactggcgcgcatcggcgtctggcaatctctggcggattgcgcaactgccatcaccaccgtgcatgttgtcgaattgcacaatgtcgggcaacggctgtttgccattgctgcgtaaagcacctggcgtaacgctgcattgccctgatcgcgtggctaacgttgcccgtactcagagtcacgttgaagtgacgctggagagtggcgagacgctgacgggccgcgtgctggtagcagctgatggcacccattcagcgttagccaccgcgtgcggcgttgactggcagcaggagccttacgaacaactggccgtgattgccaacgttgctacttccgttgcgcatgaagggcgcgcttttgaacgctttacgcaacatggcccgctggcgatgttgccgatgtctgacggacgctgttcgctggtctggtgtcatccactggaacggcgcgaagaggtgttgtcgtggagtgacgagaagttttgccgtgaactccagtcggcctttggctggcgacttgggaaaattacccacgctggtaaacgcagtgcttatccgctggcgttaacccacgccgccagatctattacccatcgtaccgtgctgattcaaagtgaacgattaaaccataaagctttagagaaaagaactcttaccgtctgggataacagctttctgatttatagacaaagtgatgtatcggaaattcgtctcgctagtctcttcgcgtccttttcaatccgtaagtcaaaacaacaagcgcgaaagcacacaaacagaagaagcaaagacaaagaaaaacgaacaagacagaagagaaaaacaacaagcagacaaagaagacgaagacaaaggatggtccgcgtcggcgacgaacagattgcaggatgccattgcctttattcaaccggatcgccgaacaggcagttgcgggaagcaggcattgaactgagcgattttgtccgtggcaatgaaaaagcgcgtgagcggatgaaagcacaatatagcattgcgggtatgaccagcggtgtcgtggtgggcaccgatcatgcagcagaagccattaccggattcttcactaaatatggtgacggcggtacggacattaatccgctgtatcgtctcaacaaacgtcagggtaaacagttactggcggcattagcttgcccggaacacctttataagaaagcgccaacggccgatctggaagatgatcgcccttctctgccataacacagtggcactgccccgtgacctatgacaatatcgacgactatctggaagggaaaaacgtacctcaacaggtcgccccaacaatagagaactggtatctgaaaaccgaacataaacgccgtccgccaattaccgttttcgatgattcctggaaaaagtaa

SEQ ID NO: 138878 - DNA, 489 bp, Homo sapiens
cttggcattcgcacaccttcaactgaacaaccgattgaatttctctccggcggcaatcagcaaaaagtgttgctttcacgttggctactgacccgaccgcaatttctgatcctcgatgagccaacccgcggcattgatgttggtgcccacgccgagatcatccgcctgattgaaacgctatgcgccgatggtctggcgctgctggtgatctcctccgaactggaagagctggtgggctatgccgatcgggtgattatcatgcgcgatcgcaaacaggtggcggagatcccgctggcagagctttccgttccggcgatcatgaacgccattgcggcgctgatgctaatcatagtgaccccagggtttgctgtgcagattaaaggagataattcaggtcgtggtgccgagcccagtgcctggcacagaacaggtttgcagtcagtgtttactgtcggtaccggtgacctcagctgtgcatgggagagaaag

SEQ ID NO: 138879 - DNA, 2346 bp, Homo sapiens
atgctggcggtcgatcagcgcgaagccatgcgcatgatgtttgccgcggctggggcacccgctccggtagccgatagcgttttaactgatttcaaagttaacgctgcaaaggccctctcgccttatgcctcggcgattctggtagatcaacaattctgctaccgccaggtggttgagcaaaacgcgattgccaaaagttgcgccatgattgtcgccgccgatgagttcattcctggcaacggtattccggtcgatagcgtggttattgaccgcaaaatcaatccgctacagaacaacatgacgctggatcagatgcgcagccgtctggcttacgatggactgaactacaacacctatcgtaaccagatccgcaaagagatgattatctctgaagttttaaataatcgcgaaagcgtccctgattcattactcacttggctggagtgcacccataatatcgaggctgaaaatcagagacttaccatcttcgccagtcaggcttgcatcgccaccagaccgtggtatttcaccgctgggtcaaagattaagccgatgatcgaaattgcaataatcaccaacaagatcccgccggcctgtatctggcgctggcaatcattatttgtggctacggtttattcaaatcaaacatcagctgtttgcttggcgagctctacgacgagaacgatcatcgacgtgatggcggtttttcgctgctgtattttgtgctttcgcccctttgccgctttggtgctgctgatagcggcgttcgacatccgtggtgatcccggtataaagcttattgtcggcggtacggatcaacaggaagtttctggcgtagaagcggacgacgttatcggtactctggcgcgcgaagccgaaaaagccgggcgtccggtgctgatcagcactggcgataaagatatggcgcagctggtgacgccaaatattacgcttatcaataccatgacgaataccatcctcggaccggaagaggcgtgccggtgggatatcgttcagcagggtagcgaggcgagggatcggttctgcggtttccgggctgatgcgcatacccaatttggcggcaaaacgtaccgcgcgcagcatacgtaccggatcttcacggtagcgcgtttccgggttaccaatcagacggataacgccgtccttcagatccttcatgccgccaacgctgttgatagtgaaatgcggcgctggggtcttcttcgatggagccgaaaatgttcagggcacatcaaagtgatcactggcggtgaaaagcgcaagggtaatggctattactatgcgccgacgctgctggctggcgcattacaggacgatgccatcgtgcaaaaagaggtatttggtccagtagtgagtgttacgcccttcgacaacgaagaacaggtggtgaactgggcgaatgacagccagtacggacttgcatcttcgggcttattatttttttccgagccgcatcaaggctctgttaactcaataaaaggaggcattatgtttgattacatcctgtctctcggcggtaccgttttcgtccctatcatcatgatcgtgattggccttatcttccgcatcccctggctgcaggcgattaaggcaggggtaacggttgggattggttttgtcgcagagcaaaaagccgcgaaagcgaaagctcaggaatacatggcagcggtgatccgcactcaccccattaatgaccaaaacacaaagccagaaaaaactgcagtcgctactaaattttatcatcttatgcaacaagcgaagatgcctttctccgcaccaccgccaacgtttgaaagcatcgtggcggacaaaacggctgaaattaaaagaggtctcctacgcgtaagacgagaatcccgccttcgtccagctgcgtcattagcgcagttggaatttccggcggtgcccgtaacaatgatagcgtcaaacggcgcacgtgccattcgccatgccacaccggatgagttagcgccatttgccaaagccgatggttcgatggggccgaatgtaacggcgagacgctggcgggcgaacggggacctgtatttcgctgtagtcgtaggcaaaaaagaagcgatctaccgtcaattagatcaaaccacccaacgttttaacgtgggcctggtagcgatcaccgacgtgcagaacgcccgcgcacagtacgataccgtgctggcgaacgaagtgaccgcacgtaataaccttgataacgcggtagagcagctgcgccagatcaccggtaactactatccggaactggctgcgctgaatgtcgaaaactttaaaaccgacaaaccatatatcgtattcctggatgataattag

SEQ ID NO: 138880 - DNA, 1716 bp, Homo sapiens
gagagcgattttctcttccatcaaatcctgaaaatcaaagcggtcgagcgtttcctggccgcgatagctgcgcaccgcattaagtgccgtttgcaggaaaaactggttactgacacctgggcaatgcagggcaaacacgaagaagccctgcgtattgctcaggagatgctggatagaggaatgcagttaatgcgtgatgcccttagcgcaaacccggatttagacggtgtattttgcaccaatgacgatattgcgatgggtgcgcttctgctgtgccgcgagagaaacctcgccgtgccagaacaaatttccattgcgggttttcatgggctggagattggcaggcaaatgatcccaagcctcgccagcgtaattactccccgttttgatattggtcggatggccgcccaaatgttgctgagcaaaattaaaaataacgatcacaaccacaacactgttgacctcgggcaggaaactggaggatatctcatgagtgaacccctgttaattgcccgcacgccggacacagaactgtttttactgccgggaatggctaaccgtcatgggctgattaccggcgcaacggggacgggtaaaaccgttacgctgcaaaaactggcggagtcattgtcggaaatcggcgtgccggtgtttatggctgatgtgaaacacgcatctgactggcgtcgcgaaggcaggaacgtcgtctgtggccgaaaaccacctgggctgcgcgtagcgattgccgcccctgccctctggcaagtgaccgagtttctgcgcggttgggtactgaccggcttcccgtggttacagttcggctatagccagattgatggcccgttaaaagggctggcaccgataatgggcgtggaagccattaacttcctgctgatgatggttagtggcctgctggcactggcgttggtcaaacgcaactggcgtccgctggtggtggccgtcgtgctgtttgcccttcccttcccgctgcgttacatccagtggtttaccccacaaccggagaaaaccattcaggtttcgatggttcagggcgatattccgcaatcgctgaaatgggacgaaggccagcttcttaatacgctgaagatttactacaacgcaacggcaccgctgatgggcaaatcatcgttgattatctggccggagtcggcgataaccgatctggaaattaatcagcaaccgttcctcaaagcactggacgtggaagatgagcaagggatagccgacacgctggtctacatgttgcagcaggaaggttttgccgtcgaggtctttgagcgaggcttgccggtgctggataaagctcgcaagcaggtacccgacgtcatgattctcgatgttggtctgccggatattagcggctttgaattgtgccgccagttactggcgctccatccggcgttacctgtactgttcctgacggcccgaagtgaagaggtcgatcgcctgcttgggctggaaattggtgctgacgactacgtggctaaaccgttttcaccccgcgaagtgtgcgccagggtgcgcaccttactgcgtcgggtgaagaagttctcgacgccgtctcccgtcatccgtattggacattttgaattgaatgaacccgcggcgcagatcagctggtttgacacgccattagcgctgactcggtatgagtttatagtgttgaaaacgttcactcaagtcaacttgctataa

SEQ ID NO: 138881 - DNA, 921 bp, Homo sapiens
atggagatcaaattagttgataacgtcttccaggagacctacggccatcctactgatatgaaccagatcatacctgccctgatgggatgccagagaaagactgctgcaagtagggatcctctggaaacagaacagagggaagaagataccttccctgaagcccagatgttccagaagcctgcgcctcattcacaaagtcaccccaaaaatgccctagagtttggagttttgaagaagcgggaagaaggcctgagtaagggcctgggaaccaagttagatcctacttcagcatcagcacatgccagcgatggtgcacacagacttaaaagggaaatcctttggattctgcctggactcctggggctcagccctggccttgccttgagggtgcaaagaggagtaaaaatatgggaaggcctgtgtgcagctgcaatggattcttcaagtgatcagaggcggtttcctgcctgtataaaacagcatgaagaaaagcatccaactcttcttcatctggatgcctcacaccttatgacctgctttgtggtggaaatgacactgtatgttttaattgcaggcttcaagagcctatgtagcatccactcttaccctcctagaaccctgagatatttatgtgaaaaagtctgggatagccttcttgagaatgagagacgacatgagaagagaggcccagccaacttcttgcatcgattgccagctgaacaccagtggggaatagtgcaatccagcaacattatggccggtctttcagcccgtctgcagctcttcctggaacacaggccttttcctgtgtttgaactcaccgccaatggctgtcctaccaaaggcactgacattgaaaccgcctttgcaaaaattataactgaggaaattacgacagtgaaagaaatcagacctaattga

SEQ ID NO: 138882 - DNA, 4338 bp, Homo sapiens
tcattctaagctttcatgcctgcaggtcctttgtcgttcgcctggctggtagttttgtggatcaaacggcatccgggtatggaggcaagtaagatgcgcttttacccttgcctcgctttcatcacagttgagcgcttcatcgcccggtagataatgactttgcccgatgtagtcgatcagttcctgcaccagtaccgacgggaaacgctcactgttatcctgaatggaacgaccgatatagctgatatagagtttttgctgcgcggaaattaacgcttccaggaacagatagcggtcgtcatcgcgacggctacggtcgccacgcttcggtttctggctcatcaggtcaaagcccaatggcgcaagctgacgtggataaacgccgtcgttcattcccagcaggcaaaccactaaaccttcggcgataatcgctgccattgttgttcgatcagcgtcatcgccgcttcggtttccgcatccggcaggaagaaggcgttgagcatatcgcgacaaaccggcaaccactcttccagcggacgctcctgtgccagcccgcgacgccagatgtttagcgaaaccgccgaagtgatcttcggtatcaaacctgctgacagcggcacggcgttgatcaaaggcaaaccgcaaaacctgcgatcgccacatcaggcttcggtactgggcattggcttctgcccggaagacaggaaaaccgatggcatcatcgctgccgcctcggtgcgggaaaatatcatcctcgctctccaggcccagcgcggctggctggcagatttgatcaagctcatcaatgatataccgtagattcgggctgatttcctggacttctttataaccctgacccacaccatcagcgacgaccgttttacgctgacgcggatatttaaacttaacgctcttggcgaaaaactcgcctttgtctttctggaaatagattttcagaatatcgttgttggcttccaataaaggcattctgcaaccacggatgccgcggttctgaaagccaataacatccagagcattcttgggatccagtcgatcgataccgggatcctcggtgcggtgatcgccggtattatcgtctggatgctgcatgagcgtttccataatatccgcctgccggatgcgctggcattcgacgcagggcagcgagggaaagtctgcggtcaaaccgtcagcggcgcactgaccatcttccaggggcaattgagttgcccgaccactcacggtttttctgaaagcgggacggtttcctttggcaaggtaaaatgggtgcgtttcttgggggtctgcaggtgcagcgttagtatgtagtaatgcgcgagtccggaaaatcggcataaaattaaaggtctgctgatttctggcctgatcggctggttcgttggagggaataacgaaacgctggaattcgtgttccggttcgtaagtgaaattttgtatgtcataaaggggctggttaaggggtggggcgcaacggttgattttttcagggttccagctgatggcttccgcgtaggggcgacagccgggataaccgcactgaccacactggctctgcggtaagatttcgtcaattttctcaacgaccggatcgtcttccaccgcaaaacggcgggaggcataacccagaatggcgccaaacgccaggcccagcaggctcacggcggcaacggcaatccagatagcattcattacaacttcaccaaaccactgcgtcacattctgaccaaaaaagcgaccaaacgtagacgtcacctgcgtccgaaagccatggtttccaaaggcgatctgggcctggtaatcgcgtgcctgccgtacgcataagccgttaacgtttttagcgtggccgtcggtcacgtaagcggtagtgccgtcaagtggtggattgcgcgtatcgcgcagcagcaggtcagaacggtatgttgcaaaggcgtcatgggccctgaaaaagccgctgttggaatcgaccggaggatccgggctggtagcgcgtgattcgacgaagtagcggtcaccgctctggttgaaaagcgtgcagctctggcctaagcggatgtagggggggcaggctccgcttgtcgtttcacgcatcaaacttggcgttgatcgcgaggccttgcgaagggctcttccctcaatggaataattctgaaggtgcggtctatgtgataccccagagagttcccccagcaggatggagcccttgtttcccgtaatgaaggccgcgtacggcccctgaaagcgatgcgtcgcgaacgtggtgaacgtcgcgaagtgatgggtaccgcaaagatgcaggtggaagaggccagccgctccggtaaaatcgttttcgaaatggaagacgtttgctaccaggttaacggtaagcaactggtgaaagatttttctgcccaggttgtggcgacaaaattgccctgattggtccgaatgggtgcggcaaaaccacgctgctaaaactgatgctcggtcagcttcaagccggacagcggacgtattcacgttggcaccaaactggaagtggcttatttcgatcagcaccgcgcggaactggatcccgataaaacggtgatggataactttgccgaggtagcaagaagggatggttaacggcagccacgccactattgggcgattttcagactttcgttcctccgaacgggcgtacccggtacgtgcccttccgacgtaccggacccttgcgctgccgtttgtcctaaaccagcaatattggatcgcgctataaattatcctcaataagaagcggcagtcctcgacaaggagaggcccacgcggcatcgcctgtgggaagcggatgcgataacggagaggcgtgcggcatcttctttgcaatactgggggctgccttcttcccgggggttttactagctcaacacgctcgactcgttccatccggggccgacggccaaaatgcttatggacctcgatctctattgcaagtgccccaggtgcacgaaccaggagccgcctaggacccatgtggctggttaggtagaggacacgaagtccggcatgcctgcaggtccgcgtggcttgagaaattttcaacgtcgcccgaagcgataaaaacgaaatcctgactaatgtcttccgctcaaaaggcgtgctggtcggcacttcgacgatgaataacgtgatgatgccgaaaatcgccggggcttccgtaacaaacgcgccagtgctttcggctctcacggctggagcggcggtgcggtggatcgtctttccacgcgcctgcaggatgcgggtttcgaaatgtcgcttagcctcggcccacggatgcagtgcagcgtctgccagtggatttacgatccggcaaaaggcgagccaatgcaggacgttgcgccaggaacgccgtggagtgaagtcccggataacttcctctgcccggaatgctccctcggcaaagacgtcttggaagaactggcatcggaggcaaatgagtaacggcattgtgatcatcgttcgggcttccacaatgcatgcccgccgcgaaccggccttttcttcaccttcgggtaataacacgctatacatgccacgatccggaatggtgccgccgctggtaaccgccaacaattgagcgccaggtcgggcggtcaatatcccggtctccctgttccagaccagtttggggcgaaaagcagaaaaatcgccagagggatagcgcccggaaagcatatccagcgtggcgtcaaaaacacgtcttggcagatctttccacggtgcggcacggcgtacgcgggagtaccattcgtctacctgtaatgcatccatcgccgcggcggcaacggtttgctgcgcaaggacgtcgagaggattatgcggtggtgtcaggttttccagcctgccgtagtcatagcggatgccgtaaccgcgccccggcaaccctaacgtcgccagagaatcaaggaagcaagccgccagacgtcccaggccaccgttaccgaggcctgggtcattttcttcatcaatcagctcttcgagatttaaccccatcgcttccagtgcgccctgtacatcttcgtaaattcctagcgacaacatggcgttggagagcgtacggccaatcaaaaactccatcgacaggtagtaaacctgacgagtttcttgcgacaactgggcacggtttgaacgtaaccagcgctccacgagacgatcgcgcacagcaaataacgttgcgttcagccattcatgtttattggcgacgaccgggtcctttccaatcgtaaacatatctatgcatgcctgcaggatcaaatcaaactgaagccgcaaactccggaggaagaacaacat

SEQ ID NO: 138883 - DNA, 1359 bp, Homo sapiens
ctaaagcgtgttgccgtgataaatctgatacccgaggtcaacagggttgtggttgtgatcgttatttttaattttgctcagcaacatttgggcggccatccgaccaatatcaaaacggggagtaattacgctggcgaggcttgggatcatttgcctgccaatctccagcccatgaaaacccgcaatggaaatttgttctggcacggcgaggtttcgctcgcggcacagcagaagcgcacccatcgcaatatcgtcattggtgcaaaatacaccgtctaaatccgggtttgcgctaagggcatcacgcattaactgcattcctaaatgaatggatgagatggcgcgtggattcatgcgtaatggggaaagattatgcagcatcatcgcatcgcaatacccctgataacgctgttcatcgcgggtgtcatctttggaaccgagatacagaattttgtgcctgactcgcttctccagcatggtacacaccatgtcaaaagcggcctgccgattatcaaaaccgacctccatatccagccgttctccctgtacatccatcaattccacgaccggaatggtggctgaacgcagaaatttcaccgtcctgatggtgtgatatttttccgaaagtataatcccgtcaatgttataagagagcaggttaatcaccgactcttcttcggaatcgcgatcgtaattgtaattagcaataagggtctgataattatgctcagaggtgacggattctattcccgcgagaatgtcagcgaagagttgattttgaaatgacggaatcaagataccgagggtataactttgtgcattcaacaacatgccgggagcgcgattagggatataattgatctcttccataattttggcgatgcgctcgcctgtttcctttgccacctttttcggcgagcggatataacgactcacggtcatttttgttacgccagccagcgtagcgatatccgtccaggtacgcaacgtttcaccaaccgtcagattaaaataccctttaaatagccagaagccagggtcgtttacgtgtgacgcgatcacgctgcccgcaccggttgccagtaccattaaagcgggatcggcatgggtaacgttgataatcggcaacaccacacccgcggtggtaatggccgcgacggtggcagagcccagagcgatacgcaacagcgccgcaacagtccagcacatcaataacggcgaaagtgtagttccggtcattaagtgtgaaatatagtgcccgacaccgctatctactaatacctgcttaaacgcgccgccgccagcgataataaacacaatcatcgcgatagcgcctatagaatccccaatgatatccat

SEQ ID NO: 138884 - DNA, 854 bp, Homo sapiens
atgccgcgaagttcggcgataattcgacgtttaatccgccagcgaaaacagcgtcgcagtgaaagcgcagaccaaatacccatagcgccaggccaaaaaccactgttaccgagcctgcaggtccaatatttatcactggctgaacagagcggatttttcacattaccgctggtgcccaaatacccccagcccaggccgagcgtaaaatcgaacggcccccaggctttgctggcaacaagatattccgcatcaaacagccccgtaccgccgatatcccgcgcaccaaccgccacttgcgccagctacgtaactctcttcccacaaacgcagtttgaggatcgaaggctttatctttatacgtttgatcgccagagaacgcttcgacgctgctgtactgccgggtgcgcacgtcggtgtagcgcaccgttgtttccagccacgggaagagttgcactgaagctgagtaataacggtactgatcgttatcgcgatagttcagactcaactccccttcccgtgccatacgcgcggtgggcgtttgtaataatcctacgccaccgaaatccgactgcgacggaccaatgggcgcaggatatgtttcgccgtagcaagctgtgctaatgcccagcgccagtaagctaagcagatgtctttttttcattattgaggtatccgctgcgtcagagtctgaagaatgtcggcgttaagggcatcaggcgtctcactccagacggagtccgcgaggccaacataaataatgctggcgggcatcggctctacgtgacgcttgttccagtaagccaccggcgctttttgcgtgcgtccgtccgggtaaaccacccacgcgtagctgc

SEQ ID NO: 138885 - DNA, 3187 bp, Homo sapiens
atgtccaggataagagggaacgataaaaactttcctccctttgttggggatagggccgagcgtaaaatcgaacggcccccaggctttgctggcaacaagatattccgcatcaaacagccccgtaccgccgatatcccgcgcaccaaccgccacttgcggcagccagtaactctcttcccacaaacgcagtttgagatcgaaggctttatctttatacgtttgatcgccagagaacgcttcgacgctgctgtactgccgggatatgtttctccgacgccgcaaaaaggcataaatgagtcgctgttggaaaaaccgggtgctgcggtggcaacgttaaaatctggtgcgccagatgacgagtctacggagcttggacctttaagctcgctggcgcatctcgaacgcgtcggcaaggcagtagaagaggcgaaagcgacagggcacatcaaagtgatcactggcggtgaaaagcgcaagggtaatggctattactatgcgccgacgctgctggctggcgcattacaggacgatgccatcgtgcaaaaagaggtatttggtccagtagtgagtgttacgcccttcgacaacgaagaacaggtggtgaactgggcgaatgacagccagtacggacttgcatcttcggtatggacgaaagatgtgggcagggcgcatcgcgtcagcgcacggctgcaatatggttggacctgggtcaatacccatttcatgctgccacagcagttacaggagcaaagcgatgaatgtcaccaccagccccattgtcaggctggtgatgatcgctttactattgatcgtcgactgatcaccaagggatgcctggagaaccacacacaggacagcgctcggtaccctatcgactttgatgatggttcaaaaaccgagaacacccgcgtttcttatccgatctatcacatcgataacattgttaagccggtttccaaagcgggccacgcgactaaggttatcttcctgactgctgatgctttcggcgtgttgccgccggtttctcgcctgactgccgatcaaacccagtatcacttcctctctggcttcaccgccaaactggccggtactgagcgtggcatcaccgaaccgacgccaaccttctccgcttgcttcggcgcggcattcctgtcgctgcacccgactcagtacgcagaagtgctggtgaaacgtatgcaggcggcgggcgcgcaggcttatctggttaacactggctggaacggcactggcaaacgtatctcgattaaagatacccgcgccattatcgacgccatcctcaacggttcgctggataatgcaaaaaccttcactctgccgatgtttaacctggcgatcccaaccgaactgccgggcgtcgtcactctcaaccagggaacgcgcttcgaaggcactgcattgttacgtgatttccgcattacggacttccaggattatcaggcgatcattggtcaccaggcggtggcgctcgacccgaacgataccgaccagatggacatgcgcacattgtggaacactgacaccgatcgtgctcgcgcagaactgaactggcgtatcacgttggtattcaccgtgtttatgatggcacttaaggttggacccgtaaggcgtggttaacccacgtcagggacgcgtactgtcgatgctgccagccatgctgctgtatctacttttcttcctgatccagacctccctgaaatcgaacggcggtaaaggtaagctggacccgacgctgtggatgtggaccgttaacctgatttatctggctttagcgattgttctcaacctttgggacaccgtgccggtccgccgcctgcgcgccagtttttcgcgtaaaggagcgaggatccccttcgtaggctgtcgggaaacgtgcgagctaccgcagatcgaactggtaaaaatgatgctggggcgcgagctggatacccacgcgctacagcgtgccgggcgaacattgttgagcgacaaacccgttgccgcgttcaaaaattacggcaaaaaaggaacgatcgcaccgtttgatctcgaagtacgccccggcgagatcgtcggtctggctggattgctgggatcaggacgtaccgaaaccgccgaagtgatcttcggtatcaaacctgctgacagcggcacggcgttgatcaaaggcaaaccgcaaaacctgcgatcgccacatcaggcttcggtactgggcattggcttctgcccggaagacaggaaaaccgatggcatcatcgctgccgcctcggtgcgggaaaatatcatcctcgctctccaggcccagcgcggctggctacgtcccatttcccgcaaagaacagcaagagattgccgaacgctttatccgccagcttggcattcgcacaccttcaactgaacaaccgattgaatttctctccggcggcaatcagcaaaaagtgttgcttttacgttggctactgacccgaccgcaatttctgatcctcgacgtgacagtccccacattctgcagacttaaaagggaaatcctttggattctgcctggactcctggggctcagccctggccttgccttgggagtgaggtgggatcgatgctatcgcactctctataacattgacgggattatactttcggaaaaatatcacaccatcaggacggtgaaatttctgcgttcagccaccattccggtcgtggaattgatggatgtacagggagaacggctggatatggaggtcggttttgataatcggcaggccgcttttgacatggtgtgtaccatgctggagaagcgagtcaggcacaaaattctgtatctcggttccaaagatgacacccgcgatgaacagcgttatcaggggtattgcgatgcgatgatgctgcataatctttccccattacgcatgaatccacgcgccatctcatccattcatttaggaatgcagttaatgcgtgatgcccttagcgcaaacccggatttagacggtgtattttgcaccaatgacgatattgcgatgggtgcgcttctgctgtgccgcgagcgaaacctcgccgtgccagaacaaatttccattgcgggttttcatgggctggagattggcaggcaaatgatcccaagccttgtcagcgtaattactccccgttttgatattgggcggatggccgcccacatgttggctgagcaaaattaa

SEQ ID NO: 138886 - DNA, 2037 bp, Homo sapiens
atgactttgtcatgcagctccaccgattttgagaacgacagcgacttccgtcccagccgtgccaggatcatctcggcacgttttggtgtcccccgaacccaggtcaggacatgggttgccctctatgaaaaacatggagaaaaaggtttaattcccaaacctaaaggcgttagtgctgatccagagttgcgtattaaggtcgtgaaagctgtgatcgagcagcacatgtcccttaatcaggctgctgctcactttatgcttgctggtagtggttctgtagccaggtggctgaaggtctatgaagagcgcggagaagctggtttacgcgcgctcaagattggcaccaaaagaaacattgcaatatcagttgatccagaaaaagcggcatcagcattggagctgtcaaaagaccgacgcattgaggatcttgaaaggcaagttcgatttcttgaaacgcggcttatgtatctaaaaaagctgaaagccttagctcatcccacgaaaaaggctgcggagataccgcgcagtacgttttattatcatctaaaggctctcagcaagcctgacaagtatgcggacgttaaaaagcgtattagtgagatttatcacgagaatagaggccgatacggataccgtagggtaacgctgtctcttcatcgagaagggaaacagattaaccataaagctgttcagcgcctgatgggaaccctctcacttaaagcagcgattaaggtcaagcgataccgctcttacagaggagaggtagggcaaaccgcccctaatgttctccaaagagatttcaaggctacgcggccaaacgagaagtgggttaccgatgttactgaatttgcagtcaatgggcgcaagctgtatttgtctccagtaatagatctcttcaacaacgaagttatttcttacagcctttcggaaagaccagtgatgaacatggttgagaatatgctcgatcaggcattcaaaaagcttaatcctcacgagcatcctgttctgcactctgaccagggatggcagtatcgtatgagaagatatcaaaatatccttaaagaacatggtattaaacaaagcatgtccagaaaaggcaattgtctggataatgctgtggtcgcaggatatcgctattctacgcaaggtttttataacttatccgacagtgcctacagtcgaatgagtggttacaccgtcaagcctcctagcggagacaccaatgagcagacacaatttattgattattttaatctgttctacagtaagcgtggtcaggaacaaataagcatctctcagcagcttggaaattacggacccgggttgaagcccaaggcctttgggccaaccaagccggggtttgttttgaagcctggtatactggaatccacgggtgtcgatggtgtggtaattgccggagctgcaggaagtagcgatgacctgcgacggatggcagaagaaaaagctatcccggtgattttcgcttcccgtgccagttatcttgatgatgttgatacggaggtttatgtgtttaattctgacaacctgagactcgacggaaaatgcgccatcatcacaggtgcgggtgcaggtattggtaaagaaatcgccattacattcgcgacagctggcgcatctgtggtggtcagtgatattaacgccgacgcagctaaccatgttgtagacgaaattcaacaactgggtggtcaggcatttgcctgccgttgtgatattacttccgaacaggaactctctgcactggcagactttgctatcagtaagctgggtaaagttgatattctggttaacaacgccggtggcggtggacctaaaccgtttgatatgccaatggcggattttcgccgtgcttatgaactgaatgtgttttcttttttccatctgtcacaacttgttgcgccagaaatggaaaaaaatggcggtggcgttattctgaccatcacttctatggcggcagaaaataaaaatataaacattgcgttgtctgtttgcttgtgtttggtcttgttcgtgttctga

SEQ ID NO: 138887 - DNA, 4977 bp, Homo sapiens; identical to SEQ ID NO: 136654

SEQ ID NO: 138888 - DNA, 1307 bp, Homo sapiens
cctttctgaaactgcgggatatcgccgaccaccagtggttcaggccgtagtagcgcacgcgcatctgtttgcgatcttgcagcccaacaatttgcgccatccggctttcaataccgattggcatgtcacagatgttgaggattttcgcattcgggcgcagacgacgcgtggcttctgcgacaatggctgccgggttggagtagttgagcatccaggcattagcacgtttcagctcgatggcggagtttgtcacttcggcattgatagacttcgacgcaagagtgttcgactcgcggttgaactcctgcatcataaaatccagacgacgaccaaccgcttcttttttcttcagaatgttgtaggtctctttgacatgcgcttcgaggcgatccagttcttcggcaacgtcaattcgttgtgccagcagaaccagttcctgctccagacggttgttttccagttgcacctgagcatcttccagcttcgcgaccagacgctcacgctgccattgcaggatttccggcatatgggagcggactttgaccacttcggcggtgacgccttccagacgctgctcgatcaatgctttcagtgcctgaccttcggtttcgcgcgcgacaataaagtcgtccagcgtaccattcaacgccgcgagaatttcaacggcaatggcgttaaagatcctgctcctgggctgccatcacgcccggccagcgtagaatatcaaccgggttgatttccccttcgtcactctgcatttttacccagttcgcggcagttaccagctgtttagccagtttttcgttgaggatcagctcaccttgcgcgctaacatatcctttcatcggattggttttcagcttgccgttttccaccagcttctgtagcgcatctaccagcgccacgcaggcacccgtaatcgacgcggtacgcgtgccaccatcagcctgaagcacgtcgcagtccagcgtaatggtgaactcacccagcgctttcaaatctactgccgcgcgaagagcacgggcgatcagacgctggatttccattgtgcgtccaccctgcttacctttcgccgcttcacgagcgttacgggtgtgggtagaacgtggcagcatgccgtactctgcggtgatccagccctggccctgacctttcaggaagcgcggcacgccttcttcaatagaggcggtacacaacactttggtatcgccaaattcgaccagcaccgagccttctgcatgttttgtatagttacgagtcagggtaacgggacgcacctgattattgctacggcctgctggacgcat

SEQ ID NO: 138889 - DNA, 1984 bp, Homo sapiens
atggccgcattaccatacatgcaactgtacatagctgattacctggctgacaccatgcatttgtcagcagaggagcatggtgcgtatttgttgctgatgttcaattactggcaaacaggaaagccaatacctaaaaacaggctggcaaaaattgcccgtctgactaacgagcgatgggctgatgttgaaccatccttgcaggagtttttttgcgataacggcgaggaatgggtgcatcttcggattgaggaagatctggcatcagtcagggaaaaattaaccaaaaaatcagccgcaggaaaagcatctgttcaggccagaagaagcagaaaggaagcagatgttcaaacaaaacaagagagaaatttaacaggtgttcaaacagatgttgaagtggtgtttgaacatgatgtcaacacaaaggcaactaataaagatacagataaagatctaaaaacagatccccccctaaatcccccccgggggaatcgaggtgtcaaaaagtttgaccctctggatattactttgccgaactggatttctgtctcgctttggcgtgagtgggttgaatttcgccaggcattgcgaaaaccgattcgaacggagcagggcgctaacggggcgatacgggagctggaaaaattccgccagcagggtttttcacctgagcaggtgattcgacacagcatcgccaatgaataccagggcttgttcgcgccgaaaggtgttcgacctgagacgttactccgacagactggccccgtcacatgtaaccgcgccattcaagacggtagcggagtggcgcgagtggcaactttccgaagccagaaacgttgtgaggagatcaaccgtcagaatcgtcagttgcgggtggaaaaaattctgaatcgctctggcatccagccattgcaccgcaaatgctcgttttcgaattaccagcggaaaacctggtaccgggaagaaccacttagcggcactatcgggaatcgcctgctgaaagacggtcagacagtgattgtggttaccgtggctgatgttatgagtgccctgcacgccagctatgacgatgggcagtcaggcgaaaaatttttgcgggaactgtgcgaagtggatctgctggttcttgatgaaattggcattcagcgcgagacgaaaaacgagcaggtggtactgcaccagattgttgatcgccggacagcgtcgatgcgcactaaaagcattcgctttttcacccgtggaagatggcatagccgttcgccagttgctgtttactttgttggcaaccgcattgatcgtcccctatttcaaacgctcgtcgcggctactgacggggtggtgcgtaacggcaaaagcactgccggacatcagcgctatctctgctctcactgccgtaaaacatggcaactgcagttcacttacaccgcttctcaacccggtacgcaccagacaatcattgatatggccatgaatggcgttggatgccgggcaaccgcccgcacttatgggcgttggcctcaacacgattttccgccatttaaaaaactcaggccgcagtcggtaacctcgcgcatacagccgggcagtgacgtcatcgtctgcgcggaaatggacgaacagtggggatacgtcggggctaaatcgcgccagcactggctgttttacgcgtatgacaggctccggaagacggttgttgcgcacgtattcggtgaacgcactatggcgacgctggggcgtcttatgaagctgctgtcaccctttgacgtggtgatatggatgacggatggctggccgctgtatgaatcccgccctgaagggaaagctgcacgtaatcagcaagcgatatacgcagcgaattgagcggcataacctgaatctgaggcagcacctggcacggctgggacggaagtcgctgtcgttctcaaaatcggtggagctgcatgacaaagtcatcgggcattatctgaacataaaacactatcaataa

SEQ ID NO: 138890 - DNA, 678 bp, Homo sapiens
atgacgtgccggctgctcacaaggcttccaggccaagctggtgtgggaaagagagtttctggagtaccagatgagttgtctcccctattctccgttggatcgcggtacctgcagggtggtgtggggctggtttccccaacatctggcgccaacgtgggactccccgttatctctacaaataatctggtgaaggaatgtagagcatggaaagtggaagatgacagaaaaagggtgcctgaatatgtttcacttcaagctctgtggataagtagtgtgcttggagaattccacggtacctcgggaaaacggataatgcccgtgactttgtcatgcagctccaccgattttgagaacgacagcgacttccgcccagccgtgccaggtgctgcctcagattcaggttatgccgctcaattcctgcgtatatcgcttgctgattacgtgcagctttcccttcaggcgggatcatacagcggccagccatccgtcatccatatcaccacgtcaaaggtgcgttcaccgaatagtgcgcaacaaccgtcttccggagactgtcatacgcgtaaaacagccaggctggcgcgatttagccccgacatagccccactgttcgtccatttccgccagacgatgacgtcactgcccggctgtatgcgcgaggttaccgactgcgcctga

SEQ ID NO: 138891 - DNA, 962 bp, Homo sapiens
gcctgtctttggcttttgaacgggaggtacgtgattcaccgatcagccagtcaaagatgaagataatcgccagcatcaccacgatcagaatggaaccgtaggcaatcgctacaccgtattcgccatcttccacgcggttgaggatgtaagccgtcgctacgcgggtatccggcgtgacgaggaacacaatggcgctgacggtggtaatggcgcgcacaaagctgtaaatcagcgccgagaggatcgccgggcgcagcagcggcagcaggatgtgcgtaatggtacgcagggaaccggcgcgcaggctgagtgaggcttcatcgagcgatttatcgatttggcccggtaatgactccaatttgtcatgctgctccaccgattttgagaacgacagcgacttccgtcccagccgtgccaggtgctgcctcagattcaggttatgccgctcaattcgctgcgtatatcgcttgctgattacgtgcagctttcccttcaggcgggattcatacagcggccagccatccgtcatccatatcaccacgtcaaagggtgacagcaggctcataagacgccccagcgtcgccaagtgcgtcaccgaatacgtgcgcaaaaacggcttccgaacctgcatacgcggtaaacagcagcgcggggccgaatagcccgaagtatccaaggtcggccactccggcgaacatgagcccggccggctgatggccgggaccgaagggccgaagattaaaggggcaccaggtagggcgcccaaaggggatgaaccgttctgcacgggttaatgaggaactttgccctcccagccaggcgatccgctgatgcccatgagaagcagagaacacatagcccattcccacgggatcaaggccgatatctttggccatttccgaaccggcgatagagagcgtagcgcggtcgccgtagttgaaggatgtgacgataaacaacat

SEQ ID NO: 138892 - DNA, 1912 bp, Homo sapiens
ggaccgggacgtcggggcgaatagaaagccccgcgccggaggggtaggtacaaatgtaatcgagtgagcccccagaaccggtgattcacgaactggtggcccactccgaagcagtttgctctggtgcagggtgtgacccgcggcaaaagcggtaatacgctggatttcggcacttacggcaccaccaccctcgacgaagtacggcagataatttaagccttcacatttcaggagtcagtcatggccttttctcaagcggttagcggattaaacgctgccgccaccaacctcgatgttattggcaacaatatcgccaactccgccacctacggctttaaatcaggcacggcctcttttgccgatatgtttgccggttcgaaagtgggactgggggtaaaagttgccggtatcactcaggactttaccgatggcacgaccaccaacaccgggcgaggtctggacgttgctatcagccagaacggttttttccgtctggtagacagcaacggttcggtgttctacagccgtaacggacaatttaagctggatgaaaaccgtaacctggtgaatatgcaaggtttacagctgacgggttacccggcaaccggtacgccgccgactattcagcaaggggcgaatccgaccaatatttcgatcccgaataccctgatggcagcgaaaactaccaccacggcatcgatgcagatcaacctgaattccagtgatccgcttcctactgttacgccattcagcgccagcaatgcggatagctataacaaaaaaggttcggtgactgttttcgacagtcagggtaatgctcatgacatgagcgtctactttgtgaagaccggggataataactggcaggtctacacccaggatagcagtgatccaaacagcattgcgaagacagcgacaacactggaatttaatgctaatggcacattagtggatggtgcgatggcaataatatcgcaaccggcgcaattaacgtctgagcttcctcaactccatgcagcaaaataccggcgctaacaatattgtggcaaccacccagaacggctacaaaccgggcgatctggtgagttatcaaatcaatgatgacggtacggttgtcggcaactattccaacgaacaaacccaactgctggggcagattgtactggcgaactttgccaacaacgaaggtctggcatccgaaggcgacaacgtcgtggtctgcgacgcaatcttctggcgtggcgctgttggggacagccgggacgggaaactttggcaccctgaccaacgctcgatcgaatcaggcatagcgttcctggtgaatgttccgctcaatccaaaattaaagcgagttaatgtagccggggcaagatggcatccatatggttggccggcgttcgcggaacgtgcctgtttgatcgaaccggaaggtgaccggagaacacatcaccgccccaacaaccagaggacatactcgagaaaaacacagcgacaaggtggacacaagaccagacaagacaactgggaacaaaaaggggacggaggcccaagaccggagcccacggacccacaccagcatgacgcgaacagaccgacagtagccaccaaaaagagaaggaaatcaacgcaatcccaaagaaaccacagaaaccccaagggaacacacccaaccgaagaacacggaaccgcaggcaccacaaaaccaccagacacaccccagaccgacaactggacccataagggaagcctgagggaggggaaggcgaaccgaaagaggaacccgctacgaggagcagaggtagcaggggggggaaagcaacgcgcaaaagcagagagacaaacacagcgcggagagcgaagggaggacgtcgacgaaggggaagaagacagaagcaaaaaaacagaaaaatag

SEQ ID NO: 138893 - DNA, 754 bp, Homo sapiens
atgacatttaaacagttactgcttgccctagagctacagctaacacctctgactgctgttgccaacacaggagcccacgagagggaaacagtaatgactatagaggcaaggaggaatacagcccaaacaggccctattatctggttcacttccacgcctggagatgtcactcgaggaggttggagaaagcaaagatgggtgactgctctttcctctcatacctctgacctcaagggcactgatctgatgccagtagggacgctcctatataggatgtctgacaaccctgttgaggggtctcacccagttgggtggcatgggaagcaggacccattaatgaagaactttggctgccccttggtggaggggataatgcccgatgactttgtcatgcagctccaccgattttgagaacgacagcgacttccgtcccgccgtgccaggtgctgcctcagattcaggttataccgctcaattcgctgcgtatatcgcttgctgattacgtgcagctttcccttcaggcgggattcatacagcggccagccatccgtcatccatatcaccacgtcaaaggtgcgttcaccgaatacgtgcgcaacaaccgtcttccggagactgtcatacgcgtaaaacagccagcgctggcgcgatttagccccgacatagccccactgttcgtccatttccgcgcagacgatgacgtcactgcccggctgtatgcgcgaggttaccgactgcggcctgagttttttaa

SEQ ID NO: 138894 - DNA, 2769 bp, Homo sapiens
tcatgtctgttccccgttgggcacgatgacgattatgcggaattgcttattcacggttttccactccggataattctgtgtccagattcgcgatggacgctcgcgagccgggtaacccgttattccgccgaagtggtcaaagtccgctcccatatgccggaaatcctgcaaggcagcgtgagcgtctggtcgcgaagctggaagatgctcaggtgcaactgaaaacaaccgtctggagcaggaactggttctgctggcacaacgaattgcgttgccgaagaactggatcgcctcgaagcgcatgtcaaagagacctacacattcctttgacgtggtgatatggatgacggatgctggccgctgtatgaatcccgcctgaagggaaagctgcacgtaatcagaagcgatatacgcagcgaattgagcggcataacctgaatctgaggcagccctggcacggctgggacggaagtcgctgtcgttctcaaaatcggtggagtgcatgacaaagtcatcgggcattatcgatgctcgaccaccaacaccgggcgagttctggacgttgctatcaccagaacggttttttccgtctggtagacagcaacggttcggtgttctacgccgtaacggacaatttaagctggatgaaaaccgtaacccggctaccggtacgccgccgactatcagcaaggggcgaatccgaccaatatttcgatcccgaataccctgatgcagcgaaaaccaactgctgggcagattgtactggcgaactttgccaaccacgaaggtctggcatccgaggcgacaacgtctggtctgcgacgcaatcttctggcgtggcggtgcatgtagggcaacccacaggcatttaacacttgtagcgttgccggcttcgtgatgttcgtgtcggaacttgtggatgcggtataaccaagtgttcagcgcaaacgcagcaccggaaaaccgagcaggaagcccgcgccgctgcaaatccgaagattcggtgtccacaactgtttcctccttgcggtggtgcatcctggttgtcccgcgcgtatctggcgactgtttgtgcccctgtgtcggtttgtgggggcacaacacaacctgtgtgccgcgcctattgttttccgaacgtctgctcgcggaccccaatttggcccgtggccttcctacgatttcttctcgcgccccgaattcggttaaagtggcgggcttcggattcccgcactgtgccgccatggtgaggccctggcaagaccgttcaggttttgattgggtgaccgcgcattgttgtggttcccgaccaggtgaattgtacggctttatggcgaagcggcgatgtgatcctcggctctttactgccatgttgtttaccggtatctggccacaacgggcgttcatccactggcgcatcaactggcgaaaagtacatgatgcagcaaatactgctgagccttgttcatgcgctgtacgaagtaatccgcagccggtttttgccaatacggaaaaattgaacgatgctgtgaagagctgcgtcagttgctcaataaccaccatgacctgaaggttgtggaacaccaatctatggttatgtgtggctgaacatggaaacggcgcatcagctgagttgctatcgaatctgatttgccgggccttgcgcaaataattcctgacttcagaatcatcttgctgctgcttcgattcagcaaggataaagggtagatagtgaaaagggataaaagcattgtcatctgcggcagctatgagtaacttgggtgcaccgggttcccctgtgtggccaccgggggatcccccatgggcgccgcaaagcgcgtggatgagaacgctcgggtcgatgtccaaggcacgcaaaccactcttggcgcatatcaccgtaaatggcagtgagaaagcaatgaaatattccttagggccagtgctgtggtacagcagcgccgacgtgattatcttggtgaagcggtatgcagcaagcgtcgggcaaccaaagttggcactggctggagatggcaaaatcgctcgccgggagtggtaagcagattgtctctccacgctggcgctggtgcaggcatcatctgaactgggcgaactgaacgctatgttgagaacggtgagtttctgattgaagccagcgatctcggctggtgaatatgtgcgctgaacgcaaactgccgttcgtcgccgggcacgcctgaactgcgggataactctccagccccgcagatggacaaactccacttcaatcacgggaatatgctcaatggcggcgtagcagaaaaaggaaaatcgacgtccagcgccttcgccagtcgcacaaccctgcaccatcccaactgtgagtttttgccagtacagcgaagtaacaaagagcacgtagcacagcctcgtcgttgactgtatgtctttctcccatctttcgtacagtttgcggggcaatacttcatcaagtcgtttaatgtgtccaggtagcgcaggttgccacgccaggcttgctcctgcgttttgcctcgtgatgatctgtttcctcgtgattatctggcgtgtgttctcgtgtttagtctcttcgtttttgggtgctttattccgtaacctccagtacatgccttcgtctttttccattgctattgactgccgtatgtcggtgaatgtttcgacccttgtgtatgccatcacctgccggcaacatgcgctcgggcaaagtgaaccttcgataatcaagtctctgacgccggagatatttctcgccat

SEQ ID NO: 138895 - DNA, 456 bp, Homo sapiens
atgaagcagatggatacccgcggcaaagtcatcaactgcgccttcgccgtttccgctgctttcgccctgggcgaccacttaggcttcgccgctgccaacatgaacgccatgatcttcccgatgattgtcggcaagttgatcggcggcgtaacggcgattggcgtggcgatgatgctggtgccgcgctacgaattcattaaacgcgaaattagctggcaaagtccggtgttctttacccctgtcgataaacagggcggtttaaaagaagcggaactgaaaaccttaatactcgagcaatatcatgctgcgggtattgagccggaaagcgttgattctggtgccatcatcatcaccggtgaaagcgcgaaaacccgcaatgctcgcccgacggtaatggcgctctctcagtcgctgggcgattttgtcgttgccagcgccgggccgcacctcgaataa

SEQ ID NO: 138896 - DNA, 671 bp, Homo sapiens
gattccccgccaacaacatcccgatgttcggcatgatgaatcagatggatacccgcggcaaattcatcttctgcgccttcgccgtttccgctgctttcgccctgggcgaccacttaggcttcgccgctgccaacatgaacgccatgatcttcccgatgattgtcggcaagttgatcggcggcgtaacggcgattggcgtggcgatgatgctggtgattttctcccggctggagctggttaaccgtgcggcggtgtcgcaggtgccgcgctacgaattcattaaacgcgaaattagctggcaaagtccggtgttctttacccctgtcgataaacagggcggtttaaaagaagcggaactgaaaaccttaatactcgagcaatatcatgctgcgggtattgagccggaaagcgttgattctggtgccatcatcatcaccggtgaaagcgcgaaaacccgcaatgctcgcccggcggggatggcgctctctcagtcgctgggcgattttgtcgttgccagggccgggccgcaccttgaatccgtgaacgccgggtaccgaactcgaattcgaaatcatgggcatagctggttccctggggaaattggtatccgttcacaattcccacacacattacgaaccggaagcataaatggtaaagcctggggtgcctaa

SEQ ID NO: 138897 - DNA, 1626 bp, Homo sapiens
atgaataggaaattgaagtcagagtgtaaagggctggaactgctggctatgggggcagtggagctagaggacaggcagcatcccccagtaagagctcaggttttcacagccacagtgggatggaagcccttactcaggagaaaccactttgtaatgtgggttttcaaccttggctgcacgttgcaatcacctggggatcccccgcaaccgcctgacaaagattctgatgttattggtctgaggagctgcctgagaattggtgattccaaagctcctctggtgttatgtgtttttctagcacaagaaaagttccggaaaactcaaatatatgtgaggtgtgcaacaaatggggacggctgttctgctgcgacacttgtccaagatcctttcatgagcactgccacatcccatccgtggaagctaacaagtcacattgtggaaaacctggaaatctggagtgggaacccctgcttcttcctttgtaaaaaaggcccttgcacaggtgagtgtgcggaaccacgaaaatgtgctccaccacttgtagttgctgcaaatattgatgaaaagactctgaaacgagaaggtgtttgtaaaaccagtcttcctaccactatgggtttcagcagtagtgacttttcagacctgagtaatggagaagagcttcaggaaacctgcagctcatccctaagaagagggtcagaatttaagatccaaggttaccgctatcaagaacatacatctacaatcctacctttttcatggaaccccaagaattctgccagctcaatctacatatgcttgccagcagtatcagcagcacctgctactaaagatggctctacctgtacccagagtcaaatgaacctgccagcacaagccagccatgactgctgggcagaaccagccatgactctcttatgtgggcacagtttgggccccaagcatcagagaatcccagctattgccattgcccagcagggacgccgttttgagcgttaccagtacgctttgtcggtactggaaaagccgatggatttcaccggcaacgacacttataaccttgaccgcagcaaagcgccctggccgaaaaacgaggctgagttgaacgcgctgtgggacagtaaagtcaaattcgacgagttaagcctgaagctgacaggaaaaacggataaagaaattcgtgaaaccctgactcgccgctacaaatttgccattcgtcgtctggcgcaaaccaacagcgaagatgttttctcgctggcaatgacggcgtttgcgcgtgaaatcgacccgcataccaactatctttccccgcgtaataccgaacagttcaacactgaaatgagtttgtcgctggaaggtattggcgcagtgctgcaaatggatgatgactacaccgttatcaattcgatggtggcaggtggtccggcagcgaagagtaaagctatcagcgttggtgacaaaattgtcggtgttggtcaaacaggcaagccgatggttgacgtgattggctggcgtcttgatgatgtggttgccttaattaaagggccgaagggcagtaaagttcgtctggaaattttacctgctggtaaagggaccaagacccgtactgtaaccgttgacccgtga

SEQ ID NO: 138898 - DNA, 4986 bp, Homo sapiens
  misc_feature (1)...(4986): n = a,t,c or g
atgaaagcattctggcgtaacgccgcgttgctcgcggtttctctgcttcccttctcttctgccaacgccttagcgttgcaggcaaaacagtatggcgattttgatcgctatgtcctggccctctcctggcaaaccggattttgccagagtcaacacgatcgaaatcgtaacgaacgagatgaatgtcgcctgcaaaccgaaacgaccaacaaagctgattttctgaccgtacatggtctgtggccaggattgcctaaatcggttgctgcccgtggtgttgatgaacgccgctggatgcgcttcggttgcgctactcgcccaatcccgaatctaccagaagcgcgcgccagccgaatgtgttcatcgccggaaaccggattatcactggaaacggccgctaaactaagtgaagtcatgccaggagctggcggacgttcctgcctggaacgctacgaatatgccaacacggtgcctgcttttggtttgatccggacgcatacttcgatttgtcagatctgcctgactgaacgcctgatagccgcctttcagtttatccgggaacggaatggattcgatctggcctttcttgtgataagccagcgtacaggcagctaccgcctggaaggattccgcacgaccagtaccgagattgaagatgccggaaacgccattttccaggaaccacagattcacatcagccacgtcgcccacatagacgaatcctgtttgaagttctcgctaccttcaaacagcttcgtggtctgcggaagaagcgtacaggaacgggatttcacgctccaggcagtagtgcagcagctccttggagtattgatagttgttatccatcatatacttgccgtcccactcggtggtggaagagcacgcgccttcgtggaaaatcgcttcgacatcgccgaactcttcgccagccataatctggatcaggaagtcttccttatccatatagtcttcgatattcagatccaccaggttcacaaactttggtgcggttgtccaccaccagaatatcggggattccgtcttgccatgccatgcatggtcgactcctatgaggatccccacgtttatctctccaccgcttacacctacgccaaacatcgccctgaccacgctgacgatgaaaccacctctttcatgcagtttggtatctggtacgaatacggcggcggacgtttcgccacggcttttgatagccgcttctacatgaaaaatgcctctcacgatcccagcgaccaaatcttcctgatgcaatatttctactgtttttccgcccatgccgctaacgccgacaattataaaaacgtgattaaccgtactggcgcgccgcagtacatgaaggattacgattacgacgatcaccagcgttttaatccgtttttcgatctcggagcctggcatggtcatctgttgccagacggccctaacaccatgggcggctttccgggcgttgcgctgctgacggaagagtacatcaactttatggccagcaatttcgaccgcctgaccgtctggcaggacggcaagaaagtcgactttacgctggaggcatacagtattcccggtgcgctggtgcaaaaactgacagcaaaagatgtgcaagtcgaaatgactctgcgcttcgccacgccgcgcacgtcactactggaaaccaaaatcaccagcaataaaccgctggatctggtcgaaccgaacccggattatccgcgctggagccgcaagcgtattgaagaaacctgttgggaactgctgatgaacggttatctcaattgcgaagatttaatcgacccggtggtgacctttgccaatagcccggaaagctatatgcagtatgtcgaccagcatccggaacagagcatcaaaatgggcaatcaggcgttctttccggaaaacattctggagaaatttcgttatatcaaagagatgggcttcgatggttttgagattgacggcaaactgctggttaacaacatcgaagaagtcaaagcggcgatcaaagaaaccggtttaccggtgaccaccgcctgctgtggctatgacggatggattggcgactttatcgaagagcgtcgtcttaatggcttaaaacagatcgagcgcattctcgaagcgctggcagaagtggggcgtcagacgctcagcctggtcaacggtaataccgcaaccacgcgcccaaccttctgccgctttgctcggtttgccttcagcgtcgaacgcctgggcaatcgccgggccgcgtttttcgatttcacgatccggttgcgcttccgccagctactttcagcgccagacgacgcggacagcaaaccattgaacggtgccgtgtgcgaggccagcgttatccagctccgcagtaaagttcgcagcaaaggactcagccaggctgcgcagtgcttttggtggcagctcttcagtgccgatttccaccagaaaagttttctcagacatagccgcctcttacttatctttgttgcacatcgggaagccgagggcttcacgggaagcgtaaatgtagcgctgacgctcggtgacggagatggctttacgcgcatccagcaggttgaagctgtgggcggctttcagaatacgctcgtaggctggcagcggcacggnattttccagcgccacatgctgctgcgcttctttctcgtactgctcgaagcaggtgaacaggaagtccacatccgcgtattcgaagttgtaagtggactgctccacttcgttctgatggaacacgtcgccgtaggtggttttacccagcgggccgtcgctccagaccaggtcgtaaacgctgtctacgccctgaatgtacatggccagacgttccagaccaatcggctttgtctggctgatattaagcagacggctcatctcttcggttggcatcagaggaatgatttcctgttcgctacgatcgataaccattttcttcacttcttcgataaagtgatatttcgaattttccatgacctgccaggatctgctgctcgactagctgatcagcaaaatatgcagacacataatgccaaagttgagtttcagcagccgcggttccgccagcactttactgaaactgcctttcaccattccggactcacgattaagtacgtgagtgctactgttgggcacaacccaaatggtcaacgcaatgccggtcgttgccagaatagcgatcatccagaacagcgcgtgcagcccaagtttgtgagtgatgatcgggccaagcaccatcgcaatggcaaaggttctcatttgctgatgagcaccgccgaagacggcaaacaggtgccatgggtacagccgcatgaaccgcccgtcggcgatattcattccggttactgggagctggcgaaagacggtatgtacggtgttgctaaccgccctaacggtacggcgcataaatactttgctagcgcaccgtacaaaattgcggcgaaatccggtaccgctcaggtcttcggtctgaaagcgaacgaaacctataatgcgcacaaaattgccgagcgtttacgtgaccacaaactgatgaccgcctttgcgccatacaacaatccgcaagttgctgtcgccatgattctggagaacggtggtgcgggtccggcggttggtacactgatgcgccagatcctcgaccacattatgctgggtgataacaacaccgatctgcctgcggaaaatccagcgcgccctggttatctggagcgccagggtcaggatattggcatgatggagcgtaaaatcggccaaatcgcgatgggtctggtcatcatggtggtgatggcgcaaattcctccacgcgtttatgaaggctgggccccctatctctatatcatctgtattattttgctggtggcggtagatgctttcggtgccatctctaaaggttcgaaggttgaaccgattccgcaaaatggaccgtgcggtgacaacagcctggtggcgcttaaattgcttagcccggatggtgataatgcatggtcggtgatgtataaactaagccaggcgttaagcgacatcgaagttccatgttcggtgctggagtgtgaaggatgtgagcgacctatgaaaacatgttggcaaatcctcgaaattgaaagcacgacgcaaatagacattatccgccaggcttatcttgctcgcttaccgttgtgtcatcccgaaaccgatccgcaagggtttaaagcattacgccaggcctatgaagaggccctgcgactggcggtaaatcctgtcgaggaagcagatgatgaagaaaaagatgctgccgctgaacatgaaatactacgtgcattcaggacattactggattcagaaagtgatcgttttcagccttccgcctggcagaaatttattcagcaattaaatacctggaacatggaggatgtcgatcaattacgctggccgctgtgtgcaatcgccatagaagcgcgatatctttcattaaattgtgcttctttgctggcagagcgtttgaactggcattcatttaatgacagcgaaggaatggatgaggaagaaagggaggcttttcttgaggccattcaggctggtgattgtttcgatttccttagccttctggaatatcccattgcgttgcagaaccagactgttgagtattacttcgcgctggaacgttgctgccgttaccatcctgactatgtcactgcgtttttggcgatggaaagtccgtggttaattcctgatgatgcaagttacatcgcaaactgttgcgctggtacactcggtgcaaacaggtattgcggaactcattcctgtcgctcaacaattgcaaaccgaagaacccagaagcgaagatgcccggtattacctgtgtgcacaacgtttgtactgccgcgaaggggaaagcctgcatgccgatctctgcgcgtactcggaaaatttaccatctacacaactgatatttgttgttacatggagcaacgtcattgccggattattcgcgtataa

SEQ ID NO: 138899 - DNA, 726 bp, Homo sapiens
aaatgcgctgtcatcgtccgggttagtcagcacgcgcagataaccagcaagtccttgatttcaggacgagagaaaaacgacgtaccaccagaattttaccgcgcggttaaaatgtcggtgaagaccgcggtaaagagaaagtcggcgtgctggatattccgggcttctatgtgggttgacagacgatgtcaaagtgcaactgcagaaactggaaaaacagaatgtagcagcgtcatcatcgacctgcgtagcaatggcgtccgcgataacaacggcaaggttcgtgaagatagcgataccgacggacagttttctataaaggcccgctggtggtgctggttgaccgcttcagtgcttggcttcagaaatctttgccgcggcaatgcaggattacggtcgtgcgctgttgtgggtgaaccgacgtttgctggttttgagctgctggacggtggcaaaagcggaactcgcggtagcaggacgctgccagcgaactcgcagtttgcaagtgacggtattaaccgaaaagtgactgagcgtacatgtatacgaagattattggtactgcagctatctgcccgaacaagtgcggacaaacgccgatttggaaaaaatgtggacacctctgacgagtggattgtcactcgtaccggtatccgcgaacgcacattgccgcgccaaacgaaaccgtttcaaccatgggctttgaagcgggacacgcgcaattga

SEQ ID NO: 138900 - DNA, 6732 bp, Homo sapiens
atgaacggacttctgattcttacggcactcctgccgtttgtcggctttgcacagcccattaatactctgaacaaccctaaccagccggggtatcagatacccagccagcagcggatgcaaacccagatgcagactcagcaaatccagcaaaaagggatgctgaatcagcaactgaaaacgcaaactcagttgcaacagcagcatttagaaaaccagataaacaataattctcagcgggtgttgcagtcacagccgggggagcgaaatcccgcccggcagcaaatgctgcccaacaccaacggcgggatgttaaacagcaaccgtaatccggatagttcgttgaatcagcagcatatgctgccggagaggagaaacggcgacatgctgaatcagcccagcacgccgcagcctgacattccgttgaaaactattgggcccaacaaaccgcgcggcagttccggtgccgcctgttgtgcagcttctaaagcatcaatctcaaacgatgacagcagcggcggcgtcataccggcccacagctcgcgtgccgccagcgccaccattttgcccgttaatggcccggtgccggtggtgggtttgatttcgatattcgccatcatcccgtgttcgcggcaacgttccgccacctgcgaaagcaacggtagcggctcacctttaaacattttgctgtaccaactgcccgcatccacgcgcagtaaatcctgccagttcagttcacccgcgacgccccagccgttgctccgtgccggtggctctatatgcgcagggcggcagggggatttacccccgttgaaggtaatgcccgtccctacaaagacttttggcgtccacatccgtgtttctccctactgcctgccctcaaacgatttgcgcttaggatgcccacgtcttcagccacgtgatgccttctgcgatcgtcttaaagttcatccgacccacgcggatgccgtgcgcagaagcttgattcagatatggatgttccgcacggcaggtcgaacaccaggtcgcccagacgttaagcagtactggtttgccctgagtcagcacatccgcctgataaaactgccccggattgtccatgattcgagacgaaacttcggcacaggcttgccaatgagcgccgattccagattggtcggatcatccccttcggcattacgcgccagctgccacagcagcgccgcggcaatcgccaggaagataatcaacggaattaacaatactttgcgcttcatacggcctccggcgcagttttttgcggactcacgcgcttacgatagcgaggatcaaacagacacagcagtccgcccaacgccatcatcagcccgcccgcccaaatccagcgaacaaatgctcttcaccgagggccgcgtacaggtcacgcgtgatgccgccgtcaattgccgcttcggtcatcatcgacccggcagtgttgtaataacgtttttccgcatacagcaccgtttccggcttgccatcgcgcgttacgccgatagtcgccacaccgccacgccagttcgggccagtcacctctttgacatcacggaagcgaccggtttcccgattgctaaagtggcggcgaaactggcggtgggttacaccctcgacgaactgatgaacgacatcactggcggacgtactccggcctccttcgagccgtccatcgactatgtggttactaaaattcctcgcttcaacttcgaaaaattcgccggtgctaacgaccgtctgaccactcagatgaaatcggttggcgaagtgatggcgattggtcgcacgcagcaggaatccctgcaaaaagcgctgcgcggcctggaagtcggtgcgactggattcgacccgaaagtgagcctggatgacccggaagcgttaaccaaaatccgtcgcgaactgaaagacgcaggcgcagatcgtatctggtacatcgccgatgcgttccgtgcgggcctgtctgtggacggcgtcttcaacctgaccaacattgaccgctggttcctggtacagattgaagagctggtgcgtctggaagagaaagtggcggaagtgggcatcactggcctgaacgctgacttcctgcgccagctgaaacgcaaaggctttgccgatgcgcgcttggcaaaactggcgggcgtacgcgaagcggaaatccagttcgccaccgacaccgcttacatgtactccacttatgaagaagagtgcgaagcgaatccgtctaccgaccgtgaaaaaatcatggtgcttggcggcggcccgaaccgtatcggtcagggtatcgaattcgactactgttgcgtacacgcctcgctggcgctgcgcgaagacggttacgaaaccattatggttaactgtaacccggaaaccgtctccaccgactacgacacttccgaccgcctctacttcgagccggtaactctggaagatgtgctggaaatcgtgcgtatcgagaagccgaaaggcgttatcgtccagtacggcgctgctggcgtaccggttatcggcaccagcccggatgctatcgaccgtgcagaagaccgtgaacgcttccagcatgcggttgagcgtctgaaactgacacaaccggcgaacgccaccgttaccgctattgaaatggcgcgtagagaagggcgaacgagattggctacccgctggtggtcacgtccgtcttacgtcctccgcggtcgggcgatggcaatcgtctatgacgaagctgacctgcgtcgctacttccagacggcggtcacggtgtatacgatgcgccgtgtgccgcacccgtcctcgatacgcggcgccgttaccatatgtcactcctcccttgtttctgagctccccttcgcctcatcgggcatattcttttcatcccagtttctaaagtgttctcgtgccgtccgggcccttgtccctgttgcgcacaccgccctttgcctggccagttgccacacggtccgccgtctgtatccttttacgtcgtttaaccgaaaacccctgtggagtcccagagtccagcaacatagacttgggggttataaacaccaaactgaagtgtttactgtaattgctcctattaaaactcggggtaccacatgtgacgtccagctgctagcgtcagagaggtggctcccgcggagaacgaccgtcgcgggaaacattggcaagcggttggacccgaaaacgcgcgcggccgtaacaaacgggaccaccagaatttccgcaggacgctggccacggagccgtaaccagggtggaagaaaggccctgcgccgggacacgcaaattccgggcacggctggggtatgctccggcgtcacgtatcccgaggaaaccgagtcggcaagggaacgctggcccagattcaccaatgggcctgacggcgaagtgatcgccattgatgtcaatgatgagcagttaaaactggcacccgaaatgggcgcagatttagcgattaactcacacaccgaagacgccgccaaaattgtgcagaaaacttacggcggtttgttccgcctcgaggtggtgtgtaccgccgttgtcggatatggcgcctgggtatttaggggcgccatcgccgcccccgcttgttatcacccgcccgtgctggtggcccggggacatgccggacgtaagctcactgctgagatggcacgaaattacgatctgattctggcaatggagtcggaacatattgctcaggttaccgcaattgctcccgaggtccgcgggaagacaatgctgtttgggcaatggctggaacagaaagagatcccggatccctatcgtaaaagtcaggacgcatttgaacatgtctacgccgtccactcccacagcttagcaggcgtcttggcattatcttcgcttttctcaagcccggcaggtcgtagtctaggccgtagcagccctaaagcagtatcagcagtcccgcccgacgtcccaccagtcccgttcgccagatggtcaccccgggggataaccatgtcggtggcgatgccaactgtggcatctggcttgacgacccatcggcaaggttatctctattcgcccattgatccgcaaacaaataaaccgtggcccgccatgccacagagttttcataatttatgtcaacgtgcggctacggcggcgggctatccagatttccagccagatgcttgtcttatcaaccgctacgctcctggcgcgaaactgtcgctgcatcaggataaagacgaaccggatctgcgcgcgccaattgtttctgtttctctgggcttacccgcgatttttcaatttggcggcctgaaacgaaatgatccgctcaaacgtttgttgttggaacatggcgatgtggtggtatggggcggtgaatcgcggctgttttatcacggtattcaaccgttgaaagcggggtttcatccactcaccatcgactgccgctacaacctgacattccgtcaggcaggcgcttatgacgatcgtatctggacccgcagcattgttgcctggcctggcgtgcgtcatctggacggtgatgatttctctccggttatcacccaggcgcaacagatgccaggcttcccgtacagcgaaattccgcaccttatcaccgtggattttgttcgccagacgctgcttggcgctgctaatacgctgattagatctgagaaactgggctgcggtgtcaacgatctgccgctgtcgctggtgctctcctggtttgaacagaaagcgatcgtcattctgctgacgctgctttctctgggcgtgaaaaatatcgtcaccggcccgactgcacctggtttcctgacaccagacctgctggcggtgctgaacgagaaattcggcctgcgttctatcaccactgttgaagaagacatgaagcaactgttgagcgcgagtttgtcgatgacgatgccaacgaatcaatgcccgtggcggatgcaggttcatcacattacgcaagaaacgccggatgtgtggacgatttccctgatttgccacgattactacccatatcgcgccgggcaatatgcactggtcagcgtgcgaaactcagcggaaacgctgcgtgcttacaccatttcctccacgccaggcgtgagtgaatatatcaccctgaccgtgcggcggattgatgacggtgtcggctcccagtggctgacgcgcgatgtaaaacgcggtgattatctctggctttcggacgcgatgggggaatttacctgcgacgataaagcagaagataaattcctgttgctggcggcaggctgcggcgtcacgccgattatgtcgatgcgtcgctggcttgcgaagaaccgtcgggatcctctagagtcacctacagcaggcactcccctcgcgcgcccgtgtgcgtcccaactgacggtgctgacgccgggaacacacttctgtgcggacctgagtagaaatatgaccaacagcaaaggccatcgtcagaacggtcagaccgaacgccaacgccacgccggcaaaaccgatgcctattccggaagcctgagtcatgacgtccccgtcaagccggtccaggagctctggtattccgcaaaagcagagtacctggcgggagcgagatatgccgccaacaatatcaatcatatacttgaagaagcgtcacaagcgactcaaacagcggttaacattgccgggaaggaatgcaacctcgaggagcaatatcagcttggcactgaagcagctctgaaacctcacctgcgcacaatcatcattctcaaacagggaatagtctggtgtacatccctgcctgggaatcgggtcctgttgtctcgtattcctgttttcccggacagtaatttactgttggctccagcaatcgacaccgttaatagattacctatcctgctctatcagaaccaatttgcagatacgcgcattttggttacgataagcgatcagcatattcgtggggcacttaatgtacccttgaaaggggtaaggtatgtattacgcgtggcggatgacattattggaccaacgggtgatgtgatgacgcttaatggacattatccctataccgagaagttcatggacgtcacatgtggtaccccaccttgtgttataactagtgcatttcgtagcattgaacctgaattaacagtttatacgtgcttaaaaaaaatagaagcatctttcgaattaatcgaagaaaatggagatcctaaaataacgtctgaaatacagttgttaaaggcaagtggaattctccaaagtttgtatagtgtaggatttgttggtattcgtgataaaaacacctcatcctattcattttgccatgacgggcgaactccagataaaggttttgaaagtaatgagaaattattaattcatccatgttactggcttggtttgaatctaaatcgtaatgcacttgctccagaggaagcagaggagataaatgacgaatatgatattaatattatttcagataattcagccattagaaataaaacaataggtcaaataactactcatctagatcagataccgataggaaatgaaggtgccactgaatttgaacaatggtgtttagacgcactaagaatagtatttgcatcccacctaacagacatcaagtcccatccaaatggtaacgcagttcagagacgagatattataggcaccaatggtggcaaatctgatttttggaaacgagtattggaggactataaaacagacaagttgtttttgatgctaaaaattttgaagaattag

SEQ ID NO: 138901 - DNA, 1419 bp, Homo sapiens
atgaaagttaaagtactgtccctcctggtcccagctctgctggtagcaggcgcagcaaacgctgctgaagtttacaacaaagacggcaacaaattagatctgtacggtaaagtagacggcctgcactatttctctgacaacaaagatgtagatggcgaccagacctacatgcgtcttggcttcaaaggtgaaactcaggttactgaccagctgaccggttacggccagtgggaatatcagatccagggcaacagcgctgaaaacgaaaacaactcctggacccgtgtggcattcgcaagtctgaaattccaggatgtgggttctttcgactacggtcgtaactacggcgttgtttatgacgtaacttcctggaccgacgtactgccagaattcggtggtgacacctacggttctgacaacttcatgcagcagcgtggtaacggcttcgcgacctaccgggacactgacgtgttcggtctggtaccgactcgattgcatccggcccgcgtgtgctgtgctctacgcgaactgaaagacgcaggcgcagatcgtatctggtacatcgccgatgcgttccgtgcgggcctgtctgtggacggcgtcttcaacctgaccaacattgaccgctggttcctgcatataaacagagccaaagacaaaaaccacatgattatctcaatagatgcagaaaaagcctttgacaaaattcaacaacccttcatgctaaaaactctcaataaattaggtattgatgggacgtatttcagaataataagagctatctatgacaaacccacagccaatatcatactgaatgggcaaaaactggaagcattccctttgaaaactggcacaagacagggatgccctctctcaccgctcctattcaacatagtgttggaagttctggccagggcaatcaggcaggagaaggaaataaagggtattcaattaggaaaagaggaagtcaaattgtccctgtttgcagacgacatgattgtttatctagaaaaccccatcgtctcagcccaaaatctccttaaactgataagcgacttcagcaaagtctcaggatacaaaatcaatgtacaaaaatcacaaacattcttatacaccaataacagacaaacagagagccaaatcatgagtgaactcccattcacaattgcttcaaggagaataaaatacctaggaatccaacttacaagggatgtgaaggacctcttcaaggagaactacaaacctctgctcaaggaaataaaagaggatacaaacaaatggaagaacattccatgctcatgggtaggaagaatcaatatcgtgaaaatggccatactgcccaaggtattttatagattcaatgccatccccatcaagctaccaatgactttcttcacagattcggaaaaaactacttga

SEQ ID NO: 138902 - DNA, 1594 bp, Homo sapiens
ctatccagcgaccgcttcatttgcgggttctggcgcagccgcgccaacgcaacgcgctttgatgcgttcttcaatcatctccacctgttcgcggttttcttccagccactgcgcgccttgttcggtcagcgcaatctgcttcttacctccttcctcttcgcggatggtaatcagcgactgctcctgcagaaaatccagcgttgggtagatgacgcccgggcttggggtgtaattcccctgggttagattctcaatcgctttaatcaattcgtaaccgtggctgtcatcgcgcgagagaatatccagaatcaccagacgtaattcaccgtgaccaaagaaacgttgccgacgaccgccgccgcgaccgtggcgaccaccgcagcattgaccgtgttcatgctggtgaccgtgtccgcagtgctcgtgttctgacttctcacctttgcagcagccctcatggcgtggctggccatcacgaaggcgataacaatgaataacacccccccggtaccgcagcgcgttcgcaatgatctgcgcttccgtgaactgatgtggtaacgcgttgagcgcatcagcgccggttttcagcgcattgtctcgggcgcgaaggcgctggacggttttacatcgcgtggctttgacgatcacagcaaactcttctttcctcaacctgacgctcactttgtgccgccaacggtaacggaagagggcatcgtggtggcaggtccgcgcggttcgctggtggtgccggaagattacgcgtatcagctgtatgtctgcgatgaatccggaatgcctgcattgcgccgccgcctggaaacgttgagcaaacttgccgttaaaccgcaagttagtgcgctggttagcgtgcgggataacgcctgtcaggattatctcgcgcaccttgatggttttaatatcgaatggctggcacatgatgagcaggcggtagatgcgcgtctggcgcagatgcaaatccctgccgatgattacttcatcttcaacttctgcatgaatggtataaaccggcgtgcctttatctcgcaggatgcggttgagtaaccaaccgttaaaatcttctgctttcacatcccgaccaatcacttcatcccaggtgggtaaggtcaccggaatttgcgcagtgccagggtttcctgattcgagcaatggacggaacggcatggccccacgacaatcgctgttgtagcgcaaatggaacgcttcttttgcttcgatcaccttctggtcggcacgccagcccgcagcggcagaacaggttaccggttgaccgataatctcttccagagtgcgaagaccgcgtgcaatatcgtcgatcattgtttgccgatcccagttaccgctacgggcttgccaggcatggtgatcccaggcgtgcaggccgacttcgtgatgtttagccgcttcacgaatgatatcggcattggcatgaccaatctctttacctggccaggccgtacctgccagtaaaatatccccaccataaagcgattgcgcgttttgacgcacattcttccacaaaaaatgtggcttcaccagtcgccaaagatggcggcccatattgtccgggccgatg

SEQ ID NO: 138903 - DNA, 1488 bp, Homo sapiens
ttacatgcggcccaagacaattcttcttcttccaatgtggctcagggaagccaaaagattggacaccccggcggtagcgcccgttctccgctgattaaaaaagcgctggcagaacagttgccgggcattccgattgcaggcggcgatgactttggctccgtcaccgccgggctggcacgcgtcgccatggtgcacattgtggcgcttatgagccccggtcccgatttcttttttgtctctcagaccgctggcagtcgttcccgtaaagaagcgatgatgggcgtgctgggcattaccttcgccggttgtcctgatgaagtgatgatcggcagggaatagcatctgcgccggacgcgcatttaccgtctgctcatgatgtgccagacattcgatgttcaaaccataccggtgcgcgagataatcctgacaggcgttatgccgcacgctaaccatcgcactaacttgcggtttaacggcaagtatgatcaacgtttccaggcggcggcgcaatgcatgcattacggattcatcgcatacatacagctgatacgcgttatcttccggcaccaccagcgaaccacgcggacctgccaccgtatgtatatatcccggatgcgcctgcatcaggcagccggtggctaccccaccgttgcgaataaagaaatcaatactcagttcatggcgtagttcgtcatacagcggcgtatagtcacgcgacggtgggcgtggtccttccggccagacgatgccctcttccgttaccgttggcggcacaaagtgagcgtcaggttgaggaaagaagagtttgctgtgatcgtcaaagccacgcgatgtaaaaccgtccagcgcctcgccgccgaggacaatgcgctgaaaaccggcgctgatgcgctcaacgcgtaacacagtcagttcacggaagcgcagatcattgcgaacgcgccagacccttgaattgatacgacttctagctcggtaccccgccacgatggcgagaatgccaatcgaaatccagaataacatgcccgcctggtgccagttgtgtttgatagccaacgccatcaacgcgccgtagcccagcatggtacgaaaccacgccagtgatgtgcgctccggctgcagtcctgggtcggcaatgcgtctggctttgcggaacaccagtcccataacgatcaccgccacgaccatcaatattaagctaatgattaataagctgttggtgtagggcaggtcctctttcagacgcatcgctttttcattgcgtaaccagcgcaagtagccatacatcgctaacccgccggaaaacagacacaacaacaacgccagcagttcgcgaatgacgggcgtggcgaaatctggcgcaagttgatcaagcccaacccccgccgccagaaatcctagtgcagtacggatccacgccagaaaagtacgctcattagccagcgagaagcggtaatcaggcgcttctccgaggcgggaaattttcat

SEQ ID NO: 138904 - DNA, 1344 bp, Homo sapiens
  misc_feature (1)...(1344): n = a,t,c or g
tcagaacgtgaatgcagcgccacgttcatcacttatgagtcggtacagcgatacattgtgaaccgggagaagtccacgtcgtaaggccgtacccgttgccgtcagggcagcaattatgtggatgtaattagaaacaggaagcctaggctcggtaccgactacaatctctcggctccgttccaacaggtatgtcgctgctgcaaccgggtaaagcgccgctgcatatgccacccaagcgcaggaagtgtatgacgttaccggtgcgggcgacacggtgatggcgtcctggcggcaacgctggcagcgggtaattcgctggaagaagcctcttctttgccaatgcggcggctgtgcgtggtggtcggcaaactgggaanctccacggtttcgccgatcgagtcgacagcgtatgattgtgctgggcgcactggaagcggtcgactgggtagtgcgtttgaagaggacacgccgcagcgcttgatcgccgggatcttgccagactgctggtgaaaggcggcgactataaaccagaagagattgccgggagtaagaagtctgggccaacggtggcgaagtgttggtgctcaactttgaagacgttgctcgacgaccaacatcatcaagaagatccaacaggataaaaaaggtaaccggaaagcggttcacagatctcgcttcgtacatggcaggcctattacgctgttgttttttcaactttcgggtcgaatccagtcgcaccgacttccaggccgcgcagcgctttttgcagggattcctgctgcgtgcgaccaatcgccatcacttcgccaaccgatttcatctgagtggtcagacggtcgttagcaccggcgaatttttcgaagttgaagcgaggaattttagtaaccacatagtcgatggacggctcgaaggaggccggagtacgtccgccagtgatgtcgttcatcagttcgtcgagggtgtaacccaccgccagtttcgccgccactttaacaatcgggaaaccggtcgctttcgacgccagcgccgaagaacgggacacgcgtgggttcatttcgataacaatcagacgaccgtttttcgggttcaccgcaaactgaacgttggaaccaccggtttcaacgccgatttcacgcagcaccgccatcgaggcggtacgcatgatttgatattctttggcggccaacggttgggctggcgcgacagtgatggaatacccgtgtggatgcccatcgcattgaagttttccatagagcagacgatgaagccgttggcgttttatcaccaccaccttcatttcggactctttcacccgatcaggattatcaatcaccaacccttggc

SEQ ID NO: 138905 - DNA, 3332 bp, Homo sapiens
ttttattgctaccgccaattccggcttccgccagcttttcgtcaaggtcgcgaccgtctgcgactttctccaactgtgcggcagcatccaggcgagcctgacgttcggcctgacgcgtttgcaggcgttttaaggattctgccgctgtcgaaacgctggaagatgcgccaacggtagaggttgttacagcctgttgtgcacgctgcatggcttcagtggctttaacgacttccatttgctgctcaaactgagcgatacgctgcgctgtcgctgtaactgctttttccacgccatcacgggagacttccagattcgacaacacttgctcttcagcggtaatgagattctcaaggcgcgcgatttcttcagcaacttcgttaatcaacgacggattaacgttcttgcttaacgcttccagcgcacgggcttccagactggctttgcgctcacgtaaatctttcagcttatcgtgacttaatttcacccgcgccagcagatcaacgcgagattctccggcagctatagacaaaaaaaaacctatgggatcctctagagtgacctcagcatcagctaattccaatcgtgctcggtaccagcgctttttgcagggattcctgctgcgtgcgaccaatcgccatcacttcgccaaccgatttcatctgagtggtcagacggtcgttagcaccggcgaatttttcgaagttgaagcgaggaattttagtaaccacatagtcgatggacggctcgaaggaggccggagtacgtccgccagtgatgtcgttcatcagttcgtcgagggtgtaacccaccgccagtttcgccgccactttagcaatcgggaaaccggtcgctttcgacgccagcgccgaagaacgggacacgcgtgggttcatttcgataacaatcagacgaccgtttttcgggttcaccgcaaactgaacgttggaaccaccggtttcaacgccgatttcacgcagcaccgccatcgaggcgttacgcatgatttgatattctttgtcggtcagcgtttgggctggcgcgacagtgatggagtcaccggtgtggatgcccatcgcatcgaagttttcgatagagcagacgatgatgcagttgtcgtttttatcacgcaccacttccatctcgtactctttccagccgatcagcgactcatcaatcagcaactctttggtcggagagagatccagaccgcgggcgcaaatttcttcaaactcttcacggttataagcgataccgccgccgctaccgcccatggtaaaggatgggcgaataatgcacgggaagcccacgtcagcggcaaccgccagcgcttcttccatcgtgtgtgcgataccggaacgcgcggtttccagaccaattttcttcatcgctacgtcgaaacgacggcggtcttctgctttatcaatcgcatcggcagtggcaccaatcatggtgacaccgaactcttccaacacgccctgacgttccagctccagcgcgcagttcagcgccgtctgaccgcccatcgttggcagcaccgcgtccgggcgctctttttcaataatcttgcgtacaacttcccagtgaatcggctcgatgtaggttgcatcagccatttccgggtcggtcatgatggtcgccgggttggagttcaccagaatgacgcggtaaccctcttcacgcagggctttacacgcttgcgcgccagagtagtctaactcacacgcctgaccgataacaatcgggcccggacccagaatccggatacttttgaaatcgggaaaatgcttcacgccctgtttagccactaccgtagcggcagtatgcaaagcggcttgcgaatgcacgatctctgcgccatcgcctggctggtgcgcccggacctgttcactctcaaacccgtgcaaagcagcctcgatgcggtaaaagatgattttgatgtgtttatcgattttacccgtccggaaggtacgctgaaccatctcgctttttgtcgccagcatggcaaagggatggtgatcggcactacggggtttgacgaagccggtaaacaagcaattcgtgacgccgctgccgatattgcgattgtctttgctgccaattttagcgttggcgttaacgtcatgcttaagtgtcaccagggtgaaaacaatactgtagcgtagctttccgtccatcaatgaatgcagcgcaatccccaccactaccgcgacgggcatcagcgccagaaagaaaggccaggtgtagataaagaagaacagcgtgttagagccataaatcaacatcggcatcgccagcgcaaataaccaggagataaaaccgaccacggcaccaggcagtgaccatgtggtttcttcatcctcagtaaggctgtcgttatttgttagtgtaatgttatggctattacgcatatttgatcctgttacattgagatgaatttctgccgattcaggcgcttcgtaaacggaatctattcccgtaaagttgcgcagttcaccggcacgcgctttcttatataagcctttgggatcgcgggcttcgcaaatcgccagcggcgtatcgacaaacacttcgataaagcgcccttctcctacgcgttcgcgaaccatctggcgttcggcgcggtgtggcgagataaatgcggtcagcaccaccagtccggcttcaaccatcaaattcgccacttcaccgacgcgacggatattctctttacgatcggcatcgcccgttgaccggtttaactccttgtttcccggccgttgtttgcaaagttggcaggggggcttgtcccgcgtggggcccatgttggtgggaacgtcgtcctgatgcatatagtctgcgtattctgctatgggctcaacacgtggatccccggtgattccactcttgctgtaattagacgcgtcgtcctcggacacatagccgcgtcggccgcagtggcggccggcgcaggcacatggttggttccacacggcccactctcgttgctctgatacggccgtctggtggtacccctcttgccgcgcgaaaatatctcgtcctgtgtgaacacgattcccctctttgttgcccctgtctcctcgtgtgggagggaacctcttttcttttcctttttccctcccttgctggtgattacgcttggcacgctgtatctgtttgccggaagcgctctgctgctttccggtatggccggagcgacggggtacgaaggtattggtggattcccgatggcgtttacagatttcgctaacctggatgtgctgggactccccgttccgctgattatcttcctgatatgtctcctcgttttctggctctggctgcataaaacccat

SEQ ID NO: 138906 - DNA, 1794 bp, Homo sapiens
ttaatcatttttcggataccaggctgttgaaaactcaggacgaataaggtctatttcaggttggttatgcagaaaattgtcgggataataaccatagtttttcactccattcagttgtaataggctcatccagtgagcgagttgttgcgaagaaatagcctgatgctgaccatttttctgccagttttgtgcctgtaattctaaaatagatttgtctttagcctgagggatgtttttaatttgattggtccattgtattaaccattggtcagccgatttttctgcgacaccttccagatacggcatagccataatcgcggtccagtcatagctatataggaaatcagcataattctgtgcaaaccaggcttcactttcaggttgtattaccggaagtgcaaaaatatttcgtgcagttttaatatgtggaccgcgaatggcttttacgcgcgcactaagttctaaagtgaagtcagttaacgcacgacttttaaagcgggcccactgtttaaattgctccgggttttgtcgaatttcgctcagactcccgctaaagcctgcttgctgataagccgtgatagccggtgcactggcatcttcataatctgaaagcaaagcatcatcgtggaacaatatgccatcaaaagcagcatgtccggcaagatcttcatataacatgccaacttgtgctctgactctttgctcattgacgttacccgcagaagaagcaccggctaactccgtgccagcagccgcggtaatacggagggtgcaagcgttaatcggaattactgggaactgcatctgatactggcaagcttgagtctcgtagaggggggtagaattccaggtgtagcggtgaaatgcgtagagatctggaggaataccggtggcgaaggcggccccctggacgaagactgacgcctggtagtccacgccgtaaacgatgtcgacttggaggttgtgcccttgaggcgtggcttccggagctaacgcgttaagtcgaccgcacgtgtctctagcgcctggcggtctgcttgcaccaacgccggtatgctcggcaatgcgacgttcccatgcttccccgtctgtagggccttgtcgtccttcactgcccttagtcactgtggtttgcgccgtttgccgtttgtttctggcccgtccgcggttggccccgtttccggacctgttgggtcttgtgtccgctgtctccgtttgcgctttcgtctcttcgttggtcgtgtttcttgtccagtacactctcttcaccagagtccttgaccacttttctcggcagttcccctcgagtttgtgtatacacttaccactgttatacccgccgtcatgagctaccagttgacgatgaaaggagctgtgcacctgcacggcataccctagccccgttgtccgaattgatggatttaccgaaacgcctttgcgggtcacattgttcgcaatccaataattgccggcgcatgaaatattgcgtacatgcgacactcggaactccgcgggggcatccgaagcgccttctacctgcgcataaatgactcccgggtggcgatatatgggcgcgtcatgagtctgctggatggccggcagaagcgtcgtgtgcgcgccgcaatactcttccgcgctttgttcccagcgaatggccactgtgtgtaatcctcgccagtagctaccagtttgggtcactaccagaagtgcctcacgcgtgtgacttaccttgtcggcgcgtgaggaaaccgaaggcgataggcctgtatgcgaggtgtatgtgaaacttggcat

SEQ ID NO: 138907 - DNA, 4751 bp, Homo sapiens
  misc_feature (1)...(4751): n = a,t,c or g
atgaataacaccccccgctacccgcagcgcgttcgcaatgatctgcgcttccgtgaactgactgtgttacgcgttgagcgcatcagcgccggttttcagcgcattgtcctcggcggcgaggcgctggacggttttacatcgcgtggctttgacgatcacagcaaactcttctttcctcaacctgacgctcactttgtgccgccaacggtaacggaagagggcatcgtctggccggaaggaccacgcccaccgtcgcgtgactatacgccgctgtatgacgaactacgccatgaactggcgattgatttctttattcacgacggtggggtcgccagcggctgggcgatgcaggcgcaaccgggcgataaacttacggtggcaggtccgcgcggttcgctggtggtgccggaagattacgcgtatcagctgtatgtctgcgatgaatccggaatgcctgcattgcgccgccgcctggaaacgttgagcaaacttgccgttaaaccgcaagttagtgcgctggttagcgtgcgggataacgcctgtcaggattatctcgcgcacctgagtggcnggggtctgaccgccgtactggacgataacgcctttcggcttctcgatacgcacgatttccagcacatcttccagagttaccggctcgaagtagaggcggttcggaancgccagcgaggcgtgtacgcaacagtagtcgaattcgataccctgaccgatacggttcgggccgccgccaagcaccatgattttttcacggtcggtagacggattcgcttcgcactcttcttcataagtggagtacatcggccccagcccagtgtgttgccaagcgcgcatcggcaaagcctttgcgtttcagctggcgcaggaagtcagcgttcaggccagtatgcccacttccgccactttctcttccagacgcaccagctcttcaatctgtaccaggaccagcggtcaatgttggtcagggttgaagacccgtccacagacagcccgcacggaacgcatcggcgatgtaccagatacgatcggcgcctgcgtctttcagttcgcgacggattttggttaacgcttcncgggtcatccaggctcactttcgggtcgaatcccagtcgcaccgacttccaggccgcgcagcgctttttgcagggattcctgctgcgtgcgaccaatcgccatcacttcgccaaccgatttcatctgagtggtcagacggtcgttagcaccggcgaatttttcgaagttgaagcgaggaattttagtaaccacatagtcgatggacggctcgaaggaggccggagtacgtccgccagtgatgtcgttcatcagttcgtcgagggtgtaacccaccgccagtttcgccgccactttagcaatcgggaaaccggtcgctttcgacgccagcgccgaagaacgggacacgcgtgggttcatttcgataacaatcagacgaccgtttttcgggttcaccgcaaacgtgacacgtttggagaccgaacgcggggggatatgttcaagatccgtgccctgggaagttgtgtccaaaatcgcctgggccgaggctcccgatccgccgggggttacaatccttggtttgaagacgcagcatgcgacggtagtgagcgcgtaacgtcgcgcttcacccgttctcattatcgccagttcgacctcgatcaggcattttcggccaaaatctttgaccggtacctgaatctgctcgattacagccacaagcgtaaaaccgagttaggcgatgaagctgcgttcagcgcaaagctcgacgttttctacgatctctacaatctggcgcaaaagcgccgttttgagcgttaccagtacgctttgtcggtactggaaaagccgatggatttcaccggcaacgacacttataaccttgaccgcagcaaagcgccctggccgaaaaacgaggctgagttgaacgcgctgtgggacaatgttttctcgctggcaatgacggcgtttgcgcgtgaaatcgacccgcataccaactatctttccccgcgtaataccgaacagttcaacactgaaatgagtttgtcgctggaaggtattggcgcagtgctgcaaatggatgatgactacaccgttatcaattcgatggtggcaggtggtccggcagcgaagagtaaagctatcagcgttggtgacaaaattgtcggtgttggtcaaacaggcaagccgatggttgacgtgattggctggcgtcttgatgatgtggttgccttaattaaagggccgaagggcagtaaagttcgtctggaaattttacctgctggtaaagggaccaagacccgtactgtaacgttgacccgtgaacgtattcgtctcgaagaccgcgcggttaaaatgtcggtgaagaccgtcggtaaagagaaagtcggcgtgctggatattccgggcttctatgtgggtttgacagacgatgtcaaagtgcaactgcagaaactggaaaaacagaatgtcagcagcgtcatcatcgacctgcgtagcaatggcggtggggcgttaactgaagccgtatcgctctccggtctgtttattcctgcgggtcccattgttcaggtccgcgataacaacggcaaggttcgtgaagatagcgataccgacggacaggttttctataaaggcccgctggtggtgctggttgaccgcttcagtgcttcggcttcagaaatctttgctcgtgatgttgtggtcggtttgtgtatttgtttgtcttcgttggatgtttggttgtgtggattgttttgtaggtgtagtgtggatgctgagagaacgaagagacaaggaaagaaaggagaagagagcagaaagagaaggagaaaaggatatgagttgtcttatctactcttcgggtggtccgcggttgtgttgttgtttgtttcggatgcggaacaacatcgcgccagccggcatggtggcaacgcttgccaacaacatcccgatgttcggcatgatgaagcagatggatacccgcggcaaagtcatcaactgcgccttcgccgtttccgctgctttcgccctgggcgaccacttaggcttcgccgctgccaacatgaacgccatgatcttcccgatgattgtcggcaagttgatcggcggcgtaacggcgattggcgtggcgatgatgctggtgccaaaagaagacgcgaccgcgactaaaaccttgcggccgtactccccaggcggtcgacttaacgcgttagctccggaagccacgcctcaagggcacaacctccaagtcgacatcgtttacggcgtggactaccaggcgtcagtcttcgtccagggggccgccttcgccaccggtattcctccagatctctacgcatttcaccgctacacctggaattctacccccctctacgagactcaagcttgccagtatcagatgcagttcccagtaattccgattaacgcttgcaccctccgtattaccgcggctgctggcacggagttagccggtgcttcttctgcgggtaacgtcaatgagcaagtactttacaacccgaaggccttcttcatacacgcggcatggctgcatcaggcttgcgcccattgtgcaatattccccactgctgcctcccgtaggagtctggaccgtgtctcagttccagtgtggctggtcatcctctcagaccagctagggatcgtcgccttgtacctgggtaaaaacgagcgtgacactgcacgccgttctaacggcgacggtgttggcggttctatcagctacgaatacgaaggctttggtatcgttggtgcttatggtgcagctgaccgtaccaacctgcaagaagctcaacctcttggcaacggcaaaacgttataacaccggcgagcaaaaaatcgacgtcaccgccttcgaaccaccacgaaataatatgcaaaagtttgataccaggaccttccagggcttgatcctgaccttacaggattactgggctcgccagggctgcaccattgttcaaccattggacatggaagtcggcgcgggaacctctcacccaatgacctgtctgcgcgcgctggggccagaaccgatggcggctgcttatgttcagccttctcgtcgcccgaccgatggtcgctacggcgaaaaccccaaccgtttacagcactactatcagttccaggtggtcattaagccatcgccggacaatattcaggagctgtacctcggttctctgaaagagctgggcatggacccgactattcacgacatccgtttcgtggaagataactgggaaaacccgacgctgggtgcctggggactgggctgggaagtgtggctgaacggcatggaagtgacgcagttcacttacttccagcaggttggtggtctggagtgtaaaccggttaccggcgagatcacctacggtctggaacgtctggccatgtacattcagggcgtagacagcgtttacgacctggtctggagcgacggcccgctgggtaaaaccacctacggcgacgtgttccatcagaacgaagtggagcagtccacttacaacttcgaatacgcggatgtggacttcctgttcacctgcttcgagcagtacgagaaagaagcgcagcagctgctggcgctggaaaatccgctgccgctgccagcctacgagcgtattctgaaagccgcccacagcttcaacctgctggatgcgcgtaaagccatctccgtcaccgagcgtcagcgctacattctgcgcattcgcacctga

SEQ ID NO: 138908 - DNA, 671 bp, Homo sapiens
ggatgctgtgaaacggcttccgtggtcgtgaaccgcagctggatgcgatgccggagcagtgcggcattaagggctgatcattcagtgacaatctgctgaattgatgaaacaggcaccggagacggtgccttatctgttctggcggcccgctgggggctggagcacgatgaagacaacctgatggcgctggtgttaacgccggaacatctggaattgcgcaagcgtgatgagccaaaacttggcggcatctttgttgattttgttggcggagcgatggcgcaccgacgcaaattcggcggtggtcgcggtgaggcggtggcgaaagcggtgggcattaaaggcgattatttgccggatgtggtggatgccactgcaggacttgggcgcgatgcctttgtactggcttcagtcggctgccgcgtgcggatgctggagcgtaatccagtggttgccgcgctactcgacgacggcctggcgcgtggttatgcggatgcggaaatcggcggctggttgcaggagcggttgcagttaattcacgcctccagcctgacggcgctgactgatattaccccgcgcccgcaggtggtttatctcgacccgatgttcccgcataagcagaaaagcgcgctagtgaaaaaagagatgcgtgtctttcagtcgctggtgggacc

SEQ ID NO: 138909 - DNA, 1338 bp, Homo sapiens
atgcgcgataagcgtttatacgcgattcaagcttgtgcgctatacgcctattacgcctttaaccgtttaaccgatgtacgtcttaaaaaatatgggattcggcggcccaagtttctcattcccgggggtcaatatgggaataatccggccacccaaaacaaaaccttaaaaagtgctcaccatggaaaacgtttttcgggggaaaaacctccaaagattcttccggctgttgagacccagttcgatgtaaccccttgttgcccccaattgtttttcagcatctttactttcaccaagcgtttcgggttccgccggatcaggggtccaataatcctcgaaactctggcagaaatcaagaaacgggtcgcggtgggcccatctccgtcctggggccgtttcccgcacgctctcagccatattttcgccggtggttatgccgcaggttactacagctacctgtgggctgacgtactggcggcagatgctttctcgcgctttgaggaagagggcattttcaaccgtgaaaccgggcagtcgttcctcgacaacattctgagccgtggcggttcagaagagccgatggatctgttcaaacgcttccgtggtcgcaccggagacggtgccttatctgttctggcggcccgctgggggctggagcacgatgaagacaacctgatggcgctggtgttaacgccggaacatctggaattgcgcaagcgtgatgagccaaaacttggcggcatctttgttgattttgttggcggagcgatggcgcaccgacgcaaattcggcggtggtcgcgcggctatcccctatcgcttttgccctgagcgggatagacgtcccaatgatacttttgcttttggacatatccgcttttgttcccagtttgcatggaccgtaaagcgggcaaacatggcggcaccggcaggcgatctgtacgttcaggttcagtttaacagccacccgattttcgagcgtgaaggcaacaccctgtattgcgaagtcccgatcaacttcgctatggcggcgctgggtggcgaaatcgaagtaccgacccttgatggtcgcgtcaaactgaaagtgcctggcgaaacccagaccggtaagctattccgtatgcgcggtaaaggcgtcaagtctgtccgcggtggcgcacagggtgatttgctgtgccgcgttgtcgtcgaaacaccggtaggcctgaacgaaaggcagaaacagctgctgcaagagctgcaagaaagcttcggtggcccaaccggcgagcacaacagcccgcgctcaaagagcttctttgatggtgtgaagaagttttttgacgacctgacccgctaa

SEQ ID NO: 138910 - DNA, 638 bp, Homo sapiens
tttgatgggttatcaagggttttcagcgcggcatcagcctgcttgagctgtacctgaacgcgagcaagacgcagatttatcacggctttgagattttcatcgctcgtgtctgccagcccctgttgtaactgggcggcagctttctctagttcatttttgtcaacaaattgtgcggtaaccgcattttgataggcaagagaagcggagcgtgcagaatcaacctgatggctgttccagtagcgccagccaatcagtgcgccaacgcccaaaatcaccccaacagccagtgcagagcgcaaatccttcactactgctgtgccgttagccacttcagactcacccagcaccacagcaacgcgggcaccccatttatcagcacgggcaaactgtttcttaaagttgccgccgccgtggttggtcatcaatttcacgcccggtaattcatcacgcagacgctcagctaatgccatagccgcagattgtgtatcagcacctgaagccaccaggtatatatcgacaacaggatcggctttaaattccggattaacggcctgtactaacatacagacgttcgaggcccatagcaaaaccgacagccggtgttgcacgaccgcccagttgttccacaagaccgtcat

SEQ ID NO: 138911 - DNA, 1398 bp, Homo sapiens
ttaaggggtagtaatcaccactgcgacgcggcggttctcggcgcggccctgggcggtcttgttactggctatgggatatttttttcctaaaccctgtgtggtgagattgctgcgtggaatttgtccacccatagcccatgcatcggccacgacattcgcccgtttcaatgataagccttcgttgtaactgtcttcaccatagttatcggtgtgtccatccatacgggcatgtgttagccctgtcgaggccaatttagctgccatggtttggatctgttgctggctttccgggagcaatttgtagtcattttttgcgaacagaatggcatctgataagcccagcgaccagtcgccggcggattcagtaaatccataagattgcatagcggcgacttgctcaggagtaaactttccctgaggggactggcagccagtcagtattagtgaggtgaaaaccaggggtgctaccaggtgctttatcatatcgatatatccttgtatctcacagttttcggcacgctggtgtttgccttgcttatcacctttgctcagcaatgcttcaccacgcaggtcggcaacaatggcagcccacccttcacctttgatggtatcaagggttttcagcgcggcatcagcctgcttgagctgtacctgaacgcgagcaagacgcagatttatcacggctttgagattttcatcgctcgtgtctgccagcccctgttgtaactgggcggcagctttctctagttcatttttgtcaacaaattgctgcgcaagttccaaagaagccagcgcaccataagtatttttattttcagcagcaaatttttccgccgccgggatgctatccggtttgccttcgctcactgcggtaaccgcattttgataggcaagagaagcggagcgtgcagaatcaacctgatggctgttccagtagcgccagccaatcagtgcgccaacgcccaaaatcaccccaacagccagtgcagagcgcaaatccttcactactgctgtgccgttagccacttcagactcacccagcaccacagcaacgcgggcaccccatttatcagcacgggcaaactgtttcttaaagttgccgccgccgtggttggtcatcaatttcacgcccggtaattcatcacgcagacgctcagctaatgccatagccgcagattgtgtatcagcacctgaagccaccaggtatatatcgacaacaggatcggctttaaattccggattaacggcctgtactaacaatacaagacgttcgaggcccatagcaaaaccgacagccggtgttgcacgaccgcccagttgttccacaagaccgtcataacgaccgcctagaccggcatctccaacgaagagaatcaagttaactcgtacgtgacacat

SEQ ID NO: 138912 - DNA, 1579 bp, Homo sapiens; identical to SEQ ID NO: 131929

SEQ ID NO: 138913 - DNA, 3020 bp, Homo sapiens
atggccaaagccaatcccattcctgtcccccgctacccaagggactcccagtctgtatgcacaaggcgggatgtgaagtctggatgtgcaagaaacccagctgaagccgctcgttgcctcgaatgtaaatacgtttgcagcaagtgtgtggatgtctgcccgaaccgcgccaacgtctccattgcggtcccaggcttccagaaccgtttccagacgctgcacctcgacgcttactgtaacgaatgcggcaactgcgctcagttctgtccgtggaacggtaaaccgtacaaagacaaaatcaccgtcttcagcctggcgcaagactttgataacagcagcaacccaggcttccttgtggaagattgccgggtacgagtacgtctgaataaccaaagctgggtgttaaacatcgacagcaaaggtcagtttaacaacgtaccaccggagctgaacgatatgtgccgcatcatcagccatgtccaccagcatcatcattatctgctgggccgcgtggagctacacccggcaaaagtgcaggaaggcgttgatatcgccatcgaaaacgatgtgattgtcgctatcggcgatgccctgacgcaacgctaccccgacgccagcttcaaagagatgcatggccggattgtgatgccagggattgtctgctcgcacaaccatttttactcggggctttcccgcggaattatggcaaacatcgccccttgcccggatttcatctcaacgctgaaaaatctctggtcgcgaaatcacccagcgcaacgggcagaccatcaagcgggtttttaatcaccagaccgacaccggttagcggcaatgagcagcaggaacagaccgataccaatccccgtgccgtgcgccacaccgtgaggcaagttgcgcaaaatccagctacggatacccgtggcagaaattaccgtaaacagcacacccatcaggaacacggcacccagcgcgacaggtacgctaatatgttgccccagcaccaggctgaatgcggtaaacgctgtcagggagatggcgcaaccaatcgccaacggcagattagcccacagacccatcacgatagaaccgagtccggcaaccagacaggttgcaacgaaaactgccgcaggcgggaagcctgctttacccaacatacctggaacgacgatgaccgagtagaccatcgccagaaacgtttgaagcgcagattttcacgcttgagatttcatcgtcgtgttgccagcccctgttgtaactgggcggcagcttctctagttcattgtggtcaacaaaatgtgcgcaagttccaaagaagccagcgcaccataagtatttttattttcagcagcaaatttttccgccgccgggatgctatccggtttgccttcgctcactgcggtaaccgcattttgataggcaagagaagcggagcgtgcagaatcaacctgatggctgttccagtagcgccagccaatcagtgcgccaacgcccaaaatcaccccaacagccagcactttgccattttcagcaaaaaagcgtttaaccgcttctacctggtcgttttcgttctcatgctcatgctaattgcctatagcgcgctagatttgtgtattcagcgacctgaagccacgcaggtatatatcgacaacaggatcggctttaaattccggattaacgtaatagccagcaacaggggaacccccgattttaattggggaccttattgggagaaaaattcgttaaaaaatatccccccgcaggccccaagaaacattttccaaaagtccacaaatatcgccagggaaaaaacgcttgagcaggagttttcagtccagttatttgagaaaattggccgacggatgtgccttacccgcgaaggaaaaaagttgctgccgcacatttatgaacttacccgagtgatggatacgcttcgtgaggctgccaaaaaggagtcagatccggacggggaactacgcgttgtttcgggcgaaacgttgctctcttaccgaatgccgcaggtgttgcagcgttttcggcaacgcgccccaaaagtgcgtttatcgttgcagtcgctgaactgttacgtgatccgtgatgcgctactgaatgatgaggccgatgttggcgtcttttatcgtgtagggaatgatgatgctctgaatcgacgagagttgggtgaacaatcactggtgctggtggcttcaccgcaaattgcagatgtcgattttactgagccgggaagacataacgcctgtagctttattatcaacgaaccgcaatgtgtcttccggcagatatttgagagcacgctgcgtcagcggcggatcacggtggaaaacaccattgagcttataagtatcgaaagcatcaagcgttgtgtcgcggcgaatatcggggtcagctacctaccgcgctttgcggtggcaaaagagttggagtgcggagaattaattgaattgccttttggcgaacagtcgcagaccattacggccatgtgcgcacatcatgctggaaaagcggttagcccggcgatgcacacttttattcatgcgctttattcatgccggatgcggcgtgaacgccttatccgggctacaagatcgtgccaattcaatatattgcatgaaccacgtagggctgataagcgtagcgcatcaggcagtttgcggttgcaagaatttaattaccaggataaaccttgcatggagattcgcatcaggacatatgagaagacacccatacggatggataaaggcctaacaaattttgggtcacgatggattttacccgagctcgcccacaaagagaaggacgaagaaacacaacagagaagaaagagcaagagagacagtaggagagaagagacagacacgaaaaagaagacgagagacaaagcaacgaaaagagaaaaagataaagaaatagaagaaatggcttcaatatccatcaccagtagatgcgaagacaaattggagaatttttcgtcaatgaaatactatacagaaatagaaaataattaa

SEQ ID NO: 138914 - DNA, 1356 bp, Homo sapiens
ttatccagccacaaaactctcttcaacacactgaataaaagtgtgcatcgccgggctaaccgcttttccagcatgatgtgcgcacatggccgtaatggtctgcgactgttcgccaaaaggcaattcaattaattctccgcactccaactcttttgccaccgcaaagcgcggtaggtagctgaccccgatattcgccgcgacacaacgcttgatgctttcgatacttataagctcaatggtgttttccaccgtgatccgccgctgacgcagcgtgctctcaaatatctgccggaagacacattgcggttcgttgataataaagctacaggcgttatgtcttcccggctcagtaaaatcgacatctgcaatttgcggtgaagccaccagcaccagtgattgttcacccaactctcgtcgattcagagcatcatcattccctacacgataaaagacgccaacatcggcctcatcattcagtagcgcatcacggatcacgtaacagttcagcgactgcaacgataaacgcacttttggggcgcgttgcccaaaacgctgcaacacgtggcactcggtaagggtggggctgggctggaatccctcatcacagtcgcaccggaagctgcccgcggtgttgacacagcggccgttgacacagaggtcaggctgagcgtggcattcattgtcatgtagcaccacaacctgcatcgccagtttaatttcttccggctctttcagggtagaggcattcacgcggtcgctcagcacttcgtcagatttcgccagaatgttagatacacgtttgttcgccgccgccagtgcagcagctgcatccagggtacggaaatgcgataccgctttcatacgggcatcgaaatcagccggacgagtcggacgacgcgccagtaccgcctggatggtgtcaacggtataaccttcatcaaaaatcaacagcgcattgtggcggttacacaattcacgcagaccttgtaaaaacgcgttgctggctggcaccacaccgccttccccctggtccaggcaggtagtagcagtagcatccggtgtgtacccggcctgacagtggcagcggaaggagccaaggctgttgatgcactccccatgagcacacaggtgagcaagcatacggcattcatctacatctgaattagctgatatcaggagggagacattcctcttactgctgctgatgggattgctaaacttggacgatgataacttggagtttccagaactcaacttctttacagcatgagggccttggaaggtctgcgtgttgtggtggagctttgcaaaaaccttatttcgagcatccaggagcttcatggctcttaactgcat

SEQ ID NO: 138915 - DNA, 2949 bp, Homo sapiens
atgcccgttcgcacgctgtttgagatgacacttggcgaaacgttcttccttaatgccaaactgccaaccggtaaagaatttatgccgcgtgaaatcagtttgttgattgctgaagagggaaatccgctgagcagccaggaaatcctggaaggcggtgaatcgctgatattatcggaagtcgcagagccgccagcacaaatgattgattcactcaccaccttatttaaaaccattaagccggtgaagcgtgcttttatttgttcaattaaagagaacgaagaggcacagcctaatttacttattggcattgaagccgatggtgatatcgaagaaattattcaggcgacgggaagtgtagcgaccgatacattacctggcgatgaaccaatcgatatttgtcagcttgagcaggagttttcagtccagttatttgagaaaattggccgacggatgtgccttacccgcgaaggaaaaaagttgctgccgcacatttatgaacttacccgagtgatggatacgcttcgtgaggctgccaaaaaggagtcagatccggacggggaactacgcgttgtttcgggcgaaacgttgctctcttaccgaatgccgcaggtgttgcagcgttttcggcaacgcgccccaaaagtgcgtttatcgttgcagtcgctgaactgttacgtgatccgtgatgcgctactgaatgatgaggccgatgttggcgtcttttatcgtgtagggaatgatgatgctctgaatcgacgagagttgggtgaacaatcactggtgctggtggcttcaccgcaaattgcagatgtcgattttactgaatgtccccagcatatcagcctggagtttccattcaggaaatttccccagctccccagaccctcccagacttgcctcctccctcctgacaaagccccagccctacccatagccccagccaccaccccctttgaggagagaaggtgctgggttggaaaaagagttgggggggagacgagttcgggtaaagggttcgggatgccagccgtggatatgcgggaaagtcccggtgtttattcccgttattacggagcaggaaagcttccaggaattaatcagcgcaccaccacagcctgtgaatcgttggggaaagagtatgagatcctgatgattgatgacggcagtagcgataattccgcgcatatgctggtcgaagcctcacaagcggagaacagccatattgtgtctattttgcttaaccgcaattacggccaacattcagcgattatggcgggattcagtcacgttactggcgacttaattattacccttgatgccgatctccagaatccgccagaagaaatcccccgcctggtggcaaaagccgatgaaggttacgacgtggtagggactgtacgccagaaccgccaggacagctggtttcgtaaaaccgcttcgaagatgattaaccggcttattcagcgcaccactggcaaagcgatgggtgattacggttgtatgtgcgcgcctatcgccgtcatattgtcgatgcgatgttgcactgccatgaacgcagcacctttatcccgattctggcgaatatcttcgcccgccgtgccattgaaattccagtacatcatgccgagcattcctgagaaagagaacctcattgacaaaggaaagtcagttggggccaaggtgctatttctgaaagatatcaaccgcagcatcaaacacaccttcctcgactttggcgatgacgacttcaccaatggcaagccgcacccgatgattgaccccaccaaccgcatcagtcgcttgatcgaagaggcgcgcgatccagaagtggcggtgatcgtgatggattttgtgctcggatttggatcgcatgaagatccggtcggctccaccatcgagacgatcaaagaagcgaaagcgatcgccgctgccgaaggacgcgagttgatcattctcgcctatgtgctgggtaccgatcttgatacgccatcgggaggaagcctgatgagccagtcactgtttagccaaccattgaacgttattaacgtcggcatcgccatgtttagcgatgacctgaaaaagcagcatgtagaagtgactcaactcgactggacgccgccggggcagggcaatatgcaggtggtgcaggcgctggataacattgccgattcgccgctggcggacaaaatcgccgccgctaaccagcaggcgctggagcgtattatccagtcgcatccggtgctgattggttttgatcaggcgattaacgtggtgccgggcatgacggcgaaaaccattcttcacgccgggccgccgatcacctgggaaaaaatgtgcggcgcgatgaaaggcgcggtcaccggagcgctggtgttcgaaggactggcgaaagatctcgacgaggctgagtgctgtactgtgcatcgagtgagagtgaacgtattcgatgagcgcttgcatgacctctcgcagtgcctgttgctggatgggtatatggtccacgacaagaaactgctgcaagccgatccatccatcgccgatgcggcccccatggaggatgatctctatgaggccatcatcgacaagatcaatgattcggctgaagctttccgtgccagtcctccggactacaacgcagctttaacgaatgcgcgggtcgctctcgaaaccctggctgtggatgtcgccgctggcgtggcacagcagcatccaggtgtcgccacatacaacccgacaagctggggctcggtgattgcatttctacgccagtgtggcgaaatcacggtcgaagaggagaaaggcttggccggggtctttggattcctcagccctggcgctcaccgccccatcggcattccgcaagagcaaatggctcggctgggacgctccttcgccttgaacatgtgctggttccttttgcacaaccggcttgctcgcagtggcaactga

SEQ ID NO: 138916 - DNA, 2544 bp, Homo sapiens
ctatttaacttgcatcatgcgacaaaaactcgaggctttttgctgatttatgccagcgcaactgtgctctaagatgtttcgctggtttattaactgatgattgaagatcccatggaaaataatgaaattcagagcgtgttgatgaacgctctctccctccaggaagtccacgtttccggcgatggcagccactttcaggttattgccgtgggtgagttgtttgacggcatgagtcgggttaaaaaacagcagacggtctatggtccgctgatggaatatattgcggataaccgcattcatgctgtgtcgatcaaagcgtatacccctgcggagtgggcgcgcgatcgcaaactgaacggcttttgagctatgggcgattcgccggtagcggatatgaattgttaactgagaacaaactaaatggataaatttcgtgttcaggggccaacgaagctccagggcgaagtcacaatttccggcgctaaaaatgctgctctgcctaatctttttgccgcacttttgctgattaccaccggagagcgaaccaatttgcgtccgatgacccggcgtttttacccgcatcgaatcaatcacccactgggtatcgcttttcatccgcgagttatccagtaaaccaactttatttttgtagttgcgaatattggaaattaacgagttaaaaccaatatccagataggcataaattcccgttgagcggcgctcctcagttaccagtgcaaatccatggtttatggcttcgttggcattatggttattgatcggcaataccgaatcaaacgagacatcgcgaatcgacggctggcgcagtgacgtcaggttacgtacctcgaggatgacttcgcccggtttgttttctttgtcagggaaacgctggttagctcgtactaaaggatgtgcgatgatatcgcgtacggtgattgataacgacaactgtaccagtaagttttcgcgcttttttgccacccgcgaagaagcagagtcttttatgaccaaactgaaagagcttgccgccgctacatcctctgcagatgaaggggccagcgtggctggtgaataaagccctggagctcgccagacataatgacgctcacctgacgttaattcatattgatgatggcttaagcgagttgtatccgggtatctacttccctgcaacagaagatattcttcaattgttgaagaataagtcggataacaagctgtattaactgacgaaaaatattccatggccgaagacaaaaccgtatggcccgtgtctattgcccgtccggacgtaatgttcggctctgcgggctcttcagcactgtgtgttccgcaccctgtggttgcggaagatccagggggggtttttacccggggggcactgcttccagtccctttatatgcgatccccggagactctcctgccccgaggctatcgattaacaatttgcctttacggaacatcatcagacgcaggaacaccaccatcagcgcagttatgactgcccccagcgcgatccccgccatatagacgcccaggttagtgaccagcggccatgcccagatagcggactccgggaaccattgcactgcgcccagccagacagcggcggttgagccgacaatagcgccgaccatatacgacggaatggcggtgatggggctttccagcgcaaacggaatcgcaccctcactgatccccataaacgccaggaacatggcggtcttaccctgcggataaagttgagcgttgaacaggcgtttgccggttaaacgacggtcgataatggtcgccagccccagaccaatcggcggaataacgatagcgatagaacgagcggtgaccggtaatacgtggtcagtggtaaagctgaaggcaacaaaaccttgctgaggtcgatctagaggatcccactcataattgcgatgccagtagtcacggtcgcgccagtgaccaccgtcccagtaattaccgtaatgatcgcgatcgccaatttgtaatttgattgatggcagtagggtgatttcacctgcgtttgctgctaataacagccatgccggaagcatgacgatacagagcagcggtagcaatgtggtattgggtacaacgactgccgccataaaaagacttaaccagccatcgcgtgttaccaccagcacgatgccgagaatagcgcaagaaacggttattgccgctggtacggcgggaacgtgctcatgcagcatcaaccctaatgccacgccgacaaacactgccgggaagattcgcccaccgcgaaagccactggcggcagcaacgaccaaggcggcaagtttaattaccgccagcaaaaagtaatcgctggtgctgaaagcgatagcaatgagcattaatagtcgcttgccaatacgtttcatgtaatagcctgcgattaacatcatcggaatttccagaccggcagcgataccaatcatttctccagtcagtttatcggttagatgcagttcatcaataataaatagcggcatatttatcatgtagagattattcgccgcccacat

SEQ ID NO: 138917 - DNA, 1245 bp, Homo sapiens
cgtcagggcgcctctagaggatcgcaaactgaacggcttttgagctatgggcgattcgccggtagcggatatgaattgttaactgagaacaaactaaatggataaatttcgtgttcaggggccaacgaagctccagggcgaagtcacaatttccggcgctaaaaatgctgctctgcctaatctttttgccgcactactggcggaagaaccggtagagatccagaacgtcccgaaactgaaagacgtcgatacatcaatgaagctgctaagccagctgggtgcgaaagtagaacgtaatggttctgtgcatattgatgcccgcgacgttaatgtattctgcgcaccttacgatctggttaaaaccatgcgtgcttctatctgggcgctggggccgctggtagcgcgctttggtcaggggcaagtttcactacctggcggttgtacgatcggtgcacatatcgtgatggataaagtcagcgttggcgcaacggtgaccatcatgtgtgctgcaatcctgacggaaggcgccacgattattgaagtattttattttttaccgctggcaatcggtaaatttaatgagctgtatcccaatattaaagtgcggattctgggaacaaggcacgaataattgcatgggaatcggtgctgtgtaacggaatcagactttgggcataaacatggaacaacgtcacaaattcatccattggattttaccccactgggtccaacggaggccgttcgtgctgggcctgtcggcgtgaccatccattggccaaaaagcagcttgtagaatggcaggagttagtgggttacaaaatgattggcgtacgctcctccagcggcaaccgactgttgatagaacaacagctggccgacaagccctggaagctggactggttttacgaagtgcgtcatctttcgacgtcattaggactggtggaggcgggactggggatttcggcgcttcctggcctggcaatgcctcatgcgccctattcttcgattattggtatcccattggtggaacccgttatacgtcgaacattgggaataattcgccgtaaagatgccgtactttctccagcagcagaacgcttttttaccttgctgagtgatttttgccctggagtcccaagtgaagacaatatatttgaatccccggctagtcaacaacatgaatatattgggtcaaggcaatgttttctaatgccgagtgaaacgacaggaacgatgcatgtctag

SEQ ID NO: 138918 - DNA, 840 bp, Homo sapiens
atggcggagttgggtaaacgcagtagcgtggccgtctcctggattgggaaagtgaaaaccactgcccagatggtggcgttggcatggctgctgtggcgtccgcccatttgggttgagtacgccggtattgcacttttctttgtggctgcggtactgactctgtggtcaatgttgcaatatttgacgctgcgcgtgcagatttgcttgatcagtgatcgtttcggcgtaattttcagcaaacgatcaaaagtggtgaaaaatatcgttgactcatcgcgccaggaatatctggaagagttttacgcgcgttataacgttgagcttattcgcgcaccagaagggttcttctatttacgcccacgttccaccacgctgatccctcgttccgtcttgtcggaactggatatgatggtcgggaaaatcctctgttatctctatctcagcccggaacggctggcgaatgaggggattttcacccagcaggaactgtacgacgaactgctcaccctggccgatgaagcaaaactgctgaaactggtgaacaaccgttcaaccggttcagacgttgaccgtcagaagttgcaggagaaagtacgttcttcgctcaaccgtctgcgtcgtttaggcatggtgtggtttatgggccacgacagcagcaagtttcgcattaccgaatcggtgttccgcttcggagccgatgtgcgtgctggcgacgatccccgtgaagcacagcgtcgcctgattcgtgatggcgacgaatgccgattgaaaatcatctgcaactcaacgatgaaaccgaagagaatcagccagatagcggagaggaagaataatgattga

SEQ ID NO: 138919 - DNA, 1431 bp, Homo sapiens
atgaccgacatttcccgatattcgtttaactggtggcaggcggtgccaacttactcatcatcagataccaatcgcctgatccgtgcctggcaaaaaccggagctggtggtgatctctgaatgcttctggacggcggcggcaaaacacgcggatatcgttctgcctgcgactacctcttttgagcgtaatgatctcaccatgaccggtgattacagtaatcagcatctggtgccgatgaagcaagtggtgccgccacgctatgaagcgcgtaatgattttgatgtttttgccgagttaagtgaacgctgggagaagggcggttatgcacgttttacggaaggaaaaagtgagctgcaatggctggaaacgttttataacgttgcccgacagcgcggggcaagccagcaggttgaattgccgccatttgctgagttctggcaagccaaccagttaattgagatgccggaaaacccggacagcgagcggtttattcgcttcgctgatttttgccgcgatccgctggcgcatccgttaaaaaccgccagcggcaagattgaaatcttctcacagcgtattgccgattacggttacccggattgccctgggcatccaatgtggctggagccggacgaatggcagggcaatgccgaaccagaacagttgcagatgctcgccgggatgattgacctgatgccgtcgtcgatggcgttgctggcaccaaacgtgaactcgtatcgccgcttccagccgggaatgcgtccgtggggccataacaaccgcaccgtcgccctgcgtattccgtgcggcgaccgtcataatcaccgcgtggaatatcgcgtggcgggtgccgatgccaacccatatctggtgatggcagcgatttttgccggtattttgcatggccttgataacgagctgccgttgcaggaagaagtcgaaggcaacgggctggaacaggaaggcttaccctttccgattcgccagagcgatgccctggacttgtgtttcagcgacatacttgtatctccgaacatgtacattgacgatggcatgaaacgcgactggccagttatgaaacagtgcgcgctgcaacgcagatggcgtatattgccagatcactacggtactgaaccagctgaaaaacgacccggattcgcgccgcattattgtttcagctacgcgttattggtgcatatgatggcgcagcagtgcgatctggaagtgggtgattttgtctggaccggtggcgacacgcatctgtacagcaaccatatggatcaaactcatctgcaattaagccgcgaaccgcgtccgctgccgaagttgattatcaaacgtaaacccgaatccatcttcgactaccgtttcgaagactttgagattgaaggctacgatccgcatccgggcattaaagcgccggtggctatctaa

SEQ ID NO: 138920 - DNA, 1447 bp, Homo sapiens
aacagctacacccaataagttagatgaatatgaattagtcggagaactggcgcttacaggcgctctgcgtggcgttcccggcgcaatctccagtgcaactgaagctattaagtcgggcagaaaaattatcgtcgcgaaagataacgaagatgaagaacaaggaaagcgaggactggaaattaccgctgctggcgggcacaaccttttactgattgggccgccgggaacaggtaaaacaatgctcgccagccgtattaatggcctgttgccagatttaagcaatgaagaggcactggagagtgctgcgatattaagtctgctgcgtgatgaacattcctggcgttacgaccatcccggtgacgctatctacgcgccgttgttgttaaaacaactgtcggatcgtaaacctgcggattgcgtcgtgaccacagatgtggggcagcaccagatgtgggctgcgcagcacatcgcccacactcgcccggaaaatttcatcacctccagcggtttaggtaccatgggttttggtttaccggcggcggttggcgcacaagtcgcgcgaccgaacgataccgttgtctgtatctccggtgacggctctttcatgatgaatgtgcaagagctgggcaccgtaaaacgcaagcagttaccgttgaaaatcgtcttactcgataaccaacggttagggatggttcgacaatggcagcaactgttttttcaggaacgatacagcgaaaccacccttactgataaccccgatttcctcatgttagccagcgccttcggcatccatggccaacacatcacccggaaagaccaggttgaagcggcactcgacaccatgctgaacagtgatgggccatacctgcttcatgtaacaatcgacgggacaccccgcgttgatccgccaaagaaaccgctgaagatccgcaaaattgagtttgttgaaatttacgagccgttttccgaaggccaggccaaagcgcaggctgaccgctgcctgtcgtgcggcaacccatactgcgagtggaaatgcccggtacacaactacatcccgaactggctgaagctcgccaacgaggggcgtatttttgaagcggcggaactgtcgcaccagaccaacaccctgccggaagtttgcggacgagtctgcccgcaagaccgtctgtgcgaaggttcctgcactctgaacgatgagtttggcgcggtgaccatcggcaacattgagcgctatatcaacgataaagcgttcgagatgggctggcgtccggatatgtctggtgtgaaacagaccggtaaaaaagtggcgattatcggcgcaggcccggcaggtctggcgtgtgcggatgtcctgacgcgtaacggcgtaaaagccgttgtcttcgaccgtcatccagaaattggcgggctagccgaagacgacctagaggcaggcagcccgggctga

SEQ ID NO: 138921 - DNA, 1788 bp, Homo sapiens
atggacccgaaacaccgcgaccgcgtggcgtttatgcgtgtggtgtccggtaaatatgaaaaaggcatgaaactgcgccaggtgcgcactgcgaaagatgtggtgatctccgacgcgctgacctttatggcgggtgaccgttcgcacgttgaagaagcgtatccgggcgatatcctcggcctgcacaaccacagcaccattcagatcggcgacacctttacccatggtgagatgatgaagttcaccggtattccgaacttcgcaccagaactgttccgtcgtatccgcctgaaagatccggtgaagcaaaaacagctgctcaaagggctggtacagctttccgaagagggcgcggagcaggtgttccgttcaatctccaacaacgatctgatcgttggtgcagttgacgttcgcagcaaaatgcatgacgccttattggattacatggacaaaattcgcgatccgttccgcagttaccaatggagtctgcgtccgtggcgtaaagatgcacggccgcgctggatgggggcgtttcgtccacgtccacaagatggctattcgccagttgtacgcgactatgacaccggcctaccgacacaaggggtgaagcttgagagacctgtatctacgttccgacaactgaaaagcggggacattgatcatcaagacgaacgagtcatcgagctcaacattgcgttaagcaaactgcttaaggtctccaggcagttttacctgacgggaccgttcgttaacagcattcgcgtcgcgctagatgttaagacgttcggcatcaaagcgaatgacgacaaagccaagctcaaagcgctgggggaaatcgcgcacgcatgtgtcgacgcaacgatcatttattgcaagtcaccaactgttgcgggcctggtggcgcgcgagctgatcaagcttgggcatggcactccgactgagaatccccatgtctactgggtcagcgaaaagttcgatgccgactgggattacacagtcgcccttagaaacggtaatttctacacggcggttttgcgccttaccttctgcggtgctgttgctggcgattgggttagccgggccaaggccctgagtacggatgcggctggcgtccacgccctgggtgatcaacgcgctggcaacggaatccgcacgttgctgggagagacgcatgttcaggtcgtgaccacccgtgctgtcggtataaccaatcacgttaaccgccgttttcggatactctttcagtaccattgccacgccggtcatggtatcgtacaaacgatcgacaccaaccacacagatgatatgccattgtacgcagaaacagggtctagctcctatactgaccaatattgtatgtatgcgaccacatcaggagaagaacctagacgatttgtatctacttccctgtcgccgcgctttcgtaaccgtcagtttgctggattactgctcgatcaagcgtttctggctgggcttggcaattatttgcgggtggagatcctctggcaggttgggttgactggaaatcataaagcgaaagatctcaatgcggcgcaactggatgcactcgcacacgcgttactggagattcctcgattttcctacgctacgcgggggcaggtggatgagaataaacatcatggggcgctgtttcgctttaaggtttttcatcgagatggcgaaccgtgcgaacgttgtggcagcatcattgagaaaaccacgctgtcatctcgcccgttttactggtgccctggctgccaacactatgccgaccgcttcggcgcataa

SEQ ID NO: 138922 - DNA, 657 bp, Homo sapiens
atgttcgatttttcaaaggtcgtggatcgtcatggcacatggtgtacacagtgggattatgtcgctgaccgtttcggcactgctgacctgttaccgttcacgatttcagacatggattttgccactgccccctgcattatcgaggcgctgaatcagcgcctgatgcacggcgtatttggctacagccgctggaaaaacgatgagtttctcgcggctattgcccactggttttccacccagcattacaccgccatcgattctcagacggtggtgtatggcccttctgtcatctatatggtttcagaactgattcgtcagtggtctgaaacaggtgaaggcgtggtgatccacacacccgcctatgacgcattttacaaggccattgaaggtaaccagcgcacagtaatgcccgttgctttagagaagcaggctgatggttggttttgcgatatgggcaagttggaagccgtgttggcgaaaccagaatgtaaaattatgctcctgtgtagcccacagaatcctaccgggaaagtgtggacgtgcgatgagctggagatcatggctgacctgtgcgagcgtcatggtgtgcgggttatttccgatgaaatccatatggatatggtttggggcgagcagccgcatatttccctggagtaa

SEQ ID NO: 138923 - DNA, 4155 bp, Homo sapiens
ttagtgatgggtaactggaaactgaacggcagccgccacatggttcacgagctggtttctaacctgcgtaaagagctggcaggtgttgctggctgtgcggttgcaatcgcaccaccggaaatgtatatcgatatggcgaagcgcgaagctgaaggcagccacatcatgctgggtgcgcaaaacgtggacctgaacctgtccggcgcattcaccggtgaaacctctgctgctatgctgaaagacatcggcgcacagtacatcatcatcggtcactctgaacgtcgtacttaccacaaagaatctgacgaactgatcgcgaaaaaattcgcggtgctgaaagagcagggcctgactccggttctgtgcatcggtgaaaccgaagctgaaaatgaagcgggcaaaactgaagaagtttgcgcacgtcagatcgacgcggtactgaaaactcagggtgctgcggcattcgaaggtgcggttatcgcttacgaacctgtatgggcaatcggtactggcaaatctgcaactccggctcaggcacaggctgttcacaaattcatccgtgaccacatcgctaaagttgacgctaacatcgctgaacaagtgatcattcagtacggcggctctgtaaacgcgtctaacgctgcagaactgtttgctcagccggatatcgacggcgcgccggttggtggtgcttctctgaaagctgacgccttcgcagttatcgttaaagcgccggtcaggtagatacgtccggtttttcctgggcgttatccaggccagttgcgcctgttccagaatccgcgtcagtggctggctgagggcgctttccagccctcgctggctaatcagcgtagccagttcattgctgataaacggcagtgaggcgcgggtttccgctacgcttgaaagagcaattttgcactcttctgcgctacgcaccaggcgatagcttaaacgctgacgccagactttctgtaacagggccactttttccggttcgcgggcatcgcgtaccagatcgttaagcagacgaccgttggcactactgtagaaatcactctgcgcaggtacgtcgttgatggcaaccgcattccaccacggcaggatcggcagggcgatgcctttttcggtttcgccacccatacccagcagtggcatcaggtttttaaacgccagcgcgatatccagatcgttaccgccaatacggcaaccactgtgacccagcaggctggcttcacgatcgagacgcgaacgccactgcggccccatcagcagcaatgaacagtcagtcgtaccaccgccgatatccaccaccagcacccgtttttcttcgtgcaaggtggcttcgtaatccagcccagccgcgaccggctcgtactggaataccacgtccgtgaatccggcacgcttcgccgcgcgttccagaatcccttgcgcctgggtgtttgcttcatcaccgcccagcccctggaagttgatcggacgaccaatcaccgcctgagtaatcgcttctggcagctgtgcctgcgcctgctggcgaatgtgcaacatcattgcgcagaccagatcctcaaacagcgctacctgctgcggttttaagccgctggcaccgaggaacgattttggtgatttcacaaaccacacttcttctggatcatcaatgtactgtgccagtgaggaaagaccgaactgcacgcttttcgccgtaacatcgatatcttcttcgcggttataacgaatcgcccgacgtaacagcgcctgcgtttcatcgtcgtctgccggaacatcatgatggcggtacagccattcgcttaccgcttcacgcgttggcgcgcaaagcattgaaggcagcagcgtgctgtcgttttccatttttagcaaatgcggtttaccgtcacgcatgaccgccactgaacagtttgcgaaccgctccacgggcgacgcggccccgccagcccgcaggcagaccatcccgccccaggtggcttcttcaccataatgcggcggctcacaggggagcatttgccccgcgctttccagcgccgcttcaattgtcaccagcggcgttccgacacgcgcggttatcaccagctcggtcgggtcgtaattaacaatgccgcgatgacaacgaacatccagcgtttgcccggtgacagggcgacctaaaaaggctttgctattgctgccctgaatcaccagcggcgttttatcgctaatcgcctgattcacctgctccagcagcgcctggctgtaatcacactcgcgtagcatcagaaacgcgtgatgcacatgcatggcaccaaattcagcacagcggtgtagcgtgggaatgtttttcccagggttcagcaaaccatcggggtcaaacgccgccttgaccgcatggaaggtcgtgatttcatcgctgttgaactgggcgcacatttgattgattttttctcgcccgatgccatgttcgccactgatgctgccgccaacttcaacgcagagttcgaggatcttcccgcccagctcttccgcgcgggcaaattcaccgggttcgttggcatcgaaaaggattaacgggtgcatgttgccatcagacatatccggacgccagcccatctcgaacgctttatcgttgatatagcgctcaatgttgccgatggtcaccgcgccaaactcatcgttcagagtgcaggaaccttcgcacagacggtcttgcgggcagactcgtccgcaaacttccggcagggtgttggtctggtgcgacagttccgccgcttcaaaaatacgcccctcgttggcgagcttcagccagttcgggatgtagttgtgtaccgggcatttccactcgcagtatgggttgccgcacgacaggcagcggtcagcctgcgctttggcctggccttcggaaaacggctcgtaaatttcaacaaactcaattttgcggatcttcagcggtttctttggcggatcaacgcggcgcaactcagctgcgctacgactacggtgacccagcagtgcttttacatcactggacttcggtttaaccagcgcaaatttagtggcgaaggttgaccagttcgccagaatctcttcaccgcgctgagagccggtatgctgcacatgctcggtgataagaccacgcagatgctcttcatggatcgccagagcgtcaacgcttaagacctcgaccagttccgggttaacgcgtttgcggaaatcgccgctttcatcgagaacgtaagcgaaaccgccggtcatgcccgcaccgaagttaacgccggttttacccagaatgcagacgataccacccgtcatatattcacaaccgttgtcgccaatgccttctaccacggtgatagcaccggagttacgcacgccgaaacgttcacccgcgcggcctgcggcatacagacgaccaccggtcgcgccatacaggcaggtgttgccgataatgcttgcttcatggctgcggaaggcggaaccaaccggaggacgaatggggattaagccgcccggcatgcctttaccgacatagtcgttggcatcaccggtcacgtgccggtccacgccgccgcgttcccatttcccggggaggccttcgcaccgcgcccgtatatcatcttgcacgcggatcaggcacaactcagcaagtaaatagacatcaggtcgtggcagtttcgccagtagatagtacagcggactgtgtcggattgtacgcatgccaccgcgcatcctgtctagtgcaccgtcttcatgggcttcgagggtgaaatcaacgggcataaaggtggtcgggcgatgatgttgcggccagttaaactcaatcccaccggaaatccacggccccagcagccccaccagcgcaggtttaatgacttcattgtgataaacaaaatcgcgctgtttcactttatcccacgcgcgatgcacccgaccgcccagttccggcaggatcatcactttgatgtagtcgttttccagccacaccgcctgccaggatttcagggttttctgctcgctcagcgtatcggtcacgccgtagggataaaccgcgccggacgatccctgataaacgcgattttccaggaacatgggatgtatatcctgcggcccggtttcataggtcgggatctcaacgcgctcttgccacacttttactggagtcat

SEQ ID NO: 138924 - DNA, 1710 bp, Homo sapiens
atgggtttactgcggtgtaaccccaccatatgtagaggagaatttgtgtttccatctttgtgggttggtagcagttacagagactgtcctggtctgctgatttctggcctgatcgcctgcgtcgttggcggcactaccgaaccgctggaattcctgttgctgttcgtagcgccagttctgtatgtcatccacgcgctgttaaccggcctcggcttcaccgtcatgtctgtgctcggcgtcaccatcggtaataccgacggcaatatcatcgacttcgtggtgttcggtattttgcatggtctgtcaaccaagtggtacatggtgccagtggtggcggcaatctggtttgtcgtttactacgtcatcttccgtttcgctatcacccgcttcaatctgaaaaccccggggcgcgatagcgaagttgccagctcaatcgaaaaagccgttgccggtgcgccgggtaaatcaggttacaacgttcctgcaatcctcgaagcattaggcggtgccgacaatattgtcagcctcgataactgcattacccgtctgcgttttgccgaagcggcgctgacgatgctggcgcagttatccccggcacaatctggtgaggcgctgcacggtttgctggcgctggcccgccatcaactggcctgtcagccggcatttatcgccggtttcagcagtcatttaaatcaactgagtgaagccgattttattaacgccctgcccgatttacgcgcggcgatggcctggctaccaccacgagaacgcgggacgctggcgcatcaggtgcttgagcattatcaactggcgcaacttcccgtttcggcgctgcaaatgccgccattgcacatcatcaacaactcgaacagcaggcactggcatcgctgcaaaactggggagttttccatgtctgaactgaacgatcttctgaccacccgtgagctacaacgctggcgattaattcttggcgaagcggcagaaacgacgctttgtgggctggatgacaacgcccggcagatagaccacgcgctggagtggctgtatgggcgcgatcctgaacggctccagcgtggtgaacgttccggtggattaggtggctcaaatctcaccacccctgagtggatcaacagtattcacacgctgtttccgcagcaggtgattgagcggctggaaagcgatgccgtgctgcgctacggcattgaagatgtggtgacgaatctcgacgtgctggaacgtatgcagccttctgaaagcctgctacgcgctgttttgcacaccaaacatctgatgaaccccgaagtactggctgccgcccgccggatagtgtgccaggttgttgaagaaattatggctcgactggcaaaggaagttcgtcaggctttttctggtgtccgcgatcgccgtcgccgttcatttattccactggcgcgaaactttgatttcaaaagtactctgcgcgccaacctgcaacactggcacccgcaacacggcaagttgtatatcgaatccccccgctttaacagccgcattaaacgccaaagcgaacaatggcaactggtcttactggttgatcaaagcggatcgatggtcgattcggtgatccactctgcggtgatggcggcctgtttgtggcagttacccggcattcgtacccatctggtggcgtttgacacccgatccatcataagacgagcttctctcctctag

SEQ ID NO: 138925 - DNA, 3618 bp, Homo sapiens; identical to SEQ ID NO: 124854

SEQ ID NO: 138926 - DNA, 3796 bp, Homo sapiens
atgcttcttctgcgggagcacacggacacgcgacacgaccacccgcgcacacccacaagagccacaagaagacgaagacacacagaaaagaaacgacgaaagaaaaaaagacccgctacgcacgtgctcatgaccgccacgcttataccggtgagtcggctgctggcaactgaccagccccagctctttcatgagtctgccagcaagccagcgccccatctggtatcctctctgggttgccattgtggcgatgcttcttgctccggcagagccgtggctgatgccatgcagttcaagacggtttttccagtatttgtagctgctgcgatgaaccccgaacacatggcagagagtggccacaggataacgcgccctgagtttcccgattatcgagaactgttcagggagtctgacatcaagagcgcggttgtagattcaatctgtcaatgcaacacccctttcaattatctctttcggtgttttgaacttcagtgtctttctcgacacggacatagcgcatatggtgttatgcagaggcggcattcacctatgcaggagacaagaatcgccagcttaccgttacagcgataccgctggcatgaagattccgtgcgtaaccgctggttcagcgtgatggtggggccgtctgtgcgcgtgaatgaatggttcagcgcgtatgcgatggcgggtatggcttacagccgtgtgtcgactttctccggggattatctccgccagccccttgtatctggctttcacgaagccgaactgacgcttgatgatgcgaaacgggtgctccaccctggcacggatgctggctttcatgtattcgatgttgatggccgttttgttcttgcgcggattctgcttcaaggtttttaccttgccgggacgctcggcgatcaggcagtccacattcaactcggccagctcctcgcgctgaggcgctccttggtagccggcatcgctgaaacaaatgcgactctccatgaggcgattacccggcgaagatggcatgtcgtgggcccggtggtaccaggctcgggtacgccacctgggatcgacccatgggggctaagacgagggcggattgactatgacagagagaccgaaagaagggcactccttgagaacggggcccagcagtgggtccccagacggggtaataaccggtctgcacgcaatatgcgaaaaaagcgcaatgcacagggacaaatagtgtcgagaccgaataacgacgatgtcgcactcctagcaggcatcccccgcaaggcacagcaattgggcacatacattcctgctcaaaccgtggcgataaaaaagggccaccgaagtgaccctttttcagaacttttgcgaattacgcgtaaccgtagctcatcaggcgctgataacgacgattttttaaatcttcagtgcttaacacgtcgagatcggccagatccgccagcagttgcgctttcaacgatgccgccatcgcttccgggttacgaagatcagaaatttcctgagcactggggctttgatgtcgcttccattgagaaagccctggcgcacaacgagcgcaatgaaaaccgtattcgcggtgcttcaacgatttctcaacagacagccaaaaatctctttttatgggatgggcgtagctgggttcgaaaagggctggaagccggattaacgctggggatagaaacggtctggagcaaaaagcgtatcctgacggtttacctgaatatcgccgaatttggcgacggtgtgtttggcgtcgaagctgcggcacaacgttatttccacaaacccgcgagcaaacttacccggtcggaagctgcattactggcagctgtattacctaatccacttcgtttcaaagtctcctcgccatcgggctacgtgcgtagccgtcaggcgtggattttacggcagatgtatcagttaggcgaggatattctgcggcttcagcgacatcgtcgagatacggttatactgccaataaaggttcagctggttcaggaactgggcagtgtgaacggttcatgggaaggattgggaaaaaatccggccagtcccgacgccaaggaacacggcatcgtaatcactcagcagatcgtccagctgtacgtcgcggcccacttcggtattgagtttgaattcaatacccatgccggtgaagatttcacggcgacgcgtcattacctctttttccagcttgaaggccggaataccgaaggtcagcagcccgccaatttctggatgacggtcgaagacaacggcttttacgccgttacgcgtcaggacatccgcacacgccagacctgccgggcctgcgccgataatcgccacttttttaccggtctgtttcacaccagacatatccggacgccagcccatctcgaacgctttatcgttgatatagcgctcaatgttgccgatggtcaccgcgccaaactcatcgttcagagtgcaggaaccttcgcacagacggtcttgcgggcagactcgtccgcaaacttccggcagggtgttggtctggtgcgacagttccgccgcttcaaaaatacgcccctcgttggcgagcttcagccagttcgggatgtagttgtgtaccgggcatttccactcgcagtatgggttgccgcacgacaggcagcggtcagcctgcgctttgggcctgggcttcggaaaacggcttggaaatttcaacaaactcaattttgcggatcttcagcggtttctttggcggatcaacgcggccgaaacgttcacccgcgcggcctgcggcatacagacgaccaccggtcgcgccatacaggcaggtgtgccgataatgctgcttcatggctgcggaaggcggaaccaacggaggacgaatggcgataagccgccgcgtaggctggacccggttaagttggctcgtcgcgtgctgacatatggaatgcggcttgtcgcaccagaggatttctgcacatgttagcttcgctgctcgatagccggcgatatatacgacaacacaggcgtcaatgtgagttatgtacacggcccagatgcagtagaggaaggcaatggtagtaactgccagatatgccgggcgtgctttaccaaagtgaccgtgtccgagcagcagtaacgccgcacaggtgtaaagatatggcaccagtgtaaagatgaccgagacggaagaaaccagaccgaactctttggtcgcgtttggtgaaatgctgctgagctggaagatggtcatcaaaataccgacgataatcagccccgccactggcgtacccgctttatttacacgggcaaaaatcggtgggaacagtccgtcatcggcagcggctttcgccgtttgacccgccagcaacgtccagccgcccagtgaacctaagcaacccgcagctgcgcagaaggaaacaatggccccggcggtgtcacccaacgccatccgtgcggcatcaccgaatggcgaagcagaaacgcgcagtgcggcattagggatcatccccataatcgcggtggtagaaagtacatagcaaacggcggcaatcaataccccaccaatggtggcgatagggacattgcgtttcgggtttttcaccacacctgcggcaacggaggcactttccacaccgatgaacgaccacagcgtaacgttaagggtactttgaattgcaccgaaggtgcccaggccgctgacgttccatgccggcatataggtttcaccacggaaccagaaccagccaaatacggcaatcccgacgatggggatcagcgccagcacggggcactggctgcccacgggtgacat

SEQ ID NO: 138927 - DNA, 2263 bp, Homo sapiens
ttattgaataatgaatggtgtgcctttctcaaagaacatgaattctggttggtatctcgatcgatggcccccaggagttacatgaccgttaagacgcagtaattcaggtaacggtacttttgcaaaagtgatagcagccacgagcgtgatttgccaccgcgtacaattcgcgcagagaactgtaattcagctggctgtgcaggcggtgcgccggatgggcagaaagtacctgcaactgttctggttcggcattgccctgccattcgtccggctccagccacattggatgcccagggcaatccgggtaaccgtaatcggcaatacgctgtttcaaccactgacgaatcagttctgaaaccatatagatgacagaagggccataaccaccgtctgagaatcgatggcggtgtaatgctgggtggaaaaccagtggcaatagccgcgagaaactcatcgtttttccagcggctgtagccaaatcgccgtgcatcaggcgctgattcagcgcctcgataatgcagggggcagtgcaaaatccatgtcgcaacggctttttcgattgagctggcaacttcgctatcgcgccccggggtttcagattgaagcgggtgatagcgaaacggaagatgacgtagtaaacgaaaaccagattgccgccaccactggcaccatgtaccacttggttgacagacatgcaaaataccgaacaccacgaagtcgatgatattgccgtcggtattccgatggtgacgccgagcacagacatgacggtgaagccgaggccggttacagcgcgtggatgacatacagaactggcgctgcgaaaggaaacgcgtggcgctttcagaaaaaccgtgagtggtcgggcactcaattgcgcctggaagatggtcagtgcgccgctgacgtttgaccgcacttcctgcatccgcgtgcgggaccactgggcaaaacgggtgcccccccccttttgggccgcgtaaaacccggttttccctttacgttcagacatcccacacgcaaacctcggggcgtgcgcaaattccccacttttcaccggtcttcgcacagacggtttgcgggcagactcgtccgcaaacttccggcagggtgttggtctggtgcacagttccgccgcttcaaaaatacgcccctcgttggcgagcttcagccattcgggatgtagttgtgtaccgggcatttccactcgcagtatgggttgcgcacgacaggcagcggtcagcctgcgctttggcctggccttcggaaaacgctcgtaaatttcaacaaactcaattttgcggatcttcagcggtttccgtaagctgatggaagttaccgtctgcgcgacacgccgatcctcacctttatgaacaaacttgaccgtgaatccgcgacccgatggagctgctcgatgaagttgagaacgagctgaaaacggctgtgcgccgatcacctggccgattggctgcggcaagctgtttaaagcgtttaccacctttataaagacgaaacctatctcattcaggaagtccgcattgttaaagggctgaataacccggtctcgatgctgcggttggtgaagatctggcacagcagctgcgtgacgaatggaactggtgaaaggcgcgtctaacgagttcgacaaagagctgttcctgcgggcgaaatcactccggtattcttcggtactgcgctgggtaacttcgcgtcgatcatatgttggatggcctttatggcgggtgaccgttcgcacgttgaagaagcgtatcgggcgatatcctcggcccagggtgagatgatgaagttcaccggtattccgaacttcgcccagaactgttccgtcgtatccgcctgaaagatccgctgaagcaaaaacgctgctcaaagggctggtacagctttccgaagagggcgcggtgcaggtgtccgtccaatctccaacaacgatctgatcgttggtgcagttggtgtgctgcagtttgatgtggtggtagcgcgcctgaagagcgaatacaacgttgaagcagtgtatgagtcagtcaacgttgccactgcccgctgggtagaatgtgcagacgcgaagaaattcgaagagttcaagcgtaagaacgaaagccaactggcgcttgatggcggcgataacctcgcttacatcgctaccagcatggtcaacctgcgcctggcacaggaacgttatccgggacgtcagtttcaccagacccgcgagcattaattcttggctccaggccgcggtgacgcg

SEQ ID NO: 138928 - DNA, 760 bp, Homo sapiens
cgcaaaattcgaagagaaattcctcgcggtgccggctgaagcgctggtttacaccatgaaaggtgaccagaaatacttcccggtgtatgcgaacgacggcaaactgctgccgaactttatcttcgttgccaacatcgaatcgaaagatccgcagcagattatcgcatccaggcgctggctggctggattgctgaacaagattggcgctgacgttaaccacgctacccgtgcgggtctgctgtctaagtgcgacctgatgaccaacatggtcttcgagttcaccgacacccagggcgttatggggatgcactatgcgcgtcacgatggcgaagcggaagatgtcgcggtggcgctgaatgagcagtatcagccgcgttttgctggtgatgacctgccgtccaacccagtagcttgtgcgctggcgattgctgacaagatggataccctggcgggtatcttcggtatcggtcagcatccgaaaggcgacaaagacccgtttgcgctgcgtcgtgccgcgcttggcgtgctgcgaattatcgttgagaagaacctcaaccttgatctgcaaacgctgaccgaagaagcggtgcgtctgtatggcgataagctgactaatgccaacgtagttgatgatgttatcgactttatgctcggtcgcttccgcgcctggtatcaggacgaaggttataccgttgacaccatccaggcggtactggcgcgtcgtccgactcgtccggctgatttcgatgattggcacgcc

SEQ ID NO: 138929 - DNA, 405 bp, Homo sapiens
cggacgcgataatcagcagattaagcgcagcatctatttgctggcagagcgcggcaagctggcggaactgcgtttgctggtgatccctggccaggtggattatttgcaacacatcgaagaactggcggcgtttatcaagggactcggcgatgttccggtacgcctgaacgcgtttcatgcccacggcgtgtatggcgaggcgcaaagggcctacggttcggcacagacttgtaggcctgataagacgcgtcaagcgtcgcatcaggcattgtgcgccaactgccggatgcggcgtaaacgccttatccggcctacggttcggcacaaacctgtaggcatgataagacgcgacaagcgtcgcatcaggcaacggctgccggatgcggcgtgaacgccctatccgac

SEQ ID NO: 138930 - DNA, 1788 bp, Homo sapiens; identical to SEQ ID NO: 129112

SEQ ID NO: 138931 - DNA, 2025 bp, Homo sapiens
atgggtcagaaaggcctggttaaaatctttgcttggatgcatacttactattcttatccgcatctgaccacttttcagcatccgttatcggaagtcctgagcaaatgctggatctatttcaatctttaccttgccccctttcgtatgccggtttttttctttatatccggctatttgattcgccgctatatcgacagcgtaccgtggggaaattgtctcgataaacggatctggaacatcttctgggtgctggcgctttggggcgtggtgcagtggctggcgttaagtgcgctgaaccagtggctggcacctgagcgcgatttaagcaatgcctccaatgccgcttatgccgattccaccggtgagttcctgcacgggatgatcaccgccagcaccagcttgtggtatctgtatgcgttaattgtctatttcgtggtatgtaaaatttttagccgtctggcgctgccactattcgccttgtttgtactgctgagtgtggcggttaatttcgttcccacgccgtggtggggaatgaacagtgtgatccgcaatttgccttattacagccttggcgcatggtttggcgcaacaataatgacctgtgttaaagaggtgccgttgcgccgccatctgctgatggcttctttgcttaccgttctggcggtcggtgcctggttgtttactatctcgctgctgttgtcgctggtatcgattgtggtgatcatgaagctgttttatcaatacgagcaacgattcggtatgcgctccaccagcctgctgaatgtgattggctccaacaccattgctatctacaccgtcagcaaaaaccacgcaatgatagtcattgaggatttgaaggtcagcaacatgtcaaagtcagcagcggattgtattctcccaccatggctgaaatcagataaactgggggttttatttaatattgtcggcctggcgaaccccggtgctgaatacgccgcaacgcgacataatgctggtgcctggttcgttgacttactggcagagcgtttgcgcgctccgctgcgcgaagaggctaaattctttggttatacttcgcgagtcactcttggaggcgaagatgtccgcctgttagtcccgactacatttatgaatctcagcggcaaagccgttgcggcgatggccagttttttccgcattaatccggacgaaattctggcagtctgtgttaatgctgtgctgaagaaggtaaagaacatcttccaggaagaagaatccataaggcaaaacagagaggagagtgaaaattgtagaaaagccttttctgagcctgtgctttcggagcctatgtttgctgaaggtgaaatcaaagcaaaaccttatagttatgccgctgaaatcataaaagcccgaatgctggcagaacaaaaagtagaagcggcgcgtgtgctggaaagtctgcacggcgcgctggctgctgatgccgcgctgttaagcgccgcagaacgtcagctcattgagtctttgatcatcgaagcgatttcgctatcggcagccccagatattaaaagaaaactccaaaaactggagggatttgctggaatgaatatcagtcagcttttagaaatagcccaaaaggtttttgacaaccaagagtttgaaaaacaaaaacaattagtaagacagtcggcaggagcgttcgtgtgcattcctaaaatacgatcgagaggcggaacaggtgctattccttacccagactggacaagttgggggacatcaggcttgagattccctaacgcactgtgcctgatacttggggaaaaacgggaagcgcgaatcggcatgcccggtgattggaacgactttgatctacgcttcccacaccaccaaattaaaagccaaagtctgctcaatgtgagtccaatcaaccctaaatcacaggtgaccccagtgccaggaagtcatctggaagacagcattcagccatctccagcgggatcattctccttctttcagaatgcagaaactgattcgatctccataaactag

SEQ ID NO: 138932 - DNA, 3795 bp, Homo sapiens
ttataaccagcggtcatcaggtataaagcagccttctgttttgcatcgccagcgacacacggaaacataatccgacattaagtgatcgggttgcgccgcctgcgctttcggatactggccgtatcgggaactcacttcgcgacgccagatttgcgcttcgccctgctgagtctggcttaccggcaaaacaccttctggcgctttgctttcgtgcgcaccaatattttgcgtaaacagtttccctggcaattgcgcctgttcggcagtgccatcaaactgaccgacaaacagcggggtttgcaattttgagtcttcataccagcacagccccgcggcaccgtctaacgccccattcagcttgtcgttttcctggctgatgtgcgaaagcatctcttcggcaataccgtgtgaatacggcaccgccacacagaagctggctccggcaggcatactgttccataccggcgtaaaatcgaaactggcatctacgctggcggattcatcatttaacgccacaaaactgtgccagccgtcgttacccatttcgaagcgtacgccagcaaaagaaggcattaaccgctggtagccaaaccccagccacctggcgctgactacgatgcgctggcgtactggcgttttttcggcagtacgctcttccaggccaaagcttgcttgccagcgttttttgccgctcaacaaatcacctgcgatcgccgtggcttcggtatcctgctgatcatctttaaacaacatatccgtgctggaaaacaccagcatcttgtcctgataagtcgcgaacatcagggcgttattgccgttatagcgcaactgataaacaggaacagtttcactatttatcttgatgctactgatttccgttttgcttaactggctgtcgctggtagcggcaaacaacaatggctccagcagtttgcttaaaccactgcgctggatcagcaccatataatgtgaaagatggccttgtttatcgtgccacagcgctgcctgcgcgggctgatgaccaaagccagtaaagtagaacggtttgtggttaatcaggaactgttcgcccttcactgccactgaccggatgccgacgcgaagcgggtagatatcacactctgtctggcttttggctgtgacgcacagttcatagagataaccttcacccggttgccagaggtgcggattcaccacttgcaaagtcccgctagtgccttgtccagttgcaaccacctgttgatccgcatcacgcagttcaacgctgacatcaccattggccaccacctgccagtcaacagacgcgtggttacagtcttgcgcgacatgcgtcaccacggtgatatcgtccacccaggtgttcggcgtggtgtagagcattacgctgcgatggatcccggcatagttaaagaaatcatggaagtaagactgctttttcttgccgttttcgtcggtaatcaccattcccggcgggatagtctgccagttcagttcgttgttcacacaaacggtgatacgtacacttttcccggcaataacatacggcgtgacatcggcttcaaatggcgtatagccgccctgatgctccatcacttcctgattattgacccacactttgccgtaatgagtgaccgcatcgaaacgcaggcgcaggcagttatgccttatggtccaaaatgtctttatgttcttgcgcaaaacgacgcgctgcaacgcactaggggacctttggacttcagtggctggaggaccctgctcccctggctccttcccagcctgggcatccttgagttccaaggcctcattcagctctcggaacatctcgaagcgctcacgcccacggatctgaagggtgaaatattctccatccagtggtttcttctttggctggggagaggagctggtgttgttgggcagtgctcgcttagtgctccctgggggcagctcgtggtgaggctcccctttcttgcggagattctcttcctctgtgcgccggtctctcccaggacaggcacaaacacgcacctcaaagctgttccgtcccagtagattaccactggagtcttccagtgtgatgatggtgaggatgggcctccggttcatgccgcccatgcaggaactgttacacatgtagttgtagtggatggtggtacagtcagagccaacctcaggcggctcatagggcaccaccacactatgtcgaaaagtgtttctgtcatccaaatactccacacgcaaatttccttccactcggataagatgctgaggaggggccagaccatcgctatctgagcagcgctcatggtgggggcagcgcctcacaacctccgtcatgtgctgtgactgcttgtagatggccatggcgcggacgcgggtgccgggcgggggtgtggaatcaacccacagctgcacagggcaggtcttggccagttggcaaaacatcttgttgagggcaggggagtacgtgcaagtcacagacttggttgtcccaaagtcagaagcccaaggaaagggatctctgagtgactgatgattacacttgactggcgggttaacgatgtgttggagaacctggtacccatatgccatggcggtacgaatcaggcccaccgcagttaaacgcccatcttcgtcacaagcgatatattgcggttgaacattgaactgaaactcgacaccttcctcgcgcgcattaaccacctctttgcgcgagcccggcatactgacttcatcacgacgatacgcgcaggtcacgctggcggcattgaggcggatggaagtccgcaaacaatccattgtcgtatcgccaccggccaataccacgactcgcttaccttccacgtccgtcagcggatactcttcagactccggcaatcccatgagctggcgggtatgggcagtcaggaacggtagagcctgaatgacaccgggcgcatcttcatgcggcagatctgctcgcatcatcccgtaagtccccacgccgatgaaaactgcatcatattcagaagttaaatcgctaaaggtaatatcgcgggcaatttcacagttaagatgaacgtcgattcccattgcggtgaatatctctcgccgctggcttaataccgttttatcgagtttgaaaggaggaatgcccaaagtcagcataccgccaatttctggatggcgatcaaagacatcgacctgaactcctgcgcgcgccagaatatcagcacaccctaaccctgcaggcccagcgccaatcaccgccactttttcgctacggggaacaactttgctgacatcgggacgccagcccatcgccagcgcggtatcggtgatgtagcgttccagattaccgatagagactgcgcccgagtgatctttcaaagtacatgcgccttcacaaagacggtcctgtggacataccctgccgcaaatttctggtaaggaactggtctggtggcaaagttctgccgcttcaataatctttccttcctgtaccagacggatgtaatccggaatagcgttatgcagcgggcaatgccagttgcagttagctttttcggcacaataaacacagcggtcactctcataagtcgcttgttgtggatccagcccgcaatatatttcgcctaagtgggttttccgttcactcgctgaaattttatctgcgcctttacgcgagttaacggggagcacgctgccctgcgagatggctgagcgtctgatgacgcttttcctgctgccgttttgcgcggcgcacgcggtgaagccgaagcgggttatccactggtgatcaatcacgccttgccgcat

SEQ ID NO: 138933 - DNA, 846 bp, Homo sapiens; identical to SEQ ID NO: 129115

SEQ ID NO: 138934 - DNA, 2187 bp, Homo sapiens
atgccagccatcatcaaaccagctaccgcgacggcccaactgactcaggcgatggtgaaatcaattgtcgatagtggtcttgttcccgaaggcgcaattagtctgatctgcggtagtgctggcgacttgttggatcatctggacagccaggatgtggtgactttcacggggtcagcggcgaccggacagatgctgcgagttcagccaaatatcgtcgccaaatctatccccttcactatggaagctgattccctgaactgctgcgtactgggcgaagatgtcaccccggatcaaccggagtttgcgctgtttattcgtgaagttgtgcgtgagatgaccacaaaagccgggcaaaaatgtacggcaatccggcggattattgtgccgcaggcattggttaatgctgtcagtgatgctctggttgcgcgattacagaaagtcgtggtcggtgatcctgctcaggaaggcgtgaaaatgggcgcactggtaaatgctgagcagcgtgccgatgtgcaggaaaaagtgaacatattgctggctgcaggatgcgagattcgcctcggtggtcaggcggatttatctgctgcgggtgccttcttcccgccaaccttattgtactgtccgcagccggatatcgttacccaggttttgaatgatattactgccggggcggtatgtcatattcgcacgtgtccaagccgcgtactgaccaagtgcgtcaatggtgacatagcattgtaccggtgttatgacttgtgtgaattctggaggatatctgctcaccttttgtacgtggagggggcagccaagatcggctacggttttgatcgggctgtattctgccaccagaatcacttcggctttgggcttcggtggctcgacgcccacgtacaccaaatcagccccggcagcctgggccaaagattggcggaatatccccggcaggatctgcgctggcgctggcatgcggaaagcgaacagtactatttgcatctctttgcaccagaacaggcggatctcaactgggagaatccagcgctcgttctgctggccgaccaaatgctcgccctggacgatcagtacacgtttttacagcgtatcccgcgcagcccatacgggctggcatttggtcctgttcctcatctccattatctccatcagatgcgattgctggatatcgccccgatcgcttttagggctatgtccctcgcctttccggtcaattatctggatgcagtccgcactggcagcatatgttcaaactgcaaccagcggagcaacgattcggcgatgggcatctcaatgaacgtatccaccttgatgagggttcgagccatttgggtatatgctgcttatatggagcgcgtgctggataatttgctcaataacgccctgcggtactgccattcaacggttgaaaccagcctgctactgtcggggaatagagcgacattaattgttgaggatgatggcccagggattgccccagaaaaccgcgaacatatctttgaaccttttgttcgcctcgatcccagccgggatcgctcaaccggcggctgcgggctggggctggcaattgtccactctatagcacgtggcaactgggcgacgagcgatcatcgaagtctgaccggcacgcagccatacgcgcggatcgtagtatttcttgttcggctgatcttcgcctttcgggttacccagctgaccctgcagataagcttcgttcgctttgtagtagttcagaacgccttcccaggttgcccattgggtatcggtatcgatgttcatttttactacgccgtagcttacggagtctttgatttcctgagcagtagaaccggaaccaccgtgttctttgatgacctgaacacgccagatttcgaccgctgttttgcctttatgcaggcggtaggcaaaggctacaccgacgcttatttaccaattgtcgagcgacggaaagcgatggcctacggcgagcgcgagcgcaatttccagttatatcgtcgcggtcgttatgtcgagttcaatctgccgtcggaacttgccgcgactgtgtatcaaagcgaccccaacttcgcaaccggctgttttcgactatacacgtcgtgtaacacgttcaatatgcacaaagcagccacgatgcttgttcgcgcagagttcagccagggttaccagcatcaagtttag

SEQ ID NO: 138935 - DNA, 1671 bp, Homo sapiens
tcaccctgaagacaccttgtggattttcgctttcctaaggccacaagtcccaggtggctccctgctgtccccatttcccaattttgacaagctatttgagacctgtgttgtgaacacagcctgctctctagagcagtagagagactggtctgcattccgacaccttctggggcctgaaaactgaaaaccactctgcaggcagacagaggctgatttccatatgttgcaaatcgtgtcaagtgtcacagccaagatgcaaggagaactcccagctgtggcgaccagggacaggcgatgggagtcggaggagctgcctttggctctgagacaaagcaggagaaagaggccatgacctccttgtgacccttggcccacgaatgacagattcccccagagcactttcatcttgtcagattccacgcctgtgagctcagccttcacctggaagccaagcaggatgccatgttcatctgcccagtcgagcatctcttcagcgtaagggtaatgcgaggtacggtaggagttggccccaatccagtccattaatgcgtggtcgtgcaccatcagcacgttatcgaatcctttgccacgcaagtccgcatcttcatgacgaccaaagccagtaaagtagaacggtttgtggttaatcaggaactgttcgcccttcactgccactgaccggatgccgacgcgaagcgggtagatatcacactctgtctggcttttggctgtgacgcacagttcatagagataaccttcacccggttgccagaggtgcggattcaccacttgcaaagtcccgctagtgccttgtccagttgcaaccacctgttgatccgcatcacgcagttcaacgctgacatcaccattggccaccacctgccagtcaacagacgcgtggttacagtcttgcgcgacatgcgtcaccacggtgatatcgtccacccaggtgttcggcgtggtgtagagcattacgctgcgatggatcccggcatagttaaagaaatcatggaagtaagactgctttttcttgccgttttcgtcggtaatcaccattcccggcgggatagtctgccagttcagttcgttgttcacacaaacggtgatacgtacacttttcccggcaataacatacggcgtgacatcggcttcaaatggcgtatagccgccctgatgctccatcacttcctgattattgacccacactttgccgtaatgagtgaccgcatcgaaacgcagcacgatacgctggcctgcccaaactttcggtataaagacttcgcgctgataccagaacgttgccggataattacgaatatctggatcggcgaactgatcggttaaaatggtgttacgcggctttccagcaaggtgatcaatcgcaagcttcgaatccgatgtatgccaaggcgccagtttgagtccggtgggttcacggctataaggcgctctccgaaaaagggcacctcgtttatcaaagactgtaccagatttttcaacacgcagaatatcaaacggggaccaacgacgcggaaatatcgacaaagctgtgtctcttctcttcgtctcttcttctcctctcctcttcttcactacaacacagcatcccaccgaatgcctgcttgtagtatgtgctggggatcttagagtgacctgcagcatgcacttcat

SEQ ID NO: 138936 - DNA, 1518 bp, Homo sapiens
atggagcaacaaaataaagctggttccctgcgtttctattatcggtttaagggttatcaccgcatcaataaactggtgctggctttcaaaggttgcttctacgtgtttgagcggatgtgcctgttttattgcttgttgcaatacggcggcagtaaatttccgacctcgcgggcgattgccaacgtcaacggcaaatcagctgcggtagtttgctcaaccggacacgccagcgctattgttcccgtcaatcggcccttgctgtcaaacaacggcgttgcacaaaaggcccagttccagatggcagtgaagggcgaacagttcctgattaaccacaaaccgttctactttactggctttggtcgtcatgaagatgcggacttgcgtggcaaaggattcgataacgtgctgatggtgcacgaccacgcattaatggactggattggggccaactcctaccgtacctcgcattacccttacgctgaagagatgctcgactgggcagatgaacatggcatcgtggtgattgatgaaactgctgctgtcggctttaacctctctttaggcattggtttcgaagcgggcaacaagccgaaagaactgtacagcgaagaggcagtcaacggggaaactcagcaagcgcacttacaggcgattaaagagctgatagcgcgtgacaaaaaccacccaagcgtggtgatgtggagtattgccaacgaaccggatacccgtccgcaaggtgcacgggaatatttcgcgccactggcggaagcaacgcgtaaactcgacccgacgcgtccgatcacctgcgtcaatgtaatgttctgcgacgctcacaccgataccatcagcgatctctttgatgtgctgtgcctgaaccgttattacggatggtatgtccaaagcggcgatttggaaacggcagagaaggtactggaaaaagaacttctggcctggccaggagaaactgcatcagccgattatcatcaccgatacggcgtgatacgtagccggtacatgttcatgtgtgttgtggtgtgtgtttgtagcagtaatgttctggcgctgaaccaggctcgcgggctgatagaaagtacccgcagcgacatcgctaaacgtcagggggaactggcgcaggcgaataatgcattgcaactgttgctgggaagctacgtcaagctgccgcaagcgcagacagtaaacagcgacagcctgcaaagcgttaaattaccggcgggattgtcgtcgcaaatcttattgcagcgcccggatattatggaagctgaacacgcgttaatggcggctaatgccaatattggcgctgcacgcgcggcattttttccgtctataagcctgaccagcggaatatcgaccgccagtagcgatctatcgtcattatttaacgccagcagcgggatgtggaattgtatacccaaaattgagatccccatttttaatgccggacgcaatccagtgccaatctggatatcgccgaaattcgccagcagcagtcggtggtga

SEQ ID NO: 138937 - DNA, 3273 bp, Homo sapiens
ttacccagtctcagactgttgtaacacgacgggccagtcccaaggctgcaatgcttgcaggtgacttctagagaatccccaagtgtccggcaagcttcgggtaatagtcgagtctccgcatcgaccacagtcgcgtcgtatggtaccgcaatcagctttaacgtcacatccgaacccatctgtagcctgtacacatttcgacgtgttacgctgcaaggattgctctcgaccatacaagcatgggtcgacatcaggtatgctctgcctagaccacggtgcatgaccgtcaggcgtccccaggaaaacgttcgccagcgccgccatagtgcgttcaccgaatacgtgcgcaacaaccgtcttccggagactgtcatacgcgtaaaacagccagcgctggcgcgatttagccccgacatagccccactgttcgtccatttccgcgcagacgatgacgtcactgcccggcgggttgagaagcggtgtaagtgaactgcagttgccatgttttacggcagtgagagcagagatagcgctgatgtccggcagtgcttttgccgttacgcaccaccccgtcagtagctgaacaggagggacagctgatagaaacagaagccactggagcacctcaaaaacaccatcatacacggttttacatcttccgattcgaactcgaacaatgccatttatcagcaattgcccatgtcgtcccttacgcccaaaccgacgtcggagaatatccgaccccttggatggtccatccgttcgttcaaggttttgtacggggtttgtactctgtattcgtaaccaaggggtcagctcgtgacaactatagtaagcgtacgccgtaacggccatgtggtcatcgctggtgatggtcaggccacgttgggcaataccgtaatgaaaggcaacgtgaaaaaggtccgccgtctgtacaacgacaaagtcatcgcgggctttgcgggcggtactgcggatgcttttacgctgttcgaactgtttgaacgtaaactggaaatgcatcagggccatctggtcaaagccgccgttgagctggcaaaagactggcgtaccgatcgcatgctgcgcaaacttgaagcactgctggcagtcgcggatgaaactgcatcgcttatcatcaccggtaacggtgacgtggtgcagccagaaaacgatcttattgctatcggctccggcggcccttacgcccaggctgcggcgcgcgcgcggtcgggctgctgttggtggctcatcggtaagttgtgccaactgtttaaattgtgcccactgcactggggggaccacctggatctcaattgtgcttgtgttgctccgctggaaatctttgtgggaattattatggtcccggtggttgttcaattgtgttgggtacttggttcttggccccataatccctgccatgagggggatgcctgctgagattctgacaaaacaggcatgcagctggctggctgatttttgcctgctaaattctgcccacagtttcgaccagcaggctttgcgcgtaactacgggctgaattcggggggccttgccctcagccctgacggcgcagcttgccgcccgggtttttacgttaaagggtacagcctgagcacgcagttcatccgtcaggcgtggggcaccgtaacgctgttttgaccgggtaaaagccgcgaggacaacgctgtcgcagtgttggcggaactgctgacgcgtgcttatccttgtccgccgctgacaccacgtataccagccgctgcgggccacccggagcacgcggcacattgctttgatgctgaactcagcctgatgtttttcaataaagacatacttcatttcaggcgcttcgcgaagtatgtcgcggcgtgcaatctcggtagacatctccagttcacgttcagaagacgtctgctgattttgctgtttactgcgccagttgtagagttgtgattcatacaggctgagttcacgggctgcggcagtaacaccgatgcgttcagcaagcttcagggcttcactgcgaaattcaggcgaatgctgtacgccaatactatcaccgtaactaacggcggtgtattggatgtgaacgttgatcagttcgatactgaagctttccgtactgacaaactggaactgaccagcggcaacatcgctgaccataacggtaacgtagtatctggtgtgttcgatatccatagcagcgattacgttctgaacgctgatctggtgaacgaccgtacctgggatacttccaagtctaactacggttacggtattgttgctatgaactctgatggtcacctgactatcaacggtaacggcgacgtagacaacggtactgaactggataacagctctgtagacaatgttgttggcgtgttcacagtctggcgcgacatgcgtcaccacggtgatatcgtccacccaggtgttcggcgtggtgtagagcattacgctgcgatggatcccggcatagttaaagaaatcatggaagtaagactgctttttcttgccgttttcgtcggtaatcaccattcccggcgggatagtctgccagttcagttcgttgttcacacaaacggtgatacgtacacttttcccggcaataacatacggcgtgacatcggcttcaaatggcgtatagccgccctgatgctccatcacttcctgattattgacccacactttgccgtaatgagtgaccgcatcgaaacgcagcacgatacgctggcctgcccaacctttcggtataaagacttcgcgctgataccagacgttgcccgcataattacgaatatctgcatcggcgaactgatcgttaaaactgcctggcacagcaattgcccggctttcttgtaacgcgctttcccaccaacgctgatcaattccacagttttcgcgatccagactgaatgcccacaggccgtcgagttttttgatttcacgggttggggtttgatatgaaacgcgggcacagttatcaccagcccgccgaaaaagagagagaatcaggatgcggttaagataccgccaatcatcgcgcgtaatcctgagcaaacgacgcttacgcgccaggtcttccgcttcgatatcggccagtacaccgtaggtcagatccagcagtaaacgtgaagtcattgccgtgttgatgtctgggcttatctcgcctttttgctgggcatcacgcatccgctgggcaacaaattccgtgatcgtcatatgcttatttttaagcatggcgcgacctatggtacgcatcccttccgccat

SEQ ID NO: 138938 - DNA, 688 bp, Homo sapiens
tcaaagcgtgggggagcgaatgtcatcaacaactcaccggacgcgataatcagcagattaagcgcagcatctatttgctggcagagcgcggcaagctggcggaactgcgtttgctggtgatccctggccaggtggattatttgcaacacatctgaagaactggcggcgaacatcaaaagactcggcgatgtaacggtacgcctgaacgcgtttcatgcccacggcgtgtatggcgaggcgcaaagcatgggcgagcgccacgccggaagacgttgagccgttggctgatgcgttaaaggtgcgcggggtgagccggttgatatttccggcgctcaattgccggatgcggcgtgaacgccttatccggcctacggttcggcacagacttgtaggcctgataagacgcgtcaagcgtcgcatcaggcattgtgctccaactgccggatgcggcgcaacgccttatccggcctacggttcggcacaaacgattcggggccgtttgtaggcccgataagcgcgccagcgtcgcatcgggcatccgttgtcgcgtaaacgctttatccgccaggcgtacagggccgttatatggaaaaattaacggctctgctttctcacaaatagataaaatatggcgcgccgataaaggttgacagcagccccgcgggatctggaatggaaacagcaccat

SEQ ID NO: 138939 - DNA, 3706 bp, Homo sapiens
atggatcttggggccaatggctggcaaaccttccgctacgtagtgttgccgaatctcagttcggcgttactggcaggaggaatgctggcgtttgccttgtcgttcgatgaaatcatcgttacgacctttacggcagagcaggtcgatgctgctgtgcgcgcggcagatgcagcatttgccgaatgggggcaaaccacgccgaaagtgcgtgcggaatgtctgctgaaactggctgatgttatcgaagaaaatggtcaggtttttgccgaactggagtccagtaataacacggcgtttgcgcgggcgtcatcgaatggtgatctgccgacaaaagcggacctgcaggcgcaacttgactcactaaataaacaaaaagatctttctgctcaggacaaactggtgcagcaggatctgacagatacattagccaccctcgataaaatcgatcgcataaaagaagagacagttcagctacggcaaaaagtcgctgaagcgccggaaaaaatgcgccaggcgaccgcggcgttgacagcacttagcgatgtcgataacgacgaagaaacgcgcaaaattctgagcacgctgtcgttgcgccagctggaaactcgcgttgcccaggcgctggacgatttgcaaaacgcacaaaacgatctggcgtcttataacagccagctggtttcgttacagacgcagcccgaacgcgtgcaaaatgcgatgtataacgcttcgcagcagctgcaacaaattcgcagtcgtctggatgggactgatgtcggcgagacaggcttacgtcccaggcagaaagtgttaatgcaggcgcagcaagcgttgctgaatgcggagatgaccagcagcgcgctggaagcgaaaatcgcccaactggaagcggaacaggcgcgtaagctgaagaaaaccgaaaaagattcgctgaaagacgaagtgctgcactctctgctgccgcgtgctttcagccgttttagccagacaatgatgtggatcgacacggttaacggtttgattatggtggactgcgccagtgccaaaaaagcggaagatacgctggcattactgcgtaaaagcctggggtcgttaccggttgtaccattgagcatggaaaacccgattgaactgacgctgaccgaatgggttcgctccggtagtgcggcacagggcttccagctgcttgatgaagccgagctgaaatcgttgctggaagatggcggcgtgatccgcgcgaagaaacaagatctgaccagcgaagagatcaccaatcacattgaagccggaaaagtggtgactaaactggcgctcgactggcagcagcgcattcagtttgtgatgtgcgacgatggttcgctcaagcgtctgaagttctgcgacgagctgcgcgatcaaaacgaagatatcgaccgtgaagatttcgcccagcgttttgatgccgatttcatcctgatgactggtgactggcagcgtaattcaaaagagatgacagacacacagtatattggccgcttcgccccctctccttccggcgagcttcattttggctctctgatcgccgcgctcggcagctatttgcaggctcgcgcccggcaaggtcgctggctggtacgcatagaagatatcgacccgcctcgtgaagttcccggtgccgcagaaactatcctgcgccagctggaacattacggtctgcactgggacggcgatgttctctggcaatcgcaacgtcacgacgcctatcgtgaagcactcgcctggttacatgaacaaggactaagttattactgcacctgtacgcgtgcgcgtattcaaagcattggcggtatttacgacggtcattgccgggtgttgcatcatggaccagacaacgccgcagtgcgtatccgccagcagcatccggtcacgcaatttactgaccagctgcgcggcattattcacgccgacgaaaaactggcacgggaagattttatcattcatcgccgtgatgggttgttcgcctacaacctggctgttgtggttgatgatcatttccagggcgttacagaaatagtgcgtggggctgatctgattgaaccaacaattaattcccaagggtgtgggtatttccgttgggtgttgtcgaaagtcgaataccagacgtattcgccaggcgtggcacaaccggtcatcgcacccgtattcggccagtgtagcgtaaattcgcgaccatcggccgtaattgaaaattttggggaatgcctaaggacgccccaaagcatgccaccggtagatccttgctggaatttatcgggactggataacgctggcctcgcacacggcaccgttcaatggtttgcttgctccgcgtcgtctggcgctgaaagtagctaacctggcggaagcgcaaccggatcgtgaaatcgaaaaacgcggcccggcgattgcccaggcgttcgacgctgaaggcaaaccgagcaaagcggcagaaggttgggcgcgtggttgcggtattaccgttgaccaggctgagcgtctgactaccgataaaggcgaatggctgctgtatcgcgcccatgtgaagggcgaaagcaccgaagcactgctgccgaatatggttgcgacttctctggcgaaactgccgatcccgaaactgatgcgttggggcgcaagcgacgtgcacttcgtgcgtccggtgcacaccgtgaccctgctgctgggcgacaaagtcattccggcaaccattctgggcattcagtccgatcgcgtgattcgcggccaccgctttatgggcgagccggaattcaccatcgataacgccgatcagtatccggaaattctgcgtgagcgtgggaaagtcatcgccgattacgaagaacgtaaggcgaagattaaagccgatgccgaagaagcagcgcgtaagattggcggtaacgctgacttaagcgaaagcctgctggaagaagtggcttcgctggtggagtggccggtcgttctgaccgcaaaattcgaagagaaattcctcgcggtgccggctgaagcgctggtttacaccatgaaaggtgaccagaaatacttcccgggtattggtgccgggttactgttcggtaagttgctgtcggtgtcatttggtccggcggggcttgggctggcggcaaatttccgccagttgattaccgtgctcggcgtgcttgccggggctggcatctttaacggtgtaaccaaatacgttgcccagtaccatgataatccgcaacagctgcgccgcgtggtcggcacttcatcagcgatggtacttggtttctctacgctgatggcgctggtttttgtgctggcagctgcgccaatcagccagggattgtttggtaataccgactatcaggggctggtgcgtttagtggcgctggtgcaaatggggatcgcctggggcaacctgttactggcgctgatgaaaggctttcgcgatgccgcaggtaatgcgttatcgctgattgtcggcagcttgattggcgttctcgcgtactacgtcagttaccgtttgggcggttatgaaggggcgttgctgggtctggcgctgattcccgcgctggtggtaattcctgccgccatcatgttgatcaaacgtggtgtcatcccgttaagctatctgaaacccagctgggataacggtctggcagggcagttgagcaaatttacgctcatggcgttgattacgtcggtgaccttgcct

SEQ ID NO: 138940 - DNA, 5034 bp, Homo sapiens
agcaaagtgacatcgatcatcgtggtttccttgccaaaaaataataagcctgcttactttacgcttgctgcagtaagcaagtacaaaatctctgcgttttgcgcataaaaaatcagacgacctgtcctcaaagtgccatttgtgcacggtaacaataacgtgaaaccagctatctcccgggggcatgctatgaccgatcaaatgtttgtcgagacactgattatcacgtcatcgttttttaccattgatgttgtcactggttttgtccgttcttcttatcgaacggaccggctagttacgcagtgcggcggaaattgaccagttctggttgcgcaatgcgcaaataatccgcggttttcaaaataacggatttatccagcatgcctgcattgaaggcgatttcatcaaatcgttcgaagagtagagggtcggcaaccagtttgagttttggatggaagctgaaaggggggatcgcgccgaagacacagcttaacgccgcttctgggctgccatcttttggctgataatcatattcccagcgtaccagtggcggcattgacatcaggatagactcggtgcgcccgccagtttgcaggccaaacagcgtgccgcgatcccagaccagattgaactcgacataacgaccgcgacgatataactggaaattgcgctcgcgctcgccgtaggccatcgctttccgtcgctcgacaattggtaaataagcgtcggtgtagcctttgcctaccgcctgcataaaggcaaaacagcggtcgaaatctggcgtgttcaggtcatcaaagaacagcccgccaataccgcgctgttcgttgcgatgtttgaggtagaagtattcgtcgcaccactttttgtaacggggataaacgtcttcgccaaatggcaggcacaggtcacgggcggtgcgatgccagtgaatagcatcttcttcaaaaccatagaatggggttaagtcgaagccaccgccaaaccaccagacgggatcggcacccggtttttcggcaataaaaaaccgcacattcgcgtggctggtgggaacatacggggttatgcggatgcaactggtgttgtcatccagggatgttactgatttatgaatctcagcggcaaagccgttgcggcgatggccagttttttccgcattaatccggacgaaattctggtggcccacgacgaactggatctgcctcctggcgtcgccaaatttaaattgggcggtggccatggtggtcacaatggacatcagcacgttatcgaatcctttgccacgcaagtccgcatcttcatgacgaccaaagccagtaaagtagaacggtttgtggttaatcaggaactgttcgcccttcactgccactgaccggatgccgacgcgaagcgggtagatatcacactctgtctggcttttggctgtgacgcacagttcatagagataaccttcacccggttgccagaggtgcggattcaccacttgcaaagtcccgctagtgccttgtccagttgcaaccacctgttgatccgcatcacgcagttcaacgctgacatcaccattggccaccacctgccagtcaacagacgcgtggttacagtcttgcgcgacatgcgtcaccacggtgatatcgtccacccaggtgttcggcgtggtgtagagcattacgctgcgatggatcccggcatagttaaagaaatcatggaagtaagactgctttttcttgccgttttcgtcggtaatcaccattcccggcgggatagtctgccagttcagttcgttgccctgttgctgcgtcggttgttcactctgcatcgcgctcggccccagacgggcatatttctgcatcaggtagacttcggcgattaagaacagggtgtaaagccctacgatcatgatcagtgagaaagccagttgtcctgtggttaaagcggagtgcgcggagtatgtcggtaagatgtcctgtatcgcccacggctgacgaccaaactcggtcataaaccacccggcttcaatcgcaatccacggcaacggcaaactccagagcgccattttcagcacacaagcgaggttggtggattttgccacgcagcgtctggacaagcgcaatcagcatcaccagtagcagcagggaaccacagcccaccatgatgcggaaactccagaataccggcgcaacctgaggtatcgcgccacgcatcgccgcctggtactgtgcggctgtgacatgattcatatccggcgcatagcgggagagcaacatgccgtagcccaggtcaccttccagtccccggaatgcctgcaacacatgcggctcacgattgccttgcgatatttcctgcattaacagccaggccatacgtccgcgttgcaagcgtgggtaggtttcagccatcaaattcttcagacccggcacgggtttatctaatgagtgagtggcgaggatcccggacgcgataatcagcagattaagcgcagcatctatttgctgccagagcgcgccaagctggcggaactgcgtttgctggtgatccctggccaggtggattatttgcaacacatcgaagaactggcggcgtttatcaagggactcggcgatgttccggtacgcctgaacgcgtttcatgcccacggcgtgtatggcgaggcgcaaagctgggcgagcgccacgccggaagacgttgagccgttggcattcatctgcaacgacattaaaatcgccaatgaactgggctgttttccccatgtggaaagttacattatcggaggactgattcgcccaggttatttttcggtaggagagagtctggcgctggagatgatcaatgccttttccgtagaacgtgcgtttatctcctgcgatgcgctgtcgctggagacggggatcaccaatgccagccatgtttgaggtcggggtgaaaacacggattattcaacgctcgcgtgaagttattctcatggccgatcactcaaaatttgatgccgttgagccgcatgctgtagcaacactatcatgtattaaaacgatcatcagtgacagcgggttacctgagactattgcacagcgttatcagcgagccggatctagcctgccggaagcgcaaccggatcgtgaaatcgaaaaacgcggcccggcgattgcccaggcgttcgacgctgaaggcaaaccgagcaaagcgtcagaaggttgggcgcgtggttgcggtattaccgttgaccaggctgagcgtctgactaccgataaaggcgaatggctgctgtatcgcgcccatgtgaagggcgaaagcaccgaagcactgctgccgaatatggttgcgacttctctggcgaaactgccgatcccgaaactgatgcgttggggcgcaagcgacgtgcacttcgtgtgtgccggtgcacaccgtgaccctgctgcatgggcgacaaagtcattccggcaaccattctgggcattcagtccgatcgcgtgattcgcggccaccgctttatgggcgagccggaattcaccatcgataacgccgatcagtatccggaaattctgcgtgagcgtgggaaagtcatcgccgattacgaagaacgtaaggcgaagattaaagccgatgccgaagaagcagcgcgtaagattggcggtaacgctgacttaagcgaaagcctgctggaagaagtggcttcgctggtggagtggccggtcgttctgaccgcaaaattcgaagagaaattcctcgcggtgccggctgaagcgctggtttacaccatgaaaggtgaccagaaatacttcccggtgtatgcgaacgacggcaaactgctgccgaactttatcttcgttgccaacatcgaatcgaaagatccgcagcagattatctccggtaacgagaaagtcgttcgtccgcgtctggcggatgccgagttcttcttcaacaccgaccgtaaaaaacgtcttgaagataacctgccgcgcctgcaaaccgtgttgttccagcaacagttggggacgctgcgcgacaaaactgaccgcatccaggcgctggctggctggattgctgaacagagtggcactgacgcgggggaccaaacgggctattccgatgaacgctgggtcccggatgctcacagtgaagcgccgagtccggtcagcgacatgctctccgcgttattgctgttaacgctggtgctggcgggcatggtacggatggctgcgcggctgttaatggcgaaaccgccgcaggccgttaaccggggtgatatcggctggttgaccacctcgccaatggtgattctgctggtcatgatgctggcgatgggaacgcatattccacaacctgtcatcaggatacctggcgggcgcttccactatagtcctcatcagggacgcacagatctgcctgcacaacgtagcacctggcatgatttttgccttcaggcaccgcatctgtttcggagaaacacagtgaacgttaattcatcgtcaaatcgtggcgaagcgattctcgccgccctgaaaacgcagttccccggcgcggtgctggatgaagagcgacaaacgcctgaacaggtcaccattacggtgaaaatcaatctgctgcctgacgttgtacagtatctttattatcaacatgatggctggcttccggtcctgtttggcaacgacgagcggacacttaacggtcattacgcggtttattatgccctttcaatggaaggggccgaaaaatgctggattgtggtgaaggcgctggtcgatgccgacagtcgggagtttccgtcagtcacaccgcgcgtccctgccgcggtctggggcgagcgagaaattcgcgatatgtacgggctgattccggttggcctgccggatcagcgtcgcctggtgttgcccgatgactggccggaagatatgcatccgctgcgcaaagatgcgatggattatcgactgcgccctgaaccgacgactgattccgaaacgtatccgtttatcaatgagggcaacagcgatgcgcgggtgatccctgtcggcccgctgcatatcacctccgatgaaccgg

SEQ ID NO: 138941 - DNA, 531 bp, Homo sapiens
ttaatacgcccgctgcagcgaactgatcgcaatgctaagttgctgtaacaccgggttatgcaccgactgcagcaccgcctcgtggtagcgaatatccgcttcgttaaacgcttcgcggtcctgattgttggcaatcatctcgttcagcgccgattcaatctgcgccagatcgctggaagtcgcgcgctctgctgcccaacgggcaatcgccggttccaccagatttcgcacttcgctcatggcactgataagccgtgggtcgtagtcattttccagcacccattgcagtacgtcagtgtcgaggtaattccactggttacgcggtgccacaaacgccccgcgataacgtttcatttcaatcagccgcttcgccatcagcgaacggaacacctcacggatgatgttgcgcgaggttgcaaactcctcacagagttccgcctcagccggaagcggcgagcctggcacgtatttgccgtgaacgatctgtttacccagcgtaatgccaatgcgatcggttttattgagagtcat

SEQ ID NO: 138942 - DNA, 1968 bp, Homo sapiens; identical to SEQ ID NO: 123265

SEQ ID NO: 138943 - DNA, 1555 bp, Homo sapiens
atggtgatcgggcgcaccaaagaggccaacgaagagatcgacggcgacgaacgtccggaaacctctcacctcacccgcgttgatctgaaagaagatggcaaagggctgaagattgttcgccagagcctgccgtacggcactgccagtggcactcacggtctgtacttctgcgcctactgcgcgcgtctgcataacattgagcagcaactgctgagcatgtttggcgataccgatggtaagcgtgatgcgatgttgcgtttcaccaaaccggtaaccggcggctattatttcgcaccgtcgctggacaagttgatggcgctactgaaccagggagaaattgaaaccctgagaagatcaataatgagttccaaaattgaattagtaatgaaaagcttagcaaccagggaataccccgaaccagatggattcacagccaaattcttccagatgtataaagaagagctgagtatccccgcgggtactggagcaaagcgcggagagcgtgccggagtacggcaaagcggtcaatatcaaaaccaaacgcggcgtaattaagccgcgcacgccaaaccaggcgcagtacatcgccaatattctcgaccatgacattaccttcggcgttggcccggcgggtacgggtaaaacctacctggcagtggctgcggcagttgatgccctggagcgtcaggaaattcgccgtattctgctgactcgtccggcagtagaagccggtgagaaactgggcttcctgcctggcgatttaagccagaaagtagacccgtatctgcgcccgctgtacgacgcgctgtttgaaatgctgggctttgagaaagtcgagaaactgattgagcgcaacgttattgaagtcgcaccgctggcctatatgcgtggtcgtacgctgaacgacgcgtttatcattctcgatgagagccagaacaccaccatcgaacagatgaagatgttcctgacccgtatcggttttaactcaaaagcggttatcaccggcgacgtcacacagatcgacctgccgcatgccgctctggaagattccatcgctcgcttccagcaaaaactttcagacctcggctttcagattgaagaggcctcctggctgaatcccgtgcctaacgtctggtctgtacatattcgcgacaaagagtgcgcactgtgttttaccaacggtaaaggcgcaaccaagaaagcggcgctggcttctgcactcggtgaatatttcgagcgtctctcaaccaactacttttttgcggacttctggctgggcgaaaccatcgccaacggtccgttcgtgcattatcccaacgaaaaatggttcccactgaccgaaaatgacgatgtgccagaactgcatctgcagtcactctaccggatccttttggcgtcttggcaagatgaaaaagaatggcctttctgcagcacagctcagaaatgctccgaagagcaattgacattgcaaactcatttccaagggcttccctccagaagtcttcagaagctgggtttccctcgggaaccgtgccttggcctagacagtccatga

SEQ ID NO: 138944 - DNA, 1061 bp, Homo sapiens
atggcgcaagttacgattcgctttgtctgttggtgcaggtggaaagtaaaacggcactggataacctggacgaaatcctcgacgtcgaagggattgatggcgtgtttattggacctgcggatctttctgcgtcgttgggctacccggataacgccgggcacccggaagtgcagcgaattattgaaaccagtattcggcggatccgtgctgcgggtaaagcggctggttttctggctgtggctcctgatatggcgcagcaatgcctggcgtggggagcgaactttgtcgctgttggcgttgacacgatgctctacagcgatgccctggtcacgatcaaagccctgttccagcatgcgcaaagcaattttaatggcttgttcatgcaaaccttctaatttaccttcctgccagccaatttgatgtccttcctgccgcagccgttcagcaatagtcattaatctctccttttaatgacagttcggaatatcagcatcagtgagttgggttgtcgccagcacaatctcacgttcaaagccctgctccagcatgcgcaaagcaattttaatggcttgttcatgcataccttcctgccagccaatttgatgcccttcctgccgtagccgttcagcaatagtcattaatctctccttttgtagtggtgaacgttcggcaatctcctcaataaaacgggtgaaacgggaggtatcgccgcattgcagcagataattaaacagtgtttgtagctggctgtcattagtgaagcctctaaccaaaagcgtggtgatcctgtcgaccatgccgattaaatcgcggtcgcgaatatgcttttgaatcagttccagcagagctatacgccgatgttgcatgatctcatcgtcaggtacgatggtgatatccaccaacagaaaagcttcggtgtacaactgccgggcaagttgcggatcgtcaaactcatccagccagttgagtgagtacgggtaaggcgaggtttcgccatgataaaacagcaacggcaccaccagcgggactctgtcatagcctttgtcctggtgacgctgcat

SEQ ID NO: 138945 - DNA, 587 bp, Homo sapiens
ggcacgagagaacagcccacgtaggtaggacagctgccccaggtcccataggactgcatgcctcaagcccacgtcatgcagagccactcaactcaccctgctcagggcacgtggtttacctgcattcccctcttgcaggtcctacgtgtggaggacgtaccatctgacctctgcaggagagaaactcacggaagacagaaagaagctccgagactacggcatccggaatcgagacgaggtttccttcatcaaaaagctgaggcaaaagtgagcctccagacaggacaacgctcttcatcactggtggctgagctttttcccagcaggaatgggtcctcgaatcatcgtgcctcttttcacagaaaggacgttgtggtggcctcaccccagggcattgcccaacagggaactgttcagcataaacctgggggggccctcaggactaggacagggtgagccagtgctccctcctttcatgtacttggcctgagactgacctctccctaggtccaaatgccctagtcacatggcagacccacggcctggcccactgtataaaataaacctgtttgcttcttagtttgaaa

SEQ ID NO: 138946 - DNA, 4459 bp, Homo sapiens
ttaacgcatcagcagatagatgctttcattgccgcgtacaatttgcagggcgatgatggccggttttgccgccagcactttacgcatttcagcaatcgagttcacccgatcgcggttgacgccaatgatcacatcgtctttttgcaagccagcctgagcagctgggcttcctttgacaacttcatcgattttaatacctttgccgccatcttttagctgaccatcgctcaacgttgcaccttccagcgctggcgtgatcatttcagcgctggccgacgaagaggtgctggtatcgagcgtcacttctacttccagtggtttgccgttacgcagcaggccaagcttcactttcgtgcccggctcggtggtcgccgatacgagagcgcaactcagcaaagctattcagcggtttgccgttgaggctggtaataatatcgcccgctttgacgcccgcttttgccgagccagaacctggcaacacttcgctgacaaacgcgccacgctgcacgtcaaggttgaaggctttggcgatatcggcactcatctcggtgcctttgatgcctaacaaaccgcgtttgatttcaccaaagtcgataagctgctgcgccagtgttcgcgccatattactggggatggcaaatccaatcccgacgctcccgccgccaggcgcaaggattgcagtgttgatgccaattaaatcacaccgcgtaaccagtggaattacctcgacactgacgtactgcaatgggtgctggaaaatgactacgacccacggcttatcagtgccatgagcgaagtgcgaaatctggtggaaccggcgattgcccgttgggcagcagagcgcgcgacttccagcgatctggcgcagattgaatcggcgctgaacgagatgattgccaacaatcaggaccgcgaagcgtttaacgaagcggatattcgctggatgggcgatgaggccaacatgccgcaaacgctccaggaacataaggcgctgttcgatgcgatacgacatcaggacggcgatgcggcagagcaggcggcgcatgatcgccagctcgacacgaaggttaaaggaaatcacatgacagctcgctacatcgcaattgactggggatcgaccaatctgcgcgcctggctttatcagggcgaccactgcctcttcgccacgcagatgaatattgctgggaagatcgtccgacagcagtacacgctgcggtcgttgtcgggacggttcagcgaccggawcttccgccagtaawtttacgcgtataaggatgctgcgggttttcgaagaccgcgcgccgtggaccaatttcaacaatttgcccgagatacatcaccgccacacgatgactaatccgctctaccaccgccatatcgtgggagataaacagatacgcaatgccgaaatcacgctggagatcgagcaacaagttgataatctgcccgcgaatagaaacatccagcgccgaaacggcttcgtcggcaatgatcacttttggattcaatgccaacgcgcgagcaatgcagatgcgctggcgctgaccgccggaaaactcatgcgggtaacgccaggcatgttcaggtaacaggcccacgcgctccagcaaccacgcaacgcgtgcagccgcgtctttacctggcaataaaccgtgtacacgcagcggttcgataatcgaatcaccgatggtctgacgtgggtccagcgaagcgtaagggtcctgaaaaataaactgaatatcccggcgtaatgcctgaagtttgccgggtgacaaggtatcgattcgctgaccgttaaagataatttcgccgccctgcgattcgaccaggcgcagcaacgcccgcccggtagtggatttaccgctgccagactcgcccaccagcgatagcgtttcgccaggccagagatcaaaactgactttctcaacggcatgcacttcccgcgttacgcgattcaacaaaccgctgcgcaaagggaaacgggtgacaagattacgcactcgtaaaacaggttcgccatccaccaccgttttctgctcgatggggggggcctgtttcgctggatgttcaagcgatatcaacgggaaacgtcggggataatctaaccctttcatcgcaccaagttgcggaacagcagctaacagcgcacgggtgtaaggatgttgcggtgcatgaaaaatctgttcgacggtacccgtttccaccgcctcgccctgatacatcaccagtacccgatcggcaatctctgccaccacgcccatatcgtgagtgataaagataacgcccatcgacatctctttttgcaatactttgattaattgcaggatctgcgcctgaatagtgacatccagcgcggtggttggctcatcggcaatcagcaccgccgggcggcatgacagcgccatcgcaatcatcactcgctggcgcatcccgccagagagttgatgcggataacgtgaaagaatggtttgtgcctcaggaatgcgtacctgatccagcatccgcttcgcctcgaccatcgcttcttcacgactggcgttctgatgcagacgaattgattcggcaatctgttcacccacagtaaataccgggttcagcgatgtcatcggctcctgaaatatcatcgccatatccgcaccgcgaacatggcgcatttgtgcagcgttctgctcgctaagttcaatcacttcgcgactgcgccgctgcaacagcattttatcgcactgtactaaaccgcccgcatgttggtttgcgggcgtcatggtcttttgttcggcttcttcccaggcttcataggcgttaacgatacgcgccaccacagggtgacgaaccacgtcttcgctgtggaagaagttaaagctgatctcttcgacatcgggccagcacttcgatggcgtgacgtaagcctgatttagtattacgcggcaggtcgatctgtgtgacgtcgccggtgataaccgcttttgagttaaaaccgatacgggtcaggaacatcttcatctgttcgatggtggtgttctggctctcatcgagaatgataaacgcgtcgttcagcgtacgaccacgcatataggccagcggtgcgacttcaataacgttgcgctcaatcagtttctcgactttctcaaagcccagcatttcaaacagcgcgtcgtacagcgggcgcagatacgggtctactttctggcttaaatcgccaggcaggaagcccagtttctcaccggcttctactgccggacgagtcagcagaatacggcgaatttcctgacgctccagggcatcaactgccgcagccactgccaggtaggttttacccgtacccgccgggccaacgccgaagtaaatgtcatggtcgagaatattggcgatgtactgcgcctggtttggcgtgcgcggctataattacgccgcgtttggttttgatattgaccgctttgccgtactccggcacgctctccgcgctttgctcccgtaccccgggctcttttatcgccaggacgtggccggcacttactctcggagcttctttctgtcttccgtgagtttctctcctgcagaggtcagatggtacgtcctccacacgtaggacgtatctctggatggccttcttcaggtccaggactgtggcactctgcagttcaaagccctgctccagcatgcgcaaagcaattttaatggcttgttcatgcataccttcctgccagccaatttgatgcccttcctgccgtagccgttcagcaatagtcattaatctctccttttgtagtggtgaacgttcggcaatctcctcaataaaacgggtgaaacgggaggtatcgccgcattgcagcagataattaaacagtgtttgtagctggctgtcattagtgaagcctctaaccaaaagcgtggtgatcctgtcgaccatgccgattaaatcgcggtcgcgaatatgcttttgaatcagttccagcagagctatacgccgatgttgcatgatctcatcgtcaggtacgatggtgatatccaccaacataaaaggttcggctgtccggctgccggccaagttgcggatcgtcaaactcatccagccagttgagtgagtacgggtaaggcgaggtttcgccatgataaaacagcaacggcaccaccagcgggactctgtcataacctttgtcctggtgacgctgcatggcggcagtggcatatcgcattagccgaaaagccatattcttttctgcagagctttgatgttcaatcacgcagtacatatagccgtcaccgtcgctggtttccacggaccacaaaacatccgagtagtaagcgcgcaaacttttttcaataaaactagtgggttccaggcgtaaggtttgcaggctgccaagcttgcgcagcggttctggtaaatgtatttcgagaaaatcccgtgcggtttcgggtgtgaacataaagggtttaaataccgcatcatgcggggagg

SEQ ID NO: 138947 - DNA, 1479 bp, Homo sapiens
ttatgtgccacattttctaatccagtctatcattgatgacattgggctgatccagtcttggtccaggtacaaaatgagtggggagattttgcggggcatattatttcgagtggccggggtaatgttagattgaattcggactggacgtaacgaatcgtataagggtgatataagccggtataaatttgtgtcagctcgagctctacggaacgaagtgcgaggtggcagatgccataagacgatccggagggtcagcgttggtaaaaaagtaataggcctcaagttccgccatctggtgccagtggtgacgccggaatcgattgtcattccgcctgcgccagtcgccaacgatacgctggttgccgaagtgagcgacgctccgcaggcgaacgacccgacatttaacaatgaggatctggcttgatttgccgttttatcgacacccactgccattttgatttcatgcccaggccgctggggaccagccgcaggctccgagtgcggggtccgcggagcccacgcccaccgggaactcgcgctgcgggcgttttcctgctgctgcttttccagcaatgcaatcagcataccgaactgagtgccccagtcgccgacgtggtttgcccgaatcactttgtgaccgaggaactccagagtacgcactgctgcgtcaccaataatgtaggagcgcaggtgaccgacatgcatctctttcgccacgtttggcgcagagtagtcaaccacaatggtctgtttttctggcgtagcaacaccgagacgatcggacgccagcgcctgctgaacatgttcagccaggaatgccggatcaaggaaaatgttgataaagcctggaccggcgatctcaactttgctggcgataccgttaagatccagatgagtcagcacctgctctgctaattgtcgcggtgccatacccagttttttagcaactgccatcatgccgttagcctgatagtcgccgaactgaacttttgctgactgacgaacctgcggttcgcaatccgcaggcgcgcctgccgcaatcatggcctgacggactttttctgagagaagagcctgaatattcaccggaataccacaggagttagagcgattattcatttctgtatcaatctctaagcctaatacagccaaatgttccatgaccagacgacgaattaagcttgaattctctcctattccgccggtgaatataattccatccaggcgacgtaatgaagctgcgtgtccggcaatatgacgggcaattcggtgaacaaaggttttaattgccagttgcgcgcgttcgtgaccttcatgccaggctttttccagaacacgtaaatccgaagaaagaccggaaatacctaataatcccgactctttattcactacgcgttccaggtcacccaggctctggttggtttggctggcgacccaggacatcgcaccaaagtcgacatcgccactgcgggtacccat

SEQ ID NO: 138948 - DNA, 1879 bp, Homo sapiens
tcgactggctggtggaggccactgcaagccagatgccgttgcaaatggataccgccgcggttgtttgacagcggcaaatcgttttatatgtgcgcctgtcgtcaggatgactacgcgccgtattactttttaccaaccaaacaaaactggctggatgtgattcgcgcctccagtgcggataccgggctttattcgtagcggagggtcgctggaaaggcgattacctacttggatggcgggatcaggtgatgcgattccggttaaagaggcggcaaggcagggcgctaaaacgttggtcgtcattcgcactgtgccgtcacaaatgtattacacgccccagtggttcaaacgcatggaacgctggctgggtgacagtagcctgcagccgctggtcaatctggtgcagcatcatgaaaccagctatcgtgacattcagcaatttattgagaaaccaccgggcaagctgcggatattcgaaatttatccgccgaagccattacatagtatcgcgcttggcagtcggattccggcgctgcgtgaagactataaacttgggcgtttatgcggtcgttatttcctcgccacggttggcaagctattaactgaaaaagcgccgcttacccgccatctggtgccagtggtgacgccggaatcgattgtcattccgcctgcgccagtcgccaacgatacgctggttgcccaagtgaaccgacgctcctggcgatgaagaggccagcctgcaacgcgcggcacaagcgggcgtaggcaagatcattgttccggcaacagaggcggaaaattttgcccgtgtgttggcattagcggaaaattatcaaccgctgtatgccgcattgggcttgcatcctggtatgttggaaaaacatagcgatgtgtctcttgagcagctacagcaggcgctggaaaggcgtccggcgaaggtggtggcggtgggggagatcggtctggatctctttggcgacgatccgcaatttgagaggcagcagtggttactcgacgaacaactgattctggttataacgctacgaactgccggtgatcctgcattcacggcgcacgcacgacaaactggcgatgcatcttaaacgccacgatttaccgcgcactggcgtggtttacggtttttccggcagtctgcaacaggccgaacggtttgtacagctgggctacaaaattggcgtaggcggtactatcacctatccacgcgccagtaaaacccgcgatgtcatcgcaaaattaccgctggcatcgttattgctggaaaccgacgcgccggatatgccgctcaacggttttcaggggcagcctaaccgcccggagcaggctgcccgtgtgttcgccgtgctttgcgagttgcgccgggaaccggcggatgagattgcgcaagcggtgcttaataacacgtatacgttggttaacgtgccgtaagccggataaggcgttcacgccgcatccggcagttggcgcacaatgcctgatgcgacgcttaacgcgtcttatcatgcctacaggtttgtgccgaaccgtaggccggataaggcgttcacgccgcatccggcagttggcgcacaatgcctgatgcgacgcttgtcgcgtcttatcatgcctacaagtaggtttgtgccgaaccgtaggcccggataaggcgttcacgccgcatccggcagttggcgcacaatgcctgatgcgacgcttgacgcgtcttatcaggcctacagtgaacagaacccgtaggtcggataagcgcgttcacgcccgcatctcgacagctcgttgcgctgatgtgcgacggcgtaaatgcgttcttatcaaggcggctcggttgggcaacgtattctttggttaagtgagcgcctgtcat

SEQ ID NO: 138949 - DNA, 2046 bp, Homo sapiens
tcaatttttataggggatggaagatgagtgaggtggtccaccgatattcccgctacgtccacgtttcgcggttctcccagcggcagtttctttagtggcggactggtagcggaacgtaacggcatcgagagccgattctcggccttgatgtgctgtacatttgccctgcgcgacgaatacccgcgaatgctgaatgtcgacaacaaaggcttgcgcgatcatatcgaactgcaaccgctggctgtggcgcaagttatcctggcggtgatttccgcaagaacgcggtgtatgttccgatgtggtgatccgcgcattgcgagccagaaggtcgatttgcagaaactggttcacgaagatatggcgaagattttgcttcaacggcccccggatttcgccgagcagccaccaggaaaagagtacgccgtaaacggtaacggccatgtgcttaagctggcaatactggcaggcaagtttttcaatacgaacaacattaagctccacgccagtgccgtcgccagaatcgcactgtaggccagcgccataacacagtaagcgaccacactcatcaccagcgccgcatacagcatctgccaggatgttacgacaataaatccacgcgcggatgacgggcatacagacgtttagcgacatcgcgctcgccccccaactgacgccggagaggattgccagcatggcactttcatcgtaagagagatcgagttgccacggttgcaacacgttaagtttaggagagattttacaacgggggaataaccaggacaaataaccgccatgccgacgggttctttttggatcaggcaagacgcataatccagcatcagattgttgatcgtaacgggtacggtaaaggacagagtgttcgccggtaaaaagtttcccatcgcgcaccagttcacgcggatagctgttttcaatcgcgaaccaatccgtttggctaaaccaatcggttgatgctggaagtaaccaatacatcatccgccactggcgcggcttgcgggtaaacatccgcccgcgataccactcctccgcttcccggtggttgagcatcgactgattccaccagcgccaatggtggtaaaacgcagaaaaccgctctcgtcgatgtgggtgacataaagccgacttcatccatatgtccgacaacggcaacttttggaccttattccccttacgggcaacaaagctgcccagaccatcgaaggtgatttcatcacgcaaggttccagcgtgtttatcagaatgtcgcgaacttcctgttctcgccgctgacggcgctggcttcgcacaactgttgcagtaactcaatgtcatggacaagctcctgttgcgcggctttcgctttgcggcgtaaccacaacccaaaccaggtgccagacgtttgattccgaaagcgatcaccagacgccggtaatgccgcccgccagcgtattggcggtaatcatcggcaacgagccaacgatgcagggcggtacccatgttaatggtctgcgtcagtgacctttggacgcgatgcgtgagttctgtgaataccgcaatattctgccgcgcgtgtaaagctgtcggcggaagatatctgggatcgctgcgcctatgtgcgagctgttccttgtggaaggtgacccgcaggcggatctgccaagcaggcgcgcgatcgcgaatatcaggcgatatgccactgaaaggtaagatccttaacacctgggaagtctcttccgacgagtgctggcttcgcaggaagtgcacgatatttcggtagcgatcggtatcatcctcgcggatgcggactctgatggtctgcacattgccacgctgctctgcctttgttcgtaaaacatttccgcgcgttggtgaaacacggtcacgtttagtcgcactgccaccgctcacgcttgatccgaacactcgccgtctgggcagttgactatcgatgatgaagacgatcagcgtactgacgcgatgatgatatgctgctggcgaagaaacgctcggaagatcgccgcaactggttgcagagaaaggcgacat

SEQ ID NO: 138950 - DNA, 1467 bp, Homo sapiens
aattgcaattcagggcatacacagaccaggcagtcttcggcatgtccaaagaacaaagagaagattgggagttttattagaaagatcaatgttatgtactgttttgaaagaaatctcatcagcactagagaagctttcgaaagctggcaagctctgactgagccaatagaaaagatatgggaagactatttggaggaacagatgaacagctggaacagaaaggaagaagaagccggggatcctctagagtcacctacgcatggagctgcctgccgcagacagatacaatcgagctcggtaccggaccatgagagaactctggtagttatatcctacatcttgaataggaattgcatacacagctatgaagttactcttaaattccaggcccacagtccccacaatctagtccagatcttggttggctacagtgttgaaacccttaaagactcctctggaaagctcctagatctgataaatgaattcagtgaagtctcaggatacaaaatcaatgtacacaaatcagtagcactgctgtacatcaacaatgacaaagctgagaatcaaatcaagaactcaatctcttttacaacagctacaattcagctcggtaccagacagagaacactgcagagttcaaattccatggttatttttaacatgattagggtccaagaaactggagacattgtcatttcaaatgcatatgtggatcttgcaccaacatctggtacttcagctaagacaccctctgagcaccatcgcgatccacgctcgctggcgttgtccgccagaaagggtatccacgctttgatctgccagatgagttattcccgtggcctgcattgctttcgttaccgcttcttcatcctctttgcgccagcgggtaaacagcggttgatgcggataacgtccacgcgccaccagctcctgcacggtgatatcgcccggcgtggtagcattttgcgccaacagaccaatccggcgtgcaacctctttactggcgcgttcgggactcataccttcctgaagtgtgcgttcagcaacaaacagcgtcgctttaccgtcaaacggtacgctatgagcagtcgtggtcgcccgtcggcaacggcagaaatgccctataatccacaggcttctggcgggagcaatctggcggtcagtaaccctgagctggataaactaatagccgcacgcgttgctgcattacgggccgctaacccggatgccagcgcgagcgttccggttgaactggtgacggcatcggcaagcgggctggacaataatatcaccccgcaagcggcggcctggcaaatcccacgcgtggcgaaagcgcgtaatctcagcgttgaacagctcacgcaactgatcgcaaaatacagccaacaaccgctggtgaaatatatcggccagccggttgtcaacattgttgaactcaatctggcgctggataaacttgatgaataa

SEQ ID NO: 138951 - DNA, 1488 bp, Homo sapiens
tcactccgtgatgaatatcatgttattgttaagtgccagcgaatgtggcgttgaagatccgttgcgccggtccgggtcccggtcatgatgaccgggaccacagagaggcgatggttctgtcagaaggtcacattcacgtgtggcctgaccgttatacccttcagcgctgctgccgctgacgctgtgggcataaccggcctgaacgcccagggtgatattttcccggacacgggcttccagtccggcctgcaggtccagtgatgtgccattctgtgagggagagaacgtcatcccgctgcctgcagtggaagtttctgatatgttgtcgcgcctggacgccccgttgccgctcatgggaagaaatccatcaccacgcttgatctcaatctgctgctttgtctgcaactgctgatgcaggagcgcagcgtaaccaaagcggcgaagcggataaacgtgacaccttcggcggtgagtaagtcgtctgatttcgcaggtcaacccatccgtggcatcagcgtacggtttttcaccaaagttcaataagtaccggacattgagataatgcccgccagcatctccggtcgtgttggttttaggcgtgggagcgggttcaggcgtaggatcggggttgacagcactactcccgctgatattcaataaatcccctttattattaacgccattaccctcgccaacaacatcagcacgcataataaaggtactgttaccgctcaggttctctacgtttaatgtggcaaatgtgccggcagttgacccgtggctggcaaaatcgacagttgaatggctcagcgccagcgtgtcgagattagaattacttgttacgttccagacgctgttattcattgcaacgtccagttttccgccattgacattatcgctgagggaggaacctttggaaagaacgctaccgttgataagcatacgacccgaggcgttgatgcggctggcggcataaccatcgtcatgttgcgttgcgatggccatctggtcgggtgtactcatatcaatgatcacgtcgtttccacgtaccaccgctccaataatcgttcctggcggtagcttgatttcgtcaatgactctgcgagggccgtattttcggtgcaccagcagaccacccctgtaggagatcaagggttcgaatccagcaaccaccaccggacgatgtaagtcgctgccgatacaattataggcgtcggtgcccgataaccagtactgacgtgacccggcgcgaggaacagcatcgataccgttatccggctgttccagcaaagcgctttcgcctgttgcagactgatagcggtggtcggcatagtggatttcaaaacctaacccgaagatacaccactttgacgggttggattttcctgcaccagtttcaacgcatccatcggcgagtaaacgatgcgcacatcggcaccgcgatgcttttgcctgcaacagcgatccctgtttccccggcacgcgcat

SEQ ID NO: 138952 - DNA, 394 bp, Homo sapiens
ctgtacatttgccctgcgcgacgaatacccgcgaatgctgaatgtcgacaacaaaggcttgcgcgatcatatcgaactgcaaccgctggctgtggcgcaagttatcctggcggtgatttccgcaagaacgcggtgtatgttccgatgtggtgatccgcgcattgcgagccagaaggtcgatttgcagaaactggttcacgaagatatggcgaagattttgcttcaacggcccccggatttcgccgagcagccaccaggaaaagagtacgccgtaaacggtaacggccatgtgcttaagctggcaatactggcaggcaagtttttcaatacgaacaacattaagctccacgccagtgccgtcgccagaatcgcactgtaggccagcgccataaca

SEQ ID NO: 138953 - DNA, 1665 bp, Homo sapiens
atgctggcgctgatggatgcggatggaaacattgcgtggagcggggagtatgatgagtggggcaaccagctgaatgaagagaacccgcatcacctgcaccagccgtaccggctgccggggcagcagtatgataaggagtcggggctgtactacaaccggaaccggtactacgatccgttgcaggggcggtatatcactcaggacccgataggtctggaggggggatggagtctgtatgcgtatccgctgaatccggatgccgcgccagagaaactgggcgttgaccgcgcactggcattcagcgaaatcaatcagcaactttatcaactacttaacggcctggatgtggtttaccatgcccagggcgaatatgcatatgctgatgtaatcgtgaacagtgcgctggaaaaactgcgtaaaggttcgcggcaaaatctcaccgcaccggcaacgatgatcgactggcgtcctgttgttcgtgaaatgcgcctgttcaaatcgccagaagagattgccgtactccgccgcgcgggagaaatcaccgccatggcacatacacgggcgatggaaaaatgccgtccgggaatgttcgagtaccatctggaaggcgaaattcaccacgaatttaaccgccacggtgcgcgctatccgtcctataacaccattgtcggcagcggtgaaaacggctgcattctgcactacaccgaaaacgagtgtgaaatgcgcgacggcgacctggtgttgattgacgcgggttgtgaatacaaaggttacgctggcgatattacccgcaccttcccggtcaacggcaaattcacccaggcccagcgtgaaatctacgacattgtgctggagtctctcgaaaccagcctgcgcctgtatcgtccgggaacttccattctggaagtcactggtgaagtggtgcgcatcatggttagcggcctggtaaaactcggcatcctgaaaagtgatgttgatgaactgatcgctcagaacgcccatcgtcctttctttatgcatgggcttagccactggggaagtgacgctcattttcccgattatcctctggcgtcgcccagtaataatgaaattgatttacttaatctaatctcagttttatggcgggccaaaaaaacggtcatggcggtcgtttttgcgtttgcctgcgcaggcttgctgatctctttcatcctgccgcaaaaatggaccagcgcggcggttgtcacgcctccagaacctgttcagtggcaagagttggagaaatcattcactaagcttcgtgtgctggatctggatatcaaaattgatcgtacagaagcatttaacctgtttatcaagaagtttcagtcggttagcttgctggaagagtacctgcgttcatcaccttatgtgatggaccaattaaaagaggcgaaaatcgacgaactggatttgcatcgcgcaattgtcgcattgagcgaaaaaatgaaagcggttgatgacaatgccagtaagaaaaaagatgaaccgtcactgtatacctcctggacgctaagttttaccgcgccaaccagtgaagaggcgcagaccgttttgagcgggtatatcggattatatctctaccttggtggtgaaagagtcgctagaaacgtccgtaatacactggagatcaaaacccagttttga

SEQ ID NO: 138954 - DNA, 495 bp, Homo sapiens
tcgaaactctatccagttgtgatggcaggtggctccggtagccgcttatggccgctttcccgcgtactttatcccaagcagtttttatgcctgaaaggcgatctcaccatgctgcaaaccaccatctgccgcctgaacggcggtcaggctcggcgtcggtgccgataccatactgacgtgacccggcgcgaggaacgcatcgataccgttatccggctgttccagcaaactgcgcaacgtcgggataagcgtaatgtgctggcagaagaatttcaacgcatccatcggcgagtaaacgatgcgcacatcggcaccgcgtgcttttgcctgcaacagcgatccctgtttccccggcacgcgcatggcgtcgccaaaggtacagaagatgacttccggatggctggcaatctccacgcaggtgtcgattctacccatcggcagtacgcacaccgggcaccccggaccgtggataaactcaacgttttccggcagtaa

SEQ ID NO: 138955 - DNA, 5355 bp, Homo sapiens
atggactggctggctaaatattggtggattctggtgattgtctttttggtaggcgtcctgctgaacgtgattaaagatctcaagcgcgtcgaccataagaaatttctcgccaacaagccggagcttcccccgcatcgtgatttcaacgataagtgggacgatgacgacgactggccgaaaaaggatcaaccgaagaagccaggtaatctgtcttttacatcatttcaatcacatcatcatcgccaggcttaccgccacttagaataccgacagtatgcgcgtgtgcacctgcgcttgcagcagtgccggacaggtccggcaacttccgactccggtatagaagttaaccagaatatagctgtcgccagagcgggtgacattgtaagcgccagattcggcattccatggaacgccaccatccgcatcggcatatgtatccgttgcccttctggcaaaagcagccacatgcgcggcgccaccataaacatcaccttgattggtaagcagcaggaaaaagaagctaatggtctggacccggaagtgctggcggagattaaccgcgaacgcgaggccttcctggcagcacagcagggaagtacttcaacggagttgtttaccaccattgaaggcaactacgctgatgctgtgcgcctgctgacgactgctcatagcgtaccgtttgacggtaaagcgacgctgtttgttgctgaacgcacacttcaggaaggtatgagtcccgaacgcgcctggtcgccgtggatagcggagctggatatctatcgtcaggattgtgcgcatgtggatattatctctccagggacgtttgaaaaaattgggccgattattcgcgcaacgctaaacaggttataccccatgtcatcactgaatattaaacagggaagtgacgctcattttcccgattatcctctggcgtcgcccagtaataatgaaattgatttacttaatctaatctcagttttatggcgggccaaaaaaacggtcatggcggtcgtttttgcgtttgcctgcgcaggcttgctgatctctttcatcctgccgcaaaaatggaccagcgcggcggttgtcacgcctccagaacctgttcagtggcaagagttggagaaatcattcactaagcttcgtgtgctggatctggatatcaaaattgatcgtacagaagcatttaacctgtttatcaagaagtttcagtcggttagcttgctggaagagtacctgcgttcatcaccttatgtgatggaccaattaaaagaggcgaaaatcgacgaactggatttgcatcgcgcaattgtcgcattgagcgaaaaaatgaaagcggttgatgacagtgccagtaagaaaaaagatgaaccgtcactgtatacctcctggacgctaagttttaccgcgccaaccagtgaagaggcgcagaccgttttgagcgggatgttcgcacaaacagcggggaaacattatccggcccccatcaccgcagtaaaaaccattgaagctgcggcccgttttggtcgtgaagaagccttaaacctggaaaacaaaagttttgtcccgctggcgcataccaacgaagcccgcgcactggtcggcattttccttaacgatcaatatgtaaaaggcaaagcgaagaaactcaccaaagacgttgaaaccccgaaacaggccgcggtgctgggtgcaggcattatgggcggcggcatcgcttaccagtctgcgtggaaaggcgtgccggttgtcatgaaagatatcaacgacaagtcgttaaccctcggcatgaccgaagccgcgaaactgctgaacaagcagcttgagcgcggcaagatcgatggtctgaaactggctggcgtgatctccacaatccacccaacgctcgactacgccggatttgaccgcgtggatattgtggtagaagcggttgttgaaaacccgaaagtgaaaaaagccgtactggcagaaaccgaacaaaaagtacgccaggataccgtgctggcgtctaacacttcaaccattcctatcagcgaactggccaacgcgctggaacgcccggaaaacttctgcgggatgcacttctttaacccggtccaccgaatgccgttggtagaaattattcgcggcgagaaaagctccgacgaaaccatcgcgaaagttgtcgcctgggcgagcaagatgggcaagacgccgattgtggttaacgactgccccggcttctttgttaaccgcgtgctgttcccgtatttcgccggtttcagccagctgctgcgcgacggcgcggatttccgcaagatcgacaaagtgatggaaaaacagtttggctggccgatgggcccggcatatctgctggacgttgtgggcattgataccgcgcatcacgctcaggctgtcatggcagcaggcttcccgcagcggatgcagaaagattaccgcgatgccatcgacgcgctgtttgatgccaaccgctttggtcagaagaacggcctcggtttctggcgttataaagaagacagcaaaggtaagccgaagaaagaagaagacgccgccgttgaagacctgctggcagaagtgagccagccgaagcgcgatttcagcgaagaagagattatcgcccgcatgatgatcccgatggtcaacgaagtggtgcgctgtctggaggaaggcattatcgccactccggcggaagcggatatggcgctggtctacggcctgggcttccctccgttccacggcggcgcgttccgctggctggacaccctcggtagcgcaaaatacctcgatatggcacagcaatatcagcacctcggcccgctgtatgaagtgccggaagtcggtgtggcggtgggcctgcacggcgccagtgtgcagcagcaaaaatcattctgtccttctgttagtatctactcacagccgatcccgggcctgcagcaactctgcgccgctccccccccccccggcttagtgcaccgaacggcaatctccgagggggtcggaatgcctttacacgtcgtcaatttaccgccgaaaagatttgcgcgtaaacgcctggagcccaaatgggtacggataacttggcagttcgctgatatgcaagatatcggtaagacgccgctcaccgcctgccgttgccagcaagttttcagcaatgttacgcgccgacatcagcgcccgcagcatcggcataacgccacgtttgcgccagatttgccgataaccatcgaactcttcgactaccacatcccacgcatcgtttcgatatccagcgcgttcagccccatcattgacgttgccagcgcactacgcagggtgttctcacgttcgggcgtcatcaccgcctgcaacaaccaaagcatttcctgcgcttccagagtttcaaaaacactgtcgcggttcgaaagtgtagtgggcgtgaacttcgctacgcgccttcatataagtgaagatatccgcaccccggaatgcatatattgcctgcttcgggtcgccattagcaacaatgcggttcccgctgatggtgccagataccgcgaaaaatcggtactgctgggggaccgggtggccccgagcggcggcgagcggtgcaagagggggaacggaggggcccgtaaaggggggcgcgctagaggaggagcccctagggatccgaagggagcagcaagggcgaaggccaatgcatggccatggacggagccaagagagtgttccttgattgctggcgaaatcgccatcgaatgccagcgtgggattggtcaccaggatcgttttcagcgcctgatcaccacgctacgtcaggtgctggagtgcgatgcgtctgcgttgctacgttacgattcgcggcagtttattccgcttgccatcgacggtctggcaaaggatgtactcggtagacgctttgcgctggaagggcatccacggctggaagcgattgcccgcgccggggatgtggtgcgctttcccgcagacagcgaattgcccgatccctatgacggtttgattcctgggcaggagagtctgaaggttcacgcctgcgttggtctgccattgtttgccgggcaaaacctgatcggcgcactgacgctcgacgggatgcagcccgatcagttcgatgttttcagcgacgaagagctacggctgattgctgcgctggcggcgggagcgttaagcaatgcgttgctgattgaacaactggaaagccagaatatgctgccaggcgatgccacgccgtttgaagcggtgaaacagacgcagatgattggcttgtcccctggcatgacgcaactgaaaaaagagattgagattgtggcggcgtccgatctcaacgtcctgatcagcggtgagactggaaccggtaaggagctggtggcgaaagcgattcatgaagcctcgccacgggcggccaagctgctgagggtgttgcagtatggcgatattcagcgcgttggcgatgaccgttgtttgcgggtcgatgtgcgcgtgctggcggcgactaaccgcgatttacgcgaagaggtgctggcgggcgattgccgcgaccgatttgtttcatcgcctgagcgtgtttccactttcggtgccgccgctgctgccgttgaggcgttgcgtgaccatctcaatacgctgggcggcgagcaccatgaccccgtgcagttgctgaatatttactacgaaacgccggataactggctgcgtgggcacgatatgggcttacgtattcgtggcgaaaacggtcgctatgagatgaccatgaaagttgcaggaagagtgacaggcggcttacatcagcgcccggaatataacgtggcgttgagcgaaccgacgctcgacctggcgcagttaccgacggaagtctggccgaacggcgaattgcccgccgatctcgcctcccgcgtgcagccgctgttcagcaccgatttttatcgcgaaaaatggctggtggcggtcgatggtagccaaattgaaatcgccctcgaccagggggaagtgaaagcgggtgaatttgctgaacctatctgtgagctggaactggaactgcttagcggcgacacgcgcgcggtgctgaaactggcgaaccaactggtatcgcaaaccggattacgccagggcagcctgagcaaagcggcgcgtggctatcatctggcgcagggcaatccggcgcgtgaaatcaaaccgaccaccattttgcatgttgcggcaaaagccgatgtggaacaggggctggaagcggcgctcgagctggcgttagcgcaatggcagtatcatgaagaactgtgggtacgcggcaacgatgcggcgaaagaacaggtgctgcagccattagcggccagccaggaggctggaccaacgcatatgtga

SEQ ID NO: 138956 - DNA, 1890 bp, Homo sapiens
ttactcgttatccggtttaagacgacgacgactaataattcgcagcagacgccacagtacccatgccagcaatatcacactgatagccgccagcaccgccagcagaatcggatggtttgccagcgcataccacacgcgctcgaaccacggcagatgacctacgtaataaacgtcgccaacacgtaggctgttgataccggactcgcggatcaccgcgaccgaaccgaacatggtggcgcgtttgccgctatcgttcaccgcatcgttaagcatttcataaccgcgtgggctatctgccaacagcgcaatcacgctgcgctggtcgttatacggcgactggaagccaatcaccgccgccatcgcaccggaagaggtcagcgttgaccgggtttctgccgcgcgatcgctctcgtccggcacaatgccggggaacggggtctggcgcatcggtgttttcacccagctttcgtcgccacccggcggcgttttcacaagttgcggacataaccgttccacgtccgccagcagggttatggcctgtgccattgaccactgcgcatgttcgctcatcagatttcgtgcaatccactgcgcaatattgccaggttcgaatacggactgcttcgccaggtagcctatcagttcaggaatcaagatttgtaaattttgttggcgtaagggtaaaggcactgccctgatggtcacatgctgtgcatctgactggaaatcaatacccaattccgccagggcagactgcgctttttctaatgccgatttttcttcggcagaaacttttagccgcaacggaatcagcagcggctgggcgcaaacgggcgcttcacccggcgtcaattgtgcctgacgcagtgggccagtcaaacgccatttgcccgttaatacctcaccacaacgcgcgcgcgggtcatcgcagacctgctgcggtgccgggcggaaatgtgcttcggcatcgaatcgttgataatccggcgtcaggtgcacgccagaagattcaatcacgcctaagccgcgccattcgctgtcgccgttgacacagaacacatcggcaatcgcctgttgcgccagcaggttaccggcatccggtaccactcgacgatactgattctctaccttgctgtgggccgctattttctgctgcaccagcatgaccacgccttgtagtagatcaaggggttcgaatccagcaaccaccagcggacgatgaaaatcgctggcgataaaattataggcgtcggtgccgataaccatactgacgtgacccggcgcgaggaacgcatcgataccgttatccggctgttccagcaaactgcgcaacgtcgggataagcgtaatgtgctggcagaagaagtaaaaattctgcacatcacgcgctttcgcctgttgcagagtgatagcggtggtcggcatagtggtttcaaaacctaagccgaagaacaccactttgcgggttggattctcctgcgccagtttcaacgcatccatcggcgagtaaacgatgcgcacatcggcaccgcgtgcttttgcctgcaacagcgatccctgtttccccggcacgcgcatggcgtcgccaaaggtacagaagatgacttccggatggctggcaatctccacgcaggtgtcgattctacccatcggcagtacgcacaccgggcaccccggaccgtggataaactcaacgttttccggcagtaactggtcgaggccgaatttaaagatagcgtgggtatgaccgccacacacttccataatccgcagagggcgttcggcggtgtaagagagatgtgaagcacgttcgcgcagatgctcaattaactgcatcacctgttccggcgcgcgatattcatcaacaaacgcattatttttcctcgccat

SEQ ID NO: 138957 - DNA, 8160 bp, Homo sapiens
atgactaaacactatgattacatcgccatcggcggcggcagcggcggtatcgcctccatcaaccgcgcggctatgtacggccagaaatgtgcgctgattgaagccaaagagctgggcggcacctgcgtaaatgttggctgtgtgccgaaaaaagtgatgtggcacgcggcgcaaatccgtgaagcgatccatatgtacggcccggattatggttttgataccactatcaataaattcaactgggaaacgttgatcgccagccgtaccgcctatatcgaccgtattcatacttcctatgaaaacgtgctcggtaaaaataacgttgatgtaatcaaaggctttgcccgcttcgttgatgccaaaacgctggaggtaaacggcgaaaccatcacggccgatcatattctgatcgccacaggcggtcgtccgagccacccggatattccgggcgtggaatacggtattgattctgatggcttcttcgcccttcctgctttgccagagcgcgtggcggttgttggcgcgggttacatcgccgttgagctggcgggcgtgattaacggcctcggcgcgaaaacgcatctgtttgtgcgtaaacatgcgccgctgcgcagcttcgacccgatgatttccgaaaaccagagccggagcggcgctgttcgtgatgagattcagttctacgccacaggtgcgcgtccggatctggcaaaagagatgggctttatcggtggcaaaatgccgacgcactgggggccacatgatggcgatgcggggatccgcaaagatgccgctatggtcgcggatatgcgtgtaaaatgcgcggaacgttgcgaccgcatctcactgatgcacgccggaaaagtgcttgccagcggtacaccgcaggaactggttgagaaacgcggagccgccagtctggaagaggcatttatcgcctatttgcaggaagcggcagggcagagcaacgaagccgaagcgccgcaccgtgctacagccgccgcgaagcgctggaactgcgacgcgatccagtacgttcggacgctggcgctgatgggaacggtgatcctgatgctgataatgggttacggcatcagtatgatgtggaaaacctgcgctttaaagtgctggagggatttttgtggatcggacttcagattgataaaggggacgccgcgtagctccgacgacagcataaaaatcttgccgccaattttaaaaacatcgaactccgggccaaaaggccagcaaagctcgacaaagggtaactcaagcatggcaactgactcaacacaatgtgtaaaaaaaagccgtggccgcccaaaagtgttcgacagggatgccgcgcttgataaggccatgaaattgttctggcaacacggttatgaagcgacttctcttgcggacctcgtcgaagcgaccggagccaaagcgcccacgctatacgcggaatttaccaacaaagaggggttatttcgtgccgttctcgaccgctatatcgatcgttttgccgctaagcatgaagcacagctgttttgtgaagagaaaagcgtggagtctgcgctggctgactattttgctgccatcgccaactgctttaccagcaaagacaccccggcaggctgcttcatgatcaacaactgcaccaccctctccccagattcaggagatatcgccaatacgttgaaatcacgccatgcgatgcaagagcgcactttgcagcagtttttatgtcaacgacaagcgcgcggggaaatcccgccccactgtgacgtgacacatctggcagaattccttaattgtattattcaggggatgtcgatcagcgcacgcgaaggtgcatcgctggaaaaactgattgcccctgaacctcgcacccctcctgcctcgttcaggaagctccgcacctatccggccgccaccctcagcacaggcacggcagccgatgaaatctacgtatggcgtggacagacgccattcgtgatgtcgatagctgccacaaggcaacggtcttctcacccgacctggttcaacggtaatacgcaacacgcgcccaacttctgccgctttgctcggtttgccttcagcgtcgaacgcctgggcaatcgccgggccgcgtttttcgatttcacgatccggttgcgcttccgccagaatggggtcccaaacgagagattcgacgtaaacgtccgctcccaactaagttctcaggcgctgacaacgacaagaattcctcacacaatacgtagcgcttcaatcactaaaccgctttcacagccctcgacctgccgcgatatgtccgccgcccaccgtcaggccattgccgacattacgccgaaatatatggaagatctggatcaacgctggatggactatggcgttaagttcctcgacaagatggcgaagagcgataaaccattcttcctctactacggcactcaattcgccactttcgctccaggatgccctgccagatccagcgcgtggaggctaacctccacgatttcaattagcggtatggagcttcccatggccccggcttttcccattccgaggcaaaacccttggtcgatggccccagcttgccttttgactggcacttcgggccacaacggcggcagtggcgcgaagggcgaggacaggggggtctttggggggcggcctcctatcacggagtttcccttcggttccacttggaacttccgcgtgtgcggcttacggagtccggtaaccgcgctatgccgaggcgaaggcgggcaaccccagggcgcgcaggtccaacagcggccgggtaaaatcaccggggaaaatttccgacaaggaaactccaggggggggcatcaaaacgcccagggacacggacaccccctggtacaacgccacacagggggccccaggcacaagaagggggccacagaacaccccgggtacaccagcgcacccgcaaatccatccgcagagctgaaaatctacgatacctcatcacaaccacttagccagatcttaagccaggttcagcaggatggcgcgagtattgtggtcggtccgttgctgaaaaataacgttgaagagttgctgaagctttcaaaagccctctacaacattgactggcatcgccacgcgcaggtgaagtgcaacggcttgcagatcaatatgttgatggctgccgccgtctgcgccgtcattgccagcaacctcggcatgttcgtggtaatggccgaaatcatggccctgtgcgcgcaacagcaaagagggcaactgtggtttgcgctggggcgtcttggcactctgctgctggcgattgcttgctggctgctgtggcagcgttacggcacgctggatctgcgcctgctggatatgcgtatgcaacagctgccgctcggttccgatatctggctgctcggagtgattggctttggcctgctggccgggattattccgctgcacggctgggtgccgcaggcacatgcgaacgcctctgcgccagctgccgcgttgttttctacggttcatgtgtacaaacgcgtaattctgaccggtgaccatatcaccgactccacttccagccaggacgaatacaaccaaccgcaggttaacatctcgctcgatagcgctggtggtaacatcatgtctaacttcactaaggacaacatcggcaaaccgatggcaaccctgtttgtggagtacaaagacagcggtaagaaagatgcaaatggtcgtgcggttctggtgaaacaggaagaggtgattaacatcgccaacatccagtctcgtctgggtaacagcttccgtatcaccggcatcaacaacccgaacgaagcccgtcagctgtcactgctgctgcgtgccggtgcgttgatcgcgccgattcagattgttgaagaacgtaccattggcccaaccctgggtatgcagaacatccgatggggctacggccgttcccagcctgcggagctgacaaaactgtcgctgttttgctatatcgccaactatctggtgcgtaaaggcgacgaagtacgtaataacctgcgcggcttcctgaaaccgatgggcgtgattctggtgttggcagtgttactgctggcacagccagaccttggtacggtggtggtgttgtttgtgactacgctggcgatgttgttcctggcgggagcgaaattgtggcagttcattgccattatcggtatgggcatttcagcggttgtgttgctgatactcgccgaaccgtaccgtatccgccgtgttaccgcattctggaacccgtgggaagatccctttggcagcggctatcagttaacgcaatcgctgatggcgtttggtcgcggcgaactttgggggcaaggtttaggtaactcggtacaaaaactggagtatctgccggaagcgcacactgactttattttcgccattatcggcgaagaactggggtatgtcggtgtggtgctggcacttttaatggtattcttcgtcgcttttcgcgcgatgtcgattggccgtaaagcattagaaattgaccaccgtttttccggttttctcgcctgttctattggcatctggtttagcttccaggcgctggttaacgttcgcgcgggggccggggatgtaccgaccaagtacaactcactgagttgcttcaaagaaacgcgaaatgcgatattgggccgcctgatgacgcctgctcatgggcatgtctggctggatggcgagcacattcaacattacgccagtaaagaggttgcacgccggattggtctgttggcgcaaaatgctaccacgccgggcgatatcaccgtgcaggagctggtggcgcgtggacgttatccgcatcaaccgctgtttacccgctggcgcaaagaggatgaagaagcggtaacgaaagcaatgcaggccacgggaataactcatctggcagatcaaagcgtgataccctttcggtccaggctagttaaaaacagaaaggcagcctggcatagtggtagcagagacacagcagcaactctcatgctgtttgtgctggggtggctgggccgacggaggggtctaggctgttgtgggatctggggtggtttcagtcaacaaggtctcccgcctgccatgcagaaagtcatgtataagggactcgtccccgaggataaaacattgagagaaataaaagtgaccagtggggccaagatcatggtggttggctccaccatcaatgatgttttagcagtaaacacacccaaagatgctgcgcagcaggatgcaaaggccgaagagaacaagaaggagcctctctgcaggcagaaactacattgttgcttattcactttagtggcaagtattattgtgccagctgcttttgttttggaagatgtggacttcgaccaaatggtttcactggaagcaaatcgtagttcttacaatgcatcctttccctcaagctttgaactctcagcaagttcccactcggatgatgatgtcatcatagccaaagagggaactagcgtttcaattgagtgtcttctcacagccagtcactatgaagatgtccattggcacaattcaaaaggacagcaactggatggcagaagcagagtaattgctctagtcccagttactccagcgatccagcccaatgcgcgtatacggcgtcaccgagtggttgccgagcgtcagcggcaaataggcgcgaatttcttgcgtggaaaactcaccgttattgcggctgtcgtccatattgaagccgcgctcgagataatagttcactcgcaaggcaaccgtttcgttgaaggacagtaccaagctgtccagcacgctgtcgtgcggataccggtagggccaggccgtggctccggtgcgggttcactggtggcctacgcgctgaaaatcaccgacctcgatccgctggaatttgaccgtgctactgtaagggttctgaatggtgacaatacgcggcagatcgtgtttgtccgccagatgcaggtagcgcattacgccaaatgcagtttcgttcgacacgccgatataacgaatttttcccgcgcgttggtactctgccagtgcgtccagcgtatccagcagcgaaaccgcaggcgcagaatccgtccagctataaccgagtttgccgaagcagttggtcgggcgctgcggccagtgcacctgataaagatcgaggttaatgccctgagcgacggcatagtcgagttgtgcgtgggcgtcggcttcgctgttctgttcattctcagcgggaaatcggccaaacatcggtaccacagaaaactgggaataaacagggtaaacgccaattgtcccggtttttacgtcaatcgcatcttagcgccttacattaatgaagctatccgcatgttgacccaaggtgaacgggtagagcacattgatgccgcgctagtgaaatttggttttccggtaggcccaatccaacttttggatgaggtaggaatcgacaccgggactaaaattattcctgtactggaagccgcttatggagaacgttttagcgcgcctgcaaatgttgtttcttcaattttgaacgacgatcgcaaaggcagaaaaaatggccggggtttctatctttatggtcagaaagggcgtaaaagcaaaaaacaggtcgatcccgccatttacccgctgattggcacacaagggcaggggcgaatctccgcaccgcaggttgctgaacggtgtgtgatgttgatgctgaatgaagcagtacgttgtgttgatgagcaggttatccgtagcgtgcgtgacggggatattggcgcggtatttggcattggttttccgccatttctcggtggaccgttccgctatatcgattctctcggcgcgggcgaagtggttgcaataatgcaacgacttgccacgcagtatggttcccgttttaccccttgcgagcgtttggtcgagatgggcgcgcccctcgatgccgccagtgattccgttcgtcctctgaccactaatggttgtgacgaatctcgcctgatggcgaactggctgaaaggtcaaaaagtggaaatcgaacgcgttctggtgagcccgttcctgcgagccgagcaaacactggaagaagtaggggattgtctgaacctgccttccagtgcagaagttctgccggagttaacgccctgcggcgatgttggtctgatgtggattggcgataaaaaacaactgctgacgccgctgcgcgatcagttcacccgtgcaccgctggataacgacattggcgtaagtgaagcgacccgcattgaccctaacgcctgggtcgaacgctggaaggcggcgggccattaccaggccgaagcagcgttgttgcagtgcacggcagatacacttgctgatgcggtgctgattacgaccgctcacgcgtggcagcatcaggggaaaaccttatttatcagccggaaaacctaccggattgatgcgctggcggtaattatgttctccttcggcggtctggagctgattgggattactgccgctgaagcgcgcgatccggaaaaaagcattccaaaagcggtaaatcaggtggtgtatcgcatcctgctgttttacatcggttcactggtggttttactggcgctctatccgtgggtggaagtgaaatccaacagtagcccgtttgtgatgattttccataatctcgacagcaacgtggtagcttctgcgctgaacttcgtcattctggtagcatcgctgtcagtgtataacagcggggtttactctaacagccgcatgctgtttggcctttctgtgcagggtaatgcgccgaagtttttgactcgcgtcagccgtcgcggtgtgccgattaactcgctgatgctttccggagcgatcacttcgctggtggtgttaatcaactatctgctgccgcaaaaagcgtttggtctgctgatggcgctggtggtagcaacgctgctgttgaactggattatgatctgtctggcgcatctgcgttttcgtgcagcgatgcgacgtcaggggcgtgaaacacagtttaaggcgctgctctatccgttcggcaactatctctgcattgccttcctcggcatgattttgctgctgatgtgcacgatggatgatatgcgcttgtcagcgatcctgctgccggtgtggattgtattcctgtttatggcatttaaaacgctgcgtcggaaataa

SEQ ID NO: 138958 - DNA, 1494 bp, Homo sapiens
tcactcctggtctatttctatccgccgaatctgtaaaccgtcgtctgccacaatctgcagcatgtcaccatgacactgtggacagcggcggacgcgctgggtcagtagcgtcacatactgttggcatgtttcacaccagcattcggcctcttgttcttcgaggtgcagtttacaaccttccgccacgctgccgcggcaaaccagatcaaaacaaaaggcaagagagctggtttcgacacaagaaaatgcgccaattttgagccagaccccagttacgcgttttgcgccgtgttttgcggcctgctgttcgatcaattccagtgcccgttggcagagggttatttcgtgcatatcgcctcccattaacggtatcagaccagaaatggcaaagaagaaacgcgcgatggcaaagagatacagtaaggtgatcaaatcacccagttgcggcagcggagaaccgacggtcaccaccggcagcgcagtagcgatagtcagcatgacgcccaccatcacatacggcgtcaggcggaacacccagccggaggcatccgggccgacgctctgacgccccagcagtttgataatgtcgcgatactccgccagttcaaccagcgccatccggcggaacagcaacgcactcccctcgcactgccagcccggcaccagagacaccggattcagccatttgcgtagtttcagcaccggcgcaaacgcctgtttcaccggcatggcaaaaccgtgagcggtaatcaccattgatttttcgtggtcgtaaccgcacacccaggccgcaccgcgggaacgcgatggcaaacgatcgcctttgcaaatcgccataatgatgaatggcagcagcgggcaggcaatcagcagcaacgtgatcatcggttgagaaccggtggtgtaagcaggctggtttatcaggcaattcgcggtggactggcgggcagtaccgtgctggatgccaaagcgccgatggtgatggaccgcaacttcaagccgggcttccgtattgatctgcatattaaggatctggcgaatgcgctggatacttctcacggcgtcggcgcacaactgccgctcacagctgcggttatggagatgatgcaggcagtttctgttccggttgccgacggtggcgaaggaacggtggaagcgatgattgcagccacccagtgggctgaacgtcacgcctgggttacagggccgctgggcgagaaagtgatgccagtggggggattccggcgatggcaaaaccggttgatcgaatggcggcggcacggggtggaccggtacttcatccagcgagtaccagccgatatcgtttttgcctgccgcccactgggaaatgagggtggtctttccgtagcccgcaggactcgtgatcagcgccagccggaagttgttcgcgccggaaagtttagccagcaggcgctcacgaaccacggtatggtcgagtcgaaccggacgacttagttttgacggaatcagcat

SEQ ID NO: 138959 - DNA, 2127 bp, Homo sapiens
  misc_feature (1)...(2127): n = a,t,c or g
atgaatcgaatgtctggcggttattggcagctatttgctgaaagcggagaaacctgtcgggcgcgcgaactggaacagtgcctggaagatttttatgaccagcgcaaagaatctgtgcgctggcaccttgatctacataccgcaattcgtggctccttgcatccgcagttcggtgtattaccgcaacgcgacattccctgggacgagaaatttctgacgtggctgggtgcggcggggctggaggcgctggtgttccatcaggaacctggtggtacgtttacccatttcagcgccagacattttggcgcgctggcctgtacgctggaacttggcaaagcgttgccctttgggcaaaacgatcttcgccagtttgcagtaactgccagcgcaattgctgcgctgctatctggtgagagtgtcggtatcgtgagaacaccgccgctccgttatcgggtggtttcgcaaattactcgccactcgccgtccttcgaaatgcatatggcaagtgacacgctgaattttatgccgtttgagaaaggaacattgctggcgcaggacggagaggaacgttttaccgtaacccatgatgtagaagtcgctaaaaacgcgataacggagatcaaaacccagtttgaaaaagaaaaactggctcaggatcgcattaaacgaaatcaactgatgcaaacattcagcgcctcaattattcactcgacattgccaacgcggcaggaattaaaaagcccgtttacagtaatgnacggtattgaacgcaaactggaaatagaaaaagcggtcactgacgttgcggaactgaacggtgaattacgtaatcggcagtatcttgtcgagcaattaacaaaagcacatgtcaacgatgtgaattttacgccgtttaaatatcagttaagcccgtcattgccagtgaaaaaagacggtccgggtaaggcgattattgtgatcctttccgcgttgatcggcgggatgttgtattgtcgcgtctgcattaagcggaacgctgacagtccagaagtattttccggcttttctgatcctaacgttgtcctgattgccgccgtgtttattattggcgatggtttggtccgtaccggtgttgccaccgtaatgggaacatggctggtcaaagttgcgggcaatagtgaaatcaaaatgttggttttgttgatgctgaccgtcgcggggcttggcgcgtttatgagttcaaccggcgttgtcgctatctttattcccgtggtgttaagcgttgccatgcgtatgcaaacgtcgccgtcacgtctgatgatgccgttaagttttgccgggctgattagcggcatgatgacgctggtggcgacgccgccgaacctggtagtcaacagtgaattgctgcgtgaaggctatcacggcttcagtttctttagcgtaacacctattggcctggtcgtgctggtgctgggtattttgtatatgttagtgatgcgtttcatgctgaaaggggatacccagaccccgcagcgcgaaggctggacgcgtcgaacctttcgcgatcttatccgtgaatatcgactgaccgggcgtgcgcgacgtctggctattcgccccggatcgccaatgattggtcaacggctggatgatctcaaattacgtgagcgttatggcgctaacgtcatcggtgttgaacgctggcggcgttttcgtcgcgttatcgtgaacgttaatggggtttctgaatttcgcgcgcgtgacgtttcgcttattgctatgtctgcggctgatgtcgatctccggcaattttgtagtgagcgcttgctggagcctgatggtattgcgcgattctctttaattcctgagtcagaactgattggtgaatcggtgcgcgaaataggtttgcgtacccgctacggactgaatgtggtggggctaacgcgcactggcgtggcgctggacggttcgctggcggatgagcctctgctgctgggcgatatctcctggttgtgggcactggaaagtgatcggtatgcggccatgctgggccggagtcggagcctgacttaccggagaggtgatgaacattgccgtgccagcaggtcccctgcattctggcgggcgaaggggggtaagctccgataa

SEQ ID NO: 138960 - DNA, 996 bp, Homo sapiens
aacccggacgcttcatcagtttgagaatgcgcgggctggcgtgctgcaacggaatgtccagatacggcaggattttgccttctgccatcagtgggatgacgtcgtccacatgcggataaggcaaagacaaattgatcccaagtctgaaagagagcctgcaaaaattgcgtaccgattattggtgcgtgaggcgactatcgatgttaacgcgctggcggcgaagcagcctgtgaccgaacaggagattgccagctactacgaacaaaacaaaaacaatttcatgacgccggaacaattccgcgtgagttacatcaagctggatgccgcaacgatgcagcaaccggtcaggtggagtaccatttacggcgactccacccggaaaagagttccccgcgccagcagggataaaccggcaacgacgcgccagtgccagcacaatcagcacaataccgctaccttcaacggcccccggattctcgccgagcagccaccaggaaaagagtacgccgcaaacgggaacggccagtgtgcttaagctggcaatactggcaggcaagtttttcaatacaaacaaccataagctccacgccagtgccgtcgccagaatcgcactgtaggccagcgcccagaacacggtgggctgccagtcaatttcacgttgcggcaccagtaaagcgaccacactcatcaccagcgccgcatacagcatctgccaggatggtaacgacaataaatccacgcgcggatgacgggcatacagacgtttagcaacaatcgcgctcgccccccaactgacgccggagaggattgccagcatggcacttttcatctaagaagaaatcgaggtggcacggctgcgagaccaaaaatcagccgaaggcggcattcagaatcgcgaatattggcccggtcgcagcggtcaccgagaacaacggggggaaataccacccaaacggttgggttacttaggatggccccttcccggactccgttgcg

SEQ ID NO: 138961 - DNA, 5162 bp, Homo sapiens
atggtgaaagaggtgctggatacgatgattgggctggcgcagtcgggtatgacaatgttgtgtgtaacacatgagatggggtttgcacgaaccgtcgctgaccgggtaatttttatggatcgtggggaaatagtggagcaagctgcacctgatgaattttttgcgcatcctaaatcagagcgtacgagggcatttttatcgcagttccctactctcgcatggggagaccccacactaccatcggcgctacggcgtttcacttctgagttcggcatggggtcaggagcagcccccctcagttctccagcgcccacggcagatagggaccgaactgtctcacgacgttctaaacccagctcgcgtaccactttaaatggcgaacagccatacccttgggacctacttcagccccaggatgtgatgagccgacatcgaggtgccaaacaccgccgtcgatatgaactcttgggcggattagccaaccttcgtgctcctccgttactctttaggaggagaccgccccagtcaaactacccaccagacactgtccgcaacccggattacgggtcaacgttagaacatcaaacattaaagggtggtatttcaaggggtcgactcaccctgccccgattaacgttggacaggaacccttggtcttccggcgaaatcgggcgtaaatcgcaacaccactatgaaccatttgtgatgggcgcgagcttccgtcgcaccgaacaaatcctcgctttaaccggctgcgatcgactgactatcgcaccgaatttactgaaggagctgcaggaaaaagtttcgccagtggcattcgtctgttcgccgttgatcaacgcaaactggaagatcttcttgccgccaaactataaaccagccacggagtgttatatgtcccgaaaagaccttgccaatgcgattcgcgcactcagtatggatgcggtacaaaaagccaactctggtcatcccggcgcgccgatgggcatggctgatattgccgaagtgctgtggaacgattttcttaaacataaccctaccgacccaacctggtatgatcgcgaccgctttattctttccaacggtcacgcgtcgatgctgctctacagtttgctacatctgaccggttacgacctgccgctggaagaactgaagaacttccgtcagttgcattcgaaaaccccaggccacccggagattggctatacgccaggcgttgaaaccaccaccggcccgcttggacaaggtttggcgaacgccgtcgggctggcgatagcagagcgtacactggcggcgcagtttaaccagccagaccatgagatcgtcgatcacttcacctatgtgtttatgggcgacggctgcctgatggaaggtatttcccacgaagtctgttcgctggcaggcacgctgggactgggcaagctgattggtttttacgatcacaacggtatttccatcgacggtgaaacagaaggctggtttaccgacgatacggcaaaacgttttgaagcctatcactggcatgtgatccatgaaatcgacggtcacgatccgcaggcggtgaaggaagcgatccttgaagcgcaaagcgtgaaagataagccgtcgctgattatctgccgtacggtgattggctttggttcgccgaataaagcagctcccagcaacctgaccatctggaaaggttctgtttcgctgaaggaagatccagcgggcaactacattcactacggggtgcgtgaatttggcatgacccgtatcgccaacggcatcgcgcaccacggcggctttgtgccgtataccgcgacgttcctgatgtttgttgaatacgcccgtaacgccgcgcggatggcggcactgatgaaagcgcggcagattatggtttatacccacgactcaattggcctgggcgaagatggtccgacgcaccaggctgttgagcaactggccagcctgcgcttaacgccaaatttcagcacctggcgaccgtgcgatcaggtggaagcggcggtgggctggaagctggcggttgagcgccacaacggaccgacggcactgatcctctcaaggcagaatctggcccaggtggaacgtacgccggatcaggttaaagagattgctcgtggcggttatgtgctgaaagacagcggcggtaagccagatattattctgattgccaccggttcagagatggaaattaccctgcaagcggcagagaaattagcaggagaaggtcgcaatgtacgcgtagtttccctgccctcgaccgatattttcgacgcccaggatgaggaatatcgggagtcggtgttgccttctaacgttgcggcttgcgacgtaaaacgcgaggtggtgcatgatttacgtctctcgccgattactcatcacctgtttgctgctggtatctggggattacgcagcggtgccgtcacgctggaaacctcgcaggtattcgccgcgctgatgggcgatgcgccgcgcagtatgacgatggtggtcaccgaatggcgtttaccacgcgtgctgatggcgctgttgattggcgcacgactgggcgtcagtggcgctatttttcagtcgctgatgcgtaacccgctcggcagccctgacgtaatgggctttaacaccggggcgtggagcggcgtgctggtggcgatggtgctgtttggtcaggacctgacggctatcgcgctgtcagcaatggtgggcggcattgtcacttcgctgctggtctggctgctcgcctggcgcaacggcatcgacacctttcggttgattattatcggtatcggcgttcgcgccatgctggtggcctttaatacctggctgttgctgaaagcgtctttagaaacggcgctaacagcaggtttgtggaatgccggatcgctcaacggcctgacgtgggcaaaaacctcgccttccgcacccatcattatattgatgctcattgccgccgccttactggtacgccggatgcgcttgctggaaatgggcgatgataccgcgtgtgcgctgggcgtcagcgtcgaacgttcgcgtctgttaatgatgctggttgcagtgcctcggcggtatttaccttatcgtcttgttaattcaggagtctcgcaaaaaatgaccgaatcagtagcccgtttgcgcggcgaaccagttaaccctgggatatggcaaatataccgttgcggaaaatctgactgtagaaatacctgatggtcacttcacggcaattatcgggccaaatggctgcggtaaatccacgttactgcgtaccttaagccgcctgatgacgcctgctcatgggcatgtctggctggatggcgagcacattcaacattacgccagtaaagaggttgcacgccggattggtctgttggcgcaaaatgctaccacgccgggcgatatcaccgtgcaggagctggtggcgcgtggacgttatccgcatcaaccgctgtttacccgctggcgcaaagaggatgaagaagcggtaacgaaagcaatgcaggccacgggaataactctatgtggcagatcaaagcgtggataccctttctggcggacaacgccagcgagcgtggatcgcgatggtgctggcccaggaaacggcaattatgctgctcgacgaacccacgacctggctggatatcagtcatcagattgatttgctggagttgttaagcgaactgaaccgcgaaaaaggatataccctggcggcggtgctgcacgatcttaatcaggcctgtcgttacgccagccatttgattgcattgcgggaagggaaaattgttgctcagggagcgccgaaggagattgtcactgctgaactgattgagcgcatttatggtctgcgctgcatgatcattgacgatccagttgccggaacgccgcttgtggtgccacgcgtagagctggcgcgctgcgccgacggcaaaattctcgccgacaaagtgaaagataagctggaactgacagcgacgttaaccgggctggattacgggcgcttcacccgttcgatgctgctttcgcaggggcaatttgctgccttcctgaatgccaaacccaaagaacgcgcggaattgctcgaggagttaaccggcactgaaatctacgggcaaatctcggcgatggtttttgagcagcacaaatcggcccgcacagagctggagaagctgcaagcgcaggccagcggcgtcacgttgctcacgccggaacaagtgcaatcgctgacagcgagtttgcaggtacttactgacgaagaaaaacagttaattaccgcgcagcagcaagaacaacaatcgctaaactggttaacgcgtcaggacgaattgcagcaagaagccagccgccgtcagcaggccttgcaacaggcgttagccgaagaagaaaaagcgcaacctcaactggcggcgcttagtctggcacaaccggcacgaaatcttcgtccacactgggaacgcatcgcagaacacagcgcggcgctggcgcatattcgccagcagattgaagaagtaaatactcgcttacagagcacaatggcgcttcgcgcgagcattcgccaccacgcggcgaagcagtcagcagaattacagcagcagcaacaaagcctgaatacctggttacaggaacacgaccgcttccgtcagtggaacaacgaaccggcgggttggcgtgcgcagttctcccaacaaaccagcgatcgcgagcatgtgcggcaatggcagcaacagttaacccatgctgagcaaaaacttaatgcgcttgcggcgatcacgttgacgttacccgccgatgaagtatccttggtgatctgcagctctcagacaccctcaagcacagtgcctcttgcccagcccagcactctcagtggggagccaggtagtggtggctgttctggggagctgcatgggcacagggtgccatggagcatgaggatttccccagagttaacaaggaaatatctcggcgaaaaagccgctgaaaacttacaatcattacaaggctacgatcccagcgaatttacattcgctaacggtgtattttgcgatgttaaagaaaaattatgtcgtgatgatcgttattttggtgtggatggtaagcggagtgggaaaaaatgggggattccttttaaggaccgcgtcttatcaggcctaaagggattctaa

SEQ ID NO: 138962 - DNA, 4550 bp, Homo sapiens
atgcagtcttcagaggccctggtggctggtttaaggggtgcggccaatgctgagatgaaagcttcactggcgctgctcagcctgctaacggcatttaccagccactccttaaaatctcccgccgttccaccaaccgtggtacaaatccaggccaataccaaccttgccatcgcagacggtgccagacagcaaattggcagcacgctattttacgatccggcgtatgtgcagcttacttatcctggcggtgatgttccgcaagaacgcggtgtatgttccgatgtggtgatccgcgcattgcgcagccagaaggtcgatttgcagaaactggttcacgaagatatggcgaagaattttgctgagtacccgctaaaaatggaagttaaagcgcccggacagcaacatcgatcaccgtcgggtgcctaatctggaaacctggtttagccgccatgataaaacacgccccaccagcaagaaccccagtgactatcaagcgggcgatattgtctcctggcgactggataacgggctggcacatattggggtggtttcagatggcttcgcccgcgacggtacgccgctggtgatacataacattggcgcaggcgcgcaggaagaagatgtgctgtttaactggcggatgcgccagtgccagcacaatcagcacaataccgctaccttcaacggcccccggattctcgccgagcagccaccaggaaaagagtacgccgcaaacgggaacggccagttataccccatgtcatcactgaatattaaacagggaagtgacgctcattttcccgattatcctctggcgtcgcccagtaataatgaaattgatttacttaatctaatctcagttttatggcgggccaaaaaaacggtcatggcggtcgtttttgcgtttgcctgcgcaggcttgctgatctctttcatcctgccgcaaaaatggaccagcgcggcggttgtcacgcctccagaacctgttcagtggcaagagttggagaaatcattcactaagcttcgtgtgctggatctggatatcaaaattgatcgtacagaagcatttaacctgtttatcaagaagtttcagtcggttagcttgctggaagagtacctgcgttcatcaccttatgtgatggaccaattaaaagaggcgaaaatcgacgaactggatttgcatcgcgcaattgtcgcattgagcgaaaaaatgaaagcggttgatgacaatgccagtaagaaaaaagatgaaccgtcactgtatacctcctggacgctaagttttaccgcgccaaccagtgaagaggcgcagaccgttttgagcgggtatatcgattatatctctacgttggtggtgaaagagtcgctagaaaacgtccgtaataaactggagatcaaaacccagtttgaaaaagaaaaactggctcaggatcgcattaaaacgaaaaatcaacttgatgcaaacattcagcgcctcaattattcactcgacattgccaacgcggcaggaattaaaaagcccgtttacagtaatggtcaggccgttaaagatgaccccgatttttctatttctctcggtgcagacggtattgaacgcaaactggaaatagaaaaagcggtcactgacgttgcggaactgaacggtgaattacgtaatcggcagtatcttgtccgagccaattacaaaagcacatgtcaacgatgtgaattttacgccgtttaaatatcagttaagcccgtcattgccagtgaaaaaagacggtccgggtaaggcgattattgtgatcctttccgcgttgatcggcgggatggtggcttgtggtggcgtgctgttgcgctatgcgatggcatccagaaaacaggatgccatgatggcagaccacttagtttaactataatgcggttgaaggtgccgttcgtccgagcggcaccacaagcggcgttccggcaactgggattcgtcaatgatcatgcagcgcagaccataaatgcgctcaatcagttcagcagtgacaatctccttcggcgctccctgagcaacaattttcccttcccgcaatgcaatcaaatggctggcgtaacgacaggcctgattaagatcgtgcagcaccgccgccagggtatagcctttttcgcggttcagttcgcttaacaactccagcaaatcaatctgatgactgatatccagccaggtcgtgggttcgtcgagcagcataattgccgtttcctgggccagcaccatcgcgatccacgctcgctggcgttgtccgccagaaagggtatccacgctttgatctgccagatgagttattcccgtggcctgcattgctttcgttaccgcttcttcatcctctttgcgccagcgggtaaacagcggttgatgcggataacgtccacgcgccaccagctcctgcacggtgatatcgcccggcgtggtagcattttgcgccaacagaccaatccggcgtgcaaactctttactggcgtaaggtgcatgttgtcgccatccaggcagacatgccatgaccagcgtcatcaggcgggttagggtaccataaactggatttaccgagccctgctgcggtgccgggcggaaatgtgcttcggcatcgaatcgttgataatccggcgtcaggtgcacgccagaagattcaatcacgcctaagccgcgccattcgctgtcgccgttgacacagaacacatcggcaatcgcctgttgcgccagcaggttaccggcatccggtaccactcgacgatactgattctctaccttgctgtgggccgctattttctgctgcaccagcatgaccacgccttgtagtagatcaaggggttcgaatccagcaaccaccagcggacgatgaaaatcgctggcgataaaattataggcgtcggtgccgataaccatactgacgtgacccggcgcgaggaacgcatcgataccgttatccggctgttccagcaaactgcgcaacgtcgggataagcgtaatgtgctggcagaagaagtaaaaattctgcacatcacgcgctttcgcctgttgcagagtgatagcggtggtcggcatagtggtttcaaaacctaagccgaagaacaccactttgcgggttggattctcctgcgccagtttcaacgcatccatcggcgagtaaacgatgcgcacatcggcaccgcgtgcttttgcctgcaacagcgatccctgtttccccggcacgcgcatggcgtcgccaaaggtacagaagatgacttccggatggctggcaatctccacgcaggtgtcgattctacccatcggcagtacgcacaccgggcaccccggaccgtggataaactcaacgttttccggcagtaactggtcgaggccgaatttaaagatagcgtgggtatgaccgccacacacttccataatccgcagagggcgttcggcggtgtaagagagatgtgaagcacgttcgcgcagatgctcaattaactgcatcacctgttccggcgcgcgatattcatcaacaaaacgcattatttttcctcgccatacaacagcgcgccgacatccggctccacgttcaacctgtttggttatggcgtccagagtggtgttgctgacgcgggcgatatcggtgttatccaccagatgcagggctttagtcgggcacatccgcacgcaggccggaccttgttcatcaaagctacaaaggtcacatttgacggcgatcgcgcgaatacctggcacccagtcaagcaatgtgctgacacgcgccggagcaggcggtgccggtggcgctttcggggtattggcgtttgccggaatatccagcggacggctgccggaaaattcaattgcgccaaacgggcaggcgatgccgcacagcttgcagcttacgcacaggctttcattcaactgcacggccccatcgacgcgggtgatggcgttaaccgggcagaccaccgcgcagggtgcatcttcacagtggtgacagagctgcggcgcagattctttttcattcagcatcactctcaagcgcggcattgattgcaggccgtgctggcgatgccgttttgaacaggcggcctcacaagtgggggagccgatacagagcggggaggcggcatttacaaaacgattccccagggcattccagttggcttaaattcaccggcacattgttttcaatagcggtgtataagctgtcgtaaacgccagcgattttttcgagatagtgtaccagaacctgttcgcgatcgcggatgttgaccttgccatcaatcatgccgtcaatgctcagttgcgcctgcgcaatccgctgtttgtcttcgccatcttttgtttcgacgtaatactcgatggtgtgggggcactggaattgatcgaacagcaggccgcaaaacacggcgcaaaacgcgtaactggggtctggctcaaaattggcgcattttcttgtgtcgaaaccagctctcttgcctttagtttggatctggtttgccgcggcagcgtggcggaaggttgtaaactggacctcgaagaacaagaggccgaatgctggtgtgaacat

SEQ ID NO: 138963 - DNA, 1897 bp, Homo sapiens
  misc_feature (1)...(1897): n = a,t,c or g
atgtggngcgggcggaaagtcggcctggtgggtaaaaacggctgtggtaaatctaccctgctggcattgctgaaaaatgaaatcagcgccgacggcggcagctacacctttccgggaagctggcaactggcgtgggtgaatcaggaaacgccggcgttaccgcaagcggcgctggaatatgtcattgacggcgaccgtgaatatcgtcaactagaagcgcagctacacgacgccaacgaacgtaacgacgggcacgccattgcgaccattcatggcaagctggatgctattgacgcatggagtattcgctcccgtgctgccagcctgctgcacggcctcggtttcagcaatgaacaactggagcgcccggcgctgatttgccgttcagacttgctgctgctcgacgaaccgactaaccacctcgatctcgatgccgttatctggctggaaaaatggctgaagagctatcagggcacgctgatcctgatctctcacgaccgcgacttcctcgatccgatcgtcgataaaattattcatatcgaacaacaaagcatgttcgagtacaccggcaactaccagtcgtttgaagtacagggcggcaccgcgtggattaaagacggcgttatgcacaccgacgacacgctggtggatggcctggaggcggctatcgccatgacacgggtcggtaaatctggtacgtcgcgacctgaatatggacagcggttgtcgcaccagacgatttctgcgacggtgggcgtggctgcggcttttgcggttaaccccattgttggcgcggcagtgtttgccgccagtaaagtgctggggccgctgtggagcaaagtctccattttgcgctatcacatttcgggtccgctggacgatccgcaaatcaacgaagataatcgttgccaaaggccaacgagccagaacataaccgtaggtcggatagggcgttcacgccgcatccggcagccgatgcctgatgcgacgctgtgcgtcttatcaggcctacaaaaggaacataaccgaaggtcggataaggcgtttacgccgcatccggcagccgttgcctgatgcgacgcttgccgcgtcttatcaggcctatcttaaccgttggttaatttttcaaactcttcacacccggtatcaaacccttccatacagctcagcagcatcacgctgccgttggtcgaaaatgagagccgtgcacgcgcaagtgaaggatcagatggacgcaattgatcaccagacaggcgtgcgcccgctggtcttctactccatcgtgttgccggagattcgcgccatcatcttgcaaagtgaaggcttttgccaggatatcgttcaggcgctggttgccccgctacaacaagagatgaaactggatccaacgccgattgctcatcgtacccatggccttaaccctaataatctcaataaatatgatgcgcgcattgcggcgattgattacaccctcgcccacgatgacggcatttcgttgcgcaatctggaccaggctcaggtgatcctgctcggtgtttctcgctgtggtaaaacccccaccagtctgtatctggcaatgcagtttggtatccgcgcggcaaactacccctttattgccgacgatatggataatctggtgctacccgcgtcgctcaaaccgcttcagcataaattgttcggcctgactatcgacccggaacgtctggcggcgattcgcgaggaacgtcgggagaacagtcgctatgcctcgcttcgtcagtgcaggatggaagtcgcggaagtggaagccttgtaccgtaaaaatcagatcccgtggattaacagtaccaattattcggtagaagagattgccaccaagatcctcgatatcatgggccttagtcgccgaatgtactag

SEQ ID NO: 138964 - DNA, 506 bp, Homo sapiens
cccacgcgtccggccttataagctgaggtagtggagaggcccggggccaggaaagcagagacagacaaagcgttaggagaagaagagaggcagggaagacaagccaggcacgatggccaccttcccaccagcaaccagcgccccccagcagcccccaggcccggaggacgaggactccagcctggatgaatctgacctctatagcctggcccattcctacctcgggcctctcatcatgcctatgcccacttcacctctgactcctgccttggttacaggaggtggaggccggaaaggtcgcaccaagagagaagctgctgccaacaccaaccgccccagccctggcgggcaccgaagaggaaactggtgaccaagctgcagaattcagagaggaagaagcgaggggcacggcgcttgagacagagctggagatgaggccagaccatggacactacacccagcaatagagacgggactgcggaggaaggaggacccaggacaggatc

SEQ ID NO: 138965 - DNA, 517 bp, Homo sapiens
ccaggaaagcagagacagacaaagcgttaggagaagaagagaggcagggaagacaagccaggcacgatggccaccttcccaccagcaaccagcgccccccagcagcccccaggcccggaggacgaggactccagcctggatgaatctgacctctatagcctggcccattcctacctcggtaaggcccactcagccatctccacggtccttcctcctctcccgaaatcaggacccacccctcttgtttcctctcatttcctttcctttcctcttcgtttctttctttcttttttttgagagagtcactctgtcacccaggctggagtgcagtagtgtgatcacaacaactcaaacaactcaccgcagcctcgaactcctgggctcaagtgatcctcctgcttcagcctcctgagtggctggaacttcaggtgtacaccacctgcagtggtgagatggggtctcactatgtttcccaggctgatccccaattcctgggctcaagcaattctcctgcctg

SEQ ID NO: 138966 - DNA, 749 bp, Homo sapiens
  misc_feature (1)...(749): n = a,t,c or g
aggagacacagccttataagctgagggagtggagaggcccggggccaggaaagcagagacagacaaagcgttaggagaagaagagaggcagggaagacaagccaggcacgatggccaccttcccaccagcaaccagcgccccccagccagcccccagggcccggaggacgagactcccagccctggatggatctggaccttctattagcctggcccattcctacctcgggaggtggaggccggaaaggacacaccaagagagaaactgctgccaacactcagccgccccagcccttngcggggcacgagaggaaaactgttgacccaaagctgcaagaattcagagaggaagaagcgaggggcacgggcgctgagacaagagctggagatgaggcgcagaccatggacacttacacccagccaatagagacggggactgcggaggaaggaagacccaggacaggatccaggccgggctatgccacacccccccacccctaaggacttattcccgcttgacttgagtctcttgaagggctaccagggaaagcggcttccaacccttagcaaaagtgcaagatggggagtgagaggctgggaatggaaggggcagagccaggaagatcccccagaaaagaaagctacagaagaaacctggggctcctccagggtggcagcaacaataaatagactacgcacggcagccacagcttgggtgtgtgttcatccttgaaaaaaaaaaaaaaaaa

SEQ ID NO: 138967 - DNA, 1110 bp, Homo sapiens
atggaacaggcaattggtctgctttccggtggcaatcagcaaaaagtggcgattgcccgcggtctgatgacacgccccaaagtgttgatccttgatgaacctacccgtggcgtagatgtcggcgcgaaaaaagagatctatcaactgattaaccagttcaaagccgatggcttgagcatcattctggtgtcatcggagatgccagaagtattaggcatgagcgatcgcatcatcgtcatgcatgaagggcatctcagcggggaatttactccgtggctgatggagcagaaatcgcttatcgctctgctggtgctgatcgcgattgtctcgacgttaagcccgaactttttcaccatcaataacttattcaatattctccagcaaacctcagtgaacgccattatggcggtcgggatgacgctggtgatcctgacgtcgggcatcgacttatcggtaggttctctgttggcgctgaccggcgcagttgctgcatctatcgtcggcattgaagtcaatgcgctggtggctgtcgctgctgctctcgcgttaggtgccgcaattggtgcggtaaccggggtgattgtagcgaaaggtcgcgtccaggcgtttatcgctacgctggttatgatgcttttactgcgcggcgtgaccatggtttataccaacggtagcccagtgaataccggctttactgagaacgccgatctgtttggctggtttggtattggtcgtccgctgggcgtaccgacgccagtctggatcatggggattgtcttcctcgcggcctggtacatgctgcatcacacgcgtctggggcgttacatctacgcgctgggcggcaacgaagcggcaacgcgtctttctggtatcaacgtcaataaaatcaaaatcatcgtctattctctttgtggtctgctggcatcgctggccgggatcattgaagtggcgcgtctctcctccgcacaacccacggcggggactggctatgagctggatgctattgctgcggtggttctgggcggtacgagtctggcgggcggaaaaggtcgcattgttgggacgttgatcggcgcattaattcttggcttccttaataatggattgacatag

SEQ ID NO: 138968 - DNA, 1468 bp, Homo sapiens; identical to SEQ ID NO: 122994

SEQ ID NO: 138969 - DNA, 2466 bp, Homo sapiens; identical to SEQ ID NO: 128997

SEQ ID NO: 138970 - DNA, 849 bp, Homo sapiens
ttattcattaagtccaagttgaaacatctgatcagtattatcaggatgggcccgctctgttcgcgtgaaaaacggatgctggggctgatggtaggcgcgctggtgctgtggattttcggcggtgattatatcgatgccgcgatggtcggttacagcgtggtggcactgatgctgcttctgcgcattatcagttgggacgacattgtcagtaataatattgagcttggactggcctcggcaccgatgtttttcctcgcgacgattttttattttattcccttctgtcgtgttagggtggcgcattttatggacatcccgaatatgcaaaacgcaggcagcctcgttgttcttggcagcattaatgctgaccacattcttaatcttcaatcttttcctactccaggcgaaaccgtaaccggtaaccactatcaggttgcatttggcggcaaaggcgcgaatcaggctgtggctgctgggcgtagcggtgcgaatatcgcgtttattgccggcgctggtgatgctatcgaccagttcacgggcgttgcgggtctgaatgatcaggtgctccgggccgtactggttggagatctccacgcactgcgctaaatctttagtcacgatcaggcggctggcgttcagtgcctggcgggcggtttcggcacgcggcagttctgccagttggcgttcgacggcctcggcaacgcgacgcgccatatcagcagcgggcgtcagtaaaatcacctgtgagtccgggccgtgttcagcctgagagagcaaatcagaagccacgaaatccggcgtagcgccgctgtcagcaatcaccagcacttccgacgggcctgcgggcat

SEQ ID NO: 138971 - DNA, 2699 bp, Homo sapiens
  misc_feature (1)...(2699): n = a,t,c or g
gcatgagcgatcgcatcatcgtcatgcatgaagggcatctcaacggggaatttactcgtgagcaggccacccaggaagtgttaatggctgccgctgtgggcaagcttaatcgcgtgaatcaggagtaaaaaaatgacaacccagactgtctctggtcgccgttatttcacgaaagcgtggctgatggagcagaaatcgcttatcgctctgctggtgctgatcgcgattgtctcgacgttaagcccgaactttttcaccatcaataacttattcaatattctccagcaaacctcagtgaacgccattatggcggtcgggatgacgctggtgatcctgacgtcgggcatcgacttatcggggctgcatctatcgtcggcattgaagtcaatgcgctggtggctgtcgctgctgctctcgcgttaggtgccgcaattggtgcggtaaccggggtgattgtagcgaaaggtcgcgtccaggcgtttatcgctacgctggttatgatgcttttactgcgcggcgtgaccatggtttataccaacggtagcccagtgaataccggctttactgagaacgccgatctgtttggctggtttggtattggtcgtccgctgggcgtaccgacgccagtctggatcatggggattgtcttcctcgcggcctggtacatgctgcatcacacgcgtctggggcgttacatctacgcgctgggcggcaacgaagcggcaacgcggctntccgggatcaacgtcaataaaatcaaaatcatcgtctattctctttgtggtcagctggcatcgctggccgggatcattaaagtggcgcgtctctcctccgcacaacacacggcggggactggctatgagctggatgctattgctgcggtggttctggccgatgatcgtcaaagcggtggtgattttgctggcggtgctggtagacaacaaaaagcagtaataacgactacaggacatcttgaatatgaacatgaaaaaactggctaccctggtttccgctgttgcgctaagcgccaccgtcagtgcgaatgcgatggcaaaagacaccatcgcgctggtggtctccacgcttaacaacccgttctttgtatcgctgaaagatagcgcgcagaaagaggcggataaacttggctataacctggtggtgctggactcccagaacaacccggcgaaagagctggcaaacgtgcaggacttaaccgttcgcggcacaaaaattctgctgattaacccgaccgactccgacgcagtgggtaatgctgtgaagatggctaaccaggcgaacatcccggttatcactcttgaccgccaggcaacgaaaggtgaagtggtgagccacattgcttctgataacgtactgggcggcaaaatcgctggtgattacatcgcgaagaaagcgggtgaaggtgccaaagttatcgagctgcaaggcattgctggtacatccgcagcccgtgaacgtggcgaaggcttccagcaggccgttgctgctcacaagtttaatgttcttgccagccagccagcagattttgatcgcattaaaggtttgaacgtaatgcagaacctgttgaccgctcatccggatgttcaggctgtattcgcgcagaatgatgaaatggcgctgggccgcgaaaccgtaaccggtaaccactatcaggttgcatttggcggcaaaggcgcgaatcaggctgtggctgctgggcgtagcggtgcgaatatcgcgtttattgcctgtacgggtgatgacagcattggtgagagcgttcgccagcagctcgccactgataacattgatattactccggtcagcgtgatcaaaggcgaatcaacaggtgtggcgctgatttttgttaatggcgaaggtgagaatgtcatcggtattcatgccggcgctaatgctgccctttccccggcgctggtggaagcgcaacgtgagcgtattgccaacgcgtcagcattattaatgcagctggaatcaccactcgaaagtgtgatggcagcgcgaaaatcgcccatcaaaataaaaacggggggtgtgatcacgtcttgttgtgtagacgggccgccacgggttgctggatgtgttccgtggtcgcaacgcaattgtggtttggcaaaggatatttttgccccaggggaacagccggacagcggcaccatcactttgggtgaaacggtgaaactggcgtcggttgatcagttccgtgactcaatggataacagcaaaaccgtttgggaagaagtttccggcgggctggatatcatgaagatcggcaacaccgagatgccaagccgcgcctacgttggccgctttaactttaaaggggttgatcagggtaaacgcgttggtgaactctccggtggtgagcgcggtcgtctgcatctggcgaagctgctgcaggttggcggcaacatgctgctgctcgacgaaccaaccaacgacctggatatcgaaaccctgcgcgcgctggaaaacgccctgctggagttcccgggctgtgcgatggttatctcgcacgaccgttggttcctcgaccgtatcgccacgcacattctggattaccaggatgaaggtaaagttgagttcttcgaaggtaactttaccgagtacgaagagtacaagaaacgcacgctgggcgcagacgcgctggagccgaagcgtatcaagtacaagcgtattgcgaa

SEQ ID NO: 138972 - DNA, 1944 bp, Homo sapiens
atgcacgagcgggaaccggggctgcgtgcggcgcttgcgggccagctggagttccgggtgggcttgggcttgggagtgtggactctgagactcatggagctattgcgccaaagattagaactcgttgtatatactgcgagtgatggccaagaatatgagatggtctctagactgaactgggttaactatctggtccttgaagatgtgcacattatacttcctgatcagatgagaggaattactggatgctacgcgactcaccctcatgagcgaagactacatgctggaactgttcatcgtcagaacattgtcaataatccaccagactgtgtgcccagggatgctggggaagcagaggtggctcctgacccttccctagccagcctccagttgcagaccccagagctgcctggccttatcagctgccacaattctattcaggtcagcaatgaggcgaggctttttgaacttctaatctgccagtggagagattttcgcaagagggtaattgctgcaaagagcatgcaagggagggagctggagggaggacagcgaggccaggataaagccaccaatccattccgagtacttgccctcaaggggagtggtgatcctgatcctcatggtgctgggcgccagggcagtgacctccttctgcatcctgtgagtgatgcccaggttttgcagcattttttccaaagacgagctctgctgtcttcaccatgggattaccatgatgttgttgggctgtgtgcgcaggagccatgtggctacatcatggagcttttcataataaagcaccagtgttcattagcccaaacagctgggagtttggctccagaacaaaagaaagagctcgaaatgacggtcagatattatatcagttctgctgatttaaccgcagagaagttcgccacagcaatccgaaaccctggcatgtggagaataagctgcactggcgtctggacgtgtaaagacagttcgataagcattgctctacagcagattcaaccagaatcttggcaagctttgttcggcatgttaacgccgcactggatgtacgcgtggtttttgccagtggcagcgaaacaactcatggcgatggtgctcggcggtatttgcggtgtgttgacgttgattggcggcgcaggactgctgtggcgcaggctgacaaatcagcgcgtgcgtgccacttccactacgccggatatcatcatcatgagcattttgctgatccagtgtctgttggggctaagtaccataccgttttcagcacagtatcctgatggtagcgaaatgatgaagctggtgggttgggcgcaaagcattgtcactttccgtggtggatcgtcagagatgctcaacggcgtagcgttcgtcttccgcctgcatctggtgttgggaatgaccatcttcctgctcttcccgttcacccgactgcatcattttattgatgtcatcacagggctggcggtaggtatgttgattgactggatggtgcccgtcgaccgtcgttggaattatcagaaacctgatcaacgtcgaatcaaaatagcactgccctatgtcgtaggcgcgggctcgtgcattgtattgatggagctaatgatgatgattcagttatggtgtggcctagtggttcagggaggccttggtcagcagaaccaggagctccccagaggtgatgcgcagcttgttgtagaagatgtggaactagatcttctccatttcattgtatttggtgatgatgtcatgctcaatgtggtgcttcagggtcaggctttcatgcttgctctgggcctagtcaccaatgtaggagtcctggcccatgcccatcatcatgccctggtgtcaggggtgcccaacgatggagggggaacatgggttgggggacgttgtgtccagcaaagccagctttgcacatgctggagccattgtcaatga

SEQ ID NO: 138973 - DNA, 864 bp, Homo sapiens
tacgaggagcgagtgctgaaaaaaatccgccggaaaatccggaacaagcagtcggcgcaagaaagcaggaagaagaagaaggaatatatcgatggcctggagactcggtataccggaccaataacgcttttctcacctatgtggaaaccagtgatttcttcattgaatttccgcgaaacagggctggaagagtttgttgagatggttactttttatgtcattaaccgtttacgtcattaccgcgaagaacaggtgattgatgatgtaccgcagtggctgaaaagtacggtagaaaagatgcatgataaagagcagtttagtgaatcggcgctggagaatatggtggcgttgtcagccaaatcacacctgcacgatccagaatcatggagattaggaccaagccagaggggtattaagccaagggcccgtgtccggaccgaaaccattcttcagatgataaagacgtcattgcaattgatggaaaaacgctccggcattcttatgataagagtcgccgccaggggagcgattcatgtcattagtgcgttctcaacaatgcacagtctggtcatcggacagatcaagacggatgagaaatctaatgagattacagctatcccagaacttcttaacatgctggatattaaaggaaaaatcatcacaactgatgcgatgggttgccagaaagatattgcagagaagatacaaaaacagggagtcatcttctctctctgtcctgccagcataattgatgacaaaaaagttacagaccttgctgtagcagttcaaggcaccctaaaaactgggtctggagggattttgccccctgggggagctttgaagaagatatccgagaaactttag

SEQ ID NO: 138974 - DNA, 1770 bp, Homo sapiens
aacatatttctattattcccgattacagataagcctggaaagtagagcataaattgtcaggcatcctactattgactatttttgccgttatttctggtgcagaaagttggaaagatatagaggatttcgggaaaacacatctcgatttctggaagcaatatggtgattttgaaaatggtattcctgttcacgatactattgccagagttgtatcctgtatcagtcctgcaaaatttcacgagttgctttattaactggatgcgtgattgccattcatcaaatgataaagacgtcattgcaattgatggaaaaacgctccggcactcttatgacaagagtcgccgcaggggagcgattcatgtcattagtgcgttctcaacaatgcacagtctggtcatcgggcagatcaagacggataagaaatccaatgagatcacagctatccctgaacttcttaacatgctggatattaaaggaaaaatcatcacaactgatgcgatgggttgccagaaagatattgcagagaagatacaaaaacagggaggtgattatttattcgctgtaaaacagcgcaatggtgctgtcgagaaccgcgcgaaaacccagacgcggatcgcttttggcgaccattttttccgccgacaggtgagtcagcgtatccggcttttttgccaccggctggcgacacagttcgcagcacgcctgcggatgttcatcgctactggtcagcccatgaacgggctgcggctgctgctgttcatcgtcaacaaacaggcggccctgctcgtcaataaacttgatgcgcagatggcggctttccagcaactcccgggcagagggcgtcaggcgactgtccgcagggagatggatctctgcgccttcgctgagcgtatgggattgccagttagccggccaggcgacatacaggaatttcacgctggatgtcgtaccaaattcgatgctggagcctttcgggataaacatcacgtcgcctgctttggcgatcatggtttggccttcgtggcgaacatgcagctccccttccagcaccatgtcgatttcgtcgtagttcagggtccacgggaagaatgcgttctcccactgcataaaaccggcggccatgctgctgccgtcgtctccggtcacaagatcagtcaagcccacgcaatgcggctctgcgccgtcgaaacgaccaaacttgacgctactggcatcaatcactttgatgccgcctttgccggtcaccgatttgaaagctcggttgattgcgcctgctccgcgactgtttccttcatcacttttccatcagtgtgcgaccggttcggtaactggcttcgcagtggcagatgttcgcatgcggctcgcaagaacgaaatcaccctaactaacacccggcgcagcctgagacctaaacgcaacaccgagaggcacgacatgcaaacaagggccaccgttatcgctgccggtgaaaaactactgccttatgcagaaacgctcatgagcacctggcaggccgcccgtaaggaggtggcgcatacctcacgacataacgagttttctatcggtgccagcgcctcgttgtgggacatggtgatgacatccgccggggctgttgtcacgaccgtcgtcgttgctgtacgaccttcctctttctatattctctgctctcacaagaagaagcgaacactacacaccaagagagagaagacagtagacagaaggaaagagtacgaaacgagagcgaagagatcagaaacagatacacaatag

SEQ ID NO: 138975 - DNA, 1433 bp, Homo sapiens
ttcccttttcgacgatttcgtactttttgtactagacaattcgcattttatgtttaaaaattgagatattccttattacctaaagctgttttttattgcttacacatgatcaaatactccttacataattaaggagaacaaaatggaacttaaaaaattgatgggacatatttctattatccccgattacagacaagcctggaaaatggaacataagttatcggatattctactgttgactatttgtgccgttatttctggtgcagaaggctgggaagatatacaggattttggggaaacacatctcgattttttgaagcaatatggtgattttgaaaatggtattcctgttcacgataccattgccagagttgtatcctgtatcagtcctgcaaaatttcacgagtgctttattaactggatgcgtgactgccattcttcagatgataaagacgtcattgcaattgatggaaaaacgctccggcactcttatgataagagtacagccgcaggggagcgattcatgatcaataatgcgttctcaacaatgcacagtctggtcatcgggcagatcaagacggataagaaatccaatgagatcacagctatccctgaacttcttaacatgctggatattaaaggaaaaatcatcacaactgatgcgatgggttgccagaaagatattgcagagaagatacaaaaacagggaggtgattatttattcgctgtaaaaggaaaccaggggcggcttaataaagcctttgaggaaaaatttccgctgaaagaattaaataatccagagcatgacagttacgcaatgagtgaaaagagtcacggcagagaagaaatccgtcttcatattgtttgcgatgtccctgatgaacttattgatttcacgtttgaatggaaaggactgaagaaattatgcgtggcagtctcctttcggtcaataatagcagaacaaaagaaagagccagaaatgacggtcagatattatatcagttctgctggatttaaccgcagaaaagttcgccacagcaatccgaaaccactggcacgtggagaataagctgcactggcgtctggacgtggtaatgaatgaagacgactgcaaaataagaagaggaaatgcagcagaattattttcagggatacggcacattgctattaatattttgacgaatgataaggtattcaaggcagggttaagacgtaagatgcgaaaagcagccatggacagaaactatctggcgtcagtccttgcggggagcgggctttcgtaatcttgccctgaatacaggactgagtatcaaaaagccggttaactgaaactgtccaggttttgggggtcagttcataaacgccttatccggcctaaaaacaactaaaattcaataaattgcaccgatgcgtagtccctataagcttacgcg

SEQ ID NO: 138976 - DNA, 782 bp, Homo sapiens
gataacaatcattttggcgttcgatttctcgcgcgctttttcaagaagataagtgatgccaccaccgctcatgcgggtttctgccgggttgttaccaaacatcacgaccagcttgctgttttcaatatccgcggtgctgttgccatcattactgccgtaggtgtagggcatggcacaggaaatttgcgcagtgctgtaggagccatactggttgagtgaaccgccgtagcagttcatcaggcgtttgaccgccggaggctgatggcgaagagcgggtcatattgccgccaacgatccccgaagagtactgaatatatacagcctcattgccatattgttcgacggttttcttcaggctactggcgatagtatccagggcttcatcccagctaatacggtcgaaatttgccttcgccgcgtttgcccacgcgtttcattgggtaattcaagcgatcgggatgattaatacgccggcggatggagcgaccgcgcaaacaggcgcgtacctgatggttgccgtactcatcgctgccggtattgtcagtttccacccaggtcacttcattatctttaacatgtagacgaagtgcacagcggctaccacagttgacggaacaggcaccccagaccactttttcgcgggcctgttgtaccgctgctgctgcattgcgcagggtaaacggcaaagaaaaaccgcctgcagccagcgccagagaacctatcgcggtagatttaacgagtgttctgcggctgatgcccaccattcgttcatttttggacat

SEQ ID NO: 138977 - DNA, 3063 bp, Homo sapiens
atgactgagattgaggagaatatgctactcccaatttctggccaggaactgcccattcgttggcttgctcaacacggcagcgaaaaaccggtaacgcacgtttcacgcgacggactccaggcattacacattgctcgggctgaagaactaccggctgttactgccctggctgtttcccacaaaaccagcctgctcgacccgctggaaattcgcgaactccacaaactggttcgtgacactgacaaagttttccctaatcctggtaattcaaacctgggactgataactgcttttttcgaagcatacctgaacgctgactacaccgatcgaggactgctgacaaaagagtggatgaagggtaatcgtgtttcacacatcactcgcacggcttccggtgctaatgcttgcggcggaaacctcaccgatcgcggcgatagtttcgtccacgatctgacgtcaatggcgcgctacgtagccactggcgtactggcccgttcaatgggacttgtcatctatagcttcatccagcacacgttaacgcttgaggaatatcgcgaaattaccgcctttctgtttcgcgaattcacacatgctgcggcggcacgctacaccggtgaacaagaaacacttccgcttagcccgcagtggatcctccgccagtgtaaagaggtcgcctccctgtgtgatggcgacaccttctccggcgagcagctaaacttaatgctgcagcagcgtgaatggcgcgaaggtttcctcgctgaacgtatgcaggatgagatccttcaggagcaaatcctgattgaaaccgaagcgaacgcatcgggcaaattaacgccctttcggtcattgaatttccgggtcatccacgcgcttttggcgaaccttctcgcattagctgcgttgtgcatattggcgatggtgaattcaccgacatcgaacgcaaagcgacttggcggcaatatccatgcgaaagggatgatgatcatgcaagcgttcctgatgtcggaactacagcttgagcaacagatccccttctcagcatcgctgacatttgagcagtcatacagtgaagttgatggagatagtgcctcgatggctgaactctgcgccctgataagcgccctcgccgatgtgccggtgaatcagagtatcgctatcacaggttcagtcgatcagttcggtcgcgcccagccggtcggtggtttaaatgagaaaatcgaaggcttctttgctatttgccagcaacgtgagttaaccgggaaacaaggtgtcattatccccacagctaacgttcgccatttaagtcttcacagtgaactggtgaaagcggtagaagaaggcaaattcaccatctgggcagtagacgatgtgactgacgcactgccgttattattaaatctggcacgccatctggtgcgtttaatgccggtgctgcgcttgcgtgatgcccgttttatgcgccgtattcgtaacggcacggtgccaaatgtccctaatgtggaagtcaccgcgcgccactcgatttcctcgcccattcgtcagggactttccgcaatggtacagctgcttgagcattatttctctgagcagggggccggacaggcgcgatatcgtttaatgcggcggcgagccagcaatgagcaacgaagctggcgctatctggatatcatcaaccggatgattgaccgacctgttgcctggcatctgttgaatcttctgccattgcagcgcattgccaccaccaactcgggtgagttgctttcgttaacgccggtagagcatgtttgccgactggtacgtgagtcctcgcgcgttgccgcctggcgtctggggccgagtggcttgagtaccgaagatagccgacgcatatcctttcacattcgttttaaccgtccgtcatcgctgtttgcacgctgctggttgctggtggaaggggaaacggaaacctgggttatcaatgaactggcgcgtcagatcaaggtcattgagtttgcccagtccgggctaaagccactggttaaatttgcccgccgaatggggattgaatggcatgtactggtcgatggcgatgaagcagggaagaaatatgccgctacgaaattaaagccagaggaaaactcccgctggcggctgcttgggaaaacggaaactacgcctgcacttgaggtctatcgtttgttccagccaatgtcagcgccctggcggcatggaatgcacaatatgccgcgctgtaacggcaaagctgtgccacaagtagatgcacaacaggctatttttatcgccgttgatgccagtgatctggttgcaacccagagtggggaaaagcgcaataccctgattatcctcttcgccctggcgacggtcttgctggcaagcgtattgtcattcttctggtatcgccgctatctgcgctcgcgccagcttctacaagatgaaatgaagcgcaaagagaagctggtggcgctggggcatcttgcggcaggcgttgcccacgaaatccgtaacccactttcctcgattaaaggactggcgaaatactttgccgagcgcgcgcctgcagggggagaagcgcatcaactggcgcaggtgatggcgaaagaggccgaccgtttaaaccgcgtggtaagcgagttgctggaactggttaagccaacgcatctggctttgcaggcggtggatctcaacacgctgattaaccactcattacagctggtaagtcaggatgcaaacagccgggagatccagttacgctttaccgccaacgacacattaccggaaattcaggccgacccggacaggctgactcaggtcctgttgaatctctatctcaatgctattcaggcgattggtcagcatggcgtgattagcgtgacggccagcgaaagcggcgcgggcgtgaaaatcagcgttaccgacagcggtaagggaattgcggcagatcagcttgatgccatcttcatccgtacttcaccactaaagcgaaggcaccggattggggctggcggtctgcataatattgttgaacaacacggtggtacaattcaggtcgcaagccaggagtga

SEQ ID NO: 138978 - DNA, 967 bp, Homo sapiens
ggccactcacctgtatgtgcatcagcctgctgatctcctcctgctgccgctgcagaatcacctgcttctctcccatgagcatctcctgctgctccaacatcagctctcgctcaaactttctgatggagtcctagagagtcagacgatggagggctccatcagcaaggttcagcatgatctgatcatggtgcagcaggagtttctcatctgggataagcatgctattcttcagcgtcagagtgtggggatcaccaggctgtttcacattcagaggcttataacctcctcggtcagtgaacttggaccatggcttctttgctatccctgtgttcccagcagtagacttgtccctattttctggttccacgggttggttattcgagtattgcgccacactgatgactgggtttatcctgaaagggatgagtcagcaaagaagaagatgcgttttatgcaacgttctaaagactccttagctaaatggttaagcgcgatcctccccgtggtcattgttgggctggtgggattgtttgcggtaactgtgattcgtgattatgggcgggcaagcgaggcagaccgccaggcattactggaaaaaggtaatgtgcttatccgcgctctggagtcgggaagccgcgtagggatggggatgcgaatgcaccatgtacagcaacaggcgcttctggaagagatggcgggacagccgggagtgttgtggttcgcagtcaccgatgcgcagggcatcattattcttcatagcgaccccgataaggtcgggcgtgcgctctattcgccggatgaaatgcagaaattaaagccagaggaaaactcccgctggcggctgcttgggaaaacggaaactacgcctgcacttgaggtctatcgtttgttcccaccaatgtcagcgccctggcggcatggaatgcacaatatgccgcgttgtaacggcaaagtgtggcacaagtag

SEQ ID NO: 138979 - DNA, 1776 bp, Homo sapiens
atgtttgaccaactggtgtgccgcgtgatgttccaccagatgcgctatgaaggcattttcaccccgccatctgaacagggtacgctggtcttcccgggtaacctggggatgttcgaatggggcgggatttccgttgatccaaatcgtgaagtggcgattgccaacccaatggcactgccgtttgtttcgaaactgatcccgcgtggtcctggcaacccgatggagcagccgaaagatgcaaaggcacgggtacggaatccggcattcagccacagtggttttatcgttctggctttggcgctgctcaaaggcgacctgcgagcagaagcccagcagcgtgttatcgcctgcatgtttggtttatgggtgctgatgggcattggctttatcgcctctatgctccatcttggttcaccaatgcgcgcttttaactcgctcaaccgggtaggggcttcagcactcagtaacgaaatcgccagcggttcgatcttttttgccgtaggcggcatcggctggttgctggcaatgctgaaaaagctgtcaccggcattgcgtacgctgtggctgatagtgacgatggttcttggcgtcatctttgtctggatgatggtgcgtgtgtataaccccagatgcacagaagttctgtttggtccagggctgattgaagatgacaaagttctcctgcaacaactgatttcgaccatctctaactggaagaatgatctcaaaacaccgtcccaggcggcagcaagtgcgattggcgagcgggaccgtatttttgcccattgttatgggctgtatgatgcacacctgaaagcctgtaacgttctcgacttcgatgatctgattttattgccgacgttgctgctgcaacgcaatgaagaagtccgcaagcgctggcagaacaaaattcgctatctgctggtggatgagtatcaggacaccaacaccagccagtatgagctggtgaaactgctggtgggcagccgcgcgcgctttaccgtggtgggtgacgatgaccagtcgatctactcctggcgcggtgcacgtccgcaaaacctggtgctgctgagtcaggattttccggcgctgaaggtgattaagcttgagcagaactatcgctcttccgggcgtattctgaaagcggcgaacatcctgatcgccaataacccgcacgtctttgaaaagcgtctgttctccgaactgggttatggcgcggagctaaaagtattaagcgcgaataacgaagaacatgaggctgagcgcgttactggcgagctgatcgcccatcacttcgtcaataaaacgcagtacaaagattacgccattctttatcgcggtaaccatcagtcgcgggtgtttgaaaaattcctgatgcaaaaccgcatcccgtacaaaatatctggtggtacgtcgtttttctctcgtcctgaaatcaaggacttgctggcttatctgcgcgtgctgactaacccggatatcaccaaatatatgggttactaccagcttaaaatcggctatcacctcggtgatgcggtgctcagtgcgaaaggacagtacaactggaacaccggctacggcggcgcggagttaggcttaagttacccgatcaccaaacatgtgcgcctttatactcaggtttacagcggctatggcgaatcgctcatcgactataacttcaaccagacccgtgtcggtgtgggggttgcgctaaaccacctgcaggcatgcaatattcgccgcccggtttacgtcccgctaatgcgggatcggtaa

SEQ ID NO: 138980 - DNA, 900 bp, Homo sapiens
tccccgtcccgtcccctctacgactggtgtactccctccggtgtgttcaccctccacccggatccccggtcggtcgacgacggtcagtcgggtatcggtcctgtgggggtctacgaccgtcacacggacatgaagaacgacaggaacctcccgcagatacgggctaacagtcaggcaggccgggtagatgtggcgattgggggcgacggaccccgagtcccgacgggcggggggcgtcgtcgggggaggattttgattccgacggggagtagggggcggccgttccgcttcctgaaacgtgtctggaaactggtttacgagcacacagcaaaaggtgatgttgcggcactgaacgttgatgcgctgactgaaaatcagaaagcgctgcgtcgcgatgtgcataaaccgatcgctaaagtgaccgatgatatcggccgtcgtcagaccttcaacaccgcaattgcggcgattatggagctgatgaacaacctggcgaaagcaccacccgatggcgagcaggatcgcgctctgatgcaggaagcactgctggccgttgtccgtatgcttaacccgttcaccccgcacatctgcttcacgctgtggcaggaactgaaaggcgaaggcgatatcgacaacgcgccgtggccggttgctgacgaaaaagcgatggtggaagactccacgctggtcgtggtgcaggttaacggtaaagtccgtgccaaaatcaccgttccggtggacgcaacggaagaacaggttcgcgaacgtgctggccaggaacatctggtagcaaaatatcttgatggcgttactgtacgtaaagtgatttacgtaccaggtaaactcctcaatctggtcgttggctaagcgcgggaggaagcgtgcgatatctggcaacat

SEQ ID NO: 138981 - DNA, 2001 bp, Homo sapiens
ttaaaacatcacaatcatcaggaaattcgacgccttcataaaaggcattagctcaagattgcaggtttttagcgataaggtgatatcaccgatatctttaattttatcgattacatgtttggataaataggtaattatgccggttggggcgtagatggtgacccgaccacgtttctcatgcttataatctgcaataaaattattaagttgctcgtttctgtccagcatgtcgttgatgtacggtaacagcccggtgccaaaaggtgtgagcatcagctgccgggtggttcggtcaaagacttttaaacccacttttgattcaaaatcagcaagatatttgctgacgttggcctgtgcgatgccaagtacagtcgcggcatggctgatattttcactggcagcgattaccgagataatttttaactcccggtacaccagcaaatgcgcatgcataatgtcgctggccgggcgaccgtgcgccagcaaatcagccattgctttaagatatggcggtagatggcggaaataacgctgatacccggcacacaaataattcagtcccggtttgccgctggcatcgagcatgaagcggtgtttcgggcagcctccccagcacgcttttaacacgttacaactgcgacactgcgccggtaactgcttaaatttatcttcaccaaacgcctgctgttgcggggaatcgatcatttctgcaattgtttgctggtgcatattccccagccgatattgcggataaacatagtgatcacaggggatcctttggttaacaccattcgcctgagcctgctgccgctggccggtctctcgttttccgcttttgctgcacaggttaatatcgcaccgggatcgctcgataaagcgctcaatcagtatgccgcacacagcggatttaccctctcggttgacgccagcctgacgcgcggcaagcagagcaacggcctgcacggcgattacgacgtcgagagcggcctgcaacaactgctggacggcagcggactgcaggtaaaaccggagatcaggcgtgagcagggagccatcttccagttgttgacggctgactgtgcctttggcggtgcggtaatctgcccgcagaccttcgccggtttccgactgccagagctgccagcctccgccagcgccgagcaacagcagtaatcctttcatcacgtgacggcgggtgaggcgggtatcgtgcaacgcccggctggcaacgtcgccaggcacaccgccaagctggttgcgcaggttttcaacctgctgccaggcccactggttatcctgatcctgttcataccactgttgccagcgcgcttcctgttgtgggctgacgcgctcgccgcttagcacggcataccagtgggaagctgaacgcagcgcctgacggcgggaatcggttaacaaaggattcataacccatactccagacggaacagcaggcagtgctcgacggctttcgccacgtattttttcacggagttcccgattgaacgcgatctggtggtcgatatgacccacttcatcgaaagtctggaagcgatcaaaccgtacatcatcggcaactcccgcaccgcggatcagggtagtacgcgtgcatgcgacgtcatagctcttcgatagtgtctcatgatctctacccatgtgcagaacgtgcaggtttgttacataggtgaccatgtgctgtgccacttcactggctgcataatttcctcttttaaaaagtgtctgttcatattttttgcccactttttgatgttttttttttttcttgtaaatttgtttaagttccttatagattctggatattagccctttgtcagatggatagattgcaaaacttttctcccattccataggctgcctgttcactttgatgatagtttcttttgctatgcagaagctcttcagtttaattagatcccatttgtcaattttggcttttgttgcaattgcttttggcgttttagtcatgaagtctttgcccat

SEQ ID NO: 138982 - DNA, 5052 bp, Homo sapiens
atgggattatccggctcgggtaaatccacaatggtacgccttctcaatcgcctgattgaacccacccgcgggcaagtgctgattgatggtgtggatattgccaaaatatccgacgccgaactccgtgaggtgcgcagaaaaaagattgcgatggtcttccagtcctttgccttaatgccgcatatgaccgtgctggacaatactgcgttcggtatggaattggccggaattaatgccgaagaacgccgggaaaaagcccttgatgcactgcgtcaggtcgggctggaaaattatgcccacagctacccggatgaactctctggcgggatgcgtcaacgtgtgggattagcccgcgccattaatccggatatattattaatggacgaagccttctcggcgctcgatccattaattcgcaccgagatgcaggatgagctggtaaaattacaggcgaaacatcagcgcaccattgtctttatttcccacgatcttgatgaagccatgcgtattggcgaccgaattgccattatgcaaaatggtgaagtggtacaggtcggcacaccggatgaaattctcaataatccggcgaatgattatgtccgtaccttcttccgtggcgttgatattagtcaggtattcagtgcgaaagatattgcccgccggacaccgaatggcttaattcgtaaaacccctggcttcggcccacgttcggcactgaaattattgcaggatgaagatcgcgaatatggctacgttatcgaacgcggtaataagtttgtcggcgcagtctccatcgattcgcttaaaaccgcggctgtccctcctgttcagctactgacggggtggtgcgtaacggcaaaagcaccgccggacatcagcgctatctctgctctcactgccgtaaaacatggcaactgcagttcacttacaccgcttctcaacccgccgggcagtgacgtcatcgtctgcgcggaaatggacgaacagtggggctatgtcggggctaaatcgcgccagcgctggctgttttacgcgtatgacagtctccggaagacggttgttgcgcacgtattcggtgaacgcactatggcgacgctggggcgtcttatgaaattaaagcaggacttacttaaccatctctttttcaatcaactggatcaggatatggatcactttaatgtgaatctcctgaatgcggtcggcataaccaaagtgcggtacgcgaatttcgatatccgccgtgccagccattttgccgccgtctttaccggtcagggtgatcactttcattcccttctcacgcgccgctgcgatcgctttgatcacgtttgcagagttaccggaggtggagatccccagcagtacatcgccttcgcgacctaccgcttcaacgtagcgggagaaaatatcattgaaaccgaaatcattaccgacgcaggaaatatgactaacgtcagaaatagcaatcgccggcgactggacggtgaaatcgccgaaaacggcagtcaggacggaacgttgctgggctactcgctattgcaggagtcggtggatcaggccagctatatgtacagcgataaccattatctggcggagatggcaaccatcctcggtaagccagaagaggccaaacgctatcgccagttggcacagcagctcgcggactacatcaacacctgtatgttcgacccgactacccagttctactatgacgtacgtattgaagataaaccactggcgaacgctgcgcgggcaaaccgattgttgagcgcgcgttgtttcaccctcggttattttttcatgtacaaacaagctgttattctcctgctgatgctgtttaccgcaagtgtcagtgccgcgttacctgcccgttatatgcaaaccatcgaaaatgctgcggtctgggcgcaaattggtgacaagatggtgaccgtggggaatattcgggccggacaaatcattgccgtggagcccactgccgcaagttattacgcatttaattttggctttggcaaaggttttatcgataaaggtcatctcgagccggttcaggggcgacaaaaagttgaagacggtttgggcgacctcaacaagccgctgagtaatcagaacttagttacctggaaagatacgccggtctataacgcgccgagtgcgggaagtgcgccatttggggtactggcggacaatttgcgctacccgattttgcataaactgaaagacaggttaaatcaaacctggtatcagatccgtattggcgatcgactggcctatatcagcgcactggatgcccaacccgataatggcctgtcggtgctaacctatcaccatattctgcgcgacgaagaaaacacccgttttcgccatacttcgacgaccacatcggtacgcgctttcaataaccagatggcctggctgcgtgacaggggatacgcgacactgagcatggtgcagctggaaggctacgtgaagaataagatcaatctccctgcgcgagcggtggtgattacctttgatgatggcctcaagtcggtgagccgctatgcgtatcctgtgttgaaacaatatagcctgtgtgattatcatgtgttcccaacctgggacctgcaggcatcgggtgagcagcgtctgctgggcgagttaaccggcgcagcttgtgcaacgctggtagcggaaattgccgaacgtcacgccggtccggtggtactcattgcaccagatatgcaaaatgctctgcgtttgcatgatgaaatcagccagtttaccgatcaaatggtgatgaatctggcggactgggaaactcttccctacgacagtttttcgcctcatcaggacattatctcctcgcgcctttccaccctttaccagctaccgacgatgcagcgtggcgtactgattgttccggtgaatacgcttatgcagcgcgtttgcccacacagttttctccacggtcatgcgctggtgatgaaaaaaggtcagcgcctgtcacgagatgcattacgaacccaactggacagcgccggttatcgccatgttgaccaggtgatggagcacggcgaatacgccacgcgcggcgcgttgctggatctcttcccgatggggagtgagctgccttatcgtcttgcaatcggggtgaatgtggcgcaggcggaagtgttgaatctggagtccggagctaaacaggttttacaagaaacctttggctaccaacagtttcgccccggccaggaagaaattatcgacactgtgctttccggccgcgattgcctcgtcgtcatgcccactggtggcggaaaatccctttgctatcaaatccctgccttattgctaaacggccttaccgtggttgtttcaccgctgatttcgttgatgaaagatcaggtggatcaactgcaagccaacggcgtggcggcggcgtgccttaactcgacgcaaacccgcgaacagcaacttgaagtgatgacgagaccgcgcattggggatggaactggagcgttacgaaaaagagtcgcacagctggcctttaaaaatcagccaatgatggtgggcaactgggcgcaaagcattttgcacggcggggtcattgcgtcggcgctggatgtcgccgccggtctggtgtgcgtgggaagtaccttaacccgccacgaaaccatcagtgaagatgaactacgccagcggtatcgcggatggggaccattgatcttcgcgttgattatctgcgcccaggcaggggcgagcgttttactgctactagtagcctgttgcgtgcaggcaataaagtcgccgtcgcccgcgttgaattacacaatgaagaacagctttatattgccagtgccaccgccacctatatggcaatgtaggcaacataaacgctcgggcatcttcattgggaaaacccgctttcatggaaaggtaaatgcctacgccaacgaagaccgcgtcgtattgttccaaaagcgaatccaaagagacatctttacccacatcacaattgagttcgaagtgaatccccatcgcgctgaagatttcccgacggcgtgccaacagggatttatccagtttgaaagaaggtatgccgatagtgagcaagccaccgatttctggatggcgatcgtacatcgtcacccccacgccatagcgggtcaaaacatccgcacaggccagccctgccggacctgctacgataatcgtcacccgattgtccactttggtgacatgagcttatcgttcaatgttgacgatagttaccgcgccgtgctcatcgcgaatagtacaggcgccttcacacaaacggtcttgcgggcagacgcgtccggtaatatgcggcaggttgttggtctggtgagaaagctcgacggcggcgtcgagtgtttccggctttcaccagttcattccactgcggtatatggttatgctgcgggcaggacaggccaccacgcaggatttacagccaatacacttttgctgattgacctgaatgctgtcatcaacgtgtctgcaaaatctgaccatcgaaaacacgctgggcgatacgtagatgcaggtaaccatccggcggtggcactgcgtactgatggtgaccagaaccgtctggaaacgaatcgtcagccgcgtacgctggtgaccaacagctacattgaaggggatgtggatatcgtttctggtcgcggcgcagtggtgttcgataacaccgaattccgcgtggtgaactcacgtactcagcaagaagcgtatgtgtttgcaccggctacgctgtccaacatttactacggtttcctcgccgtaaacagccgtttcaatgctttcggtgatggtgtggcgcaactgggccgctcgctggatgttgatgccaataccaacggtcaggtggtgatccgtgatagcgccatcaacgaaggttttaacacggctaaaccgtgggccgatgcggtgatctctaatcgtccgtttgcgggtaataccggcagcgtagatgataacgacgaaatacagcgcaatctgaatgacactaactacaaccgcatggtggaatacaataacggtccagaatag

SEQ ID NO: 138983 - DNA, 993 bp, Homo sapiens
atgtttgctgtgtatgcccacgccgttatgcattggtatggacgctattgtggaatgtgggttaatatcgcaccgggatcgctcgataaagcgctcaatcagtatgccgcacacagcggatttaccctctcggttgacgccagcctgacgcgcggcaagcagagcaacggcctgcacggcgattacgacgtcgagagcggcctgcaacaactgctggacggcagcggactgcaggtaaaaccgctgggaaataacagctggacgctggagcccgcgcccgcaccaaaagaagatgccctgaccgtggtcggcgactggctgggtgatgcgcgtgaaaacgacgtatttgaacatgctggcgcgcgtgacgtgatccgccgtgaggatttcgccaaaaccggcgcaaccaccatgcgtgaggtacttaaccgcatccctggcgtcagcgcgccggaaaacaacggcaccggcagccacgacctggcgatgaactttggcatccggggcctgaacccgcgcctcgccagccgctcgaccgtcctgatggacggcatcccccgtccccttcgccccttacggtcagccgcagctttcactggctcccgtttcgctcggcaacatggatgccattgtacgtggtacgcggtggtggtgcggtgcgttacggacacgcagagcgtgggcggcgtggtgaactttgttacccgtgccattccgcaggactttggtatcgaggcgggcgtggaaggtcagctcagcccaacctcttcacaaaacaacccgaaagagacgcacaacctgatggtgggcggcacagcggacaacggttttggcaccgcgctgctctactccggcacgcgcggcagtgactggagcgagcacagcgccacccgcatcatcagggacgcacgtcttcgagtgttacaggatatgcgtcgcgtgcaaacaaagattattcagggggctgtgcatggaaacttatccagacccact

SEQ ID NO: 138984 - DNA, 2560 bp, Homo sapiens
atgaaccctaatgtgagctatggactctgggtgataatgatgtgtcactgtaggttcatcagctgtagcaaatgttccactctggcgcaggatgttgatgatgggggacgctgtgcatcaccttatttagccactctgcagcttgatagcagcctattgataccacctaaataccagaccccaccagcagcagcacagggacaagctacgccagggaatgctgggcccttagctccaaatggatcagcagctcccccagctggcagtgcatttaatcccacctcgaatagtagttctacaaatcctgcagcaagtagttctgcatctggttcctctgtgccaccggtctcatcgtctgcctctgctcctggtattagccagataagcactacctcttcttcaggattcagtggtagtgttggagggcagaaccccagcactgggggcatttctgcggatagaacgcaagggaacataggctgtggtggagacactgaccctgggcagagctcttctcagccctcacaggatggacaagagagtaacgtgcctagtgttgggagcctagcagatccagactatctgaacacaccacagatgaacacacccgtgacgttgaacagcgctgccccagccagcaatagtggggcaggagtcctaccatctccagcaacccctcgcttctctgtccccacaccacgaacccccaggaccccaagaactcccagaggtgggggcactgccagtggtcaagggtctgttaagtatgatagcaccgatcaaggatcaccagcctccaccccctctactacacggcccctcaactctgtggagcccgccaccatgcagccaattcccgaagcccacagcctctatgttaccctgattctctccgattccgtgatgaatatctttaaagacagaaactttgacagctgttgcatctgtgcctgcaacatgaacatcaaaggggcggatgtcgggctttacatccccgattcttccaatgaggaccagtaccgctgtacctgtgggtttagtgcgattatgaaccgcaaacttggctacaattcaggactcttccttgaagatgagttggatatttttgggaagaattctgatattggtcaggctgcagagaggcgcttaatggatgtgtcagtccactttccttcctcagtgcgctgctttgagcgtaaaagtcattatggattttctgccacgctgtctgttgttcgctggtcaaaggcgcggcattttgctgccacataccgtgtccgccgtgagcaaatgcagatgtcgatcccatcgccattgctgaaacgccatcattaccagggcaattttcgtgttccgtttcatgaaagggatgagcaggcaaagaagaagatgcgttttatgcaacgttctaaagactccttagctaaatggttaagcgcgatcctccccgtggtcattgttgggctggtgggattgtttgcggtaactgtgattcgtgattatgggcgggcaagcgaggcagaccgccaggcattactggaaaaaggccgcgtaaatcgccgccgtgaaaagtgccaatttccgccataccgtctttatgacgtccgtaactctggtcattactgggatcgccgttttcgaaacgatctgtcagcacaaagtaaaccgtggcgttatgccagtcgaaaggggcggatgtgtcagtttctgcccgttccagcaggagtaaaccgttgctggtggcagcgggttgtaacattatttgaccgttcttcactatcgcaatttgctggctgtaataatcccgtacggcggctccttccgggaaagtggcgctgacatccactgtgagcgcacatcttctctggcggcacaatctttacgtttcggttatgaaacatcacaaaccgactcgcaacatattgcggcgaaaaaattcaatgatttattgcaggagagaaccaaaggcgagctgaaattaaaactgttcccggacagcactctcggtaacgcgcaggcgatgatcagcggcgtacgtggcggcaccatcgatatggaaatgtccggctcgaataactttgccgggttatcaccagtgatgaacttgcttgatgtccctttcctgttccgcgataccgctcacgcgcataaaacgctcgacggcaaagtcggtgatgatctgaaagcctcacttgaagttgtacgcatccagattcagcgaactttctttgctgctggtagaaatcggcctcgctggcacatctttacgccggtttgcgcctgcgcctggttgatcaatccggcgttaagatcggcgtcaatcgcaatgtgtttcgagacctgcaggcatgaagttcgcatcctcgcgcgccgcagatgtgcatctctaaagctttcatcttcttgtagtttcaacggcaaaagcgccagcgcgaaaagcctgtttaaactgcagactctgggcctgactcaaggtaccgttgtgactatctccgcagaaggcgaagacgagcagaaagcggttgaacatctggttaaactgatggcggaactcgagtaa

SEQ ID NO: 138985 - DNA, 3402 bp, Homo sapiens
atgttgccagatatcgcacgcttcctcccgcgcttagccaacgaccagattgaggagtttacctggtacgtaaatcactttacgtacagtaacgccatcaagatattttgctaccagatgttcctggccagcacgcaggcccgcgccagtggtgccccactccagcgcctctttcgcgccataggcggcaacgcctgggaacgacctttcagaatggtgttttgcagcgccgctttctccgaagagtcttcaccgtttcgtgaaaccaactacgaaccgcaattgttcctcggttttgccaccgattaccgttttgcaggttggacgctgcgcgatgtggagatggggtataaccacgactctaacgggcgttccgacccgacctcccgcagctggaaccgcctttatactcgcctgatggcagaaaacggtaactggctggtagaagtgaagccgtggtatgtggtgggtaatactgacgataacccggatatcaccaaatatatgggttactaccagcttaaaatcggctatcacctcggtgatgcggtgctcagtgcgaaaggacagtacaactggaacaccggctacggcggcgcggagttaggcttaagttacccgatcaccaaacatgtgcgcctttatactcaggtttacagcggctatggcgaatcgctcatcgactataacttcaaccagacccgtgtcggtgtgggggcaatcggggtgaatgtggcgcaggcggaagtgttgaatctggagtccggagctaaacaggttttacaagaaacctttggctaccaacagtttcgccccggccaggaagaaattatcgacactgtgctttccggccgcgattgcctcgtcgtcatgcccactggtggcggaaaatccctttgctatcaaatccctgccttattgctaaacggccttaccgtggttgtttcaccgctgaattcgttgaaggaaaaatcagctaatccgttcgaatttaccttcgccgcgtttgcccacgcgtttcattgggtaattcaagcgatcggaatgattaatacaccggcggatggatcgacgcacaaacaggcgcgtacctcatggctgccgtactcatcgctgccggtattgtcagtgtccacccaggatgagaaggcaaagaagaagatgcgttttatgcaacgttctaaagactccttagctaaatggttaagcgcgatcctccccgtggtcattgttgggctggtgggattgtttgcggtaactgtgattcgtgattatgggcgggcaagcgaggcagaccgccaggcattactggaaaaaggtaatgtgcttatccgcgctctggagtcgggaagccgcgtagggatggggatgcgaatgcaccatgtacagcaacaggcgcttctggaagagatggcgggacagccgggagtgttgtggttcgcagtcaccgatgcgcagggcatcattattcttcatagcgaccccgataaggtcgggcgtgcgctctattcgccggatgaaatgcagaaattaaagccagaggaaaactcccgctggcggctgcttgggaaaacggaaactacgcctgcacttgaggtctatcgtttgttccagccaatgtcagcgccctggcggcatggaatgcacaatatgccgcgctgtaacggcaaagctgtgccacaagtagatgcacaacaggctatttttatcgccgttgatgccagtgatctggttgcaacccagagtggggaaaagcgcaataccctgattatcctctatgccctggcgacggtcttgctggcaagcgtattgtcattcttctggtatcgccgctatctgcgatcgcgccagcttctacaagatgaaatgaagcgcaaagagaagctggtggcgctggggcatcttgcggcagcgttgcccacgaaatccgtaacccactttcctcgattaaaggactggcgaaatactttgccgagcgcgcgcctgcagggggagaagcgcatcaactggcgcagcatgttcaaatacgtcgttttcacgcgcatcacccagccagtcgccgaccacggtcagggcatcttcttttggtgcgggcgcgggctccagcgtccagctgttatttcccagcggttttacctgcagtccgctgccgtccagcagttgttgcaggccgctctcgacgtcgtaatcgccgtgcaggccgttgctctgcttgccgcgcgtcaggctggcgtcaaccgagagggtaaatccgctgtgtgcggcatactgattgagcgctttatcgagcgatcccggtgcgatattaacctgtgcagcaaaagcggaaaacgagagaccggccagcggcagcaggctcaggcgaatggtgttaaccaaagcaacacgccgcctcaatggcgattgttcaggcacggcgaatatacgctgcaaatagacacccgctccggtacgccaacattgatgatttccatccagaacgccgccgaaccggtagcaagcctggtccgtgaatgcccgaaatgggatggattaccgctcacagtggatgtcagcgccactttcccggaaggagccgccgtacgggattattacagccagcaaattgcgatagtgaagaacggtcaaataatgttacaacccgctgccaccagcaacggtttactcctgctggaacgattatataaaaataaaatagaaaagagggaacagatgcgatatccggttgatgtatacacaggcaagattcaggcttatcccgaaggcaaacccagcgcaattgctaaattccaggttgatggtgagttgatgctgacggagctggggctggaaggtgacgagcaggcggagaaaaaggttcacggcgggccagacagagcgctgtgtcattatcctcgtgagcattatctctactgggcgcgggaatttccggaacaggcggagttgtttgttgcgcctgcgtttggtgaaaacctctcaaccgacggcctgacggaaagtaatgtttatatgggcgatattttccgctggggagaggcattaattcaggtcagccagccgcgctcgccttgctataaactcaattaccattttgatatcagcgatatagcgcagttgatgcaaaacacaggtaaggtggggtggttgtatagcgtgatagcgccagggaaagtgtctgcggacgcgccgctggagttggtttcccgtgtcagcgatgtgaccgtgcagtgcggccgccagcgtatttggaacggggttcatgggttgacgggcaacagaaagcgaaccgtccgatacattgctacaattatgcttgtccgactactggacatggatgcttttaatacctggcgctacgtgcgcggcagtcgcctgctgaacaggttcactcatacgcgctga

SEQ ID NO: 138986 - DNA, 2359 bp, Homo sapiens
cggccatatccttgaagtccaatcccacattcgcgttcacaccgacgccttcacagtcataagccaggcgtcgcaacacagaagcgtcgggtattcaggtcaccggataacaatctccccaccgatttttacgctttgatcccacgtttcccgggactcaggggttcctggttgcgattatccggataaaaaaagagggggtcccaggcttaaacgggaatttatatggcccttttttctcgtctccccttttctggtgaacccttgtattctgctggcacgcaaaattactttcacatggagtctttatggatatcatttctgtcgccttaaagcgtcattccactaaggcatttgatgccagcaaaaaacttaccccggaacaggccgagcagatcaaaacgctactgcaatacagcccatccagcaccaactcccagccgtggcattttattgttgccagcacggaagaaggtaaagcgcgtgttgccaaatccgctgccggtaattacgtgttcaacgagcgtaaaatgcttgatgcctcgcacgtcgtggtgttctgtgcaaaaaccgcgatggacgatgtctggctgaagctggttgttgaccaggaagatgccgatggccgctttgccacgccggaagcgaaagccgcgaacgataaaggtcgcaagttcttcgctgatatgcaccgtaaagatctgcatgatgatgcagagtggatggcaaaacaggtttatctcaacgtcggtaacttcctgctcggcgtggcggctctgggtctggacgcggtacccatcgaaggttttgacgccgccatcctcgatgcagaatttggtctgaaagagaaaggctacaccagtctggtggttgttccggttgaagatttagcgggtattgagatcgatcacaccacctcgatggtgatgattttcggtattatttttctgaccgccgtcgtggtgcatattattttgcattgggtggtactgcggaccttcgaaaaacgtgccatcgccagttcacggctttggttgcaaatcattacccagaataaactcttccaccgtttagcttttaccctgcaggggattatcgtcaatattcaggcggtattctggctgcaaaaaggcaccgaagcggcagatattctgactacctgcgcgcagttgtggatcatgatgtatgcgctgctttcagtcttctcgttgctggatgttattttgattctggggcaagaaatttccggccagcatttcagttaccgctgaaaggggatatttcaggggattaaactgatgggcccgattctggtcggcattttgatgatctcgctgctgattggtcagtcgccagcgattctgatcagcggtcttggtgcaatggctgccgtgctgatgttggtatttaaagatccgattcttggtctgggtggcaggtattcagctttccgcgaacgatatgctgaaactgggcgactggctggagatgccgaaatacggcgcggatggcgcggtgatcgatattgggttacccaccgtcaaagtgcgtaactgggacaataccattaccactattcccacctggtctctggtttctgactcctttaaaaactggagcgggatgtcagcatctggcgggcgacgtattaagcgcagtatcagtattgatgtcaccagtattcgttttcttgatgaagacgaaatgcaacgtctgaataaagcgcatttgttaaagccttatttaaccagccgccatcaggaaattaatgagtggaatcgccagcaaggttctagggaatccgttatttaatctgcgccgaatgccgcaatattggaaaccttttgtgcctatctaaacaaaatatctgggtacccattccgcggattcgtaaagatatgaccttaatggtacgccaactggctccaggtgataacggtttaccgttcgagatctacgcgtttactaacaccgtggtgtggctggaatatgaaagcattcaggctgatatattcgatcacatatttgcgattgtcgaagagtttggtctgcgacttcatcagtcgccaaccggcaatgatattcgctctctggcgggtgcatttaagcagtaattaaaaaaaaccgctctcatcgaatggatgagaacggttttgcatggttgaccatccgtttggaagcaaaagaccggaatagccttatttttcgtccggcaggattttatatggccgtaaccgggggatcgctcgggcaccggccggcaggaaccgttcggaaccgcatattatccccattgggccggtttagggaagcaaaaggaatggggaaggcaaggcaactcgccacggagtcgcccccc

SEQ ID NO: 138987 - DNA, 757 bp, Homo sapiens
atgaaagcattctggcgtaacgccgcgttgctcgcggtttctctgcttcccttctcttctgccaacgccttagcgttgcaggcaaaacagtatggcgattttgatcgctatgtcctggccctctcctggcaaaccggattttgccagagtcaacacgatcgaaatcgtaacgaacgagatgaatgtcgcctgcaaaccgaaacgaccaacaaagctgattttctgaccgtacatggtctgtggccaggattgcctaaatcggttgctgcccgtggtgttgatgaacgccgctggatgcgcttcggttgcgctactcgcccaatcccgaatctaccagaagcgcgcgccagccgaatgtgttcatcgccggaaaccggattatcactggaaacggccgctaaactaagtgaagtcatgccaggagctggcggacgttcctgcctggaacgctacgaatatgccaacacggtgcctgcttttggtttgatccggacgcatacttcgatttgtcagatctgcctgactgaacgcctgatagccgcctttcagtttatccgggaacggaatggattcgatctggcctttcttgtgataagccagcgtacaggcagctaccgcctggaaggattccgcacgaccagtaccgagattgaagatgccggaaacgccattttccaggaaccacagattcacatcagccacgtcgcccacatagacgaatcctgtttgaagttctcgctaccttcaaacagcttcg

SEQ ID NO: 138988 - DNA, 2025 bp, Homo sapiens
ttagtgaacgcggttaaaaataaaaggcatcacggtggtgaataatgccgctttcggccaagccggattaatcgccgtcaattcagcgcgagcagactcatattgcgcaacctccccgagtcccgcggacgccagcatcgccaccatcaggcatttttctttatgctgctgttgtaaatcgccatacagcgacaacaagtcaggttgcgagacggcaaagaaatccgcttcgatactggttttcgccatctcttgcgcccactgtttcatttcactaaacagttgctgtgcggtttgttgttcgcccagcagtcgcagcgccatcccttgccagaagagataatcaaccggctgatcgttgtaataactgtgaatgttaatagtgcgatcgccggtcgccgccagacgtaaacaacgcgtcgcttcagtttcatcgccctgcgcgttggcgcatatcgcctgccagaaccagatgtcgttatcagtttgccccggtaaacggccttcgcttaaattctccggataatgcagcgcggcatgaagcagttcgcaggcctgctgcggctgtctggcatcaagatgctgcgatatcgaccaatacgttccttcgcgtttaatctgcaatttacagccgagcgcatacccggaatcagttgggataacgatcaccccgcctttacgcacgatctccccgcctggtggatcagacgttggcgcaagggccgccagctgggtacgttcattgggcgattgctggcactgcgcgacttccatcgcgtcaccgtggtgttcggcaaaatgcgcaaccaatcttttcagccatttagcactaagattgtaccgcccaggatgagctagcaccgccttaccgccagaatgatgaatgacatcaatagcttgttctattgtacaccactgtggcggaacgtatccggttttcccgcgcgccagatactttttaaagacatccgccattgaactggctttgccgcactcaacaaggaaacgcgcaaaatgaccgcgcgtcactgcgccgccctgcgccagtcgttgtgcgccttccagcgccccaggtatttgcgctttttcaagtctttcggcaatcagctgcgcccgctgattgcgccgttctgtctgctgcgcgaggaactcacacattagcggatgagtaatatcaatattcagcccgacaatatgaatttcatgattttcccagaccgtggaaatttccacgccgggaataagattcaacgccagtcccgaacgtgatatttcctctgccaaactctctataccttcttcggggtatatccatttattgttgctctttgaaggtgcagaaggatccatgcggctactgtatgtttgcgttaggttactggctttcacgttctctggtccccagcttttggcaaagccggcgtcaaagtcacggcggctcactgttttaccgtaattatccgcaaggaattttccggcttcgctctctggaatttcttgattcaggcgtaccatcgtaccgaagtatgcgtccggatcaaaaccaaagcaggcaccgtgtttggcatattcgtagcgttccaggcaggaacgtccgccagctcctggcatgacttcacttagtttagcggccgtttccagtgataatccggtttccggcgatgaacacattcggctggcgcgcgcttctggtagattcgggattgggcgagtagcgcaaccgaagcgcatccagcggcgttcatcaacaccacgggcagcaaccgatgtaggcaatcctggccacagaccatgtacggtcagaaaatcagctttggtggtcgtttcggtttgcaggcgacattcatctcgttcgttacgatttcgatcgtgttgactctggcaaaatccggtttgccaggagagggccaggacatagcgatcaatatcgccatactgttttgcctgcaacgctaaggcgttggcagaagagaagggaagcagagaaaccgcgagcaacgcggcgttacgccagaatgctttcat

SEQ ID NO: 138989 - DNA, 3294 bp, Homo sapiens; identical to SEQ ID NO: 138818

SEQ ID NO: 138990 - DNA, 1452 bp, Homo sapiens
atgaaaggtgatactaaagttataaattatctcaacaaactgttgggaaatgagcttgtcgcaatcaatcagtactttctccatgcccgaatgtttaaaaactggggtctcaaacgtctcaatgatgtggagtatcatgaatccattgatgagatgaaacacgccgatcgttatattgagcgcattctttttctggaaggtcttccaaacttacaggacctgggcaaactgaacattggtgaagatgttgaggaaatgctgcgttctgatctggcacttgagctggatggcgcgaagaatttgcgtgaggcaattggttatgccgatagcgttcatgattacgtcagccgcgatatgatgatagaaattttgcgtgatgaagaaggccatatcgactggctggaaacggaacttgatctgattcagaagatgggcctgcaaaattatctgcaagcacagatccgcgaagaaggaaaaagcatttaccaggagcagacaacagcaatgaaacgcccggactacagaacattacaggcactggatgcggtgatacgtgaacgaggatttgagcgcgcggcacaaaagctgtgcattacacaatcagccgtctcacagcgcattaagcaactggaaaatatgttcgggcagccgctgttggtgcgtaccgtaccgccgcgcccgacggaacaagggcaaaaactgctggcactgctgcgccaggtggagttgctggaagaagagtggctgggcgatgaacaaaccggttcgactccgctgctgctttcactggcggtcaacgccgacagtctggcgacgtggttgcttcctgcactggctcctgtgttggctgattcggctatccgcctcaacttgcaggtagaagatgaaacccgcactcaggaacgtctgcgccgcgggcgaagtggccgcgcgggcctgctgcccatctccgacggtgcaagaaagttcttccagaaatatttcaaaggacgtgaagtgtatatcggtctggatactgctgtgacgctggggcatccaaccaccattgctgtcggtctgctactgatacccattatgttaattctggccagcattttaccgggcaacaaagtgttacccctcgcagacctgccggtagcaccgttctttatctgtatggctacggttatccaccgcggagacctggtcaggacgttgataagcggggtcatcgtgatgattaccgtcctgctgatcgccacccagttcgcgccttacttcactgaaatggcgctcaaaggcggtttcagttttgccggtgaaagtgcgcaaatctcagcgttgtccgtgggcaatatgttcggttggtcgatttctgaattgatgtcgcttgggattattggcgttgtcgtggcggtcggtattgtcgccagcgtcgtgctgttcttacgtaaacgtgaattatcggaataa

SEQ ID NO: 138991 - DNA, 4023 bp, Homo sapiens; identical to SEQ ID NO: 138671

SEQ ID NO: 138992 - DNA, 3939 bp, Homo sapiens
atgccagagcacaaatttgtcaccctggaagatacgccgctgattggtgttacccagagctactcctgttcgctggagcaaatctctgatttccgccatgaaatgcgttatcagttctggcacgattttctcggcaacgcgccgaccattccgccggtgctctacggcctgaatgaaacgcgtccgagtcaggataaagacgacgagcaagaggtattctataccaccgcgttacgccaggatcaggcagatggctatgtactgacggggcatccggtgatgctgcagggcggcgaatatgtgattgttacctatgaaagtctgggaaccggcgtgcaagagtttatcctgacggtatacggaacgtgcatgccaatgctcaaccttgacgcgccggccgagtacgaacggacgctcgccacggtcaacaaaacgcagcagttccggaccgtactgttcccaacgaccactctcttgccacaaatcggctggctgaaccaccggcatcgacacctcgatcgcaccggcgttgttcatctcttcacgcacgatgttttcgacttttttcagaacgcgcacgccggtcggcagccaggttggttgttcgcggctggctggaacaagtggaaggtcagcagttgcgcgacgccagttgaagaatacggtaacgctattcgccagcttgccgctgctaacattttccctggcgacatgctgtttaaaaacttcggtgtcacccgtcacgggcgtgtggttttttatgattacgatgaaatttgctacatgacggaagtgaatttccgcgacatcccgccgccgcgctatccggaagacgaacttgccagcgaaccgtggtacagcgtctcgccgggcgatgttttcccggaagagtttcgccactggctatgcgccgacccgcgtattggtccgctgtttgaagagatgcacgccgacctgttccgcgctgattactggcgcgcactacaaaaccgcatacgtgaagggcatgtggaagatgtttatgcgtatcggcgcaggcaaagatttagcgtacgaatttgtcagccaggtgtcaagcagatccgccgtatcaagcattttgtcataagcatcggcttcctttttgctgcaactcgcgtgatgttattaggctccggtgaactgggtaaagaagtggcaatcgagtgtcagcgtctcggcgtagaggtgattgccgtcgatcgctatgccgacgcaccagccatgcatgtcgcgcatcgctcccatgtcattaatatgcttgatggtgatgcattacgccgtgtggttgaactggaaaaaccacattatatcgtgccggagatcgaagctattgccaccgatatgctgatccaacttgaagaggaaggactgaatgttgtcccctgcgctcgcgcaacgaaattaacgatgaatcgcgagggtatccgtcgcctggcggcagaagagctgcagctgcccacttccacttatcgttttgccgatagcgaaagccttttcccgcgagcggttgctgacattggctatccctgcaatgtaaaccgggtgatgagctcttccgcaaagggcaaacgtttattcgttctgcaaagcaccttgctccagcatggcacggggcgcgtaaattgtgaaagccgcgttaagtttgactccgaaattaccttgctaaccgtcaacccggttgatggcgtcaattcctgtgcaccagtaggcaatcgccaggaagtttgcggacttttttgtggggtgaatatggcagtaaagatttcaggtgtactgaaagacggcacaggaaaaccggtacagaactgcacaatccagctgaaagcaaaacgtaacagcaccacggtggtggtgaacacgctggcctcagaaaatccggatgaagccgggcgttacagcatggacgttgagtacggtcagtacagcgttattctgttggtggaaggattcccgccgtcacatgccgggaccattaccgtgtatgaagattctcaacccggtacgctgaatgattttctcggtgccatgacggaggatgatgcccgtccggaggcactgcgccgttttgaactgatggtggaagaggtggcgcgtaacgcgtccgcggtggcacagaacacggcagccgcgaagaagtcagccagtgatgccagcacatcagcccgtgaggcggcaacccatgcggctgatgctgcggactcagcacgcgcacgcagcacgtcagccggacaggccgcgtcgtcggctcagtcagcgtcttccagcgcaggaacggcatcaacaaaggccactgaagcatcaaaaagtgctgccgctgcagagtcctcaaaaagcgcggcggccaccagtgccggttgcatgaaagcattgacttatcacggcccacatcacgttcaggtagaaaatgttcccgatccgggcgttgaacaggcagatgatattattctgcgtattacggcaacggcgatctgtggctctgacctccatctttatcgaggcaaaatacctcaggttaaacatggcgatatttttggtcatgaatttatgggggaagtagttgaaaccggaaaggacgtaaaaaatttgcaaaaaggcgaccgagtggtaattccgttcgtcattgcttgtggcgactgttttttctgtcgattgcaacaatatgccgcctgcgaaaataccaatgcgggtaaaggcgctgcgctcattaaaaacgttacacgctcacgggattggatttctgattatggcggcgattatcgtcatggctgtcctttacctcgaaaaccactcctgacgatcatattgttccccccggcatcgcattcaccagacctgaaaccgccttctgcgccgcctctgcgctttgtgcaccggccatgcgtgaacgtgggtctgtcccattttaaacgacaaccctttatcaaaggcgtcgccaaacaggaaaccgtgaataaatccagcgtagacgcccggtacgctaacaatgccgccacgcctgaccgccgcaatagcactgagcgcaacgctttaccgctgctgccctccagtttcaggtgtttatgcttgatgaaaaaagttcgaataccgcgtctgtcgtggtgctatgtacggcaccagatgaagcgacacccaggatttagccgccaaagtgctggcggaaaaactggcggcctgcgcgaccttgatccccggcgctacctctctctattactgggaagcacttccgtttttgccggattattcgacgcgccgggacgttcacaatttgtccccgcggatcaagcctttgcttttgattttcagcaaaaccaacatgaccttaatctgacctggcagatcaaagacggttactacctctaccgtaaacagatccgcattacgccggaacacgcgaaaattgccgacgtgcagctgccgcaaggcgtctggcatgaagatgagttttacggcaaaagcgagatttaccgcgatcggctgacgcttcccgtcacatcaaccaggcgacgaatggtcgccacaacgcagcgcacagctgtgtctgttcgcagcagacagccacgcgcaatgccttttcgcgtctggcgtgtgatcgtatggacgactctagaagatccccaccagcatcgatccggcaataatcccacctttagtcagcagcacgatcacagtaaagaacgttttcagcggtcgtgcaccgagatccagcgctgcttccaccagcgaataatcaatacgaatcaacgcggtataaatcggcagtaccataaacggcacaatgtgatcccccacgcgtataaccttgcggcggctcaacagttttcgggcaccgagttccgcctattcacgatgtcgtgcttgcggtcccccgggaattcctgcttctatcttgagtactcaacgttctgcgtaatgccttag

SEQ ID NO: 138993 - DNA, 2242 bp, Homo sapiens
atgcgcagccccatgacccgcaacagtcgaaacggcaaacacgactacaaacccccaccccgcaagcgacgccaacccccccacgaccacacagcacccaacagcacccccgcaagaaaccaacgcggcagaccccaccgacccaaccgacaggccggacaaagagaacaaagagctaacaaccccaccccgaacacccccagcccccccccaaccaacgaccccgctgaaccacaccaaacccgccacgacagccgccaaccgcacaacaccccaccagcctacgcagagctagtagctgctgcgcttttaaccacggatacaaatgttacccgccgacggcttcggtatatgcaacctgacacaaaattgtgtcatagtgcaggaaaaagcatttaccaggagcagacaacagcaatgaaacgcccggactacagaacattacaggcactggatgcggtgatacgtgaacgaggatttgagcgcgcggcacaaaagctgtgcattacacaatcagccgtctcacagcgcattaagcaactggaaaatatgttcgggcagccgctgttggtagaagatgaaacccgcactcaggaacgtctgcgccgcggcgaagtggtcggcgcggtgagtattcaacatcaggcgctgccgagttgtcttgtcgataaacttggtgcgctcgactatctgttcgtcagctcaaaaccctttgccgaaaaatatttccctaacggcgtaacgcgttcggcattactgaaagcgccagtggtcgcgtttgaccatctggacgatatgcaccaggcctttttgcagcaaaacttcgatctgcctccaggcagcgtgccctgccatatcgttaattcttcagaagcgttcgtacaacttgctcgccagggcaccacctgctgtatgatcccgcacctgcaaatcgagaaagagctggccagcggtgaactgattgacttaacgcctgggctatttcaacgacggatgctctactggcaccgctttgctcctgaaagccgcatgatgcgtaaagtcactgatgcgttactcgattatggtcacaaagcagatgatattattctgcgtattacggcaacggcgatctgtggctctgacctccatctttatcgaggcaaaatacctcaggttaaacatggcgatatttttggtcatgaatttatgggggaagtagttgaaaccggaaaggacgtaaaaaatttgcaaaaaggcgaccgagtggtaattccgttcgtcattgcttgtggcgactgttttttctgtcgattgcaacaatatgccgcctgcgaaaataccaatgcgggtaaaggcgctgcgctcaataaaaaacagataccagctccagcggcattgtttggttatagtcacctgtatggcggcgttcctggtgggcaggcggaatatgtccgcgtccctaaagggaatgtggggccgtttaaagtaccgcctttgctttcagatgataaagcgcttttcctttctgatattctgccaacggcatggcaggcagcaaaaaatgcgcagatccaacaaggttcaagcgttgcagtctatggtgctggtcctgtgggattgttgacaatcgcctgtgcacggttgctcggtgcggaacagatttttgttgttgatcatcatccctaccgcttgcatttcgccgccgaccgatacggcgcgatcccgattaattttgatgaagacagcgatccggcacagtcaattattgaacaaacggcaggtcaccggggcgtggatgcagtaatagacagccgtcggttttgaagcgaaaggcagcaccacggaaacggtgctgactaacctgaaactggagggcagcagcggtaaagcgttgcgtcagtgtattgcggcggtcaagcgttgcggcattgttagcgtaccgggcgtctacgctggatttattcacggtttcctgtttggcgacgcctttgataaagggttgtcgtttaaaatgggacagacccacgttcacgcatggctgggagaattattaccgttaattgagaaaggattactgaaaccagaagaaattgttacccactatatgccgtttgaagaggccgcccggggatatgagattttcgacaaacgtgaagaggagtgccgtccggtgattctggtacccggtgcacaaagcgcagaggcggcgcagaagacggtttcaggtctggtgaatgcgatgccgggcggaacaatatga

SEQ ID NO: 138994 - DNA, 2101 bp, Homo sapiens
ggtgacatgcagataacaataaccgctaagtctgtggcactggaagagggcgctattcttgcgcgcttcgactccactgacacccagttgcgcgctcgtgaagcattaatgggcgttatgggtgacaaatacgtcggggcttaaccttgccccggcaacgccgcgctggctggcagctattcacgctgagccgatgaagctcggccttgacctgcgtggcggcgttcacttcctgatggaagtggatatggacaccgcgcttggcaaactccaggaacaaaatatcgatagcctacgcagtgacctgcgcgaaaagggcatcccgtataccactgttcgtaaagaaaacaactacggcctgagcatcactttccgcgatgctaaagctcgtgatgaagccattgcgtatctgagcaagcgccatccggacctggtgattagcagccagggcagcaaccagctgcgtgcggtaatgagcgatgctcgtctgagtgaagcgcgtgaatatgcggtgcagcagaacattaatatcctgcgtaaccgtgtaaaccaacttggcgtggcggagccggtggttcagcgtcagggtgctgaccgtatcgttgttgaactgccaggtattcaggacactgcgcgtgcgaaagagattctgggtgcgacggcaacgctggaattccgtctggtaaacaccaacgttgaccaggccgctgcggcatccggtcgcgtaccgggcgactctgaagtgaaacagacccgcgaaggtcagccagttgtgctgtacaaacgcgtaattctgaccggtgaccatatcaccgactccacttccagccaggacgaatacaaccaaccgcaggttaacatctcgctcgatagcgctggtggtaacatcatgtctaacttcactaaggacaacatcggcaaaccgatggcaaacctgtttgtggagtacaagacagcggaaactgcccctgacggcgatatcacccgctaccgttatgataatccacacagtgacttaccctgcgcaacggaagatgccaccggcagccggaaaaccatgacgtggagccgttacggtcagttgctgagcttcaccgactgttccggttatgtaacccgttatgaccatgaccgcttcgggcagatgacggcggtgcaccgcgaggaagggctgagtcagtaccgcgcatacgacagccgtggacagttaattgccgtgaaagacacgcagggccatgaaacgcggtatgaatacaacatcgccggtgacctgaccgccgtcattgccccggacggcagcagaaacgggacacagtacgatgcgtggggaaaggccgtccgtaccacgcagggcgggctgacgcgcagtatggaatacgatgctgccggacgggtcatccgcctgaccagtgaaaacggcagccacaccaccttccgttacgatgtacttgaccggctgatacaggaaaccggctttgacggccgcacacagcgttatcaccacgagctgaccggcaaacttatccgcagcgaggatgagggtctggtcacccactggcactatgacgaagcagaccgcctcacgcaccgcaccgtgaagggtgaaaccgcagagcggtggcagtatgacgaacgtggctggctgacagacatcagccatatcagcgaagggcaccgggtggcggtgcattacaggtatgatgagaaaggccggctgaccggtgagcgtcagacggtgcatcacccgcagacggaagcactgctctggcagcatgagaccagacatgcgtacaacgcgcaggggctggcgaaccgctgtataccggacagcctgcccgccgtggaatggctgacctacggcagcggttacctggcaggcatgaaactcggcgacacaccgctggtggagtacacccgcgaccgcctgcaccgggaaacgctgcgcagcttcggccgttatgaactcaccaccgcttatacccctgccgggcagttacagagccagcacctgaacagcctgctgtctgaccgcgattacacctggaacgacaacggcgaactcatccgcatcaatcggtaccacccctgcggtgtactctga

SEQ ID NO: 138995 - DNA, 510 bp, Homo sapiens
atgcgggtgatatggtctggctctgtgtccgcacacaaatctcatattgaattccgcggacccacccggctgttgggataccgcgggagcgcccgctcaggggagccgacaccccgcaacgtggagctagccatagaattagaggagaagggaaaaggaaataaaagagatgggctctgctctgttgtccaggctgcaatatctgaagacacttttgtcatcacaactaagagaggtacttctggcatctactgggttgaatccacgggtgctgttaaacatttgcaaaacacaggccattggcttaacgctggtgcgcttcctgttcgtcggccccggaaatcagtaactggcagtatcgcccgccagcgtatcggtgccaatcagcgcaagggcgcttttggcttgcccttgcggtcagtgcgcaggttatgccactcaatttgtgatgaaaagtattacacagcgtttcaacgtggcttgccggacgcgcatgtacgccgtaggtag

SEQ ID NO: 138996 - DNA, 2316 bp, Homo sapiens
tcagcacagcccgcaaggttgaaaggcccaggaccagagcggtgcaacgctgtacgccagctcccgcagtgcgcaagggaccgctggcccggatttccgactggagatggaaggcttgcagtacagcgaaatcccgatgctggcaggcggtaatctacccgttaaagcaataccagaaccgccgttaacacccgcgcgtaattcgctggtctggtgtttttgcggcgcttgccttcgcagttgtgtgtccgtattccgtgtcctcgctcgctcgctgttgttcttgtgttcttccattgtgtgttctccgggtgctggtgtgtgtgggtcctttctccctgttcccgacgctttttgcgggcgttgctttgggcgggccggcttgcgctccggtttctcccggtttggcgtggggcccttggtgccggtgcctctctgttcgtctggttctcttcgctgtctttttctgtcttttctgtgagcgtcccctgtcttcccctcgcttccgttgcggtcctgtacttgtgggttccctttccgtccttcttgcgccagaggactaataccacggtcggcgcgatcgccaagccctgttggactaataatcgataaattacgtggtgtttgagtctgtttatattcgtcagcaagagcagtaattaacgtggtggcttccagaataccgccgccagcgcctaacacacaaagtgttgcttcgtcgggaatataattcaccgcttcctgtgccgacaggaccggcactcgtccattaatacgaggtggttttacaggtttcattgttaattcctgattcagatgtgattttcccacttcgctacgcaatctgaagtcaccattgcccttctcgcactcatccaccagcatgtcgacaatctgctgcgcggagtcatcgcagaagagttgccctaacgttttctcgtgccaggcgatgccgtgtttattgaccagatcaatgaaatcccactgggtaaaacgtgcgagtgcagacttacaaaaatgcggattctggctcagataagcgcctggttcgacataaaggttggtaaagttgcagcgcccaccgccagacataaggattttgcgccctggttttttaccattatcgatcagcagaacccggcgtcctgcctgaccacgaaggatggtctctgccttctcttgtcggtgtatgccatctgaaccttgcattgctgtcacagcaccttgtatgatggcaggacaggctccagcagagagaactgcacagtgaccactgtatttttcacgctcttccagggatccctgtccccgacatgaagagaggtcggttggcccctggggcctgcggggatgtgacttgtcatttaattctccttcaccactagacccccagggcctggtatgtggtgatcgctcagggcccattttcttcctttcctcctcctccaagggtggggaaagagcatcagaaggtataggtggccccaggcccaaacaatcctcctctatggggatgtagagcatgaatcctggctctcctgtgtgcgtcatgctcatcacccggatcccatttgcatagcccacactcatctcattacttgtcacatccgcgactgccagcagtgcttcaagtttgcgcagcatgcgatcggtacgccagtcttttgccagctcaacggcggctttgaccagatggccctgatgcatttccagtttacgttcaaacagttcgaacagcgtaaaagcatccgcagtaccgcccgcaaagcccgcgatgactttgtcgttgtacagacggcggacctttttcacgttgcctttcattacggtattgcccaacgtggcctgaccatcaccagcgatgaccacatggccgttacggcgtacgcttactatagttgtcacgagctgacccctgctcaccttctgggcctcggcacctgtgacagccacaatcctccggatacccttggcaatggcttcttccgtcacgatcacaaaagctcctgcatgactcgagttccgcaggtgcctgaatggcagaacacaaagtccatagtgaaagaggccctggcagcccttggctggggggtcacagcctgccagtaaatgttcgcgcagggaagtatcgccagccagggatcggtgagcttccagaatcgcgctggtagcaccgtcgctatccagcagacgaaactcaatgtttttcagtaccagcgtcaggccgttttccagtgcggattgctcggcgtcaacgcctttggctgcgggaagattacccagcgcatatgctctatttaactcccggtaaatcat

SEQ ID NO: 138997 - DNA, 2293 bp, Homo sapiens
ctgtaggccggataaggcacttgtgccgcatccggcaatcaatgcctgatgcgacgctgtcgcgtcttatcaggcctacaactattgccgacccgcggcgactcaaaatttctttctcataagcccgcacgctctccagccattcgctacctgctggcgtatcgtgacgttggcaatacatttcccagaccgcctgccacggcaacgatttctgctcttccagcagtgccagacgcgcagtgtaatcgcccgccgcttccagcttgcgcagctcagcggtaggttccagcaacgcacgcagcagggcttttttcatattgcgtgtaccaatgacccacgcgggcaggcggtgatagaggctcgaagaagtcaggccgattgcaccggtcaaacgattggacgccaactccgggcatgcctggctcacatccacgcctattatcggggagccgccgccgcctggcggtggccctatcgggcgcggttccgccacgtcggcatagggttcacccgtcccgggcggtccctctgtgcccttctgtcttgttctccgttctccccgcccagccacgacgcgccggcgcggccgctgatctccccgcgcccctgccgcggcgccccgcgcccactctttgttgcagcggtctggccgggaactcaaaggagactgccagtgataaacatctttcttcccgccgcgtggtccggtagtgccgaacaaaatatccttcaatccaccaagaatgccgtcatccaccgctacctctttccctttcgcgggaggattattttgctgctcggtactggcctgaaagcctttttgcaacatctcataggcggattcccggtccacctcatcctcatatttgccatacaccggagagtgattaatcaagccattacgctcatcttccgtcaccggccccatccgcgaacaaggcgcgatcaccatcgcacgctccaccacagaagggcttcctttcgcatccagaaaagagatcaacgcctcgccggtgcccagttcctgaatcgccttttcggtatcaaacgccggattggcccgcatggtttgcgccgctgccttcactgctttctgatctgccagcacgcagatccgcaactggctctcgccactcacgccaatatccgccagaatatcactattgcgctggggctgaaagggatcttcctcgtcaccacgtttacgaatcaaataacgataaggcagtccatccgtctctttagcaaccagttcgtgttccataaaggtacaaaacccaggaatatcgcgggtagtggccggatcgtcggcgataatcagcaacgtttcgccaggctgcatattgcgcacggttttgcgcaccatcatcaccggttccgggcagcgcaggccaagcgcgtcgagtgtgtggtcagggcacacttcctgtgttttcagaaccgctaatttctcttcgggaatggttaatttaagcgtttccgtaacgaatttatcgccatcgatcgtgccgcgaataaaattcatcgctggtgatccaataaatccggaaacaaacatattcgcgggttggttataaacggttttcggcgcacctacttgctgaacaatcccgtctttcataatcacaatccgcgtcgccatggtcatcgcttcggtctgatcgtgggtcacgtagatcatggtggtgttcagtttctgatgcagcttgctgatctctgcgcgcatttgcacgcgcagcttggcatcaaggttagagagcggttcatccattaaaaacacgcccgcttcgcgtacaatcgcccgcccaagcgccactcgctgacgttgcccgccggaaagcgcccccggcttacgtttcaggtactcacgcaggccgagaatttgcgccgcccagttcacccgctcatcaatcacctctttggcgattttttgcatcttcagaccaaacgccatgttgtcgtaaaccgtcatatgcggatacaacgcgtagttctggaacaccatcgctatattgcgtgctttggctggaacgtcattcattcgtttgccgtcgatcaacagatcgccgccgctgatctcctcaagcccggcgatcatgcgcagggtggtcgacttaccgcagtccgacgggccgtacaacacgatgaactcttgatcgggcatttccaggttgcagttccttaccaaatgcacctggttatcgtagatatctcgactatgtggaacgacaagtgagcctgttgattcctttgctaacgatttgccagaaggcgataacgcggacggtgacat

SEQ ID NO: 138998 - DNA, 4590 bp, Homo sapiens
ctggatagcgccttgccggaccgcaccaccatcatgaatttccgccacctgctggagcagcatcaactggcccgccaattgttcaagaccatcaatcgctggctggccgaagcaggcgtcatgatgactcaaggcaccttggtcgatgccaccatcattgaggcacccagctcgaccaagaacaaagagcagcaacgcgatccggagatgcatcagaccaagaaaggcaatcagtggcactttggcatgaaggcccacattggtgtcgatgccaagagtggcctgacccacagcctggtcaccaccgcggccaacgagcatgacctcaatcagctgggtaatctgctgcatggagaggagcaatttgtctcagccgatgccggctaccaaggggcgccacagcgcgaggagctggccgaggtggatgtggactggctgatcgccgagcgccccggcaaggtaagaaccttgaaacagcatccacgcaagaacaaaacggccatcaacatcgaatacatgaaagccagcatccgggccagggtggagcacccatttcgcatcatcaagcgacagttcggcttcgtgaaagccagatacaaggggttgctgaaaaacgataaccaactggcgatgttattcacgctggccaacctgtttcgggcggaccaaatgatacccattcgctacctgctggcgtatcgtgacgttggcaatacatttcccagaccgcctgccacggcaacgatttctgctcttccagcagtgccagacgcgcagtgtaatcgcccgccgcttccagcttgcgcagctcagcgaggcatcgaagaagtcaaggccgatatgcacccggtcaaacagatcgtgacgcacaatctcactggcaattgcctgggtttcatcatccagcagcactacgtgatcgctgtcccagcgaacctggactggcttgaacgttgcaagcaaagcaactcgggtggaagtgcccggcgtccaggcacagcgcagtctggctggctggttggcataccccatgtaaaactcattggagccaaccgtgtagctctctgcgccaatgccaaacaattggctctcaacggcgtcgatattgggtttagcttctcgcctgatcacctcatccagtgctgccagcagacgctgacgcggggcgagacggtcaacggtgatatctttcataccatccgggatccagatgttcatcaccgatggtgtgccgagttgctcgccaaaataggccgaaacgcgacggctggctttgcagtgatcaatccagaactggcgaatgctgtcctcactggcattacgcgctttgcccggataattgcctgtggcctgaatccccccggtcagcgaaccttccgggttttcaaaaccggaaacatcatcgcctgccagcagtgcattgaaacggctgcgccagctcatgcaacacatcggcatacagcagcgccagctgtcgaaaatgcagcgcgcaggcttggcaataatttgcggttggagatcctctggcaggttgggttgactggaaatcataaagcgaaagatctcaatgcggcgcaactggatgcactcgcacacgcgttactggagattcctcgattttcctacgctacgcgggggcaggtggatgagaataagcatcatggggcgctgtttcgctttaaggtttttcatcgagatggcgaacccccccacgccatacccgcacaaatagccagcagagcaaaaatcgacagcaggatttgcggtagcgggcgtagtgcccgcagtaagatttgtttatcgaaaccaagaccaatccgccagccaattgccatatacgccatcgccagcagccattccggtagttcgatgcatcgggatgagcatcgtgccggaaggaagacgcagcaggcatcccactgtaccggcaacgaccgcgagcaaaatagtaagcaggagattaatgctcactggcgggaaccagacgatatgctggttaaccgcttcagcgttatcgcccagcatcatgcgggtgaccagaacagcggcccccggcgacgaacagcactccgcagattttgccataaacgccaccaggcgaattatcttgcgcccggaaagaagaaatctccggagacgaagaacggccacaggtgggtgcgggaacctttgaaccgaccggttttggccaaagctcggctctttcgccttttccagcgcgcgcacctttctttcggcatcacaagccaattggaaaccagtggagtcaatggtgtaaccgtcacgctcagcttggtacagctcacgttttacggtaacgttagtgagatcatcagacatcaatgtcaacttacacggcacggcaatcacccgctgccactgacggcaatccagggtatcgccctctttagtgacaatcaggctgcctatcgcttccgggctgaccagcgcacgttgcggccctttggtctgccagtagcccgccagccagtccggcgcgggggttttcacgacattgttatagttttcgacttcggcacagcccgccagcaacaagagcgcgcctgcaattgcgagttttttcatcattcgtcctgcatgagaagaaaagaggattgtggcattaaagccctgatgtcgccagcctttcaagaggctacattcatgtcatggcagcaattcaaacacgcctggttgattaaattctgggcccccatccctgcggtcatcgcggcgggtattctctctacttactattttggcattactggcaccttttgggctgtcacgggtgaatttacccgttggggcggccagctcctgcaactgttcggcgtccatgctgaagagtggggttactttaaaattatccatctggaaggatcgccattaacccgcatcgacgggatgatgatcctcggtatgtttggcggctgctttgccgcagcgctgtgggccaacaatgtagcggtaccgacatggtgtaatggctgcggcacaagtcatgaggtgcgggtcattaccgcaccgccttactacccgcaatggcaggtgggcgagaactattccgcctggcgctacaaacgagaagagggggccgccacggtgtggcgctgcccgctgtatgtgccaaaacagccgagcaccctgaaacgcctgttgcatctgggcagttttgccgtcagcagtttctttccgctgatggcgcaacgtcgctggaagccggatcgcattattggcgtggtgccaacgctgttttgcgcgccgggaatgcgcctgctggcgaaactctctggtgcgcgtaccgtgctgcatattcaggattacgaagtggacgccatgctggggctgggccttgccggaaaaggcaaaggcggcaaagtggcacagctggcaacggcgttcgaacgtagcggactgcataacgtcgataacgtctccacgatttcgcgttcgatgatgaataaagccatcgaaaaaggcgtggcggcggaaaacgtcatcttcttccccaactggtcggaaattgcccgttttcagcatgttgcagatgccgatgttgatgcccttcgtaaccagcttgacctgccggataacaaaaaaatcattctttactccggcaatattggtgaaaagcaggggctggaaaacgttattgaagctgccgatcgtctgggcgatgaaccggtgaattttgccattgtcggccagggcggcggcaaagcgcggctggaaaaaatggcgcagcagcgtggactgcgcaacatgcaatttttcccgctgcaatcgtatgacgctttacccgcactgctgaagatgggcgattgccatctggtggtgcaaaaacgcggcgcggcagatgccgtattgccgtcgaaactgaccaatattctggcagtaggcggtaacgcggtgattactgctgaagcctacacagaactggggcagctttgcgaaacctttccgggcattgcggtttgcgttgaaccggaatcggtcgaggcgctggtggcggggatccgtcaggcgctcctgctgcccaaacacaacacggtggcacgtgaatatgccgaacgcacgctcgataaagagaactcgaaactctatccagttgtgatggcaggtggctccggtagccgcttatggccgctttcccgcgtactttatcccaagcagtttttatgcctgaaaggcgatctcaccatgctgcaaaccaccatctgccgcctgaacggcggtcaggctcggcgtcggtgccgataccatactgacgtgacccggcgcgaggaacgcatcgataccgttatccggctgttccagcaaactgcgcaacgtcgggataagcgtaatgtgctggcagaagaatttcaacgcatccatcggcgagtaaacgatgcgcacatcggcaccgcgtgcttttgcctgcaacagcgatccctgtttccccggcacgcgcatggcgtcgccaaaggtacagaagatgacttccggatggctggcaatctccacgcaggtgtcgattctacccatcggcagtacgcacaccgggcaccccggaccgtggataaactcaacgttttccggcagtaa

SEQ ID NO: 138999 - DNA, 1497 bp, Homo sapiens; identical to SEQ ID NO: 138868

SEQ ID NO: 139000 - DNA, 2640 bp, Homo sapiens
atgctgcacttattgccaaaacgctatgagttcctgggcacaaatggccggaaaagcggaaaaaagcaacaccgattaaatgctctggataaggattatccgattctagaaaaaaagcccggacgactctacgaaggtgcattgaaggcaattgcatttgaactggaaaaacggaatttaaatgacagtgtggccttaattggccaccgcatcgctcacggcggcagtatttttaccgagtccgccattattaccgatgaagtcattgataatatccgtcgcgtttctccactggcacccctgcataattacgccaatttaagtggtattgaatcggcgcagcaattatttccgggcgtaactcaggtggcggtatttgataccagtttccaccagacgatggctccggaagcttatttatacggcctgccgtggaaatattatgaagagttaggtgtacgccgttatggtttccacggcacgtcgcaccgctatgtttcccagcgcgcacattcgctgctgaatctggcggaagatgactccggcctggttgtggcgcatcttggcaatggcgcgtcaatctgcgcggttcgcaacggtcagagtgttgatacctcaatgggaatgacgccgctggaaggcttgatgatgggtacccgcagtggcgatgtcgactttggtgcgatgtcctgggtcgccagccaaaccaaccagagcctgggtgacctggaacgcgtagtgaataaagagtcgggattattaggtatttccggtctttcttcggatttacgtgttctggaaaaagcctggcatgaaggtcacgaacgcgcgcaactggcaattaaaacctttgttcaccgtattgcccgtcatattgccggacacgcagcttcattacgtcgcctggatggaattatattcaccggcggaataggagagaattcaagcttaattcgtcgtctggtcatggaacatttggctgtattaggcttagagattgatacagaaatgaataatcgctctaactcctgtgtggatatggacaccgcgcttggcaaactccaggaacaaaatatcgatagcctacgcagtgacctgcgcgaaaagggcatcccgtataccactgttcgtaaagaaaacaactacggcctgagcatcactttccgcgatgctaaagctcgtgatgaagccattgcgtatctgagcaagcgccatccggacctggtgattagcagccagggcagcaaccagctgcgtgcggtaatgagcgatgctcgtctgagtgaagcgcgtgaatatgcggtgcagcagaacattaatatcctgcgtaaccgtgtaaaccaacttggcgtggcggagccggtggttcagcgtcagggtgctgaccgtatcgttgttgaactgccaggaaacagacccgcaagtcagccagttgtgctgtacaaacgcgtaattctgaccggtgaccatatcaccgactccacttccagccaggacgaatacaaccaaccgcaggttaacatctcgctcgatagcgctggtggtaacatcatgtctaacttcactaaggacaacatcggcaaaccgatggcaaccctgtttgtggagtacaaagacagcggtaagaaagatgcaaatggtcgtgcggttctggtgaaacaggaagaggtgattaacatcgccaacatccagtctcgtctgggtaacagcttccgtatcaccggcatcaacaacccgaacgaagcccgtcagctgtcactgctgctgcgtgccggtgcgttgatcgcgccgattcagattgttgaagaacgtaccattggcccaaccctgggtatgcagaacattgaacaggggctggaggcttgccttgccggtctgctggtttctattctgttcatgatcatcttctataagaagtttggtctgattgcgaccagtgctctgattgccaacttgatcttaatcgtcggcattatgtcgctgttgccaggcgcaacgctgagtatgccaggtatcgcgggtatcgtcttaacccttgcggtggcggtcgatgcgaacgtactgatcaacgaacgtattaaagaagagttgagcaacggacgtactgttcaacaggcaattgatgaaggttattcgtggcgcattcagttctatcttgcgaagagaccaacgagcgccgtaatgttttttgtgttgtttcctttttatatttttttgtttttccacagtagcccagaaaccagcgcccaatacgagaaatatgcccccccccggggaaggaggcagcaggtccccggtgcagttatatttcacatcccgcactcacgtaagatgtacacccttttaggcggtacatccgtctcccgtatcactctccaatggaagttcgcagcgttgatacgctgcagatccacgcgttcggcattcccggcatatatttcggagcagtcgaagcagcctaaacgaatccaaagagctattcgggccaaaactcacgagctgcctaaacgtgtgcggcacaactgtgcttcaccttggaagcaattcaattacagcgggtatcggcaaagtatatgtatttggaccgctaactggcagtgccagcccctcgcaccgccgtgtcccgttcgcataggctag

SEQ ID NO: 139001 - DNA, 5956 bp, Homo sapiens
ttcgggcaggatgcgttttgcatcgttatcgtcggcaataccgatgggatgacgtccacggcggccagcgcatcggcgaacgagagttccagcacacaatccgttgtggcgttttttcgagtgtaaacgtgccgtgttcgtccgaaccgtggcggcaaaggcgtggctgatcaccagcagcaggccttcaacgaatacgcttgccttgcgagtgaactattatctcgagcgcggcttcaatatggacgacagccgcaataacggtgagttttccacgcaagaaattcgcgcctatttgccgctgacgctcggcaaccactcggtgacgccgtatacgcgcattgggctggatcgctggagtaactgggactagagcaattactctgcttctgccatccagttgctgtccttttgaattgtgccaatggacatcttcatagtgactggctgtgagaagacactcaattgaaacgctagttccctctttggctatgatgacatcatcatccgagtgggaacttgctgagagttcaaagcttgagggaaaggatgcattgtaagaactacgatttgcttccagtgaaaccatttggtcgaagtccacatcttccaaaacaaaagcagctggcacaataatacttgccactaaagtgaataagcaacaatgtagtttctgcctgcagagaggctccttcttgttctcttcggcctttgcatcctgctgcgcagcatctttgggtgtgtttactgctaaaacatcattgatggtggagccaaccaccatgatcttggccccactggtcacttttatttctctcaatgttttatcctcggggacgagtcccttatacatgactttctgcatggcaggcgggagaccttgttgactgaaaccaccccagatcccacaacagcctagacccctccgtcggcccagccaccccagcacaaacagcatgagagttgctgctgtgtctctgctaccactatgccaggctgcctttctgtttttaactagcctggaccgaaagggtatcacgctttgatctgccagatgagttattcccgtggcctgcattgctttcgttaccgcttcttcatcctctttgcgccagcgggtaaacagcggttgatgcggataacgtccacgcgccaccagctcctgcacggtgatatcgcccggcgtggtagcattttgcgccaacagaccaatccggcgtgcaacctctttactggcgtaatgttgaatgtgctcgccatccagccagacatgcccatgagcaggcgtcatcaggcggcccaatatcgcatttcgcgtttctttgaagcaactcagtgagttgtacttggtcggtacatccccggcccccgcgcgaacgttaaccagcgcctggaagctaaaccagatgccaatagaacaggcgagaaaaccggaaaaacggtggtcaatttctaatgctttacggccaatcgacatcgcgcgaaaagcgacgaagaataccattaaaagtgccagcaccacaccgacataccccagttcttcgccgataatggcgaaaataaagtcagtgtgcgcttccggcagatactccagtttttgtaccgagttacctaaaccttgcccccaaagttcgccgcgaccaaacgccatcagcgattgcgttaactgatagccgctgccaaagggatcttcccacgggttccagaatgcggtaacacggcggatacggtacggttcggcgagtatcagcaacacaaccgctgaaatgcccataccgataatggcaatgaactgccacaatttcgctcccgccaggaacaacatcgccagcgtagtcacaaacaacaccaccaccgtaccaaggtctggctgtgccagcagtaacactgccaacaccagaatcacgcccatcggtttcaggaagccgcgcaggttattacgtacttcgtcgcctttacgcaccagatagttggcgatatagcaaaacagcgacagttttgtcagctccgcaggctgggaacggccgtagccccatcggatgttctgcatacccagggttgggccaatggtacgttcttcaacaatctgaatcggcgcgatcaacgcaccggcacgcagcagcagtgacagctgacgggcttcgttcgggttgttgatgccggtgatacggaagctgttacccagacgagactggatgttggcgatgttaatcacctcttcctgtttcaccagaaccgcacgaccatttgcatctttcttaccgctgtctttgtactccacaaacagggttgccatcggtttgccgatgttgtccttagtgaagttagacatgatgttaccaccagcgctatcgagcgagatgttaacctgcggttggttgtattcgtcctggctggaagtggagtcggtgatatggtcaccggtcagaattacgcgtttgtacacatgaaccgtagaaaacaacgcggcagctggcgcagaggcgttcgcatgtgcctgcggcacccagccgtgcagcggaataatcccggccagcaggccaaagccaatcactccgagcagccagatatcggaaccgagcggcagctgttgcatacgcatatccagcaggcgcagatccagcgtgccgtaacgctgccacagcagccagcaagcaatcgccagcagcagagtgccaagacgccccagcgcaaaccacagttgccctctttgctgttgcgcgcacagggccatgatttcggccattaccacgaacatgccgaggttgctggcaatgacggcgcagacggcggcagccatcaacatattgatctgcaagccgttgcacttcacctgcgcgtggcgatgccagtcaatgttgtagagggcttttgaaagcttcagcaactcttcaacgttatttttcagcaacggaccgaccacaatactcgcgccatcctgctgaacctggcttaagatctggctaagtggttgtgatgaggtatcgtagattttcagctctgcggatggatttgcgggtgcgctggtgtacccggggtgttctgtggcccccttcttgtgcctggggccccctgtgtggcgttgtaccagggggtgtccgtgtccctgggcgttttgatgcccccccctggagtttccttgtcggaaattttccccggtgattttacccggccgctgttggacctgcgcgccctggggttgcccgccttcgcctcggcatagcgcggttaccggactccgtaagccgcacacgcggaagttccaagtggaaccgaagggaaactccgtgataggaggccgccccccaaagacccccctgtcctcgcccttcgcgccactgccgccgttgtggcccgaagtgccagtcaaaaggcaagctggggccatcgaccaagggttttgcctcggaatgggaaaagccggggccatgggaagctccataccgctaattgaaatcgtggaggttagcctccacgcgctggatctggcagggcatcctggagcgaaagtggcgaattgagtgccgtagtagaggaagaatggtttatcgctcttcgccatcttgtcgaggaacttaacgccatagtccatccagcgttgatccagatcttccatatatttcggcgtaatgtcggcaatggcctgacggtgggcggcggacatatcgcggcaggtcgagggctgtgaaagcggtttagtgattgaagcgctacgtattgtgtgaggaattcttgtcgttgtcagcgcctgagaacttagttgggagcggacgtttacgtcgaatctctcgtttgggaccccattctggcggaagcgcaaccggatcgtgaaatcgaaaaacgcggcccggcgattgcccaggcgttcgacgctgaaggcaaaccgagcaaagcggcagaagttgggcgcgtgttgcgtattaccgttgaaccaggtcgggtgagaagaccgttgccttgtggcagctatcgacatcacgaatggcgtctgtccacgccatacgtagatttcatcggctgccgtgcctgtgctgagggtggcggccggataggtgcggagcttcctgaacgaggcaggaggggtgcgaggttcaggggcaatcagtttttccagcgatgcaccttcgcgtgcgctgatcgacatcccctgaataatacaattaaggaattctgccagatgtgtcacgtcacagtggggcgggatttccccgcgcgcttgtcgttgacataaaaactgctgcaaagtgcgctcttgcatcgcatggcgtgatttcaacgtattggcgatatctcctgaatctggggagagggtggtgcagttgttgatcatgaagcagcctgccggggtgtctttgctggtaaagcagttggcgatggcagcaaaatagtcagccagcgcagactccacgcttttctcttcacaaaacagctgtgcttcatgcttagcggcaaaacgatcgatatagcggtcgagaacggcacgaaataacccctctttgttggtaaattccgcgtatagcgtgggcgctttggctccggtcgcttcgacgaggtccgcaagagaagtcgcttcataaccgtgttgccagaacaatttcatggccttatcaagcgcggcatccctgtcgaacacttttgggcggccacggcttttttttacacattgtgttgagtcagttgccatgcttgagttaccctttgtcgagctttgctggccttttggcccggagttcgatgtttttaaaattggcggcaagatttttatgctgtcgtcggagctacgcggcgtcccctttatcaatctgaagtccgatccacaaaaatccctccagcactttaaagcgcaggttttccacatcatactgatgccgtaacccattatcagcatcaggatcaccgttcccatcagcgccagcgtccgaacgtactggatcgcgtcgcagttccagcgcttcgcggcggctgtagcacggtgcggcgcttcggcttcgttgctctgccctgccgcttcctgcaaataggcgataaatgcctcttccagactggcggctccgcgtttctcaaccagttcctgcggtgtaccgctggcaagcacttttccggcgtgcatcagtgagatgcggtcgcaacgttccgcgcattttacacgcatatccgcgaccatagcggcatctttgcggatccccgcatcgccatcatgtggcccccagtgcgtcggcattttgccaccgataaagcccatctcttttgccagatccggacgcgcacctgtggcgtagaactgaatctcatcacgaacagcgccgctccggctctggttttcggaaatcatcgggtcgaagctgcgcagcggcgcatgtttacgcacaaacagatgcgttttcgcgccgaggccgttaatcacgcccgccagctcaacggcgatgtaacccgcgccaacaaccgccacgcgctctggcaaagcaggaagggcgaagaagccatcagaatcaataccgtattccacgcccggaatatccgggtggctcggacgaccgcctgtggcgatcagaatatgatcggccgtgatggtttcgccgtttacctccagcgttttggcatcaacgaagcgggcaaagcctttgattacatcaacgttatttttaccgagcacgttttcataggaagtatgaatacggtcgatataggcggtacggctggcgatcaacgtttcccagttgaatttattgatagtggtatcaaaaccataatccgggccgtacatatggatcgcttcacggatttgcgccgcgtgccacatcacttttttcggcacacagccaacatttacgcaggtgccgcccagctctttggcttcaatcagcgcacatttctggccgtacatagccgcgcggttgatggaggcgataccgccgctgccgccgccgatggcgatgtaatcatagtgtttagtcat

SEQ ID NO: 139002 - DNA, 3777 bp, Homo sapiens
atggcgaagcgggcggtcagcatctgctgtggcctgactcttggggaggcggccccgcgaggcagcggggctgagggcccctggttaatatctaactgcaatctcgcctccagcctggctcgcagttctgtgaacccgcccccagctcagggagacatatttgagcatttcttcctttctccttgccgacatgcaggcatggcggtcagcgcctcgtcgttgttctacgtgcgctatgtgttaaatgataccgggctgttcactgtgctggtactggtgcaaaacctggttggtactgtggcatcggcaccgctggtgccggggatggtcgcgaggatcggtaaaaagaataccttcctgattggcgctttgctgggaacctgcggttatctgctgttcttctgggtttccgtctggtcactgccggtggcgttggttgcgttggccatcgcttcaattggtcagggcgttaccatgaccgtgatgtgggcgctggaagctgataccgtagaatacggtgaatacctgaccctgatgaatcccctaatgatttttatcaaaatcattaagttaagtctggcaaaaacgctgctgttctgcggttccggcaatgtactgctcaagtacggcacgcgcgatctcaacgtcgtctgtgggatgctcaaaatcatgccatttaccgccgtgctgtttggcggcggtgcgctggcgctggcagggatgccgcccttcaacatttttcttagcgaatttatgaccattaccgccggactggcacctgcatgctctgcacgtcccagcgaagcggagctgctggagcttatcgatacgctgaatgccgacaacaccatcgatggcattctggttcaactgccgttaccggcgggtattgataacgtcaaagtgctggaacgtattcatccggacaaagacgtggacggtttccatccttacaacgtcggtcgtctgtgccagcgcgcgccgcgtctgcgtccctgcaccccgcgcggtatcgtcacgctgcttgagcgttacaacattgataccttcggcctcaacgccgtggtgattggcgcatcgaatatcgttggccgcccgatgagcatggaactgctgctggcaggttgcaccactacagtgactcaccgcttcactaaaaatctgcgtcatcacgtagaaaatgccgatctattgatcgttgccgttggcaagccaggctttattcccggtgactggatcaaagaaggcgcaattgtgattgatgtcggcatcaaccgtctggaaaatggcaaagttgtgggcgacgtcgtgtttgaagacgcggctaaacgcgcctcatacattacgcctgttcccggcggcgttggcccgatgacggttgccacgctgattgaaaacacgctacaggctcgggtcccagtttgcaacggtttcgccgccagcaacctgttcgccatcgcctttcgccagtaccgcaccgtaaggtactttgtagctttctttagtacgaccgaattcgtcgatcagtttcagttcagtattacgggaagtgataaccagtttaccgctggagttcacaaccgacttcacgttgctgagcttgatgctacctttgtttttcacttggatgctggattcagcagccgcacgagatgccgcaccaccgatgtggaacgtacgcatggtcagctgtgtacccggttcaccgatggactgtgccgcgataacaccgattgcttcacccttgttgatgatgtggccacgcgccaggtcacgaccgtagcagtgcgcacatacaccaaagtcggtgtcacaagatacaacagaacgtactttaaccgcgtcgacagagttctcttccagcaggtcacaccactgttcgtgcagcagcgtgttgcgcggaacgaggatatcagcagtacccggcttcagaacgtcttcagcagttacacgacccagtacgcgatcgcgcagcggctctttaacgtcaccaccctcgataaccggagtcatcatgataccttcatgggtaccacaatcgtcttcggtaaccaccaggtcctgcgccacgtcaaccagacgacgagtcaggtaaccggagttcgcagttttcagtgcggtatccgccagacctttacgagcaccgtgggtggagatgaagtactggagtacgttcagaccttcacggaagttcgcggtatgcaatggctggcatccggcgtgctggaatgggtgagaaaactgttctggacggctgaaacaccctggcaaatgttgattgaagaagctcgtctgatcgcgcctggcgcggatggcgtaaaaatgcagtgtgatttattgtcgtgtcagaacgctggctggcaaggagtgacgcttaataccacgcgggggcatttctatcgcgcggcgctggaagggttaactgcgcaattacagcgcaatctacagatgctggaaaaaatcgggcactttaaggcctctgaattattgttagtcggtggaggaagtcgcaacacattgtggaatcagattaaagccaatatgcttgatattccggtaaaagttctcgacgacgccgaaacgaccgtcgcaggagctgcgctgttcggttggtatggcgtaggggaatttaacagcccggaagaagcccgcgcacagattcattatcagtaccgttatttctacccgcaaactgaacctgaatttatagaggaagtgatccgcgctgatggcctgttggtgagcgacttgctccaggcgattatcccgttatttgaactggacagttatgcaccgccgctggtgatgatggcggcggtagaaggtccggcggcatcagccattatggcggggatttccgaaccggcgttatatggcgtggcgatccgcctgaaacgtccgcttatcgccagtcttatcagcggttttatttgcggcgcggttgccggtatggcggggcttgccagccactcaatggcagcgccggggctatttaccagcgtgcagttcttcgatccggcgaatccaatgagcatcgtctgggtgttcgcggtcatggcgctggcggtggtgctgtcgtttatcctcacactgttgctcggctttgaggatattcctgttgaggaagcggctgcccaggcgcgaaagtatcagagcgtacaaccgaccgtcgccaaagaatctgaaggtgcgttccgtgaaggtgacaaaggtctgaccactgtcgatatgatcccacacggcgagcatcgaatggcggtgaaactggggctggaaaaacgttttcagttgcgagatgacgagttttatcccagccatgaggcgacggatttttatcatcgttataaagaagatatcgccctgatggcagagatgggattcaaggttttccgtacctcaattgcctggagccgtctctttccgcagggcgatgaaatcacgcccaatcagcagggcattgctttttatcgttctgtctttgaagagtgtaaaaagtacggtatcgaaccgctggtcacgttgtgccacttcgatgtgccgatgcatctggtcaccgaatatggctcctggcgtaaccgcaagctggtggagtttttcagccgctacgccagaacctgctttgaagcatttgatggtctggcaggtcttccgcttggatatcggccagtacacggcttcatgggtgagagagacaatggactcgaccatatagtcaacgaaatgaatcccttcaatcggttcccggaaacgggccagcgccctctcctggtcctgtaa

SEQ ID NO: 139003 - DNA, 2952 bp, Homo sapiens
atggggacttgggaggtcgatggcttgaactttgctttgcaatatcagggtaataatgaaagtggtggaccattcgggcaggaaggttccggtagtggtgatggccgtagcctttccaaagaaaatggtgatggtttcgcccaggctgttggcgcagctgacagtctgaaaacgtttatggaaaccccgctcgcccatccgcaacgtggtgaggcggaattagcatcgaccgatccggtgaccattgaggccgaggagctgtttatcacgtcgccggaaggtaaaacgctggccggaccgctgaactttactttgccagcaggccaacgtgcggtgttggttggtcgcagcggttcaggtaaaagctcactgctgaacgcgctttctggttttctctcatatcagggatcgctacgaatcaacgggatagaattacgcgatttatcaccagaatcatggcgtaaacatctctcctgggttgggcaaaacccacaattaccggcagcaacattgcgggataacgtactactggcgcgacctgatgccagcgaacaagaattacaagcagcgctggataacgcctgggtcagcgagtttctaccgctcctcccacaaggcgttgatacgcctgttggcgaccaggctgcccgcctttccgtggggcaggcgcagcgcgtggcggtggcccgtgcgttactaaatccgggtgccgagctcagggtcgtatcacttggagatctcaatgcgctgggtaatcttcccgcagccaaaggcgttgacgccgagcaatctgcattggaaaacggcctgactttggtcttgaaaaacattgagttttgtttgctggatagcgacggtgctaccagcgcgattctggaagctcaccgatccgtggctggcgatacttccctgcgcgaacatttattggcaggcgtcagcgccggattaagctgcgccgaagcaattgttgccagcgcgaatcacttttgcgaagagttttcccgttccagcagcagctacctgcaagaacgtgccctggacgtacgcgacgtctgcttccagttactccagcaaatctacggtgagcaacgcttcccggcaccgggcaaactgacgcagcccgccatttgtatggctgatgaactgacccccagccagttcctcgaactggataaaaatcacctcaaaggattgttgctcaaaagcggcggcaccacctcacatacggtgatccttgcccgttcgttcaacattccaacgctggttggtgtggatattgatgcccttactccgtggcagcaacaaacgatttatatcgacggcaacgccggggcgattgtggttgagccaggggaagccgtagctcgttattatcagcaagaagcccgcgtacaggacgccctgcgtgagcaacagcgtgtctggctgacccaacaagcccgtaccgctgacggtatccgcattgaaattgccgctaacatcgctcactccgtggaagcgcatgccgcattcggcaatggtgcggaaggcgttggtttgttccgcactgaaatgctctatatggatcggaccagcgcaccgggcgaaagcgagttgtacaacattttttgtcaggcgctggaatccggcaacggacgcagcattattgtgcgcactatggacattggcggcgacaaacccgttgattatctgaacattcccgcaaaggcaaacccgttcctcggttattgtgccgcgcgtatttatgaagagtacgcgtcgttgtttaccacgcagctacggtcgatcctccgcgcctccgctcacggcagcctgaaaatcatgatcccgatgatctcctcaatggaagagatcttatgggtgaaagaaaaactggcggaagccaaacagcaactacgtaacgaacacattccgtttgatgagaaaatccagctcggcatcatgctggaagtgccgtcggtgatgttcatcatcgatcaatgctgcgaagagattgatttctttagtattggtagtaatgacctgacgcagtatctgctggcggtggatcgcgataacgctaaggttactcgtcactacaacagcctgaatccggcattcttgcgggcgctcgattacgccgtgcaagcggtgcatcgccagggcaaatggattggtctgtgcgcgcctgcaagcgagtggtatactcttttgccgcgacaggatcatgaattgagcatgggccaatcacaaccaacaaggcgatcagtcattacctttcaggatcttatggatcgcttttcgggcatgggcaaccgtattcgcggcattttcagtagcggggaatttttccagcaatgcgacaggaggaaccttgccagcggtgccgcactggctgccgatagcggagcgcaaactaataacggccaggcaaacgccgcagctgatgcgggccaggtagcccctgacgcccgtgaaaatgtcgcgccaaataacgtcgacaataacggggtaaataccggttctggcggcacaatgctgcattcggatggttcttcaatgaacaatgacggaatgaccaaagatgaagagcacaagaacaccatgtgcaaagatggtcgctgtccggatatcaataaaaaggtacaaaccggtgatggcatcaataatgatgtcgataccaaaaccgacgaagataataatgctcgtccggactcccctgataacttccacgactacctacaggacgtgactgacgtgcacggacgacactctgctatgacacccacggagacgtgcggacgggttgtagacatgacgactgacgactatgtgggtgtacccgacgactacgacacttctgatcacatccattggctccatcagcatagtattcccttgatggttgcacacatttgtatcatcgctgcatccaccacatatcccaccaccacaccatcacagcagacctga

SEQ ID NO: 139004 - DNA, 2568 bp, Homo sapiens; identical to SEQ ID NO: 136631

SEQ ID NO: 139005 - DNA, 2323 bp, Homo sapiens
atgttcacatacccgcattcgaagttccgcgtcaaccgctttgtgggtcaagtactactgatcgagttttcgattttactagacgggggtcgtaccggcttgggtcattccttatctgtttggtgcatctccggcgattgttcttctttcctgcaaggaaaaccaacgtcgctgccgttgagaaaaccgagtgcgattatttgttctgatagtctttcaggatctgccgacctgctacgtaatcataatttcgtctgtaccgccgccgatacgttcacaacggacatcacgccagaagcgggagacgcgcgcctcatcggtatagcccagaccgtccgtcatctagaggatcccatgcgggcatggaagagcattcacaaaagttgtgaaatcctggacccgatccacagggctcctgtcaaggaaaacacccacccagcacgcaagattaatatatccgacccggctgctggcgctgtagcccgcattcggtacgaaggtgtgttatctgtatgtcgtgcatcagcatcagcttatgtgtcgcgctcacggacgattactgtcgcctgttggtacgttagcaacacaggggtgacgggcgctaccattggtgtaaaacgacagcatcgccacgcgcggctcttctccggtgatggcgcgccaggtttcggcactggcaagcgcgatatccgccagctgcgccgccttgtacgcatccagattcagcgaactttctttgctgctgtacttcacgtcccgacgccttggtccagggctattgatgccgccgcccttctgaccgtcatcgacgttaaagtgctgactgcctgcgcctgccaggcttgccgtacgctggctcttcgcgtagctcaggtgatcgaccggtgcagcaaccctggtgacatcatgtctagcgtcgcgcggaggtactggttcatctcgcgttggtctgctaagcgggactgcgcggtgagctacgatcaagaccctggtcaggcgcagcgttcatgtcggtcatgtctggtcgcggttgatcgggggctatggctgtccgcgtattgccggtcactcatgacgcagactctgctacctgacgatgtgccacgcatattgccgaatgcttcttcgccgagccgtttgcggtgcctgcagcatctgggtaattaccgcctgctggatttgcgcaaactcatctggcttcatcgctcgcaatttagcctctgcggttgggaaaaacgccttgttaaggatctcacgcgtattcaggacactgggcgtgcgaaagagattctgggtgcgacggcaacgctggaattccgtctggtaaacaccaacgttgaccaggccgctgcggcatccggtcgcgtaccgggcgactctgaagtgaaacagacccgcgaaggtcagccagttgtgctgtacaaacgcgtaattctgaccggtgaccatatcaccgactccacttccagccaggacgaatacaaccaaccgcaggttaacatctcgctcgatagcgctggtggtaacatcatgtctaacttcactaaggacaacatcggcaaaccgatggcaaccctgtttgtggagtacaaagacagcggtaagaacagatgcaaatggtcgtgcggttctggtgaaacaggaagaggtgattatcatcgccaacatccagtctcgtctgggtaacagcttccgtatcaccggcatcaacaacccgaacgaagcccgtcagctgtcactgctgctgcgtgccggtgcgttgatcgcgccgattcagattgttgaagaacgtaccattggcccaaccctgggtatgcagaacattgaacaggggctggaggcttgccttgccggtctgctggtttctattctgttcatgatcatcttctataagaagtttggtctgattgcgaccagtgctctgattgccaacttgatcttaatcgtcggcattatgtcgctgttgccaggcgcaacgctgagtatgccaggtatcgcgggtatcgtcttaacccttgcggtggcggtcgatgcgaacgtactgatcaacgaacgtattaaagaagagttgagcaacggacgtactgttcaacaggccattgatgaaggttatcgtggcgcattcagttctatcttcgatgcgaacatcaccacgctgattaaagtcatcatcctgtacgcagtgggtaccggggcaattaaagggttcgcgattactaccggtatcggtgtggcgacgtcgatgtttaccgcgattgtcggtacgcgtgccatcgtaaacctgctatatggcggcaagcgcgtcaagaagctgtcaatctga

SEQ ID NO: 139006 - DNA, 1373 bp, Homo sapiens
atgtgcagcgaaattcaagctgcgtgtcgggaaacggcgcaaccgatcccggaaagtgatgctgaactggcgcgctgcattttcgacagtctggcgctggtgtatgccgatgtgttgcatgagctggcgcatctgcgcggtgaagatttctcgcaactgcatattgtcggcggaggctgccagaacacgctgctcaaccagctatgcgccgatgcctgcggtattcgggtgatcgccgggcctgttgaagcctcgacgctcggcaatatcggcatccagttaatgacgctggatgaactcaacaatgtggatgatttccgtcaggtcgtcagcaccaccgtgaatctgaccacctttacccctaatcctgacaattcactctacacgacagacaaaggagctttgcgcatgaccactcaactggaacaggcctgggagctagcgaaacagcgtttcgcggcggtggggattgatgtcgaggaggcgctgcgccaacttgatcgtttacccgtttcaatgcactgctggcaaggcgatgatgtcagcttgcacttcgtttatagctcacgcctacatatgccgacctgtagccggataggcacttgtgccgcatccggcaatcaatgcctgatgcgacgctgtcgcgtcttatcaggcctacaactgttgccgacccgtaggccggataaggcgctcgcgccgcatccggcagtgtttacccgcggcgactcaaaatttctttctcataagcccgcacgctctccagccattcgctacctgctggcgtatcgtgacgttggcaatacatttcccagaccgcctgccacggcaacgatttctgctcttccagcagtgccagacgcgcagtgtaatcgcccgccgcttccagcttgcgcagctcagcggtaggttccagcaacgcacgcagcagggcttttttcatattgcgtgtaccaatgacccacgcggcaatgcggttgatagaggcatcgaagaagtcaaggccgatatgcacccggtcaaacagatcgtgacgcacaatctcactggcaattgcctgggtttcatcatccagcagcactacgtgatcgctgtcccagcgaaccggacggctgacgtgcagcagcaactgcggcacatacagcatggcggcggaaatctggtcggaatcaactcgtcgggtgaaatgccgggtccagcaaggcagctggggtccattggcacagtccagcagtccatcatcaaccacccttactggcagtgcacaggcaacaactccccatattaccgtagccgtagcaacattgtccatagggccatatgcagcaccccagccacatcgtcacaatccccacaccgcaggccagtgcaca

SEQ ID NO: 139007 - DNA, 3441 bp, Homo sapiens
atggctatctcttctccgctgctggaagatatcgacctgtctggcgcgcgcggcgtgctggttaacatcacggcgggcttcgacctgcgtctggatgagttcgaaacggtttctgtgacgttccaggtcgatattcacccggcagcaaaaattggtcgcggtatcatgcttgaccacgcgacaggcatcgtcgttggtgaaacggcggtgattgaaaacgacgtatcgattctgcaatctgtgacgcttggcggtacgggtaaatctggtggtgaccgtcacccgaaaattcgtgaaggtgtgatgattggcgcgggcgcgaaaatcctcggcaatattgaagttgggcgcggcgcgaagattggcgcaggttccgtggtgctgcaaccggtgccgccgcataccaccgccgctggcgttccggctcgtattgtcggtaaaccagacagcgataagccatcaatggatatggaccagcatttcaacggcttcatacaccactaccgacaccgcattggacagattcatgctgcggctgtccggcacacatcggaatgcgattatctgatgttcggcccaggaaacacgcggcactgccagcctggcttccggcaaatcgtcaccggtgatcacgatgtaccgatagccacgtcggctgacgggatcaaaccagagcacttcaaaaactgggttgaatgggcgaaagccaatcagctcggtctggattttaacccctcctgcttttcgcatccgctaagcgccgatggctttacgctttcccatgccgacgacagcattcgccagttctggattgatcactgcaaagccagccgtcgcgtttcggcctattttggcgagcaactcggcacaccatcggtgatgaacatctggatcccggatggtatgaaagatatcaccgttgaccgtctcgccccgcgtcagcgtctgctggcagcactggatgaggtgatcagcgagaagctaaaccctgcgcaccatatcgacgccgttgagagcaaattgtttggcattggcgcagagagctacacggttggctccaatgagttttacatggggtatgccaccagccgccagactgcgctgtgcctggacgccgggcacttccacccgactgaagtgatttccgacaagatttccgccgccatgctgtatgtgccgcagttgctgctgcacgtcagccgtccggttcgctgggacagcgatcacgtagtgctgctggatgatgaaacccaggcaattgccagtgagattgtgcgtcacgatctgtttgaccgggtgcatatcggccttgacttcttcgatgcctctatcaaccgcattgccgcgtgggtcattggtacacgcaatatgaaaaaagccctgctgcgtgcgttgctggaacctaccgctgagctgcgcaagctggaagcggcgggcgattacactgcgcgtctggcactgctggaagagcagaaatcgttgccgtggcaggcggtctgggaaatgtattgccaacgtcacgatacgccagcaggtagcgaatggctggagagcgtgcgggcttatgagaaagaaattttgagtcgccgcgggtaaacactgccggatgcggcgcgagcgccttatccggcctacgggtcggcaacagttgtaggcctgattaccaccaggagcgatatcccacgggtgagcaattaacttcacctgcgagagcaccgggcagttctggatagcggtaaacaacggcgcatcctgacggaactctggcgtacggcccatgactgccgccagatcaaagcggaaaccatcgacgtggcaggttactacccaataacgcaggcaggcgctggcgtaatccaccaccgccggatgactcaaattgagcgtgttgccgcaaccggtccagttgtgataatcgccgtcttctccgctaacaaacatacgccggattagaacaaacatcgcgcccggctgtaacacattggtgcttttcccctgcgtttctataaggggtaatttccacatgtacaatgggtatcgttttaagtggtgtaccctatcgtgcttttgcagcaactgaaaaaagctgcggcgctcgaagatttccagctgatagcccgcactgccactggcgaaaatgcgggctttgccgttaagggtgaagttgagatagtcaatatcacgcaggatggtcctgcctgaaacgccagtctgttgcgccagctcgccaggcgtgcgcggctgttgctccagcagatcgacaatctgacggaactggctaaacgcgttgactttctccgcagttaaggtcgtcagaaaaccccgtatcagcgtgagcagagcttcgtaatcggcttttgaaatcataccgctgttggcgtgcagataacgagttggcagacacagcgcgacaaccggacgcccgccgcccatcacgttgtagcgcccgccatccgtcgcaccggttttcatggtggaaaattgcagcggtaaatcgttatgtgcggcacagctttttaacgctgctaccaatttctggttggggaagtagcgcttgtcaaacagcatcaagccccgcccctggcccaagtttagcgggtatttaatggtatcaatgcccggaacatctcccgcttcgggggtattcaacacgatcacgacgtccggtttaatggtgttccgcttacagccatgcctgaaaccctgtgtagcccactggatttgtgtgtgccaagcaccaagcaaggcatcatagagtccggtaagctgccggtccagggataggtcactttgacacagctcttgccaggctgctaaaagctgcacgttcatctttgaaataaacaacagctgttgtttgatgcgcatgaacaccggaatcgaagccaactggtgggcctgctggttaaacccaatcaacgctgctcgaggtgcagccaaccaggttgtgggtgcttgaccctttttccgtatggtttccagccagtaaaccgcctcttcacctaacggcaccagacgctctttgttgcctttaccaatgacccgtaccacgccctgacgcaggctgatatcactcattgtcagtccgaccagttcagagacacgcagcccggtagcatacaacacttcaagcatggctttatcgcgtagctccagtggctgatcgattaatggtgcctgtaataaacgttcgacctgcgcttcgcttaaatcttttggcaaacgctggggcaatttcggtgaagcgagatgcgcactgggatcgtcttcacgaaacttttcgcgataaagatactggaacaatcggcgcactgcactcagcaaacgcgctgagctggtggctttatacccgccctccagccgttctgccagtaatgcctgcaaatcgtcactttgcgccgtcgccagcgtcaacccgcggtgatgcaaccactccaccat

SEQ ID NO: 139008 - DNA, 6000 bp, Homo sapiens
ctatgcgtatgtgaacgcggaaatccgcgagaaaggcgacacctacggcaatctggtaccattctccccgaaacataaaggcacgctgggcgtggactacaagccaggaaactggacgttcaatctgaacagcgatttccagtccagccagtttgcggataacgccaatacggtgaaagagagcgccgacggcagtaccggccgcattcccggcttcatgctctggggcgcacgcgtggcgtatgactttggcccgcagatggcagatctgaacctggcattcggtgtgaaaaacatcttcgaccaggactacttcatccgctcttatgacgacaacaacaaaggcatctatgcaggccagccgcgcacgctgtatatgcagggctggaatgtgattatgttggcatttatccgttttctttttgcaggcctgctgctggtgatcagccacgcctttgccgccacggttcaggacgaacacggcacgtttacactcgaaaaaacgccacaacggattgtggtgctggaactctcgttcgccgatgcgctggccggcgtggacgtcatcccgatcggtattgccgacgataacgatgcaaaacgcatcctggcccaattgtgtggcacctgaaaccgtgggatccggggaaacagacggcacgatgcttgaaaacacatgggcaaccagcagccaggcaggattgaccgcagcagttgctcccagccgatggacggatggagcaaccggcatcgaagggaacgttcagcccagagaggcaaagctgccgtccagtcccgatttcacgtggattgctgtccgtgaatggcaaggcctgttcctttgtggtcgtcgtgggggctgcgcacctcttatttgccaaagccgctctcggttaacccatcgcgtaacgatggatccgcgttgcgggaacccatccgcttggggtgacccgggggactctggcagggcctgcctttgtgcgtctgtcgctcgtcttcttgctccgccgcgtgctcgctggttcatcgcttctgccattgctgatggggtaacagaaacagaggttttacttcctgacggcgcttcagaacatgattattcactgcgcccatcggatgtaaaacgcttacagaacgcggacttagtcgtttgggttggcccggagatggaagcgtttatgcaagaaaccggtaagcaaattaccaggagcgaagtcagcccgctctgtcgccgcgtggcgtttaataagtttaaccgcgacccacaaccgcgttatgattggggtcgactcaccgttctttactctggctcgtcgctgtctggcggccgttatgttgttatcatccgtgagtgccactgccaattgtcaaaaccattgagactggaacagaacgaaattcgttcgctcttacctgaagccagtgagccgattgatcaagctgcacaagaagatgaagccattccccaggacgaactggatgacaaaatcgccggtgaagcgggcgtgcatgaatatgttgtttccactggcgatacgctaagcagcattctcaatcagtatggtattgatatgggtgatatcacccaactggctgcggccgacaaagaattgcgtattacaagttgaagttagcggccgtctgggcggcagcggaaatcgcacgtaccgaatgatcgaagcagcacgtcgtgctatgacccgtgcagttaagcgtcaagacggtgatgtaatgaaagcaaaagagctgcgtgagaagagcgttgaagagctgaacaccgagctgctgaacctgctgcgtgagcagttcaacctgcgtatgcaggctgcaagtggccagctgcaacagtctcacctgttgaagcaagtgcgtcgcgatgtcgcacgcgttaagactttactgaacgagaaggcgggtcgcgttgttagcgacaaaatggagaaatccattgttgttgctatcgaacgttttgtgaaacacccgatctacggtaaattcatcaagcgtacgaccaaactgcacagaaagcggttcctgagcatcactttccgcgatgctaaagctcgtgatgaagccattgcgtatctgagcaagcgccatccggagctggtgattagcagccacggcagcaatccagctgaccgcgtgaatatgtcggtgcagcagaacattaatatcctgcgtaaccgtgtaaaccaacttggacgtggctggagccggtggttcacgcgtcagggtgctgaccgtatcgttgttgtaaactgccagtgtattcaggacactgcgcagcgctggtgtgtaacgatcatgtctaacttcactaaggacaacatcggcaaaccgatggcaaccctgtttgtggagtacaaagacagcggtaagaaagatgcaaatggtcgtgcggttctggtgaaacaggaagaggtgattaacatcgccaacatccagtctcgtctgggtaacagcttccgtatcaccggcatcaacaacccgaacgaagcccgtcagctgtcactgcctgctgcgtgccggcgcaacgctgagtatgccaggtatcgcgggtatcgtcttaacccttgcggtggcggtcgatgcgaacaagcaagcctgacaggtgcaggtgcaaccttccctgcgccggtgtatgccaaatgggctgacacttaccagaaagaaaccgctacctggcgaaagtgaacgaagagtggaaaaacaacgttggtactggctctaccgtaaaatggccgatcggtctgggcggtaaagctggaactctttcgggtaaagccgctggatatcccacagcaacgggttgggcagcaacacgttttgctgaaagcgtttaatcgcagactggcaatgcagtttatccagctcatcgccaccgacgtgacggaaatcctgccccttcacgtagtagaagatggtaccgacagcctttattgcctggcgctgtcccatctgcgttgtgggcgtttgtcactccggtggcggcgtgagcttcctcgcgggctgggcgttaatgttagttggtgctatccgtttaaagcgcaagggcagtgcgccgcagaaattaccgataaagccggccagcgggaaattttcggttttgcccgcgtgaaagagaatgcgggttatgtcatttatgaatgttatcaacctgatgatggcgataagttaatccgtgagctgccgttcagttcattaatttttgcccgccagtggtttgtggtgggggaactcctgcagcatttgccgccagaagatcgtattacccccattgtcggcatgttacagggcgtagtagagaagggcggtgaactgcgtgttgaagttgccgataccaacgaaagcaaagagttactgaaattctgccgtaaatttactgttccgctacgcgctgccttgcgcgatgccggggtgctggcgaactatgaaacgccgaagcgtccggttgtgcatgtattctttattgcaccaggctgctgctataccggttactcatacagcaacaataattcgccgttctatatgggcattccgcgcctgaaatttccggcagatgcgccgagtcgttccacgctcaaactggaagaggcatttcatgtgtttattcctgcggatgagtgggatgaacgcctggcgaacgggatgtgggcggtggatttaggcgcttgccctggcggctggaccttccaactggtgaagcgcaacatgtgggtttattccgtcgaccacggctcgatggtccaatcctctggattacgacagggacctgctggggaacacggttccattccgcccgaggccagaaatttccggaagtgttacaggggtcccagaccttacccgctgctacggatcctccaggtatgcaatggctggcatccggcgtgctggaatggaagctcgtctgatcgcgcctggcgcggatggcgtaaaaatgcagtgtgatttattgtcgtgtcagaacgctggctggcaaggagtgacgcttaataccacgcgggggcatttctatcgcgcggcgctggaagggttaactgcgcaattacagcgcaatctacagatgctggaaaaaatcgggcactttaaggcctctgaattattgttagtcggtggaggaagtcgcaacacattgtggaatcagattaaagccaatatgcttgatattccggtaaaagttctcgacgacgccgaaacgaccgtcgcaggagctgcgctgttcggttggtatggcgtaggggaatttaacagcccggaagaagcccgcgcacagattcattatcagtaccgttatttctacccgcaaactgaacctgaatttatagaggaagtgatccgcgctgatggcctgttggtgagcgacttgctccaggcgattatcccgttatttgaactggacagttatgcaccgccgctggtgatgatggcggcggtagaaggtgacactctcgatcctgaagtagaacgacgttaccgtaatgcgctttcactacaagccccgtgtcctgacatcatccgcatcaatcgttttgcgttttatgaacgggcgcaaaaagcctttgcgttcggttatcacaggcgaacgagcgaagtacgggaatattcttttaaaaaaaggggcctacaactgttgccgacccgtaggccggataaggcgctcgcgccgcatccggcagtgtttacccgcggacgactcaaaatatctttctcataagcccgcacgctctccagccattcgctacctgctggcgtatcgtgacgttggcaatacatttcccagaccgcctgccacggaaacgatttcatgctctaccagacagtgccagacgcgcagatgtaatcgcccgaccgcattccagacattgcgcagctacagcggaacagaccaacgtgggtcatgcgcgtccggcaagccacgttgaaacgctgtgtaatactttttcatcacaaattgagtggcataacctgcgcactgaccgcaagggcaacgccaaaagcgcccttgcgctgattggcaccgatacgctggcgggcgataactgccagttactgatttccggggccgacgaacaggaagcgcaccagcgtttaagccaatggctgcgcgatgaattcccccactgcgatgcgccgctggcggaagttaaatctgacgacctggaaccactgccggtttccccgaccaatctgaatccgcaaattatccgcgcccgcaccgtgtgcagcggtagtgcaggcggcattctgacgccgatctcttctttagatctcaatgcgctgggtaatcttcccgcagccaaaggcgttgacgccgagcaatccgcactggaaaacggcctgacgctggtactgaaaaacattgagtttcgtctgctggatagcgacggtgctaccagcgcgattctggaagctcaccgatccctggctggcgatacttccctgcgcgaacatttactggcaggcgtcagcgccggattaagctgcgccgaagcaattgttgccagcgcgaatcacttttgcgaagagttttcccgttccagcagcagctacctgcaagaacgtgccctggacgtacgcgacgtctgcttccagttactccagcaaatctacggtgagcaacgcttcccggcaccgggcaaactgacgcagcccgccatttgtatggctgatgaactgacccccagccagttcctcgaactggataaaaatcacctcaaaggattgttgctcaaaagcggcggcaccacctcacatacggtgatccttgcccgttcgttcaacattccacgctggttgcaacaaacgatttatatcgacggcaacgccggggcgattgtggttgagccaggggaagccgtagctcgttattatcagcaagaagcccgcgtacaggacgccctgcgtgacccacagcgtgtctggctgacccaacaagcccgtaccgctgacggtatccgcattgaaattgccgctaacatcgaggctcgactctag

SEQ ID NO: 139009 - DNA, 522 bp, Homo sapiens
atggtaaagttcgcctgggtgcagtatgtcagcatcctgcttatcttcctctgggtgtttgaaagaatcaagatcttcgtgtttcagaatcaggtggtgaccaccattcctgtgacagtgacgccccggggagacttgtggcgggagatgaacacggacgcaagtgttcacccgccagggtctcaacccccagggggagacccccttacggggtcgaaaatttacgggtgccgctgcgcccaagggactgggaagagctggaacccaggcaaaggaaaggcgctggacaaggcagaaagcgatcgccagggcgttccagtaatgaaagcctgcgaccgctgcggtggtagaggttacgccaggcttaagttctcaacggtaaatgagggcgttaagactgttgcggagataaagaaaacggcggcatatgagcaacttcagccgctatttgaggagttggtcgccgaatgccataaacaggagtctatggctgattccattctctcaaaagtaacgagatga

SEQ ID NO: 139010 - DNA, 906 bp, Homo sapiens
atggtaaaaataatcaaacccaaggcgattcagattggcacagcttccataccagggcaggtgggcccggcaaccagtaccgatattgcaccgccagatatcccggctggcttcgtggctgttttcaacagtgatgagtcatcgtggcatctcgttgaagatcatcggggtaaaacggtttatgacgtggcttccggcaacgcgttatttatttctgaactcggtccgttaccggaaaatgttacctggttatcgccggaaggggagtttcagaagtggaacggcacagcctgggtgaaggatacggaagcagaaaaactgttccggatccgggaggcggaagaaacaaaaaacaacctgatgcaggtagccagtgagcatattgcgccgcttcaggatgctgcagatctggaaattgcaacggaggaagaaatctcgttgctggaagcatggaaaaagtatcgggtattgctgaaccgtgttgatacgtcaactgcacaggatattgaatggccagcactgccgattattcaagaagtgctgccagcactcgaaaatgtgattgctgtgatggtggcggatttacagaggcgcaagtgtttaccaacaaggtctcatacccatgggggaaaccgccttactggtcgaaaatgtcgcgtgccgttcgcccaagcgactgggagagctggacacaggcgcacagaatcgccagtcactatggcgtgctgtagcgctatatgcgatgatgcaaaatctatgcgaacccgaacacgcaacataaaacaagtacaacaaccgccgccaagtcctgcaacgtcgctacttggagccactatcgactacgcgatcatggcgaccacacccgtcctgtggatctacccactagtcaattcaccatcttgttga

SEQ ID NO: 139011 - DNA, 1057 bp, Homo sapiens
atgaggttatgtccagaaaagacaactaaagcaaagagggtgaaggcagttcttgcctggtcaaaagaggaaccatggctttcagagtggtcagaggaagtgttagagatgggctataaaaaattaggagatttttcaacagcaggtgccatcttggaaacagagatcaggccctcgcctgccagtgccttcaccctggactctcagcctccagaatcgaataatttaagtgaagcgaaatatgcgccaaataatatcgaatcaatcgctaaatactttgcgcctaaatcaccgatgttcagtgaatctcctagcggaaccgccttagacagtttcaaccggaatgaacgccgccgttggcctttgtggcccaacaagtcggggtttggttccgatcttaccctctcgaaaatcggcattagcagcccagatatagcactggagagactctatgagcaggcacgtaagttatcaggtaaattcagagcactgtctgaactcgatgaatcagctcggtcaggcgtgcttaaggttctctgcgcttttgcataccaggattattcaagaagtgctgccagcactcgaaaatgtgattgctgtgatggtggcggatttacagaggcgcaagtgtttaccaacaaggtctcatacccatgggggaaaccgccttactggtcgaaaatgtcgcgtgccgttcgcccaagcgactgggagagctggacacaggcgcgtgaggtggtgcgagttaagtgcaagccgtgtaacggaaaaggcgttatcagcaattcgtgtcgttgccatggcaaaggtaaggtgctggcaaagcatgaaagcgatcgcaggggcgttccagtaatgaaagcctgcgaccgctgcggtggtagaggttacgccaggcttaagttctcatcggtaattgagggcgttaatactgttgcggagactaaagaaaacggcggcatatgagcaacttcagccgctatttgaggagttggtcgccgaatgccataaacaggagtctatggctgattccattctctcaaaagtaacgagatga

SEQ ID NO: 139012 - DNA, 1718 bp, Homo sapiens
ctctgaagcaccattcaaattacggcgtagcacccgccatccgcgaatttggatatatacaccaccagttcccggataatattccgctgactttataccttgcggaagcctatcgccattttggtcatgatgaccgggctcgtctgttgcttgaggatcaactgaaacgtcacccaggagatgcccgacttgagcgcagtctggcggctattccggttgaagtgaaaagcgttacgacagttgaagaactgcttgcccagcaaaaagcgtgcgatgctgctccgaccctgcgttgtcgcagtgaagtcgggcagaatgccctgcggctggcacagttacctgtcgccagagcgcaactgaacgatgcgacgtttgctgcatcgccggaaggattttactctgcgaaccgatctgctgcaacgggcaatctacctgatacaatgctggacgatcggatcctggcactgcaatcacaggggatcttcaccgatcctcagtcatatattacttacgcgaccgcgctggcttatcgtggcgaaaaagcacgcctccagcattatctcattgaaaataagccactatttaccacggacgcacaagagaaaagttggctctatctgttatctaaatacagcgctaaccccgttcaggcgttggcgaattatacggtacagtttgccgacaaccgccagtatgttgttggcgcgacgctaccggtgctgttaaaagaaggtcagtacgacgcagcgcaaaaactgctcgccaccctccccgccaatgaaatgcttgaggagcgttatgctgtcagcgtggcgacccgtaacaaggctgaagctctgcgtctggcacgattgctgtatccccaagaaccggcaaatcttacccgcctggatcaactaacctggcaactgatgcagaacgagcagtcacgcgaagctgccgatttattgctgcaacgctatcctttccagggcgatgcgcgtgtcagccagactttaatggcgcgactggcgtctctgctggaaagtcatccttacctggcaacgccggcgaaggtggcgattttatcgaaacccttaccgctggcggagcaacgtcagtggcaaagtcagttgcgggcgaccagtgcacaaccggttcccggtccgacgcccgtcgccaacggttctattttccagtctgctcagccgattaactatggctatcaaccgctgtttgaagatcgtcgaccacgcaatattggcgatacgctgaccatcgtgttgcaggagaacgtcagcgccagcaaaagctcctctgcgaatgccagccgtgacggtaaaactaattttggctttgatactgtgccgcgctatttgcaggggctgtttggtaacgctcgtgccgatgtcgaagcctccggtggtaacacgttcaacggaaagggcggggccaatgccagcaatacctttagcggcacgttgacggtgacggttgaccaggtactggtcaacggcaacctgcatgtggtgggtgaaaaacagattgccattaatcagggtaccgaatttattcgcttctctggcgtggttaatccacgcactatcagcggcagcaataccgtaccgtctactcaggtggcggatgcgcgcattgaatacgtaggcaatggctacattaacgaagcgcaaaatatgggctggttgcagcgtttcttccttaacctgtcgccaatgtaa

SEQ ID NO: 139013 - DNA, 1739 bp, Homo sapiens
aaaggctcgcgctcctggcctattaaacgggaattaacaagtttcgatcgcaatcctttttattccaaacaggttttaaccccagaccaggttggcgcaactgagttccgaaaataaaggagaatacccttaatcgggtcatcggaagttttggtttactgctgacgtctttattgagtaccagcgcactcgcagacaatatcggcaccagcgcagaagagctggggctgagcgattatcgccattttgttatttatccccgtctcgataaagcgctgaaggcacagaaaaataacgacgaagcaaccgccatccgcgaatttgaatatatacaccagcaggtgccggataatattccgctgactttataccttgcggaagcctatcgccattttggtcatgatgaccgggcgcggctgttgcttgaggatcaactgaaacgtcacccaggagatgcccgacttgagcgcagtctggcggctattccggttgaagtgaaaagcgttacgacagttgaagaactgcttgcccagcaaaaagcgtgcgatgctgcgccgaccctgcgttgtcgcagtgaagtcgggcagaatgccctgcggctggcacagttacctgtcgccagagcgcaactgaacgatgcgacgtttgctgcatcgccggaaggaaaaacgctgcgaaccgatctgctgcaacgggcaatctacctgaaacaatggtcccaggcagatacgctatacaatgaagcacgccagcagaacacattaagcgcggcagaacgccgtcagtggtttgacatacttcttaccaggcaactggacgatcggagtctagcactgcaatcacagaggatcgtcaccgagtctcagtcatatatgacttacgcgaccgcgctgacttatcgtggcgaaaaaagcacgctgcagcattatcgcattgaaaataaaccactaggaactggatattggtgcagtcgcgattaccgatcgagagaaattgctggccttaccggaattggtgacgaccaccatttacccggcaaaccgatttcttcaacttatactttaaaagcgattgaaaccggtgaagtggtctacgctgatggcaacgaagtaccttaccgttgctctttgaatccgcaatgcaaactggggtcaacgctggaaatcccgttgcgtggtgaaaatcagcgggttatgggcacatcaaattgtatgacgccaaaaaccgtttattcagttcaatcaaccgcactttgggccagccagctggtgcagtatctttccacttttttccgcaaaaacttaaagcggccttcggagtttgttactctcgccgacgaaattgaacatgtgaatgcttatctgcaaattgaaaaggcgcgcttccagtcgcggttgcaggtcaacattgctattccgcaagaattatcccagcagcaattgcccgcgtttaccctgcaaccgatagtggaaaacgccattaaacatgggacatcacaactgctggatacagggcgagtggcaatcagcgcccgacgtgaggggcaacatttgatgctggagatcgaagacaatgccggtttgtatcaaccggtaaccaatgccagtgggctggggatgaatctggtggataagcgtttacgtgaacggtttggcgatgactatggaataagcgtcgcctgtgagcctgatagttacacccgaataacgttacgactaccatggagggacgaggcatga

SEQ ID NO: 139014 - DNA, 2046 bp, Homo sapiens
atggacgtggtgatccttgataccggctgcgccaacctgaactcggtgaagtctgccattgcgcgtcacggttatgaacccaaagtcagccgtgacccggacgtcgtgttgctggccgataaactgtttttacccggcgttggcactgcgcaagcggcgatggatcagctgcccaacgccaaatacaaactcaccgcacaaacattacaatggctggcagaggagacgttacccgacaacacccaggactggcactggacggttgtcgataaacaaaacgaaagtgtcgaggtgataggcattcagtcggagaaactcagtcgctatcttgagcgtttacatactgccggactcaacgtgacgcgggttttgccagatggctgctatcttccctgggaagtagatagctggactctggttaaccagcaaacaagctggctcattcgcagtgccgcacatgccttcaacgaactggatgaacactggttacagcatcttgctgcccagtttccgcctgagaatatgctttgttatggtgtagtacctcacggcgttgcagcggccaatccacttatccagcatcctgaaataccatcactgagtttgtattctgccgatattgcattccagcgctatgacatgctgcatggtatttttcgtaaacagaaaactgcgctgcattatgagattttcgacgacgccaattttatggtgctggtggaaccggagattatcctcaatgcaccgcaacaatatctgctggcggggatcggtgacacgctggcgaaatggtatgaagcggtggtgctggctccggcagggacggcggatgtggtcgcttctgccgcgcaggtacagtatctggtcgatggtctggaagagattggcgttgtctgccagcaggcgggcggtcacgcggcattcgttgatgccggtaaactgttgccgcatatcccggcagaccagttcccggcacaggcgctggcctgcgagctgtatacagtcgcgctggaaggcgcattgaagttgaaagagatctcttacattcacgctgaagcctacgctgctggcgaactgaaacacggtccgctggcgctaattgatgccgatatgccggttattgttgttgcaccgaacaacgaattgctggaaaaactgaaattcaacattgaagaagttcgcgcgcgtggcgcgatatacatgcacatcatcgagatgccgcatgtggaagaggtgattgcaccgatcttctacaccgttccgctgcagctgctggcttaccatgtcgcgctgatcaaaggcaccgacgtgaccagccagcacactgcacgcctcactcactggcgacagcgagagccgcccctccgcgcttacggcgttgctgggcgcagaggcaaaatgaccggcaatcagccgtttggtgagttcatgcagcggcgatgccagcacatccgcggtgctgccctgctgaccctttcctaccttggcgctgagcgcgctatcccgaactacaacgttatgggtctggcaaaagcgtctctggaagcgaacgtgcgctatatggcgaacgcgatgggtccggaagatctttggataccccctgggacaattcccgagtttaaactagcaacacggacctgcatgaaacacggatcatcccgtgggccaggcttgaccatttatgactacagaaagggctatacgccaacccggaatccattcaaacccaacaaaaccgacgaccaaagaacacacacaaaggcgagccctacggcggaacttcaggattcgaacttgcattcctgtttggtcagccaagaaggaccaattgacaatcgccccgccccgctgacggcgaaactggttcatggtttgctggaacaggttaaacgcaccgccgacgctgcgcaggtcgcgcaagtgtgtcagcgactgttagctgaaacggagcgactggacgcgctggtcaatgcggcgggaattttacgcatgggcgcgaccgatcagctcagtaaagaggactggcagatctggactcatcactaa

SEQ ID NO: 139015 - DNA, 2634 bp, Homo sapiens
ttactgctgctgtgcagactgaatcgcagtcagcgcgatggtgtagacgatatcgtcaaccagtgcgccacgggacaggtcgttaaccggcttgcgcataccctgcagcatcggcccgatggagatcaggtcggcagaacgctgtaccgctttgtaggtggtgttaccggtgttcagatccgggaagatgaacacggtagcgcgacctgcaaccggagagttcggcgctttggatttcgcaacgtcagccattaccgcagcgtcgtactgcagcggaccgtcgatcatcaggtcaggacgtttttcctgcgccagacgagttgcttcgcgaactttttctacgtcgctacctgcaccagaagtaccggtggagtaggagagcatagcaacgcgcggttcgataccgaaggccgcagcggaatcagcggactgaatcgcgatttctgccagctgttcagcggtcggatccgggttgatcgcacagtcaccgtaaacgtaaacctgttccggcagcagcatgggggatctgtatgaatcagcgcaccaaatttccggtgaaaagcccaacagcatggcgatgacggcagcagcaacaaacaccagcgtcgagtagactttggtcacggccatcacaccgatattttcagcataggtggtcacgccgctaccgccgacagagccggaaagcatcgttgccagaccatcgcctacgaatgcccgccccatatacgggtccatattgcgtccggtcatcccggcgactgccttgagatgacctaagttttccgccaccagaatcaccgccacgggcgcaatcagcatcattgcctgaccattaaaagcaggagtggaaaaatgtggcagaccgaaccaggcagcatggctgacgagagtaaaatcgacggcttttcccagccctaaaacgttggtcatcacgccatacagcagacaggcgacaattaatcctacgagaatcaataaccgctggatcatgccacgggtaaacaccgccaccagcccaatacacagcaccgtcattaccgccatccagctatcaaaggccgaagccgatacacttttcactgcgataggcgctaagttcaggccaatcgccatcaccaccgcacccgtcaccaccggcggcatcagtcgttcaatccagcgcgtaccgattttcatcaccaccaggccaatgacggtataaaccagcccacaggcgataatcccgcccagcgcaatgctgatattcgggttaatgccctgaccgttaaagcccgtcgcggcgatcaccacgccgacaaaagccgcgctggagccgagataactggggacgcgcccgccggtaataaagaaaaacagtaacgtgccgatccccgacattaaaatggaaagattgggatccagccccatcagaatcggcattaacaccgtcgcgccaaacatcgccaccgcgtgttgaacgcccattactgccgtctgagcaaacggcaatcgttcatccggcgcgaccacgccgctctctgtagaggtcgattttaacacctggctgatacggcagtcaaacgaaaccagagcctcttccagttgcgggcatccggtcacccccgtctgccagcgggcggcggcaaagcggtgttccatgggcgttttgcgccaaaaaggtttgaaagcggctccagtaatgtggggcgcgtatcggtcacactgcagacggctccgttgccgctgcccgccggagaacgcatgaggcaggcggtcgagatactccggacgaatacccacctgcacagccaactcctctgccaacgctcgccgctgttgttcactactacgcttagctatccagagcggttctgtgatgatgcgccacaccggtaagcgcggattaagcgaagagagcgggtcctgaaacaccatctgcataatgcgttgtgagccagaacggatgtactgcccgtggctcggttgcagcatacccattaaaagctgtgcgagggtgcttttgccgcagcctgactcgccgacgatccctaaggtttcaccacggcggatctgcaactgcaccgtgacgtccagcgccgtagtcggttcgtcggcaataatcaattgcggctcgcaggagaatgccagcgcaatcattacccgctggcgcataccacctgaaagctcaaacggatagcgcgacataacttccacggcatccgggatttgcatctcttccagcaggtcaatcgctttagctctggcttcccgacgacttattggttgatgatggcggatcacgtccatcatctgaagacctattcgacgtgtcggattgagggcggtcatcggttcctgaaagatcatcgccactcgtgcgccgcgccactgacgaagctgtttttcccgcgcgttaagaacatcttctcccagcagggaaatctgcccccgatgtacgcaataactgcccgtcggtagcagacgcataatcagcattgcggtgactgatttacctgagccggattctcccaccagaccgacaatttcaccgcggataatctgcaaggacacattgttgagcgcgtgaacatcaccgctagaaccggggatactcaaatgcagctgttgaatgtccagaacgggttgggtcat

SEQ ID NO: 139016 - DNA, 2577 bp, Homo sapiens; identical to SEQ ID NO: 118132

SEQ ID NO: 139017 - DNA, 1524 bp, Homo sapiens
atgttgttgtcagctatttcaagtacagccaaaaactggaccacagtgcagatgtcccatcaacagcatagtcttctccggttgatcagcattttccgaaaggccacggtcgctgaccggggttggcaccagccactcgaaggtctacgcctgggcggttcaatgctgatgcaggggctgattagcgccgagcagctggcacaggcgctggcagagcaaaacggcgtggcgtgggaatccatcgatgcctggcagatcccttcctcgctgattgccgaaatgccggcctccgtggcgctgcattatgcggtactgccgctgcgtctggaaaatgacgagttaattgtcggcagtgaagatggtattgacccggtttcgctggcggccctgacgcgtaaagtcggacgcaaagtgcgttacgtcattgttctgcggggacaaattgtcacagggttacgtcactggtatgcacgccgacgcggtcacgatccgcgggcaatgagcctgaccgggagttatagcagtgtctgggctgaagacgacattcagtttgattcccgttttctggaattaaaaggcgacacaaaaattgatctgaagcgtttttccagccaggggtatgttgagcccggaaaatacaatttacaggtgacgaccggtgtcacatctcgcatatatgatgatgctgccgttgaacgttttaatatttccgttggtcaaatctactatttcacggagtctcgcactggcgatgacaacataacatgggagaatgacgacaaaacgggttcactggtgtgggcaggcgatacttactggcgtatctccgagcgttggggattgcgtggcgggattcagtacgatacacgtctggataacgtagcgaccagtaactccagcattgaataccgtcgggatgaagaccgtctggtacagctgaattaccgttacgccagcccggaatatattcaggctacgctgcctaagtactattccactgctgagcaatataagaatggtatttcgcaggtaggtgctgtcgccagctggccaattgccgatcgttggtccattgttggggcctactactacgacaccaatgctaacaagcaagccgactctatgttaggtgtgcaatacagctcctgctgctatgcaattcgcgtcggttacgagcggaagctgaacggttgggataacgataaacaacatgcggtatatgacaacgcaatcggctttaacatcgaacttcgcggcctgagctccaactacggtctggaaccaaatgttcaaatcgaggggatttctatggaagcgcgggaagcaaccgctacgggtgaatcatgcatgcgcgtcgatgccattgctaaggtcaccgggcgggcacgatatactgacgattatgttatggcgggcatgtgttatgcgaaatatgttcgtagccctatcggacatggttatgccgtaagtatttatgatgaacaaagccaaaattttgccggggcgtaccgggcgaaattttaa

SEQ ID NO: 139018 - DNA, 3150 bp, Homo sapiens
ttatctgtatttttcttgtgggtattttggtgcataaagcgcgtattggtttgccccatgtgcaacgtggtgcgccagccgctcctgtaaatagcgcggaccatcaaaatcaggaaagccttgcgacaggttaatcgcctggtgttgctgcgccagcgcgctcatctgacgaagttgcgtgttgaaggcactataacacgatgctagtatttggcaatcaagacgtttagatgtctgcacgattttttcactgatgaacaactttctcgcgcggtgtggatctacggcaaacgcgccattgctgcggcgcaaaccaaacttccgccagcgtttggactgccaggggcaaagcatattttgtttcgcggtcattgcagcgaaagcgatgtacaacaactggcggctgagtccggtgacgaccgcagcgtggtgattggcgtcggtggcggtgcactgctcgacaccgcgaaagccctcgcccgccgtctcggtctgccgtttgttgccgttccgacgatcgccgccacctgcgccgcctggacaccgctctccgtctggtataatgatgccggacaggcgctgcattatgagattttcgacgacgccaattttatggtgctggtggacccggagattatcctcaatgcaccgcaacaatatctgctggcggggatcggtgacacgctggcgaaatggtatgaagcggtggtgctggctccgcaaccagaaacgttgccgctaaccgtgcgactggggatcaataatgcgcaagccattcgcgacgtcttgttaaacagtagcgaacaggcgctgagcgatcagcaaaatcaacagttaacgcaatcattttgcgatgtgggggatgctattattgctggtggtgggatggtttggggtctgggcgatcgttttacgcgtgtggaggcagctcatgccgggcctaacggactgaccgggctgccgcaaaccgagaagtttctccacggcaccaaagtcgcctacggaattctggtggcaaagcgccttgctgggtcaggatgatgtgctggcgcaattaactggagcgtatcagcgttttcatctgccgactacactggcggagctggaagtggatatcaataatcaggcggagatcgacaaagtgattgcccacaccctgcgtccggtggagtccattcattacctgccagtcacgctgacaccagatacgttgcgtgcagcgttcaaaaaactaatacagggcctgattagcgccgagcagctcgcacaggcgctggcagagcaaaacggcgtggcgtgggaatccatcgatgcctggcagatcccttcctcgctgattgccgaaatgccggcctccgtggcgctgcattatgcggtactgccgctgcgtctggaaaatgacgagttaattgtcggcagtgaagatggtattgacccggtttcgctggcggccctgacgcgtaaagtcggacgcaaagtgcgttacgtcattgttctgcggggacaaattgtcacagggttacgtcactggtatgcacgccgacgcggtcacgatccgcgggcaatgttgtacaatgcggttcagcatcagtggctcacggaacagcaggccggtgaaatctggcggcaatatgtgccgcatcagttcctgttcgccgaaatactgaccacgctcggtcatattaatcgttcagcaattaacgtgttgttattgcgccatgaacgcagttctctgccgctcggcaagtttttggtcaccgaaggcgttatcagccaggaaacgttggatcgcgtcctgacaattcaacgcgaattacaagtttcgatgcaatcactattactcaaagcaggtttaaacacagaacaggttgcgcaactggagtccgaaaatgaaggagaataaccttaatcgcgtcatcggatggtctggtttactgctgacgtctttattggagtaccagcgcactcgcagacaatattcggaccagcgcagaagagctggggctgagcgattatcccattttgttatttatccccgtctcgataaagcgctgaaggcacagaaaaataacgacgaagcaaccgccatccgcgaatttgaatatatacaccagcaggtgccggataatattccgctgactttataccttgcggaagcctatcgccattttggtcatgatgaccgggcgcggctgttgcttgaggatcaactgaaacgtcacccaggagatgcccgacttgagcgcagtctggcggctattccggttgaagtgaaaagcgttacgacagttgaagaactgcttgcccagcaaaagcgtgcgatgctgcgccgaccctgcgttgtcgcaagcgcaactgaacgatgcgacgtttgctgcatcgccggaaggaaaaacgctgcgaaccgatctgctgcaacgggcatctacctgaaacaatggtatggcacttcggtttttgaaggcatccgttgctacgactcgcacaaaggaccggttgtattccgccatcgtgagcatatgcagcgtctgcatgactccgccaaaatctatcgcttcccggtttcgcagagcattgatgagctgatggaagcttgtcgtgacgtgatccgcaaaaacaatctcaccagcgcctatatccgtccgctgatcttcgtcggtgatgttggccgggcagctccctggtatcttccgtgttcttcatgctgctgccggaacaggtttacgtttacgctggcagaaatcgcgattcagtccgctgattccgctgcggccttcggtatcgaaccgcgcgttgctatgctctcctactccaccggtacttctggtgcaggtagcgacgtagaaaaagttcgcgaagcaactcgtctggcgcaggaaaaacgtcctgacctgatgatcgacggtccgctgcagtacgacgctgcgcagaaaaaagcatcagacagtggttttattcagcagcaaaccaaagataatcagacacgcgacggtgagccagattggcgcaggcagaccgaaccagttggcgtaaccaagggcaaagaagctttcatcttcgataccgaccgtttaccgtctgaaatgatgtacgccagacctcgaacaatctctgaaagcggccggattcccggaaaaacaaatttatcag

SEQ ID NO: 139019 - DNA, 326 bp, Homo sapiens
ggtcggcgtggtcccagaagagatcagcgcatggaagccagacaccgcgccacaggcgatggtgataaacaggaacgggaacaggttaccggtccataccgggccagtgccatcgacaaatttggtcagcgcaggcatggtcagcgtcgggcgcataatcaaaatgcctaccgccagaccgacgatagtcccgattttcaggaaggtagagaggtcggactttctgccacccagccgccagagataatggcgaaaatcaggaataccagaccgatgaccgacacttcgccatatacgtccccggacaaagatagggcagggaccag

SEQ ID NO: 139020 - DNA, 410 bp, Homo sapiens
gctggcagaaagcgtttagcccggatgcgaaagtcggcttcctggccattgctaataagtaccaggcaatgatcgacagcggcaatattccgtcgcagtatactgagtcacagctggcgcaactggtgttcaaacaaaatggcgaagtgataccagaacgccacatccatcatgccgcccagcgcgccgtgcagaatggtcggcgtggtcccagaagagatcagcgcatggaagccagacaccgcgccacaggcgatggtgataaacaggaacgggaacaggttaccggtccataccgggccagtgccatcgacaaatttggtcagcgcaggcatggtcagcgtcgggcgcataatcaaaatgcctaccgccagaccgacgatagtcccgattttcaggaaggtagagag

SEQ ID NO: 139021 - DNA, 780 bp, Homo sapiens
  misc_feature (1)...(780): n = a,t,c or g
atgctggtgggttacggttttgtggcggcggtgctgccggtgtggttactgctggcnccgcgtgactacctctctaccttcctgaaaatcgggactatcgtcggtctggcggtaggcattttgattatgcgcccgacgctgaccatgcctgcgctgaccaaatttgtcgatggcactggcccggtatggaccggtaacctgttcccgttcctgtttatcaccatcgcctgtggcgcggtgtctggcttccatgcgctgatctcttctgggaccacgccgaagatgctggcgaacgaagggcaggcgtgctttatcggctacggtgggatgttaatggaatccttcgtggcgattatggcgctggtttccgcctgtatcatcgatccgggcgtgtattttgccatgaacagcccgatggcggtgctggctccggcagggacggcggatgtggtcgcttctgccgcgcaggtgttttggtcagttggagaagcgcagtctctgctggagcagattcgccatattgacggtgattttgaattcgaaacctattactcgctctcttgccacaactgcccggacgtggtgcaggcgctgaacctgatgagcgtactgaacccgcgcatcaagcacactgcaattgacggcggcaccttccagaacgaaatcaccgatcgcaacgtgatgggcgttccggcagtgttcgtaaacgggaaagagtttggtcagggccgcatgacgttgactgaaatcgttgccaaaattgatactggcgcggaaaac

SEQ ID NO: 139022 - DNA, 1703 bp, Homo sapiens
atgaaagcattctggcgtaacgccgcgttgctcgcggtttctctgcttcccttctcttctgccaacgccttagcgttgcaggcaaaacagtatggcgattttgatcgctatgtcctggccctctcctggcaaaccggattttgccagagtcaacacgatcgaaatcgtaacgaacgagatgaatgtcgcctgcaaaccgaaacgaccaacaaagctgattttctgaccgtacatggtctgtggccaggattgcctaaatcggttgctgcccgtggtgttgatgaacgccgctggatgcgcttcggttgcgctactcgcccaatcccgaatctaccagaagcgcgcgccagccgaatgtgttcatcgccggaaaccggattatcactggaaacggccgctaaactaagtgaagtcatgccaggagctggcggacgttcctgcctggaacgctacgaatatgccaacacggtgcctgcttttggtttgatccggacgcatacttcgatttgtcagatctgcctgactgaacgcctgatagccgcctttcagtttatccgggaacggaatggattcgatctggcctttcttgtgataagccagcgtacaggcagctaccgcctggaaggattccgcacgaccagtaccgagattgaagatgccggaaacgccattttccaggaaccacagattcacatcagccacgtcgcccacatagacgaatcctgtttgaagttctcgctaccttcaaacagcttcgtggtctgcggaagaagcgtacaggaacgggatttcacgctccaggcagtagtgcagcagctccttggagtattgatagttgttatccatcatatacttgccgtcccactcggtggtggaagagcacgcgccttcgtggaaaatcgcttcgacatcgccgaactcttcgccagccataatctggatcaggaagtcttccttatccatatagtcttcgatattcagatccaccaggttcacaaactttggtgcggttgtccaccaccagaatatcggggattccgtcttgccatgccatgcatggtcgactcctatgaggatccccacgtttatctctccaccgcttacacctacgccaaacatcgccctgaccacgctgacgatgaaaccacctctttcatgcagtttggtatctggtacgaatacggcggcggacgtttcgccacggcttttgatagccgcttctacatgaaaaatgcctctcacgatcccagcgaccaaatcttcctgatgcaatatttctactgtttttccgcccatgccgctaacgccgacaattataaaaacgtgattaaccgtactggcgcgccgcagtacatgaaggattacgattacgacgatcaccagcgttttaatccgtttttcgatctcggagcctggcatggtcatctgttgccagacggccctaacaccatgggcggctttccgggcgttgcgctgctgacggaagagtacatcaactttatggccagcaatttcgaccgcctgaccgtctggcaggacggcaagaaagtcgactttacgctggaggcatacagtattcccggtgcgctggtgcaaaaactgacagcaaaagatgtgcaagtcgaaatgactctgcgcttcgccacgccgcgcacgtcactactggaaaccaaaatcaccagcaataaaccgctggatctggt

SEQ ID NO: 139023 - DNA, 3261 bp, Homo sapiens
atgtgcgaactcgatattttacacgactctctttaccaattctgccccgaattacacttaaaacgactcaacagcttaacgttggcttgccacgccttacttgactgtaaaactctcactcttaccgaacttggccgtaacctgccaaccaaagcgagaacaaaacataacatcaaacgaatcgaccgattgttaggtaatcgtcacctccacaaagagcgactcgctgtataccgttggcatgctagctttatctgttcgggcaatacgatgcccattgtacttgttgactggtctgatattcgtgagctaaaacgacttatggtattgcgagcttcagtcgcactacacggtcgttctgttactctttatgagaaagcgttcccgctttcagagcaatgttcaaagaaagctcatgaccaatttctagccgaccttgcgagcattctaccgagtaacaccacaccgctcattgtcagtgatgctggctttaaagtgccatggtataaatccgttgagaagctgggttggtactggttaagtcgagtaataggaaaagtacaatatgcagacctaggagcggaaaactggaaacctatcagcaacttacatgatatgtcatctagtcactcaaagactttaggctataagaggctgactaaaagcaatccaatctcatgccaaattctattgtataaatctcgctctaaaggccgaaaaaatcagcgctcgacacggactcattgtcaccacccgtcacctaaaatctactcagcgtcggcaaaggagccatgggttctggtccatgcggcgagcggcgaaatcctgggtttgtttgtctacgtttttaatcgcttgttcgatggcgtcaacatcatcgccctgcgccacttcactcagaccgtaagacggtttgacctgaatagacgcctcaacgccggtggatttctccatcgccgtcacgctcaaaagaccgtcggcatcgacctggaacgtcacgcgaatatgcgcaccgccagccgacatcgccgtctgaccatctttaaaggtggtgaaatcctgagcgcgggccaccggaatagtggtattacgcggaatcactttctccaccaggccgcccatcgtttcgaggcccagcgacagtgggatcacatcaagcaacagcatttcgctgtctggcttgttacccaccagaatatccgcctgaatcgccgcgccaatagcgacgactttatccgggtcgatggaagtcagcggtggacgaccgaaaaattcgcctacccgttcacgcaccagcggcacgcgagtagaaccgcccaccatcaccacttccagcacttcatcagcttctacacccgtcgtctttcagagcgcgacgacaagccatggcgcgatcagttcattgaattgttcacggctgatttcgccctgccagcccgcaacgttaacggtcacggagtccgcatgtcagcgcgattttgctcaatgcgcatccagcagttcactgaccgttacgtcgatcaggatggaatcttagagtcgactctggatgaagaaatgttgcaggatctgctgggcgtggtgtctcctggcctgaagcggaccgattcactgcctgctaacctgctggcaacagcgctgtgcgtactggcgtggggctactttctccatcagggcgtggtcgatccgctgggcggcattaacactctgtggccgctgtttggtattgccaaccagatgctggcagggatggcgctgatgctctgtgccgtggtgttgttcaagatgaaacgtcaacgttacgcctgggtggcgctggtaccaacggcctggctgctgatttgtaccctgaccgcaggctggcagaaagcgtttagcccggatgcgaaagtcggcttcctggccattgctaataagttccaggcaatgatcgacagcggcaatattccgtcgcagtatactgagtcacagctggcgcaactggtgttcaacaaccgtctggatgccgggttaaccatcttctttatggtggtcgtggtggttctggcactgttctcgattaagacggcacttgcggcattgaaagatccgaagccaacggcgaaagaaacgccgtatgaaccaatgccggaaaatgtcgaggagatctccgcagatgaaaacgctgatacgctccagttaattgcggcagcacatcatcctgacccagcaaagcgctttgcaccagaattccgtaagcgaattgggtgcgttggagaacatctccggttgcggcaaaaggtcgattttccggtgattatcgtcagcgcctcgctgcccggtgcgtcaccagaaacaatggcgtcttccgttgccacgccgctggagcgctcacttgggcgcattgccggagtcagtgaaatgacctccagcagttcgctcggcagcacgcgtattattttgcagtttgattttgaccgggatatcaacggcgcacgcgcggcgatcaacgctgcacaaagtttgctgcccagtgggatgcccagccgcccgacctatcgcaaagcgaacccgtcggatgcgccaattatgatcctcacgctgacgtccgatacttattcgcagggtgaactgtacgatttcgcctcgacgcagctggctccgacgatttcgcaaatcgacggtgttggtgatgtcgatgtcggaggcagctcactgcccgccgtacgcgtcgggctgaatccgcaggcgctgtttaatcagggcgtgtcgctggacgacgtacgcaccgccgtcagcaatgccaacgtgcgtaaaccgcagggcgcgctggaagatggcactcaccgctggcagatccagaccaatgatgagctaaaaaccgccgctgaatatcagccgttgattattcactacaacaacggcggcgcggttcgtctgggcgatgtggcgacggtgaccgactcagtgcaggatgtgcgcaacgccgggatgaccaacgccaaaccggctattttactgatgatccgcaaactgccggaagccaatattatccagacggttgacagcatccgggcaaaattaccggagttgcaggaaaccattccggcggcgattgatctgcaaattgcccaggatcgctcccccaccattcgcgcctcgctggaagaagtcgagcaaacgctgattatctcggtggcgctggtgattctggtggtgtttttattcctgcgctcgggtcgcgccactattattccgccgtttcggtgccggtttcgctga

SEQ ID NO: 139024 - DNA, 522 bp, Homo sapiens
atgcggaacgaggcaggcgtgcttatcggctacgggggatgtaatggaatccttcgggcgatatggcgctggttcgcgtatcatcgatccgggcgtgtattttgccatgaacagcccgatggcgggctggctccggcagggacggcggatgtggtcgcttctgccgcgcaggtgtcgatcatttcccgtgcgggcggtgcgccgacgctggcggtggggatggcctacattctgcacggcgcgctgggcggcatgatggatgtggcgttctggtatcacttcgccattttgtttgaagcactgtttattctgacggcggtggatgcaggtactcgtcctcacaagtgcccagactgcgacatggcctttgtgaccagtggagaattggttcggcatcgtcgttacaaacacacccacgagaagccattcaagtgttccatgtgcgattacgccagtgtagaagcagaccatgatttatttcaatacaaagctataactactacccaaacggacttaagatga

SEQ ID NO: 139025 - DNA, 2151 bp, Homo sapiens
atgagcgagcgttttaagctcaacgacgttgaagatattctgccggagtcattgccgctcggcattcgccagcggctttcgctggcggtggcgttttcatcaacaatcgcgctgcgcgaacgatcaggtatcttcatgttccacgccttcaacgggcgtaacagacgatatgcccgccacgatattgagcatatcgatctcaacgcgccggaagaagaaatccgccagttgctggagcgaaatcagcatacgcggctggtggttaccgaccgcgggaaaaccacgtcgattcttcatctgttagcccataaagatcccaacgaaaaatgggcggtactggttaatgaatttggggaagtcggaattgatggtgctttgctcgccgatagcggcgcattgctgaaagagatccccggcggctgcatgtgctgcgttaatggtttacccatgcagagccatgatttacgcggtatggagatggatcccattgggcgaatctacctcaattttgctgaactggagtttgagagtttcagcagtctgatggccgaaatacgccgtattgcgggtgttaccgatgtgcgtactgtcccgtggatgccttccgaacgtgagcatctggcgttgagcgcgttactggaggcgttgcctgaacctgtgctctctgtcgatatgaaaagcaaagtggatatggcgaacccggcgagctgtcagctttttgggcaaaaattggatcgcctgcgcaaccataccgccgcacaattgattaacggctttaattttttacgttggctggaaagcgaaccgcaagattcgcataacgagcatgtcgttattaatgggcagaatttcctgatggagattacgcctgtttatcttcaggatgaaaatgatcaacacgtcctgaccggtgcggtggtgatgttgcgatcaacgattcgtatgggccgccagttgcaaaatgtcgccgcccaggacgtcagcgccttcagtcaaattgtcgccgtcagcccgaaaatgaagcatgttgtcgaacaggcgcagaaactggcgatgctaagcgcgccgctgctgattacgggtgacacaggtacagagcgtgaggcggattgtttcagcacagccgtacggttaaccgagcatgtggggaggataaacagtgtttctgtggaaggtagtgtcaggttttgcgcccacgcacaaagcgcctcaacgttctgtttttgcaccgcatgcagcaccagtggcggcagcgagaactggtacacaatatgtgcttcgtcatcgcctgcgccaaaagaaagcgagcgccattcgttcaggccgcggaagaagtaccggccaggacagcatgacgacgaattcccgctggctatctggcagaccggctccggcacgcaaagtaacatgaacatgaacgaagtgctggctaaccgggccagtgaattactcggcggtgtgcgcgggatggaacgtaaagttcaccctaacgacgacgtgaacaaaagccaaagttccaacgatgtctttccgacggcgatgcacgttgcggcgctgctggcgctgcgcaagcaactcattcctcagcttaaaaccctgacacagacactgaatgagaaatcccgtgcttttgccgatatcgtcaaaattggtcgtactcacttgcaggatgccacgccgttaacgctggggcaggagatttccggctggcctgcctcacgtagcggaactggctcttggcggtacagcggtgggtactggactaaatacccatccggagtatgcgcgtcgcgtagcaagatgaactggtactcgacccgtgcgagcgacggcggacacgcgagcgatgctgtgcggactgcgcaagcagctgacagggaattgcgggctcccgtaagagacgaactcaacgcgagcattacgagcaaaacacgattggccgagagcacgagccttgccgagtgggtgaaagcctcgccgcatgatgatgataagccgattttgctaccgggcgagtgggaagtgaacacgcgtcgcgaacggcagaagcaggggattccactggatgcgggaagctggcaggccatttgtgatgcagcgcggcagattggtatgccggaagagacgttgcaggctttctgtcagcagtag

SEQ ID NO: 139026 - DNA, 2235 bp, Homo sapiens
cgccgggcaagaatccatgggctgtttgtttttaccgcccctaccgtcgcctcctggttaaatggtcacaaaaaaaaattggccaacccccggggtgattccgctggtggcccccttatatccaaaggccacataccccgcaaagcggcgaaaatattggtgtaaaaccccttctctaatagcccgtgggaaacatacccggttgcgttcaccattccgctggcgctgtttatggggatctacctgcgctatctgcgtccggggcgtattggcgaagtgtcggtcatcggtctggtattcctgattttcgccattatctctggcggctgggtggcagaaagtccgacctgggcaccgtactttgactttaccggcgtgcagttgacctggatgctggtgggttacggttttgtggcggcggtgctgccggtgtggttactgctggccccgcgtgactacctctctaccttcctgaaaatcgggactatcgtcggtctggcggtaggcattttgattatgcgcccgacgctgaccatgcctgcgctgaccaaatttgtcgatggcactggcccggtatggaccggtaacctgttcccgttcctgtttatcaccatcgcctgtggcgcggtgtctggcttccatgcgctgatctcttgtgggaccacgccgaagatgctggcgaacgaaggcaggcgtggctttatccgcttcggtgggatgttaatggaatccttcgtggcgattatggcgctggtttccgactgtatcatcgatccgggcagtcattgctcccatcgctttggcgttgatcgcctcgcgccagtgactctctttactgataccgtagctctcttcatagacaaagagcttgatatcatcaatgtcatcaatatcttcgccgccggtgtagcggaaaatctgactaccgccgcccagatcgatgtggctgacggcggctaccgtaaattcctcacccggcagcgcaatcagcaattcatcttccagcaaacgatacgcttacgtgtcgagcgcgctgggaaaaaccagacctatttattcttattgacagccgtatcctatatgtgctctaaagatgtacaaggttggagagcagaacagcgtctgtatgtcctgtcatctgccggaacagttgcaaaaagcgttctggccgcacgatgtccacgagcagccatgacctggtctcgtcgccagtttctcaccggcgtcggcgtgctggcagccgtcagcggcaccgcagggcgcgtggtggcgaaaacgttgaatatcaatggggtgcgttacggcatggtgcatgacgagtcgttatgcatcggctgtaccgcctgtatggatgcttgtcgggaagtgaacaaggtgccggaaggcgtctcgcgcctgacgattattcgtagcgagccgcagggcgaatttcctgatgtgaaatatcgcttcttccgcgtgagtgaatatatcaccctgaccgtgcggcggattgatgacggtgtcggctcccagtggctgacgcgcgatgtaaaacgcggtgattatctctggctttcggacgcgatgggggaatttacctgcgacgataaagcagaagataaattcctgttgctggcggcaggctgcggcgtcacgccgattatgtcgatgcgtcgctggcttgcgaagaaccgtccacaggccgatgtgcgggtgatctacaacgtgcgtacgccgcaggatgttattttcgccgatgagtggcgtaactatccggtaacgctggtggcagaaaataacgttaccgaaggctttatcgctggtcgtctcactcgcgaactgctggcaggtgtacctgacttagcttcacgtaccgtgatgacctgcggcccggctccgtatatggattgggtagagcaggaagtgaaagcgctcggcgtgacgcgtttctttaaagagaaattcttcaccccagtagcagaagcggcgaccagcggtctgaaattcaccaaactgcaaccggcacgagaattttacgccccggttggcaccacgctactggaggcgctggaaagcaataacgttccggttgtcgctgcctgccgtgcgggtgtttgcggctgctgtaagacaaaagtggtttccggtgaatatacggtgagcagcacaatgacgctgaccgacgccgaaatcgctgaaggttacgtactggcctgctcctgccatccgcagggggatttggttctcgcataa

SEQ ID NO: 139027 - DNA, 541 bp, Homo sapiens
  misc_feature (1)...(541): n = a,t,c or g
ttccggatattcaacacattccaggctcttaatacttccctgcgccaatacagcggccggaccaccgatactgccaaggtagaagccgccgtgttttttacaggcatccgtcacctgctggctgcggttgcctttcgccagcatgatcatacttccgccctgcgcttgcagttgatcgacataagaatccatccgtccggcggtcgttgggccaagagaaccggagggcataaccttccggcgttttggccggacccgcgtagtaaatcggatgatctttgatgtactgcggcacctcttcaccgttatccatccgctctttcagtttggcgtgacatatatcacgaccgacgataatccgngtagaaacgggatactgcgacaactgtgcgaggatctctttcatcggacggttaaggtcaacgcgcaccgcttcgccttctcccgctttgcgcacgtcttccgggatatatttgcctggattatgttccagtttttcgatccagatcccctgacggttgatcttcgctttgatattacg

SEQ ID NO: 139028 - DNA, 1053 bp, Homo sapiens
cggacgtaatccgaagactggcgataaagtacaactggacaggcaaaataccgtttcccttcaccttttttacaaacccttgcgctttcgccgttggcttcggatctttcaatgccgcaagtgccgtcttaatcgagaacagtgccagaaccaccacgaccaccataaagaagatggttaacccggcatccagacggttgttgaacaccagttgcgccagctgtgactcagtatactgcgacggaatattgccgctgtcgatcattgcctggaacttattagcaatggccaggaagccgactttcgcatccgggctaaacgctttctgccagcctgcggtcagggtacaaatcagcagccaggccgttggtaccagcgccacccaggcgtaacgttgacgtttcatcttgaacaacaccacggcacagagcatcagcgccatccctgccagcatctggttggcaataccaaacagcggccacagagtgttaatgccgcccagcggatcgaccacgccctgatggaggaagtagccccacgccagtacgcacagcgctgttgccagcaggttagcaggcagtgaatcggtccgcttcaggccaggagacaccacgcccagcagatcctgcaacataaagcgcgcagcacgcgtacctgcatccaccgccgtcagaataaacagtgcttcaaacaaaatggcgaagtgataccagaacgccacatccttcatcccgcccagcgcgccgtgcagaatgtaggccatccccaccgccagcgtcggcgcaccgcccgcacgggaaatgatcccagggcaggctcatgggccagaggaatatctgagcccgtcttctgagctcttctcagatgcgtccatcaatagctggtgttctcttggttactcacttgatcacctcacccaacccatggcagatgggagggagaagaggcttggagccatctcatgacttaaatagcctactcacaaacatatcccaaaacggaagtgtcaggaggctgaggtatgccccttctcttcccgtacaagaatacagt

SEQ ID NO: 139029 - DNA, 3019 bp, Homo sapiens
atgtcacaagatcctttccaggaacgcgaagctgaaaaatacgcgaatcccatccctagtcgggaatttatcctcgaacatttaaccaaacgtgaaaaaccggccagccgtgatgagctggcggtagaactgcacattgaaggcgaagagcagcttgaaggatatgctcccgtgttggcccccgaaagcggcattttgattatgcgcccgacgctgaccatgcctgcgctgaccaaatttgtcgatggcactggcccggtatggaccggtaacctgttcccgttcctgtttatcaccatcgcctgtggcgcggtgtctggcttccatgcgctgatctcttctgggaccacgccgaagatgctggcgaacgaagggcaggcgtgctttatcggctacggtgggatgttaatggaatccttcgtggcgattatggcgctggtttccgcctgtatcatcgatccgggcgtgtattttgccatgaacagcccgatggcggtgctggctccggcagggacggcggatgtggtcgcttctgccgcgcaggtggtgagtagctggggctttagcattacaccagatacgctaaaccagattgccagcgaagtgggtgaacagtcgatcatttcccgtgcgggcggtgcgccgacgctggcggtggggatggcctacattctgcacggcgcgctgggcggcatgatggatgtggcgttctggtatcacttcgccattttgtttgaagcactgtttattctgacggcggtggatgcaggtacgcgtgctgcgcgctttatgttgcaggatctgctgggcgtggtgtctcctggcctgaagcggaccgattcactgcctgctaacctgctggcaacagcgctgtgcgtactggcgtggggctacttcctccatcagggcgtggtcgatccgctgggcggcattaacactctgtggccgctgtttggtattgccaaccagatgctggcagggatggcgctgatgctctgtgccgtggtgttgttcaagatgaaacgtcaacgatcagtcggtaccgatcatgctggtgaaaggacgcagcagcaggtgacggatgcctgtaaaaaacacggcggcttctaccttggcagtatcggtggtccggccgctgtattggcgcagggaagtattaagagcctggaatgtgttgaatatccggaactgggaatggaagccatctggaaaattgaagtggaagatttcccggcgtttatccttgtggatgataaaggaaatgacttcttccagcagatacaactcacacaatgcacccgctataagctgtggggcgcacaaactcaacgctcgctggagcatttccgcatttcgacggagaaaatgcccacctcactgattcatgcgctggcgctaaccaagcgtgcagcggcaaaagttaatgaagatttaggcttgttgtctgaagagaaagcgagcgccattcgtcaggcggcggatgaagtactggcaggacagcatgacgacgaattcccgctggctatctggcagaccggctccggcacgcaaagtaacatgaacatgaacgaagtgctggctaaccgggccagtgaattactcggcggtgtgcgcgggatggaaccggaactggctcttggcggtacagcggtgggtactggactaaatacccatccggagtatgcgcgtcgcgtagcagatgaactggcagtcattacctgtgcaccgtttgttaccgcgccgaacaaatttgaagcgctggcgacctgtgatgtcgattttgtgatccggcgcaggttccgccttatatcatgcggctaccggagtaaggcccaaatagacaccgcaacgcagtcccgtaaggctcccgcgcaccggtattatcgttgttgcaaggcgattgcgatatttcccgtaggttttgtcgctttcgacagtcgcgactggcgcgaatattctgacccatcatttgttataacgtcgccggtattgttatcttccttggctgtgcgtggagaagaagcacgtccggcagaacatgacgacacaaaaacacccgcaattacctcgacatcttctccttcatttcgtttttacggcgaattaggggttggtggatatatggatttagagggtgagaataaacataaatacagcgacggtacctatattgaaggtggcctggagatgaagtacggctcctggttcggcctgatttacggcgaaggctggacccgtgccaggccgacccacgacggcaatgcctgggtgcctagaccatagctggggtggtttcgagggcggaattaaccgtttctatggcggttatcgtaccaatgatggcaccgaaatcatgctcagtctgcgtcaggattcctcgctggatgacctgcaatggtggggcgatttcacccccgatctgggctacgtcattcccaatacccgcgacattatgactgcgctgaaggtacagaacttaagcggcaactttcgttatagcgtcaccgcgactcctgccggacatcatgatgaaagcaaagcctggctacatttgggcaaatacgatcgctatgacgacaaatacacctatccggcaatgatgaacggttacatccagtatgaccttgccgaaggcatcacctggatgaacggtctggaaatcaccgacggcacaggacagctctatctcacgggcctgctaactcctaactttgccgctcgcgcctggcaccataccggacgcgccgacgggctggacgtaccgggaagtgaaagtgggatgatggtgagcgccatgtatgaagcgttaaagggcgtttatctctccaccgcttacacctacgccaaacatcgccctgaccacgctgacgatgaaaccacctctttcatgcagtttggtatctggtacgaatacggcggcggacgtttcgccacggcttttgatagccgcttctacatgaaaaatgcctctcacgatcccagcgaccaaatcttcctgatgcaatatttctactggtaa

SEQ ID NO: 139030 - DNA, 2913 bp, Homo sapiens
atgagccagactttttaccgctgtaataaaggagaaatcatgagcaaaactatcgcgacggaaaatgcaccggcagctatcggtccttacgtacagggcgttgatctgggcaatatgatcatcacctccggtcagatcccggtaaatccgaaaacgggcgaagtaccggcagacgtcgctgcacaggcacgtcagtcgctggataacgtaaaagcgatcgtcgaagccgctggcctgaaagtgggcgacatcgttaaaactaccgtgtttgtaaaagatctgaacgacttcgcaaccgtaaacgccacttacgaagccttcttcaccgaacacaacgccaccttcccggcacgttcttgcgttgaagttgcccgtctgccgaaagacgtgaagattgagatcgaagcgatcgctacgaggcaaaatgctgaataccgcgtcaatgccgtactggtgcaccacttccacgccatcacccaatacgccagcaatcccaatcaccggtacattaaactgcttcgccaccgacgccacacccagcggcgctttaccgcctgccgtttgcgagtcgatgcgcccttccccggtaatcaccagtgctgcgccctgcactgcctgcgcaagattgaccgcattcaacacaatttcaatgcccggtttaatatccgcattgagaaataccgccgccgcaataggaggaagagaccaggcttggaaaagttcagtcgccggaaacagggccccacgcctccggaagccccccgtgaaatccatgccgccaaagacccaagagcgaacgcccgcgaaaccggtgacggacaatccgaggatccccccgaaagctgcttgcggggagccaaccccggagcaattgcccgaccccgcgatgaatcggtctcgctgcagaagaggcacccggaaactgtacccctgaccgaccaacctggtgaccgggcatccgtgtcgctgttacgctggctgaaagaccccgaaccagaacgctacgcgcaaattggctgcgtgatgatgacgcacgactacctgcgctggtgtttaactggcgtcaaaggctgtgaagagagcaatatttccgagtccaacctctacaacatgagtcttggggaatatgacccgtgcctcaccgactggctggggatcgctgaaatcaatcacgccctgccgcctgttgtcggatctgccgaaatctgcggggagatcaccgctcagacagccgccctgaccggtctgaaagcgggtacgcccgttgttggcggcctgtttgatgtggtttccaccgcactctgcgccgggatcgaagacgaatttaccctcaatgcggtgatggggacctgggcggtgaccagcggcataacccgcggtttacgtgacggtgaagcgcatccgtatgtctatggtcgctacgttaacgatggtgaatttatcgttcacgaagccagccctacctcttccggcaacctcgaatggtttaccgcacagtggggagaaatctcgtttgatgagatcaatcaggccgttgccagcttgccgaaggctgggggcgatctctttttcctgccgttcctgtacggcagcaacgccggactcgagatgaccagtggtttctacgggatgcaggccattcacacccgcgcgcacctgttgcaggccatctatgaagggtgtgcgaatgacgaccaacgttttagcgccctgccttgccgcctctttaaccggaatcgcatcactgatcccgccatccaggtagttaatgccttccagcgacactccgctacgataaaagccagaaaattaaggcagtaccttaatttaagcgtcaggtggatgtttttgctcttatttcgatcaatgaataaacaggaaaacaggggggttttatatcagcaggatctatgtgaacgctattcaggacgggtcacacgcgcaaaaaaaagccagcctgtttccagactggcttttgtgcttttcaagccggtgttacatcgcttttttggtcaactcgataacgcgcagctgcgcgatcgctttggccagttccgcagacgcctgagcgtaatctacgtcgccgtgagagctgctaatgtgctcttcagccttacgtttcgcttccatggctcgcgcttcgtcgagatcctggccgcgaattgcggtgtcggccagaacggtcacgttgccaggctgcacttcaagaatgccgccagacagatagataaactcttcgtgaccgtgctgtttcacgatgcgaatcataccaggcataatgtcgtttctgttctagcgcgctatgtgatgagtgcgtgtcttagtctgctcctccgccacgaaaaagatttcgagcatacccccgtgttacaccgcctgatattttacagcggcctagcggtatacgtgcgagaaccgctctgttatagagaatgtccgagaaacccgtggtggtgcgactattttacacgcaccctttattaccgcgttattattccccttacgtgtttttggcataggcctgataccaggttcctccttatgacctttctggccaaagcgtcaatgccaaacgtgtttcaaatttcggggagttatcgcctgaccaccaaatttattgccgtcgggcagaaggcgctgtcttcgctgaatatcattcatatcgccgctccgcatcttgaggcactgaacatcgccactggtgaaaccattaacttctccagccgcgaagacgatcacgctattttgatttataagctggaacccacaaccgggatgctgcgaacccgtgcctatattggccagcatatgccgctctactgttccgcaatgggcaagatctacatggcgtttggtcacccggactacgtgaagtcatactgggaaagccatcagcatgagatccagccgtaa

SEQ ID NO: 139031 - DNA, 982 bp, Homo sapiens
atggcgatgccgagccgtttgtttttctgccgcggccgcaaagatcacgaatacagccttgatcactaccagcatcgtttttatctgcgttccaaccgccacggcaaaaactttggcttataccgtacccgtatgcgtgatgagcaacagtgggaagagttaattccgccacgcgaaaacatcatgctggaagggtttacgctgtttaccgactggctggtggttgaagagcgtcagcgcgggttaaccagtttgcgccaaattaaccgcaagacccgggaagtcattggtattgcctttgatgatccggcctatgtgacctggattgcctacaatccagaacctgaaaccgcgcgattgcgttatggttattcttccatgactacaccagacactttgtttgaactggatatggataccggtgagcgtcgtgtattaaaacaaacggaagttcctggtttttatgcggcgaattaccgcagtgaacacctgtggatagtcgcccgtgatggcgtcgaagttccggtttcgttggtctaccatcgcaaacattttcgcaaaggacacaacccgttgctggtgtatggctatggttcttacggcgcaagtattgatgccgatttcagttttagccgcttgagtttgttagatcgtggctttgtctacgccattgtccatgttcgcggcggtggttgcaaaatcaacctggtcgtcgataacggcaaaatcgtccgggcggaggcagcgcaggggaaaaccaaccagggtaccctgtgtctgaagggttattatggctgggacttcattaacgatacccagatcctgaccccgcgcctgaaaacccccatgatccgtcgccagcgtggcggcaaactcgaacctgtttcctgggatgaggcactgaattacgttgccgagcgcctgagcgccatcaaagagaagtacggtccggatgccatccagacgaccggctcctcgcgtg

SEQ ID NO: 139032 - DNA, 3868 bp, Homo sapiens
atgaaagaattctcatcagaaaaaatatatgattacatcgatataatcattgaagattatgaaaataccaaagaaaatgcttatctggtcgtcccccaaattaattatactatggatttaaacatagaagactctagctcagaagagttactttcagataataccctcgagaaagacgaaaattctccggacaatggctttgagcttttgtctgctcgtcgtcctttcacattgcgactgcctgtgcgtctgcatcgcccttaccttgcggcgaatcttagccgtaagcaattgctggaggcgttacgttaccattatgcgttactccgcgaatgtatgtcggcggaagaattcagcttatatttgaatacccccgggctgcaactggcgaagctggaaggcaaaaacggcgagcagttcacgcttgagctgaccatgatgatctcaatggataaagaaggtgacagcacaatcctgttccgcaacagcgaaggtattcctctggcagagatcacgtttaccctgtgtgaatatcaggggaaaagaacgatgtttattggcggactgcaatggcgcaaaatgtggaaattccacatcaggaaatccagaatgcgacgaaagcctgccacgggctatttcccaaacgcctcgtgatggaagcggcctgtctgtttgcccaacgtttgcaggtagagcagattattgccgtcagcaatgaaacgcatatttaccgcagcctgcgttatcgcgataaagaaggcaagatccacgctgattacaacgctttctgggaatcggttggcggcgtatgtgatgctgaacgccattaccgccttccagcacagatagcacgaaaagagattgccgaaatcgccagtaaaaaacgggctgaataccgtcggcgctatgagatgctcgacgctattcagccacaaatggccacgatgtttcgcggttatccccgcgaacgcgcgcccgccccagagcgcgttttacctctttttccgcgcgtcttttcgggtctcccccgaggtctccgccatgattgggggatttgcggtccttggatgatttttatcaccctgatgctgccggttgaagtacgtatcttcccgacggtggaagtcatcgccaacctgcagatgctcgacagctacgccggtttaacgctgccgctgatggcctcggcgaccgctactttcctgttccgccagttctttatgacgctgccggatgagctggtggaagccgcgcggatcgacggcgcatcgccaatgcgcttcttttgcgacatcgtttttccgctctccaaaactaatctggcggcgctgtttgtgatcacctttatctacggctggaatcagtatttgtggaccgttgttgattattaccgatgtggatctcggcaccaccgtggcagggatcaaagggatgatcgctacaggcgaaggcaccacggaatggaactcagtgatggtggcgatgttgttaacgcttatccctccggtggtgattgttttagtgatgcagcgtgccttcgtgcgcggcctggtcgatatgagaaataagatggcaggactgaaattacaggcagtaaccaaaagctgggatggtaaaacccaggtcattaaaccgctgacccttgatgtggcggatggcgaatttatcgtgatggtcgggccgtctggctgcgggaaatcgacgctgctgcgcatggttgccgggctggagcgggtgacagaaggcgatatctggatcaacgaacagcgcgtttccgaattacgccttatcgggtatatgtcgagaaaaatgggtggggggaaaaaccggagggaaccacatatcgacgttaaaaggggcatctttgggctgtccataacccccgaattcagtgagccactggcagaagattttctttcccgacgccagtacggcattcgttttcgtaatctggaaactggtaactggtacccggaactgctggataacgttgaacccagctttgtctgggcaaatgactcctggattttctactatgttcgcaagcatccggtgacgctgctgccttatcaggtctggcgtcacgccatcggtacgccagcatcgcaagataaactgatctacgaagaaaaagacgatacctattacgtcagcctgcataaaacgacctcgaagcactatgtagtcattcatttggccagcgccaccaccagtgaagttcgcctgctggacgcggaaatggccgatgccgagccgtttgtttttctgccgcgccgcaaagatcacgaatacagccttgatcactaccagcatcgtttttatctgcgttccaaccgccacggcaaaaactttggcttataccgtacccgtatgcgtgatgagcaacagtgggaagagttaattccgccacgcgaaaacatcatgctggaagggtttacgctgtttaccgactggctggtggttgaagagcgtcagcgcgggttaaccagtttgcgccaaattaaccgcaagacccgggaagtcattggtattgcctttgatgatccggcctatgtgacctggattgcctacaatccagaacctgaaaccgcgcgattgcgttatggttattcttccatgactacaccagacactttgtttgacctggatattgataccggtgagcgtcgtgtttttaaaccaccggaggtccggcttttatgcggcgagtaccgccgtgaaccccgttggttgtttccgctgatggggtcaagtactcgttcgtcggcaccacggcaacattttcgcagggacgcacccgtgctgtcgtttttattgttttcggaccgggcccccttcaggaacaacggcccgcgggttgtgcttctgcttgggtactaccaccctgaactactcggcgtgacctactctcaactctcagtccacgaggctcgaccgaagccactccccatcccccactccaggcaccgccacgttcccacgcgcaacgagatggcgcaggaaaaagagcgtccagccggaagccagagtctgtttcgcgggttgatgctgattgagattttgagcaactatccaaacggttgtccgttggcgcatctttcggagctggctggtttaaataagagtaccgtccatcgcttattgcagggattacagtcctgcggctatgtgaccaccgcgcctgccgcagggagttatcgcctgaccaccaaatttattgccgtcgggcagaaggcgctgtcttcgctgaatatcattcatatcgccgctccgcatcttgaggcactgaacatcgccactggtgaaaccattaacttctccagccgcgaagacgatcacgctattttgatttataagctggaacccacaaccgggatgctgcgaacccgtgcctatattggccagcatatgccgctctactgttccgcaatgggcaagatctacatggcgtttggtcacccggactacgtgaagtcatactgggaaagccatcagcatgagatccagccgttaacccgcaataccattaccgagctgcccgcgatgttcgacgaactggcgcacattcgtgaaagcggagcgggcgatggacagagaagaaaacgaactcggcgtctcctgtattgctgttccggtgtttgatattcatgggcgggtgccgtacgcccgtgtcgatttcgctttcgacatcacgtctgaaaccggtgggggagaaaatctccttgaacccgtggttaacgcgcgggtattctatgaacgcggttaccgtgcgggttcgtgctttatcatagccagtggaatcctggacatcgagtctgtgggaaaaatccacaagatattttcagattcattgtctttctacatttag

SEQ ID NO: 139033 - DNA, 248 bp, Homo sapiens
ctgcctgcacaatggaggtgcggctctgcagcggcgtgggcgtggctggctggctgtgccgggaaaccatctgtgatggcagggcagggcccctttgccaagtacccccttccactgaaaacgaggacggcagggcccaaacagtccgaaccacgaaacacccccctgcagtgtttgaaggcacgtatatcgttctgcccgcgaagccatttggcccgtatgaagagggcgggaacgaagaagagtag

SEQ ID NO: 139034 - DNA, 2712 bp, Homo sapiens
tcagactggtaaaatgccctgcgcggtaagcagcacgtggactttatcttttgcttcttcagatgcttcaagaatcggtggtaagcaatatgtctctacaggcagcccgacacactgcatgctgtatttgatcagtgagacaaacggtgtttcgagggcgtaaatagcgggcagttgtagtagttttttattcagcgtcgcagcggtcgccagatcgccttcacgccaggcgcggtagatgccgacggagagttccggagcaaagttagcgctggcggttatcgcaccgtcgccgcccagcagcatcgtattcagcaaatgatcatcgtaaccgcagaataccgaaaacgacgggcgtaccgacttaactgtgttgatcatcgtacgcaagtgaccaacgctgtcgatggtgtctttgatgccaacgatattctcgttttgcagagccagacgcgtcacggtttccggggttaagtcctgacccgtcagatcccgaaagttgtacaggatcacccggaagggtgaactgacgcctggcagtttcgctagcttcgcggaggtatcagagatgcacagcataatgcggcgcagctggctgcgctgactcacgcttaacggctcgtaactttccatattgcctggcagcatcgttttaacgcgcgcaatagcatcaaaggtatttgccggatgacagtgaaactctgttacttgcgtgccatcagtcgatgctgcaggcaatggaggttccatcgcaatcaacttctgcggcagttcaggatgctgttgcaggtagtgttcgaagttggtaacggcatcgcgggtacgggtaatttcatagccggacgcattcatattgacgacgaagccagcaggggcaatccccaccagtaccagcattaccaggccgatccctttttgtccgtcgttcgcgccgtgcgaaaacgccacgcccgcagcggaaacaatcagcgcaatacgcgtccagaatggcggtttacgtttgccttttttctttttgcgatcttccggaatgcggtgaatacggtcaccatgtccattcgtaaagggattggcgttcatcacaatgcagccaatcttgttccctggatgacgaaattttttcagcgattcggcatagcgtttcagtcgcgtggcgctgttttccatcagcaccatcacgccgggtacgctggtcagcgtggaaaaaccgcactggcggaacagcgcctcgtattcggttttggtataaataaacagatgcgtgctgtgccgctcataggcgaggtttatcaattcagtggctaatgtcagcgccagtccttcaccgcggacggattcactgatagcaacgcatttaataatatttccggcaattccaccgcacgcgataagcttttcatcgcgggttacggtaatagatacttccactgtggtgtcaacgctcaaataattttcatgcaggaattgggcgatttccgccattttgttattttccgcaaaaaggtaacgaataccatggagatacgcgtatttcgccaggaagatttcgaagaggtcatcaccctttgggagcgttgcgacttgctgcgtccgtggaacgatccggaaatggacatcgagcgtaagatgaaccatgacgtcagtttgtttttggtcgctgaggtaaacggtgacgtggtcggaacggtgatgggcggttatgacgggcatcgcgggtctgcttattatcttggcgtgcatccagagtttcgtgggcgtgggattgccaatgcgttgcttaatcggctggagaaaaagctgattgctcgtggctgcccgaaaattcagatcaatgtgcccgaagataacgacatggggctcggaatgtatgaacgccccgagcgtgcgttcggcatattcacgtgccaccgtgttgtgtttgggcagcaggagcgcctgacggatccccgccaccagcgcctcgaccgattccggttcaacgcaaaccgcaatgcccggaaaggtttcgcaaagctgccccagttctgtgtaggcttcagcagtaatcaccgcgttaccgcctactgccagaatattggtcagtttcgacggcaatacggcatctgccgcgccgcgtttttgcaccaccagatggcaatcgcccatcttcagcagtgcgggtaaagcgtcatacgattgcagcgggaaaaattgcatgttgcgcagtccacgctgctgcgcccattttttccagccgcgcttttcgcacacgggacttagcgccagaccgtctttggcgcgcataattggcacaccgacaatctcaatatcgaagcccatatcggcaaccattttgcggatcagcgccagttgctgaaaatctttttcaccgaagcaggcgatgtccggctggaccaggttgaacagcttgctgacaatagtcgaaacgccgcgaaaatgtcccggacggctggcaccttccagcatggtcgaaaggccaggaacgtcaacgtaagtgtgggtttcagtaccgttcgggtagatctcttttaccgaaggggcgaaaactaaatccactttacgtttgtttagcttctcgcagtcctcctgcaaggtccgtggataacgagccagatcttccgggcggtcgaactgcatcgggttaacgaaaatactgacgacgaccacatcggcgcgggctttggcttcgtcgaccagcttcatatgggccat

SEQ ID NO: 139035 - DNA, 3397 bp, Homo sapiens
ttacatagtgtggatttttttccgtctggtaacgcgtccgtggcgatagaaccccggctcccgcaggcggattttcctgaacatcatcatgattttcatgaaattgtgattgtcgaacatggcacgggtattcatgtgtttaatgggcagccctataccatcaccggtggcacggtctgtttcgtacgcgatcatgatcggcatctgtatgaacataccgataatctgtgtctgaccaatgtgctgtatcgctcgccggatcgatttcagtttctcgccgggctgaatcagttgctgccacaagagctggatgggcagtatccgtctcacattttgccgatgaggtgaattgggatgcgcgtggcgtagtagttttttattcagcgtcgcagcggtcgccagaatcgccttcacgccaggcgcggtagatgccgacggagagttccggagcaaagttagcgctggcggttatcgcaccgtcgccgcccagcagcatcgtattcagcaaatgatcatcgtaaccgcagaataccgaaaacgacgggcgtaccgacttaactgtgttgatcatcgtacgcaagtgaccaacgctgtcgatggtgtctttgatgccaacgatattctcgttttgcagagccagacgcgtcacggtttccggggttaagtcctgacccgtcagatccggaaagttgtacaggatcaccggtagggtgacgctacgggcgatctgctggtaatagtcgtcaagatttcgtggtgcgactttccagtagtaggggttgatggcgacgataccatcagcgccgtaggcttgcgcatgctgcgccagtttgaccgcttcgtcagtggaaggggaaccgacgccaatcaataccggcactcgcccgtcgacaatggttacagcttcttcggcgagtgccatgcgctgggctgtattcatttggctaaattcaccaccggtacccagataaaacagcccgtcgacccctttattaatcaggaagtcggcaacttcgcgcattgcctttttatcaagggttccgtcacgatgaaacgtgctggataccggtggaataatgccgctgaattttttcattacctcagtttccttttcgtaagtgctcattttcgtttccgcgtaatagttgccgccaaccggaacacgaccgtagcgcggattatggtactgtttcagttcgtcgatattagggtcaacaggggcccggccggtttttgccttaggggcggtgcagcttgctgctgtggtcactctagaggatcccccgaagctgggatggtcgacgtaggcgtcgcccgtgacgatgatgacgtcgcagctgtcccagccgagctgctccatctccgcccggctcatgggcaggaagggtgcggggccgaaacgcttggcccagaaggggcggtaagcggtcagggccttcggggcggcaacgggcagtgcggacataagaggtggattgtcgacggcaggcccagaaagcacaaagcccgcgcagggcgcgggctgggcgccttcggccagagtgcggaagccgccgttgttcttgatttcgctgtgatgggcgaacaggtccttgccgccgtcggcgggggtgatgaagccgaagcccttgccgtcgtcaaaccacttgacgatgccggattgcatggtgctcatgaaaatttcccaacaatcttctcgctgggcattaagaatctcggccaggacaccaaatatggttcgtccttcatcgttatgaccattattggcggcggtattgtcactccggtcatgggttttgtcagtgacgcggcgggcaacatccccactgctgaatttttcttcgcaagcagcggcttcagccatacccgcgatacaggtatcggaaatgacacactcgacggcagctccgcaggcatggcgcagtttctcggtcagctcggtaccatttctcgtttgctctgagtatatttccgggtggaaaatatggggaatactatgctgtgctacagagtcaatagctaagaccagtaatatctcttcgtgtagaaacattcctttgtcagatgtcgtgcgtttcatctctactagggttgaaacattcatgtcattgagcagtttggaaagtcttatttgtagaataccgcttctcaacccggtacgcaccagaaaatcattgatatggccatgaatggcgttggatgccgggcaaccgcccgatccttccagcacatccagactgcggttgattttctcccgctggcgtaacaattcatcttcagactgctgcgccgctggacgcgcctgttcacgcaccgataccagcccggcatccataatgccatccgccagtgcctcaattttgcgcacccgcaacgactccagcggatcgcgcggcaacatcgccggagcgacattcattaattcaatatattcagcgatgatcggcgaatcaaaccagcattcgccctcttcggtcaccagcaccggcacttttcctaacgggttaaattgcgccacgccgttgtccgcgttatagggcagttcattaataaattcgaaagttatgcccttttctaacaacagaatagaaagtttgcgtacaaacgggctggtgtagctaccgacgagtttcatgccgagtcctttgtgcgaggtcgtgctccaatgaaaagaaaactttaactctttatgcagctcggtggcgatgtaattcagccattcgatggttttatagcgggaaatactgtttaccggtgccagcaactggcggtcggggacgctgtcggcaagatactgcataatcgctacgccttccgtcagcaaagtaccgtcatccagcagcaatgcaggcacctgcccctttaattcgtacaagatgatgcgctggcgcagccgcacgtggacgtccccgcagagaccgaagtcccaggccgagaacacccggtggctgtagctggtcagagcctcggactccgccagcagtgtctgcttcagcccagacaccgagcagcttttggtactgagcctgtatatagttgaattagtaatgtgatcctccagcttgttctttggctcaggattacttcgcgatgcggctcctttttggttccatatgaactttaaagtagttttttccaattctttgaagaaagtcattggtagcttgatggggatggcattgaatctataaattaccttggccagtatggccattttcacgatattgattcttcctaaccatgagcatggaatgtacttccatttgtttgtatcctcttttatttccttgagcagtggtttgtagttctccttgaagaggtccttcacatcccttgtaagttggattcctaggtattttattctctttgaagcaattgtgaatgggagttcactcat

SEQ ID NO: 139036 - DNA, 1284 bp, Homo sapiens
ctcgaggttttgttccattcgatcggcaatcttaaacagaatcgccgcacgatcctgcaccgaggtgtgcgcccatttatctttcactttgtgcgcagcatccagcgccagatcgatgtctcgtttgcccgaagacgccacttcgcacagcagctgccgcgcgcgaaatgtccgcgaagacgagccgatgccgctcaccagcgcatgaggcgattgcgcttctcgccacgaagttcatttgcccgtacgttattgctcatcgtcaccttgctgttcgccagcctggtgacgacttatctggtggtgctgaacttcgcgattttgccgagcctccagcagtttaataaagtcctcgcgtacgaagtgcgtatgttgatgaccgacaaactgcaactggaggacggcacgcagttggttgtgcctcccgctttccgtcgggagatctaccgtgagctggggatctctctctactccaacgaggctgccgaagaggcaggtctgcgttgggcgcaacactatgaattcttaagccatcagatggcgcagcaactgggcggcccgacggaagtgcgcgttgaggtcaacaaaagttcgcctgtcgtctggctgaaaacctggctgtcgcccaatatctgggtacgcgtgccgctgaccgaaattcatcagggcgatttctctccgctgttccgctatacgctggcgattatgctattggcgataggcggggcgtggctgtttattcgtatccagaaccgaccgttggtcgatctcgaacacgcagccttgcaggttggtaaagggattattccgccgccgctgcgtgagtatggcgcttcggaggtgcgttccgttacccgtgcctttaaccatatggcggctggtgttaagcaactggcggatgaccgcacgctgctgatggcgggggtaagtcacgacttgcgcacgccgctgactcgcagacctgccggtagcaccgttctttatctgtatggctacggttatccaccgcggagacctggtcaggacgttgataagcggggtcatcgtgatgattaccgtcctgctgatcgccacccattcgcgccttacttcactgaaatggcgctcaaaggcggtttcagttttgccggtgaaagtgcgcaaatctcagcgttgtccgtgggcaatatgttcggttggtcgatttctgaattgatgtcgcttgggattattggcgttgtcgtggcggtcggtattgtcgccagcgtcgtgctgttcttacgtaaacgtgaattatcggaataa

SEQ ID NO: 139037 - DNA, 2182 bp, Homo sapiens
atggagaccctcaatctgtacgcggatttgcgcagcgtcaccggcgaggcactgttgctgctcgatgaacccggcgtcggcgttgaccctatctcacggcgcgaactgtggcagatggtgcatgagctggcgggcgaagggatgttaatcctctggagtacctcgtatctcgacgaagccgagcagtgccgtgacgtgttactgatgaacgaaggcgagttgctgtatcagggagaaccaaaagccctgacacaaaccatggccggacgcagctttctgatgaccagtccacacgagggcaaccgcaaactgttgcaacgcgccttgaaactgccgcaggtcagcgacggcatgattcaggggaaatcgaatatcgttggcatcaaagacaccatcgacagcgttggtcacttgcgtacgatgatcaacacagttaagtcggtacgcccgtcgttttcggtattctgcggttacgatgatcatttgctgaatacgatgctgctgggcggcgacggtgcgataaccgccagcgctaactttgctccggaactctccgtcggcatctaccgcgcctggcgtgaaggcgatctggcgaccgctgcgacgctgaataaaaaactactacaactgcccgctatttacgccctcgaaacaccgtttgtctcactgatcaaatacagcatgcagtgtgtcgggctgcctgtagagacatattgcttaccaccgattcttgaagcatctgaagaagcaaaagataaaaaccgaccgttggtcgatctcgaacacgcagccttgcaggttggtaaagggattattccgccgccgctgcgtgagtatggcgcttcggaggtgcgttccgttacccgtgcctttaaccatatggcggctggtgttaagcaactggcggatgaccgcacgctgctgatggcgggggtaagtcacgacttgcgcacgccgctgacgcgtattcgcctggcgactgagatgatgagcgagcaggatggctatctggcagaatcgatcaataaagatatcgaagagtgcaacgccatcattgagcagtttatcgactacctgcgcaccgggcaggagatgccgatggaaatggcggatcttaatgcagtactcggtgaggtgattgctgccgaaagtggctatgagcgggaaattgaaaccgcgctttaccccggcagcattgaagtgaaaatgcacccgctgtcgatcaaacgcgcggtggcgaatatggtggtcaacgccgcccgttatggcaatggctggatcaaagtcagcagcggaacggagccgaatcgcgcctggttccaggtggaagatgacggtccgggaattgcgccggaacaacgtaagcacctgttccagccgtttgtccgcggcgacagtgcgcgcaccattagcggcacgggattagggctggcaattgtgcagcgtatcggggataaccataacgggatgctggaacttggcaccagcgagcggggccggcctgtccattcgcgcctggctgccagtgcccggtacgcgggcgcagggcacgacaaaagaaggcgcccgtgaagacgcggtggagtttttcgccaagctggggtttgttaatcagggagaaatcaccacgccaaccaccacgccgattcgccattttttgatgattaagcccgtcgccactctggatgacattctgcatcgcggcgactggtgcgcgcagctgcaacaggcgtggtacgaacatatcccgcttagtgaaaaaatgggcgtgcgcattcagcaatataccgggcaaaaatttatcactaccatgccagaaaccggcaatcagaatccgcaccatacgctgtttgccgggagtttattctcactggcgacgctcactggttggggacttatctggctgatgctgcgtgaacgccacctcggcggaacgattattcttgcggatgcgcatatccgctacagcaagccgattagcggtaaacctcatgcggtagccgacctcggtgccttaagcggcgatctcgaccgtctggcgcgcggacgaaaagcacgggtgcagatgcaggtcgaaatctttggcgacgagacgccgggtgcagtgtttgaaggcacgtatatcgttctgcccgcgaagccatttggcccgtatgaagagggcgggaacgaagaagagtag

SEQ ID NO: 139038 - DNA, 1902 bp, Homo sapiens
atgtgtcaaatgatcttccagccattgctggtattgcggttgcgccatttcaagtgggtaacctggacgccgacagacgatcaaatcgttggctgggatgatgcctttgacaatgggatctctgcagaacagttgattgaggcgcgcaccgagtttatcgaccagctcctgcaacgattatggattgaagcgggattcagccagattgccgacctggcattggtcgccgtcggtggctacggtcgtggcgagctgcatccactttcagacgtcgatttactgattttaagccgtaaaaagctcccggacgatcaggcgcaaaaagtgggcgagctgttaacgctgctctgggatgtaaagctggaagtcggtcatagcgtgcgcacgcttgaagagtgcatgctggaagggttatcggatttaaccgtcgccaccaatttaatcgaatcccgcttattaattggcgatgttgcgctgttcctcgaactgcaaaaacatattttcagcgaaggattctggccttccgacaagttctacgcggcgaaagttgaagaacagaaccagcgccatcagcgttaccatggcaccagctacaaccttgaaccagacatcaaaagcagccctggcggcttgcgcgatatccacactctgcaatgggtggcccgccgtcattttggcgcaacatcgctggatgaaatggtcggcggacgggcggaattaaacgaatgtctgcatatattgtggcgtattcgctttgccctgcatctggtcgtcagccgttacgataatcgcctgttattcgatcgccagcttagcgtcgcccagcgtctgaattacagtggtgaaggtaacgaaccggtcgagcggatgatgaaggattacttccgcgttacacgccgcgtcagtgaactcaaccagatgctgctgcaactgttcgatgaagccatcctcgcccttcccgccgacgaaaaaccacgtccaatcgacgatgagtttcagctacgcgccatcttgcgtatgttctacaccatggtgcacaacagtgcgatcaccggcatttactccaccacgctgcgccagttacgccatgcccgtcgccatctgcaacaaccgctgtgtaatattccggaagcacgaaaactgtttttgagcattctgcgtcaccccggagcggtgcggcgcgggctattgccaatgcatcgccatagcgtgctcggcgcgtatatgccgcaatggtcgcatatcgtcgggcagatgcagtttgatctgttccacgcctacacggtggatgaacatactatccgcgtgatgctgaaactggagagttttgccagtgaagaaacgcgccacgccatccgttgtctgattttcatcgccgcgctgtttcacgatatcgccaaaggacgcggcggcgaccactccattctcggtgctcaggatgtagtgcattttgccgaactccacgggctgaactcacgcgaaacacagctggtcgcctggctggttcgccagcacctgttgatgtcggtgaccgcccaacgccgcgatattcaggacccggaagtcatcaagcagtttgccgaagaagtgcaaacggaaaatcgtctgcgctatctggtatgcctgactgtggctgacatttgcgccaccaacgagacgctgtggattagctggaagcaaagtctgttgcgtaactctactttgccaccggaaatcagctacgacgcggaatgcgaaacacgccggatatgcgcgaacgggtttatttggctggctgttttcttgcgcaaaccacgctttaacgatcggcgcaacgaaccggaatacaccggatcggtactgacgaaattcacgccatccagttgcgcggcggtgatctctttttcatgtgctaaagggtga

SEQ ID NO: 139039 - DNA, 2358 bp, Homo sapiens
tcattgttcaatttcgttacgcagcagtttcgctattccttgtggattgatatagagcggaacgatgccatcagtgggtattacatccaccattgccgggcgggttttattcagtgtttgcagcgcgttattaaccagcgtgtcatcgagggagaaaagcagcgttttgttttgcatcgccagcgacacacggaaaaaataatccgacattaattgatcgggttgcgccgcctgcgctttcggatactggccgtatcgggaactcacttcgcgacgccagatttgcgcttcgccctgctgagtctggcttaccggcaaaacaccttctggcgctttgctttcgtgcgcaccaatattttgcgtaaacagtttccctggcaattgcgcctgttcggcagtgccatcaaactgaccgacaaacagcggggtttgcaattttgagtcttcataccagcacagccccgcggcaccgtctaacgccccattcagcttgtcgttttcctggctgatgtgcgaaagcatctcttcggcaataccgtgtgaatacggcaccgccacacagaagctggctccggcaggcatactgttccataccggcgtaaaatcgaaactggcatctacgctggcggattcatcatttaacgccacaaaactgtgccagccgtcgttacccatttcgaagcgtacgccagcaaaagaagacaaaaccgaccggtaggaacggggaacggtgaaccaatagatgccaacgccggaagcttttacccgcccgatcaaatcgaaagcgcctggctgccatgaacaggttagcagtttatcccgtcccgtctcgcttaaggcctgctgcaaacgtagtgattcgtcggcaggcacaacgtcatcgtcgaggccatgccacagcagtagaggtctgtcactaagttgttccaggtggtttgtcgcttcccactcgtggggtggcgagcggtaatccccagtgccgtcatcgcgcccatcgacgcgccaccgactgccagacgggtcatcaagcagccagttttcttcggctattgccgcacgtaaagtagtgaattcctgcatactttgtagcaagatttgccagaattgatttaaccgccgcgctgcgtcaccactaaaacggctaccgtgatcgggcgcatccggcatgatcacccgcaaaccagcctgcgccagcgcaacggcaaaatagctatacaccagactggatgaagtaaagccgtgataaaaaattacgcacggtaacggggtatctttttgcccgacaggataagcatgaagaacgggaatatctgccagctcgcgtgatttggaggtgcagagcaaaaagcgcagttttccagcattgaattggtcggcagtgtattgctgcagtgccctcggtagcgcgccaaaatgcaagccaataccgtttctcggcaaggcgtacagtttgatgaagtgcttgatttgtccgcacctgcccgccgatgagtgcgactgccgtaagccgaaagtaaaactggctggcacgttatctggcatttcgcactcttccaggccggatttggcgctggcttgctgttgcaggcaggcggtcaactccgctttacggctctggtcatacagttcgctgtcgccgagtttctcttccgcctgcgccagttgcgcgttcagcttctccatctctttttccagacgggcaatctctttacgcagtggctgggtttgcgcacgcagctcagcttcccgacgcttctgatctttacgtgcctgggcgctgttcgcattctcttttggcgcttcgtcggtctggttttcctgcttttgtacgtcgctcaaccactgttgataatcttccagatcgccgtcgaacggttcgactttacgatcgtgaaccaggtagagatcgtcagtggtggaacgcagcaaatgacggtcgtgcgaaacgacaaccagcgcgccttcaaactcgattaatgcttcggtgagtgccgctttttccagcatcaacgccactgaacaatatttctcggcagagagatcaaccgcacgcgcaaccgctgcgtctttcaggtcgcgaccggtgacgataaaatgcagattaatgtgcgtaaacaggcgtggtgcctcttcgcggcgttcagaggtcaattttacttcacaatcgaccacatcctgacgccctttttgcaggatcgaaaccacatcgatggcactgcaaccacccgccgccatcaacaccatttccatcggacttggtgctttatcgcctgagttgccgtccattaaaatctgatgaccagaggcggattcgcccagaaaagttaacccttcgacccacttcactcgcgcttgcat

SEQ ID NO: 139040 - DNA, 1006 bp, Homo sapiens
atgtgtcaaatgatcttccagccattgctggtattgcggttgcgccatttcaagtgggtaacctggacgccgacagacgatcaaatcgttggctgggatgatgcctttgacaatgggatctctgcagaacagttgattgaggcgcgcaccgagtttatcgaccagctcctgcaacgattatggattgaagcgggattcagccagattgccgacctggcattggtcgccgtcggtggctacggtcgtggcgagctgcatccactttcagacgtcgatttactgattttaagccgtaaaaagctcccggacgatcaggcgcaaaaagtgggcgagctgttaacgctgctctgggatgtaaagctggaagtcggtcatagcgtgcgcacgcttgaagagtgcatgctggaagggttatcggatttaaccgtcgccaccaatttaatcgaatcccgcttattaattggcgatgttgcgctgttcctcgaactgcaaaaacatattttcagcgaaggattctggccttccgacaagttctacgcggcgaaagttgaagaacagaaccagcgccatcagcgttaccatggcaccagctacaaccttgaaccagacatcaaaagcagccctggcggcttgcgcgatatccacactctgcaatgggtggcccgccgtcattttggcgcaacatcgctggatgaaatggtcggcggacgggcggaattaaacgaatgtctgcatatattgtggcgtattcgctttgccctgcatctggtcgtcagccgttacgataatcgcctgttattcgatcgccagcttagcgtcgcccagcgtctgaattacagtggtgaaggtaacgaaccggtcgagcggatgatgaaggattacttccgcgttacacgccgcgtcagtgaactcaaccagatgctgctgcaactgttcgatgaagccatcctcgcccttcccgccgacgaaaaaccacgtccaatcgacgatgagtttcagctacgcg

SEQ ID NO: 139041 - DNA, 1884 bp, Homo sapiens
atgcgggcaggattcacaagtaacgtcctgaccttcctgacgtgcacgagtcacttcctcaacaccttccgggctgctgacgtggcaaacgtgcagacggcaaccagcaactttcgccagatacaagtctttgaagacatcatcacgcaatacaatggcaaatatatcctcgcagtagaaggtaatccgccgctgggcgagcaggggatgttctgtatcagcagcggtcgaccgtttattgagaaactcaaacgtgccgctgccggagccagcgcgattatcgcctggggaacctgcgcgtcctggggctgcgtgcaggccgcgcgacccaatccgacgcaggcaacgcctatcgacaaagtcatcaccgacaaacccattatcaaagtacctggctgcccgccgatcccggatgtgatgagcgccatcattacttacatggtgacctttgatcgcttgccagatgtcgacagaatgggccgtccgctgatgttctatggtcagcgaatccacgataaatgctatcgccgcgcccacttcgacgccggagagttcgtccagagttgggatgatgacgctgcccgcaaaggttactgcctgtacaaaatgggctgcaaagggcctaccacctataacgcctgttcctcacacgctggaatgatgggtctggtcacggctgctggctggcggaaatggtttggatcggggtcgtttcagcggtgtcgattcgagttggataagctatctatccagcgccatcagcgttaccatggcaccagctacaaccttgaaccagacatcaaaagcagccctggcggcttgcgcgatatccacactctgcaatgggtggcccgccgtcattttggcgcaacatcgctggatgaaatggtcgggtttggcttcttaacctcagcggagcgggcggaattaaacgaatgtctgcatatattgtggcgtattcgctttgccctgcatctggtcgtcagccgttacgataatcgcctgttattcgatcgccagcttagcgtcgcccagcgtctgaattacagtggtgaagtgaactcaaccagatgctgctgcaactgttcgatgaaaccatcctcgccctttccgccgacaaaaaaccaccgtccaatcgacgatgagtttaagctacgcggtacgctaatcgacctgcgtgatgaaaccattattatgccgccagccggaagccatcttgcgtatgttctccaccatggggcacaacagggcgacaaccgcttttactccaccacgttggcccatttcgccatgcccgtggcctttggaaacaccgttgtgtatattccggaagcccaaaactgttttgagcatcttggtcaccccggtgagcgacttagctctaaagattttttctacgacgacggtgagtttgccgccattcttgaggatgtgcgcacggtccgcgaattaggttttcctggactggtgacgggcgttctcgatgttgacgggaatgtcgatatgccacgaatggaaaaaataatggctgctgccggtccgctggcagtgacttttcatcgcgccttcgatatgtgcgctaaccctttatatacactcaataatcttgcggaattgggcattgcccgggtactgacatcagggcaaaaatcagacgcactgcaaggtttatcaaaaattatggaacttattgcccatcgtgatgctccaatcattatggccggagcaggagtccgtgcagaaaacctgcaccacttcctcgatgccggagtgctggaagtccatagctccgcgggagcgtggcaagcctcaccgatgcgttatcgtaatcaaagattgtccatgtcatcagatgaacacgcggaccagtattcgcgttatatc

SEQ ID NO: 139042 - DNA, 1761 bp, Homo sapiens
ggagtaaaggcgatgggaattaacgaaatcatcatgtacatcatgatgttctttatgctgatagctgccgtagacaggatcctgtcgcagttcggcggttctgctcgtttcctcggtaagttcggtaaaagtatcgaaggatcaggcggtcagttcgaagaaggctttatggcaatgggcgcactgggcctggcgatggtcggtatgaccgcgctggcaccggtactggctcacgttctcgggccggtaattattccggtttacgaaatgctcggcgctaacccatcgatgttcgccggaacactgctggcgtgcgatatgggcggcttcttcctcgccaaagagctggcgggcggcgacgtagccgcgtggctatactctgggttaattctcgggtcgatgatggggccaacgattgtgttttccattccggtggcgctcggcattatcgaaccttctgaccgtcgttatctggcgctcggcgtgctggcgggcattgtgaccattccgattggttgtatcgctggtggtctggttgctatgtactccggtgtgcagatcaacggccagccggtggaattcactttcgccctgatcctgatgaacatgatcccgcaaacgccagaaggtgttttgccggtaagccagactcagcagggcgaacgcaagatctggcgtcgcgaagtgagttcccgatacggccagtatccgaaagcgcaggcggcgcaacccgatcaattaatgtcggattattttttccgtgtgtcgctggcgatgcaaaacaaaacgctgcttttctccctcgatgacacgctggttaataacgcgctgcaaacactgaataaaacccgcccggcaatggtggatgtaatacccactgatggcatcgttccgctctatatcaatccacaaggaatagcgaaactgctgcgtaacgaaacgttgaccagtctgccgaagaatctcgaaccggttttttataacgccgcacaaactttattaatgccgaagctggacgctttatctcaacaaccgcgttatgtcatgaagctggcccagatggaacccgtggctacccataacctggcagccgctatgaggcacgggctgctggcgctgatttgctggctgtgttgtgttgttgcccatagcgaaatgctgaatgtcgaacaatccgggctgtttcgcgcctggtttgtacgcattgcacaagaacagctccgccaggggccaagtccacgctggtatcagcaggattgtgcgggcctggtgcgatttgcggcgaacgagacgctgaaagttcacgacagtaaatggctaaaaagtaacggtttatctagccagtatttgccgccagagatgacgctaacacctgaacagcgtcaactggcgcaaaactggaatcaggggaacgggaaaaccggcccctatgtgaccgcgattaatttgattcagtacaacagccagtttattggccaggacataaaccaggcgctgcctggcgatatgatttttttcgatcagggcgatgcccagcacttaatggtctggatggggcgttacgtcatctaccacaccggaagcgccacgaaaactgacaacggaatgcgcgcagtcagtctgcaacaacttatgacatggaaggacacccgatggatacccaacgattccaatcccaatttcattggcatttatcgtttaaattttctggcgcgatacagcgtgcttgtccctgtctcttgtggggacaggggctgctaa

SEQ ID NO: 139043 - DNA, 2443 bp, Homo sapiens
ttaaaacactttctccccggtgaatctgaggaagatcagcaccggtgcaccaataaacgcactgaccacagaaacgcgcagttcgccgggcacaatcacgcgcccgatgatatcggcaaacagcagcaggggcaggggtagcaagtagcgtgacgggcagcgaccagcgatgatcggcacccaccagccaacgcgccatatgcggcatcatcaggccaataaaggcaatcgggccaactattgccgtcgcactaccacaaagcacggtaatcgccagcagaccaatcaactgtgtgcgcgccacgcgactgcccagcgccgtcgcggtgtcgctgccgaggctcaaactgttcagcgcgcgactcagtaatagcgcagttgctccggcgatcagcaccgggatcagcaccacttttaaggtatgtagattgcgaatatccagcgaaccggcttgccagaaacgcaactgatcgtagacgtcaggattaagcagggcgatgccgctggtcagtccttccagcaccgccgccagcgccacgcccgccagggttaaacgcaccggacttaactgcccgccgccctgactgccggtaaaggcaacaatcaatgaggccaccagcgccccggcgaaggccatcgccagttgttcctgcgcggaagagtaaccaaacagcgccgcacccagcacaatggcaaagctggctccggcgttcacgcccattctctgcccgcggatcgtcatattgctggtctgcgccagtgacatccctcgagtctccggggcaaacgctacggaaatcaacaagccaaacagcgagatacccgcccccattagcatcgtgttactgataccgtaattattgataaagatcggtagtgcccaggtcgaaacaatggtgccaatacgacttaaggacataatcacgcccacggcagaggcgcggatatctgtcgggaagagttcattaggatagagccactggcaggtccagatggcggcaacaaacagaacaaaaggaaaatggcggcgattaaacagatcgcgaaaacgggtttgctgcggctgctcttcatcgaaagccaccggttcgccaaacagtttgatcatcatctcttcgcactcttttactcgccgaggcaacagatgctcagaaatcttcttcgcccactcgtacgcttccgcgtgcagctgcgactcgtaagggttcgaggtgcagagtacgttacggttcatgtcgttagctgtcgccagcgcatcaagaccgaccgagtgcagcatctggtgcaccggtttgacgttctttttcagaatgccgtggaactgaaacgtctggcggttggtcaggcgaatgctgccatagatggtgttttcaccggcaaatttgtcgatcgcctgccactgtttagtggtaatcaccccacccggcagacgacagcgaacgagcatcgcgtggcgcggctccagcttctgttcagcacgttcggcgcggatgtcgcggtcatcctgctgatacatgccgtggaagcgaatcagcaggaagttgtcgcccttaaagccgccggtcagaccgtcgtttaaatcttccgcaatggtgccgcgcaggtagttgcttccatgcttcatgcgctcggcgtctgtcagttttccttcgacaactaaaggccctgaatgttttccgctcattagtagacatctcgctgataacggcgctttcgcctgacgtttctggaactcgctggcggctttcacaaagcctgcaaacagcgggtgaccatcacgtggagtagaagtaaactccggatggaactggcaagccacgaaccgacgggtgattcggaacttcgatgatctcgaccaactgatcatccccggaacggcccgcaacgcgcagacctgcatcttcaatttcgtaacggtgacgatgacgctcaacaattgtcggcgcattgtacagctggcgaaccaggctatcgtcaaccaactggcactgctgtcgccgagacgcatggtaccgccgagatcgctcttctcgctacgaacttcaacgttgccgttttcatcgcgccactcggtaatcagcgccacaaccgggtacttacagtctggcacaaattccgtagagttggcgttctccatgttggcaacatggcgagcgtaatcaattaacgccacctgcatacccaggcaaatgcccagataaggaatattgttctcacgcgcaaaacgcgcggtcgtaatcatgccttctacgccacgatagccgaaaccgccaggtacgaggattgcgtccagacctttaaggatttcaacgccgcgcgtttcaacatcttgtgaatcgatcagtttgatgttgacgctgacacgattcttcagcccaccgtgtttcagtgcttcgatcactgatttataagcatccggcagttcaatgtacttgccgaccat

SEQ ID NO: 139044 - DNA, 1458 bp, Homo sapiens
tcaccaggaaaaatcaggccggtcattgctgccgccatgaagcagattaaagaattcatgagcccggatagcgatttcttccgctacatgaagacgccgacttccgcaacgcgttaatataacgactgcggtacaggtcaataaagccaccgcatcctcagggatgtcggtggttttctttttcaatcgatgctcggtaccaatcgacggcagctcgatacgcccggctttcgccagaggcgctaacgcatcgtagtagttttgccacagcgccagacgttgctggttgatacgatccgctgcttccagttgcgcccacaggtatgcagcttgcagatcggacatcaaatagctggagccaatatcgcgccaggtatatttatcgacctgaccacggaagaactggctgcggttagtgcccttttcacggatgatctcggctcgttcgattaacgctttatcgttaatcagcgtcgcgccgccttcaccgcccgccgtgtagtttttggtttcatggaagctaaagcagccaatatgaccaatggttcccagtgcacgccctttgtaagtggacatcacgccctgagcggcatcttctaccacaaacaaattatgctttttcgccaacgccataatggtgtccatttcgcaggccacacccgcgtaatggaccggcacgataacgcgcgttttgtcggtgatcgccgcttcaatcagcgtttcgtcgatgttcatggtgtccgggcgaacatccacaaaaacgatttttgcgccacgcagcacaaaggcattggcggtggagacaaaggtgtagctcggcatgatcacttcatcgccaggctggatatcgagcagcagcgccgccatctccagcgaagcggtgcaggacggcgtcagtaacactttggcgctgccaaaacgttgctccagccactgctggcagcgacgggtaaaaccgccatcgccacacagtttgccgctacccattgccgactgcatatagtcgagttcggttcccaccaccggcggtgcgttaaatggaatcatgtgatcaccgcgagcatacgcccagtttagcgccgtttgcatcagctcagcacctgcaccgcgtccagccagcaggccaattcgcgcatctgtcgcattgagttcccgtaaagagacatagccgcgaatatcgccggacgccgcacgtaaaatcagacattgatgatcaaaggtgccgcgcacggcattttcaatccactgtgcataaaagcgactgctggcgtcaggcgcataccacggcgcacgaaaacggctttgcgcaaatgcggcgctggctaactgacgtaatgcgggaatatcggtctcttgtgccactacagcaccgctatcactggcattgttcacgggtgcaggccaaattgcggcatcaaatacgggtgaactggatgtcctgcaacagctgggattctc

SEQ ID NO: 139045 - DNA, 2353 bp, Homo sapiens
  misc_feature (1)...(2353): n = a,t,c or g
atgcctgacttcgacgttgacttctgtatggagaaacgcgatcaggttatcgagcacgtagcggacatgtacggtcgtgatgcggtatcgagatcatcaccttcgntgatccgcgacgtaggccgcgtgctggggcatccgtacggctttgtcgatcgtatctcgaaactgatcccgcccgatccggggatgacgctggcgaaagcgtttgaagccgagccgcagctgccggaaatctacgaagcggatgaagaagttaaggcgctgatcgacatggcgcgcaaactggaaggggtcaccgtaacgccgcacgccggtggggtgtttatcgcgccgaccaaaattaccgatctaagcgcgctttactgcgatgaagagggcaaacatccggtcacccagtttgataaaagcgacgttgaatacgccggactggtgaagttcgacttccttggtttgcgtacgtcaccatcatcaactgggcgcttggagatgatcaacaagcggcgggcgatttctatccggacgtacattgcagatgtaacctctaaccggtattggagcaccttcaggattatcctgttcaggaaagttatcaatttcccagtgcgttccggtaaccccgggttgctcaaagcaggattagtcaccagcaaaaaagcggcgaaggtggagagaacggcgaaaaaatcgcgcgttcaggcgcgtgaagctcgggcggcggtagaagaaaataaaaaggcacagcttgagcgtgataaacagcttagcgaacagcaaaaacaagcggcgttggcgaaagaatataaagctcaggtgaagcagcttattgaaatgaaccgaatcaccattgccaatggcgatattggttttaacttcactgacggcaatctgattaagaagatttttgtcgataagctcacacaggcgcagttgattaatggtcgtctggcgattgcccgcttgttggtcgataacaatagcgaaggtgaatacgccattattcccgccagcgttgccgataaaattgctcagcgcgatgccagcagtatagtgttgcacagcgcgctcagcgccgaagagcaggatgaagacgacccgtatgccgacttcaaagtgcctgatgatttgatgtggcctacggtttatgggcgaagtgtagaccggataaggcgttcacgccgcatccggcaccggctcaattctgcaaaaccgatgacaccagcagctgtgtatacggatgatgcgggtcgtcgagcacgcggtcggttaacccactctccaccacttgcccctgcttcatcaccagcaaacggttgccggaacccggatgatgttgagcgcatgaacagcatgggatttaccggcgtgttgatcgatctggattcaccagaaagtgttgatcgcgcagccgacgaggtgatcgccctgaccgataattgtctgtatgggatctttaacaatgccggattcggcatgtatggccccctttccaccatcagccgtgcgcagatggaacagcagttttccgccaactttttcggcgcacaccagctcaccatgcgcctgttacccgcgatgttaccgcacggtgaagggcgtattgtgatgacatcatcggtgatgggattaatctccacgccgggtcgtggcgcttacgcggccagtaaatatgcgctggaggcgtggtcagatgcactgcgcatggagctgcgccacagcggaattaaagtcagcctgatcgaacccggtcccattcgtactcgcttcaccgacaacgtcaaccagacgcaaagtgataaaccagtcgaaaatcccggcatcgccgcccgctttacgttgggaccggaagcggtggtggacaaagtacgccatgcttttattagcgagaagccgaagatgcgctatccggtgacgcatggtgacctgtggcggtaatggtgcttaagcgcctgctgccggggcgcgtgatggacaaaatattgcaggggtgagttgaagcgcgcgcttaagcccccatgtcaaagaaaatatcgacaacagagagcgactccatgtccgtagaaaaaattgtcaacattaacgaatctaacctgcaacaggttcttgaacagtcgatgaccactccggtgctgttctatttttggtctgaacgtagccagcactgtttgcagttaaccccaattctggaaagcctcgcggcgcagtacaacgggcaatttattctggcgaagctggactgcgacgcggagcagatgattgccgcgcagtttggtctgcgtgcgattccgcccgtgtatctgttccagaacgggcaaccggtagatggcttccaggggccgcaaccggaagaggc

SEQ ID NO: 139046 - DNA, 4719 bp, Homo sapiens
atggacaccattatggcgttggcgaaaaagcataatttgtttgtggtagaagatgccgctcagggcgtgatgtccacttacaaagggcgtgcactgggaaccattggtcatattggctgctttagcttccatgaaaccaaaaactacacggcgggcggtgaaggcggcgcgacgctgattaacgataaagcgttaatcgaacgagccgagatcatccgtgaaaagggcactaaccgcagccagttcttccgtggtcaggtcgataaatatacctggcgcgatattggctccagctatttgatgtccgatctgcaagctgcatacctgtgggcgcaactggaagcagcggatcgtatcaaccagcaacgtctggcgctgtggcaaaactactacgatgcgttagcgcctctggcgaaagccgggcgtatcgagctgccgtcgattcccgatggctgcgtgcagaacgcgcatatgttctacattacactgcgggatattgatgaccggagcgcgttgattaactttctgaaagaagcggacatcatggcggtgtttcattacattccgctgcacggttgccctgcgggggaacactttgacgctttcagcaacagccaggtattaaaggccaccagcatggcgcgaacgccgataccgataataatcaaccgaaaggtgtcgatgccgttgcgccaggcgagcagccagaccagcagcgaagtgacaatgccgcccaccattgctgacagcgcgatagccgtcagtgctgcgccaatcaacagcgccatcagcacgcgtggtaaacgccattcggtgaccaccatcgtcatactgcgcggcgcatcgcccatcagcgcggcgaatacctgcgaggtttccagcgtgacggcaccgctgcgtaatccccagatacctgcaaccacacaggcggaaaccagcagcaaacaggaagatcagcaccggtgcaccaataaacgcactgaccacagaaacgcgcagttcgccgggcacaatcacccgcccgatgatatcggcaaacagcagcagggcagggtccactctagaggatccccattggtcgccgtcggtggctacggtcgtggcgagctgcatccactttcagacgtcgatttactgattttaagccgtaaaaagctcccggacgatcaggcgcaaaaagtgggcgagctgttaacgctgctctgggatgtaaagctggaagtcggtcatagcttgcgcaacgctttaagagtgcatgctggaagggttattcggatttaccgtccgccacccatttaatcgaatcccgcttattaattggcgattgttgcgctgttcctcgacctgcaaaaccatattttcagcaaaggattctggccttccgacaagttctacgcggcgaaagttgaagaacagaaccagcgccatcagcgttaccatggcaccagctacaaccttgaaccagacatcaaaagcagccctggcggcttgcgcgatatccacactctgcaatgggtggcccgccgtcattttggcgcaacatcgctggatgaaatggtcgggtttggcttcttaacctcagcggagcgggcggaattaaacgaatgtctgcatatattgtggcgtattcgctttgccctgcatctggtcgtcagccgttacgataatcgcctgttatgtgtacaccctactcttttgacgacgctcgacatacacggcgaagcgcaaatctggcgtcgcgaagtgagttcccgatacggccagtatccgaaagcgcaggcggcgcaacccgatcaattaatgtcggattattttttccgtgtgtcgctggcgatgcaaaacaaaacgctgcttttctccctcgatgacacgctggttaataacgcgctgcaaacactgaataaaacccgcccggcaatggtggatgtaatacccactgatggcatcgttccgctctatatcaatccacaaggaatagcgaaactgctgcgtaacgaaacgttgaccagtctgccgaagaatctcgaaccggttttttataacgccgcacaaactttattaatgccgaagctggacgctttatctcaacaaccgcgttatgtcatgaagctggcccatattgaacccgtggctacccataacctggcagccgctatgaggcacgggctgctggcgctgatttgctggctgtgttgtgttgtttcccatatccaaatgctgaatgttgaacaattctggccttttttccgcctggtttttcaacattatacaaaaacaaattccttcattgtgccaattccacactgttttaaccatgattttacggtcccctcgaaactgatcccgcccgatccggggatgacgctggcgaaagcgtttgaagccgagccgcagctgccggaaatctacgaagcggatgaagaagttaaggcgctgatcgacatggcgcgcaaactggaaggggtcacccgtaacgccggtaagcacgccggtggggtggttatcgcgccgaccaaaattaccgattttgcgccgctttactgcgatgaagagggcaaacatccggtcacccagtttgataaaagcgacgttgaatacgccggactggtgaagttcgacttccttggtttgcgtacgctcaccatcatcaactgggcgctggagatgatcaacaagcggcgggcgaagaatggcgagccgccgctggatatcgctgcgatcccgctggatgataagaaaagcttcgacatgctgcaacgctcggaaaccacggcggtattccagcttgaatcgcgcggcatgaaagacctgatcaagcgtctacaacctgactgcttcgaagatatgatcgccctagtggcacttgtccgccccgtgaatattcaaattgccgacggcaaagcgacggtcactggtgacggcctgagtcaggaggcgaaggagaaaatccttgttgcggtggggaatatttccggtattgccagtgtcgatgatcaggtgaaaacggcgacaccagccactgccagccagttttataccgttaagtctggcgacactctgagtgccatttccaaacaggtctacggtcaccagcgtcaccggatagcgcatcttcggcttctcgctaataaaagcatggcgtactttgtccaccaccgcttccggtcccaacgtaaagcgggcggcgatgccgggattttcgactggtttatcactttgcgtctggttgacgttgtcggtgaagcgaggcgatcacctcgtcggctgcgcgatcaacactttctggtgaatccagatcgatcaacacgccggtacctgcaacaggtgaacgagtcctttggctttgagctggaattttttgactttctgctgacggaaaaaaccgctaaaactgccaatggctgcgaagcggtatgtattttcgtaaacgatgacggcagccgcccggtgctggaagagctgaaaaagcacggcgttaaatatatcgccctgcgctgtgccggtttcaataacgtcgaccttgacgcggcaaaagaactggggctgaaagtagtccgtgttccagcctatgatccagaggccgttgctgaacacgccatcggtatgatgatgacgctgaaccgccgtattcaccgcgcgtatcagcgtacccgtgatgctaacttctctctggaaggtctgaccggctttactatgtatggcaaaacggcaggcgttatcggtaccggtaaaatcggtgtggcgatgctgcgcattctgaaaggttttggtatgcgtctgctggcgttcgatccgtatccaagtgcagcggcgctggaactcggtgtggagtatgtcgatctgccaaccctgttctctgaatcagacgttatctctctgcactgcccgctgacaccggaaaactatcatctgttgaacgaagccgccttcgaacagatgaaaaatggcgtgatgatcgtcaataccagtcgcggtgcattgattgattctcaggcagcaattgaagcgctgaaaaatcagaaaattggttcgttgggtatggacgtgtatgagaacgaacgcgatctattctttgaagataaatccaacgacgtgatccaggatgacgtattccgtcgccctgtctgcctgccacaacgtgcttgtttaccggggcaccaggcattcctgacagcagaagctcttgaccagtatttctcagactacgctgcaaaacttaaagcaatctggaaaaaggcgaaacctgcccgaacgaactggtttaatcttgccgctcccctgcattccaggggagctgattcagataatccccaatgacctttcatcctctattcttaaaatagtcctgagtcagaaactgtaattgagaaccacaatgaagaaagtagccgcgtttgttgcgctaagcctgctgatggcgggatgtgtaagtaatgacaaaattgctgttacgccagaacagctacagcatcatcgctttgtgctggaaagcgtaaacggtaagcccgtgaccagcgataaaaatccgccagaaatcagctttggtgaaaaaatgatgatttccggcagcatgtgtaaccgctttagcggtgaaggcaaactgtctaatggtgaactgacagccaaagggctggcaatgacccgtatgatgtgcgctaacccgcagcttaatgaactcgataacaccattagcgaaatgctgaaagaaggtgcacaagt

SEQ ID NO: 139047 - DNA, 789 bp, Homo sapiens
atgggttttgacgatacccgtgaccgcgcgttgttcgaagacagtgccatgtcgcagcagccgaccgtgccggatcgtctgcgttggttattgcaaacttttaaatatcagaaaaatattcgcattcatgctttcaacgaagagggcatggagccgtatccgcacggctgggatgtgtggagcaacggcatcaaaaagtttatggctgaaaaagggatccagccggatctgatctacacctcggaagaagccgatgcgccacagtatatggaacatctggggatcgagacggtgctggtcgaatccgaaacgtacctttatgagtatcagcgtgcgtgggaatatggccgcgattatgtcttttcacacctcggcggtgatgagatcgcattgcagtattctgactacgataaaatcgcgctgggccacgctcaatacattgattttgcggtgaaatatgccaataaagtggcatttatcgataccgattttgtcaccactcaggcgttctgcaaaaagtacgaagggcgggaacatccgttcgtgcaggcgctgattgatgaataccgtttcgatctggtgatcctgctggagaacaacacgccgtgggtggcggatggtttacgcagcctcggcagttcggtggatcgcaaagagttccagaacttgctggtggagatgctcgaagagaacaatatcgaatttgtgcgggttgaagaggaagattacgacagtcgtttcctgcgctgcgtggaactggtgcgggagatgatgggggagcagagataa

SEQ ID NO: 139048 - DNA, 330 bp, Homo sapiens
ttatctctgctcccccatcatctcccgcaccagttccacgcagcgcaggaaacgactgtcgtaatcttcctcttcaacccgcacaaattcgatattgttctcttcgagcatctccaccagcaagttctggaactctttgcgatccaccgaactgccgaggctgcgtaaaccatccgccacccacggcgtgttgttctccagcaggatcaccagatcgaaacggtattcatcaatcagcgcctgcacgaacggatgttcccgcccttcgtactttttgcagaacgcctgggatgtggggggagtgatatctttaacattgagttcccacat

SEQ ID NO: 139049 - DNA, 1998 bp, Homo sapiens
atggttatggacaacggacaaatcgtcgaaacccaggtggtgggagagaaattaaccttttcctctgacgatccgaaacgtacctttatgagtatcagcggtgcgcagatccgcgaaaacccgttccgctactgggaatatattcctaccgaagtgaagccgttttttgtgcgtaccgtggcgatccttggcggcgagtcgagcggtaaatccaccctggtaaacaaacttgccaatatcttcaacaccaccagtgcgtgggaatatggccgcgattatgtcttttcacacctcggcggtgatgagatcgcattgcagtattctgactacgataaaatcgcgctgggccacgctcaatacattgattttgcggtgaaatatgccaataaagtggcatttatcgataccgattttgtcaccactcaggcgttctgcaaaaagtacgaagggcgggaacatccgttcgtgcaggcgctgattgatgaataccgtttcgatctggtgatcctgctggagaacaacacgccagttccagaacttgctggtggagatgctcgcgatccccaatttgtcgagcctgctatagcccgcaaaatatattcatcggcttttccgttggtggatattaccgtggtgccggatgacgagattatgcaacaccgcaaaatggcgctgttggagttaattcagaaacatattcgtcagcgcgatctgttgggattagtcgaccaaattgtttcgctgctagttacagggaacactaatgacagacagctaaaagccctgtttaattacgtattacaaacaggggatgcccagcgttttcgtgcatttattggtgagatagcggaacgcgcaccacaagaaaaggagaaactgatgaccattgctgacagattacgtgaagaaggcgcaatgcagggcaaacacgaagaagccctgcgtattgctcaggagatgctggatagaggtttagacagagagttagttatgatggcccatgccggtccctacgccaaacagtttttcatctttaacagacgggccaccgaatttgtaatctttaccgacaggttgtttgaggaaaccttcgctggcagcgacctcatcctggaacgcggcatcaatacgtccggcagtcagctttgccgttacagcgcggcatattgtgcattccatgccgccagggcgctgacattggctggaacaaacgatagtattggccttcatccgatcccggatcgttccggcctgtggcgctatctcagcaccacattgctgctactgacgatgctgggtagcgccatttacaatggcgtacaggatggcgtcgataatggcgcggaaaaccatccgccatttgagatccctaaagagatttatcacgcctgggatctcaaatggcggatggtgccagcccagtttttgccgtgccagcgccacttcttcttcccccagtggtgcgccgtgcgcctcttccttacctgctttattcggcgaaccaaagccaatcaccgtacggcagataatcagcgacggcttatctttcacgctttgcgcttcaagtgttactgcgaaggggggacggagaaggctatgttggccgggcgacggttgtcccggtttaagcgtccaggcaaagatagctatgagctgcgcaaggctggcgcggcacaaaccatcgttgccagccagcaacgatgggccttgatgacggaaacaccagacgaagaagagctggatctacagtttctcgcaagtcgaatcgcaggtcacgatattcacgaactgccgtctggcggtcgcgatccgctctcctatgatgatccattgcgtcaaatcacccgcatgatccaaaaattcccgaaaccgatcatttcgatggtggaagggcggaaattcaccggttattccaacagaattcagggagatacacgcacggaacagaacaatgtgacgcaaacacggccagacaaaaaggacacggacacccgctaa

SEQ ID NO: 139050 - DNA, 2196 bp, Homo sapiens; identical to SEQ ID NO: 135942

SEQ ID NO: 139051 - DNA, 3117 bp, Homo sapiens; identical to SEQ ID NO: 123281

SEQ ID NO: 139052 - DNA, 2412 bp, Homo sapiens
tcacggccactctgcctgtatgtgcccgtttcgatggcggtacagcaggttttcgctcaagcaacagcgcattctggcgcatgatccggtaaacacgtttggcattgatcgcaggcataccatcaagttctgcctgtctgcgaagcagcgcccataggccagttcgtcatccagtgttttccatgtctgcttgtattcgcgatgaatggcagcaatgaccgggctgatttttcctgttgaattttcagtgtactgttgattggctctggcgcgggcgagatcaacaacagacgtgtattttccggtttccttgcgttcaccttcgcgacgttttttccagatgcgcatctctgcctgaatttcgggccatttagcaccaggaatacatttatgcttaacccacccaatggcgtgcaacttaagctccggatacatggcgttaacttctggcattttcatcaacgcttcaacgatatgtccgtcgaatgttgccatgtcttcctgcaacaattcctgtgcgctaataaccatatcaacggtgatgtttccatgtggtccaccgagggttttgaacgctttaatgcgctgtaaatgcggggagatattcttgaatttgtgcgtctgctcttcgtcccagacaatctcgtaataatgatgcaactcttcagatgtccgctggctgttaagcgcttcatcattacgcgacaaaatcaccaggcaacgatcgcgattcttctcacggaagttggtcacacacttagtggcaatatcggcatactcttccgggcgatcaatcttgccttccatgttctgcgccggactgccgcccagtagttcagttaaccctgccgccgccattgaacaggccacgccaatctccccctgacagccgacttccgcgccagagatggaggcgttcattttatacagcgcgccaatagcccccgcggccagaaaatagcgggcaattgaccgctcgtttaccggacgacggaacttatcgtaataagccagtactgccggaataatgccgcacgcaccgttagtcggtgccgttaccacgcgcccgccagctgcgttttcttcactaaccgccagcgcgtacatgttgatccagtcgatgacattcatcggatcgttagagatgttatcgctggaaaccagctgacgacgcagcgctacggcacggcgcggcacattgagcggaccaggcagcacgccttcagtgttcatcccacgttcaataccgtcatgcatcacttgccagatacgggcaaaaccggcgtcaatttccgctttgctgcgcagcgctgctgagtggaaatcgtaaggtaacggaacgttcgacatcgtgcgacaggccgaagtgtttttcttcgacaataaaccggcgccaagagtaaaagttatattcggacgcatactacgcatcttgatagccatcatcatgtgcatatgttcccgcagattttcccgattgttgccaggtttgcggcagagcagggcattgcgttgcgggcggatcgtcagatggcgtttgatttgccggtcaacctgcgcactacccagggattcagcagtgcattctacggtgaagagatcagtgagtcgctgttcctgcaagtgctggatgacgcaggccatcggggtgatcgttcgctggaggtgatgtgtcatccggcgtttatcgataatactatccgtcagagtgcttactgtttcccacgtcgacttctgtaataccccggtcagggttaattcgctgtagcgtgccacgtctttgatttcgtggccgttaattcgataaggaatggtattgagtaccgagttttcccgcaccacgccacgttgcaacgcggtcatcaccaccatcggtttaaccgttgagccaggttcaaacacgtcggtgatggtacggttacgcatcgcctctttcggcgtgccgctcagattgttagggttgtatgacgggctgttagccatcgccagcacttcaccggtgttgacatccaccagcacggcgctaccagattcagccttgttaaaggccaccgcattgttcagttcgcgataaaccagcgcctgcaggcgttcatcaatactcagcgccaggttgtgcgcagcctggctgtcagtagaagaaatatcttcaattacgcgaccatagcggtctttacgcacaatgcgctcacccggctgcccggtaagccatttatcgaaactcttctcaacgccctcaatcccttgacggagcatgcagcacgcgatctggaggattctccggtacgcatcacggcctatattgaagatgttgatgcgctggcgcaggcgggcgcggacattatcgccattgacggcaccgaccgcccgcgtccggtgcctgttgaaacgctgctggcacgtattcaccat

SEQ ID NO: 139053 - DNA, 3441 bp, Homo sapiens; identical to SEQ ID NO: 138871

SEQ ID NO: 139054 - DNA, 3020 bp, Homo sapiens
atggctgcattacggcaatcgttctggtcgcagctgtttgaccgggtgcatatcggccttgacttcttcgatgcctctatcaaccgcattgccgcgtgggtcattggtacacgcaatatgaaaaaagccctgctgcgtgcgttgctggaacctaccgctgagctgcgcaactggaagcggcgggcgattacactgcgcgtctggcactgctggaagagcagaaatcgttgccgtggcaggcggtctgggaaatgtattgccaacgtcacgatacgccagcaggatcaccagatcgaaacggtattcatcaatcagcgcctgcacgaacggatgttcccgcccttcgtactttttgcagaacgcctgagtggtgacgaagatctgggcctgaaggctcctatccttgaagcccttaacgatctgggttacgaaaaaccatctccaattcaggcagagtgtattccacatctgctgaatggccgcgacgttctgggtatggcccagacggggagcggaaaaactgcagcattctctttacctctgttgcagaatcttgatcctgagctgaaagcaccacagattctggtgctggcaccgacccgcgaactggcggtacaggttgctgaagcaatgacggatttctctaaacacatgcgcggcgtaaatgtggttgctctgtacggcggccagcgttatgacgtgcaattacgcgccctgcgtcaggggccgcagatcgttgtcggtactccgggccgtctgctggaccacctgaaacgtggcactctggacctctctaaactgagcggtctggttctggatgaagctgacgaaatgctgcgcatgggcttcatcgaagacgttgaaaccattatggcgcagatcccggaaggtcatcagaccgctctgttctctgcaaccatgccggaagcgattcgtcgcattacccgccgctttatgaaagagccgcaggaagtgcgcattcagtccagcgtgactacccggtccctgacatcagccagagctactggactgtctggggtatgcgcaaaaacgaagcactggtacgtttcctggaagcggaagattttgatgcggcgattatcttcgttcgtaccaaaaacgcgactctggaagtggctgaagctcttgagcgtaacggctacaacagcgccgcgctgaacggtgacatgaaccaggcgctgcgtgaacagacactggaacgcctgaaagatggtcgtctggacatcctgattgcgaccgacgttgcagcccgtggcctggacgttgagcgtatcagcctggtagttaactacgatatcccgatggattctgagtcttacgttcaccgtatcggtcgtaccggtcgtgcgggtcgtgctggccgcgcgctgctgttcgttgagaaccgcgagcgtcgtctgctgcgcaacattgaacgtactatgaagctgactattccggaagtagaactgccgaacgcagaactgctaggcaaacgccgtctggaaaaattcgccgctaaagtacagcagcagctggaaagcagcgatctggatcaataccgcgcactgctgagcaaaattcagccgactgctgaagaggtgtatgaacagcagacctcctggccgctgattctggaaaacagccaggttgtggtgctgtggggaatgaacccgctgaataccttaaaaattgcctggagcagtaccgatgagcaagggctggaatacttccatcagctgaaaaaatctggcaaaccagtgattgccattgatcctatccgctccgaaaccatcgaattctttgacgataatgccacctggatcgcgccgaatatgggcaccgacgtggcactgatgttagggattgcgcataccctgatgacacaaggcaaacacgataaagtgttccttgaaaaatacactaccgggtatccgcagtttgaagagtatctgacaggtaagagcgataatacgccgaagagcgcggtctgggcggcggaaattactggcgtaccggaagcgcagatagtcaaactcgctgaactgatggcggcgaatcgcacaatgctgatggcaggctggggaattcagcgccagcaatatggtgaacagaaacactggatgctggtgacgctggcggcgatgttagggcagattggtacaccgggcggcggttttggtttctcttatcattactccaacggtggcaacccgacgcgtgttggcggcgtgctgccggaaatgtctgcggcgattgccggacatgccagcgaggccgctgatgatggcggaatgacggcgattcctgttgcccgtatcgtcgatgcgctggaaaatcctggcggcaaatctcagcataacgcaggtgaactgctgaaaatgtgtgattacaacggcctgtctatatctggtctgatgatgcacaacgagctagcgctgcgcacaaagcaggaaattgacgccggttttgcccgtatctggcaagtgatgcatgacggtattgaacgtgggatgaacactgaaggcgtgctgcctgctggtttccacgataacatctctaacgatccgatgaatgtcatcgactggatcaacatgtacgcgctggcggttagtgaagaaaacgcagctggcgggcgcgtggtaacggcaccgactaacggtgcgtgcggcattattccggcagtactggcttattacgataagttccgtcgtccggtaaacgagcggtcaattgcccgctattttctggccgcgggggctattggcgcgctgtataaaatgaacgcctccatctctggcgcggaagtcggctgtcagggggagattggcgtggcatgttcaatggcggcggcagggttaactgaactactgggcggcagtcaggcgcaggtacaaatcccgtgcattgaacgtaatgccattaatgccgtgaaagcagtaaacgccgcgcggatggcgatgcgccgcacctcggcaccgcgtgtttcactcgataaagtgatcgagacgatgtattaa

SEQ ID NO: 139055 - DNA, 1191 bp, Homo sapiens; identical to SEQ ID NO: 124815

SEQ ID NO: 139056 - DNA, 1735 bp, Homo sapiens
  misc_feature (1)...(1735): n = a,t,c or g
tgtgcgccacgggttttgcgtcgcgaatcagttccaccaccgcggcgctgtttntggcgtccagcgaggcggtaggttcgtcaagcagcagaatggggtagtcgacgataaagccgcgggcgatgttgacgcgctgctgttcgccaccggaaaatgtcgatggtgccaggtgccacaggcgttccggcacgttcaggcgggtgagaagacgcgcggctttagcggcgcaggcttcacgcggaacgccggtatcgagcagcggctgcatcaccacttccagtgctgagatacgcgggatgacgcgcagaaactggctcacccagccgacggtggttttgcggatttccaccactttgcgcgctggcgcggtgaccaggtctacccactcgtcaccgtgtttgatctggatttgaccttcgtcgggcagatagttggcgtacagcgagcgtagcagagttgatttgccgctgccggaatggccgtggagcaccacgcattcgcccgcgttgacggtgagcgaggcgcgattgaggacgggcaggcgcacgccgttttgctggtgcaggatgaaggttttactgacgttttgtacgttaatcatttttcgcctcgtggttcgggtgtcggatgcggctgacgcgtccggatcatgtgggtcgaggaaatcggccagcgattcggtaaccatccattcggtgcgtcgctgctcttctgtggtggtaacgctcacatccgcaatgcggatatctacaaaaccacacttcttcagccagtttttcagcgccagcgcggaagggatgaaatagacattacgcatttgcgcgtaacgatcgcctggtaccagcaccgtgttctcatcaccatcaataaccagcgtttccagcaccagttcaccttcattgaccagttgatctttcaactgccatagatgctccagcggtgaacggcgatggtaaagcacgcccatcgaaaagacggtatcaaaggctttcagtgccggaagttgttcaatactaacggtaacaaatgcgcgcgcatctgctcgaagtgcctgcatcatctcaataaccgcagctgtgagcggcagttgtgcgccgacgccgtgagaagtatccagcgcattcgccagatccttaatatgcagatcaatacggaagcccggcttgaagttgcggtccatcaccatcggcgctttggcatccaaaacggtactgcccgccagtccaccgcgaattgcctgataaaccaggtccgggttaacgcccgctttagttgccagcgttaacgcttctgacatcgcggcaatattcagcgccacaatgacctgatttgccagtttggtgacgttacctgcaccgatttccccggtatgcaccacggaacccgccatcgctttcatcaaatcatagtatttgtcgaaaatagccttgtcgccgcccaccatcactgacagcgtaccgtcgatggctttcggttcaccgccgctcaccggagcatccagcatatcaatgcctttcgctggctccgcgccttcaataatgccattctcacccagcgccacctctttcacatgaggggagtttggcagcatggttatgatgacgtcgcactgttcagcgatcgctttagccgtagacgctgtttctgcacctgcagcaatcacgtcagcaatagcttctgggttacggtcagcaaccaccagcgagtaacctgctttcagaaggtttttactcat

SEQ ID NO: 139057 - DNA, 4182 bp, Homo sapiens; identical to SEQ ID NO: 124812

SEQ ID NO: 139058 - DNA, 3024 bp, Homo sapiens
tcaggcaaatatcgtcatcaaataggcggcaaacagtgccagatgcgctgcgccattgagcacgttagtacgtccggtggagaaggagatatggcacagcactaaagaggccaccatcaccaccatttctggcgcaccaagtgcaaactgcaattcgttacccgtcataaaggcaattagcgtgacgacaggtacggtaagcgaaatggttgctaacactgaaccaaagaacagattcatcgcgcgctgaacctggttgttcaacactgcttttaatgcacctaaaccttccggcgacagaatcaacagtgccaccaggaagccagtaaaggcgacaggggcattcatgctgtcgagcaatgtctccagcgagctggcgttcattttggtcaccgcaataacggcaatcagatggataatcaaccagatagcatgccacaggctgctatgggcagacggtttaccgtgatgcgggtcgtcatcatcactgtcatcttcgtgctcgtagacaaacaaactttgatgcgttttggtaggtgcagcacccgccggatgcggcaaaatacccatcgggatgccataaatcatttcgagggtttcgccgcgcataatttccgcaggcgttccctgagcaatcatttcaccgccgcgcagggcgaccagataatcacagtagcgtgccgccatattgatatcgtgcaacacggcaatgaccgtcaggccacgctcctgacttaaacggtgcaccagcgacagcacatcaacctggtgggcgatatccagcgccgaggtcggttcgtcgagcaacagacaacggctatcccggtatgcgtgcataaggtgcatggccagatctggaaaatggcttgtgtaaaaacggcagtgcgaacgtgttaacggcggatatccccagctcgcagctggcaaatgcctgtgccggtaactcagcgttggtgtatatcgaaaaatatacgggcaatgcaccgaagttaacggcgtttgatcagccagcgcgcgtttaggtgccggataaccttccaccgttttacccggatcatgtgggtcgaggaaatcggccagcgattcggtaaccatccattcggtgcgtcgctgctcttctgtggtggtaacgctcacatccgcaatgcggatatctacaaaaccacacttcttcagccagtttttcagcgccagcgcggaagggatgaaatagacattacgcatttgcgcgtaacgatcgcctggtaccagcaccgtgttctcatcaccatcaataaccagcgtttccagcaccagttcaccttcattgaccagttgatctttcaactgccatagatgcttcacgctagcagctgccagggaggctgtgcgtgtcggggtaccacatgtgacgtccagctggctagcttgcagctcagccaacactttgccgttaaccctaagggccaggtgcctgcattgctgctggatgacggtactttgctgacggaaggcgtagcgattatgcagtatcttgccgacagcgtccccgaccgccagttgctggcaccggtaaacagtatttcccgctataaaaccatcgaatggctgaattacatcgccaccgagctgcataaaggtttcacacctctgtttcgccctgatacaccggaagagtacaaaccgacagttcgcgcgcagctggagaagaagctgcaatatgtgaacgaggcactgaaggatgagcactggatctgcgggcaaagatttacaattgctgatgcctatctgtttacggttctgcgctgggcatacgcggtgaaactgaattcgcgcgtaatgttgctcactgatcaacgccgtcattgcgcggctgatcgacgcttcaatatcgatagccggatagtgcccggcttccgccagtcggcgagacagcacaatgtgaccgtcgaggatcgcccgcgcggagtcggcaatcggatcctgctggtcatcgccagcgatatccagcgggtccagcgccacgccgcgcaggtagtaatcgaacggtgaacggctggcgtgatgatattgctccagatgctgaccgataaaccaggcttcatctgtactggtaatgtcttgtgctgccagtggcgctttggcgacgtccggtaacggcaacgcttgcggctgatgttcctgataactcagtacaatattgccgtcggcatcggagagctcaatggtcagcctttcaggattgataccgtgcaacacgccctggatggcggtcgcaggcatcagtgccacggcatcatcaagtaacgcgttgcatttaccgatttcgcggatcgccaggcggtatccgttcaacggagagatggcatacagcccccactcaatcccccgcttactacgctggagttttatcaccgcatcgcgggaggcattttgcaccatgcccaaagaatgataaggcaggaaatactgctcaaaacgcttctcttcgtaagcatcaagccaggtaaaatcgggctggttatcggcaaaaataccggtcatcagttcgatatacgggccgttattgtcggtcagactcttatcccacgcctggccaaattcactgtgtccccaactccactgttttttacctggcgcaatatggagtgcctcttcattgcttaaatctggcaacaggccattaatacggctggcgagcattgttttacctgttcccggcggcccaatcagtaaaaggttgtgcccgccagcagcggtaatttccagtcctcgctttccttgttcctgaccgataacatcactgagatcatgttgtagcgcccggatacgtggacacacgtcatgtacgtgctgcaccatgctgacaagccaaatctgtatcatggcttgccggagaacccggaaatcagcgaaaccgtgaaattctggaaaggcatctggaaaccgctcgcggctgttggctttgcggctacctttgcggccagtatcttccactacgtgggtgtcggtccgaaccgtgcggatgaggaagagaataatcat

SEQ ID NO: 139059 - DNA, 504 bp, Homo sapiens
ttacacagtcagcttaactatgcggaactgcgtaaaaaatatgcgatcgccgatcgtgaaccaatcactattcacaccgaagatgctgcacgctttggtattgcgaatggcgatctggtgcgtgtctggaacaaacgtggtcagattttgacaggcgcggtggtgactgacgggatcaaaaaaggcgtggtatgcgtgcatgaaggtgcatggccagatctggaaaatggccggatcatgtgggtcgaggaaatcggccagcgattcggtaaccatccattcggtgcgtcgctgctcttctgtggtggtaacgctcacatccgcaatgcggatatgcttaggcggtagatcgctggtccacaacggttccatacctaataaccgggttccggacagtccttcatgccgtgacttcatccctatttcgcgtaacggaatgagcgccataagggtaaggtcagcgaagtacatagaaaacgcgagtccgatgggcttcggtaccat

SEQ ID NO: 139060 - DNA, 1378 bp, Homo sapiens
ttacagaagacctttcaaacgtaacgtttttcgggtggcgacattcaaatcataatgcaccagataatcaggtttaaatgtcgcgtcacgcttatctttagcaatatatgtcaggcaatgattatgggtgaaaataacgatatttttatcaggcgctttgctttgtaagtccttaattgtggtcctctcagattgcaggatcagagggcagttctgaaagtctccttggtcagggagctggtttgcagagctgaaggggaggagggggccaggaggttgcttgcggccgtggtcctgaaaatcaggccctgccaagggtctctgagggccagccggatcatgtgggtcgaggaaatcggccagcgattcggtaaccatccattcggtgcgtcgctgctcttctgtggtggtaacgctcacatccgcaatgcggatatctacaaaaccacacttcttcagccagtttttcagcgccagcgcggaagggatgaaatagacattacgcatttgcgcgtaacgatcgcctggtaccagcaccgtgttctcatcaccatccataaccagcgtttccagcacagttcccttcattgccagttgactttcaatggcaagatgcccaccgggaacgcgcgttatagcgtacaggcaccgtagcatttgtccgttataacgcacaagtgataaacttccgttttgccggaggagtcgcatggaaaatctcgctcgctttttatccaccacacttaaacaactacgccagcagcgcggctggagtctttcgcgactggcagaagcgacgggcgtttctaaagcaatgttagggcagattgagcgtaatgagtccagtccgacggtcgcgacattatggaaaattgccaccgggttgaacgtaccattttcaacatttatttctccgccgcagtccgctacgcttcgctgtttccttatgatccacaactctgctttgaacacttggcgattcagatggcatctggtgcaataagcgaatcgacgccccatgagaagggggtaatcgaacatgtcgtcgtcattgatggacaacttgatctgtgcgttgatggggaatggcacacccttaattgtggggaaggcgttcgatttgctgcagacgtcacgcatatctatcgtaatggtggggagcaaaccgtacattttcattccctcatccattacccgcgcagttaagcgggaaaactatttcgcaacgtcgcgcttgtggctaaaatagccgccatttttcagctactggataagaatgtgaccgtatcttctcatcgacttgaactgttaagcccggcacgcgatgccgccattgcccgcgaagctatgtttgcacggtgccgatgctgtttatatc

SEQ ID NO: 139061 - DNA, 3858 bp, Homo sapiens
ctaaaaccggtaaatacgacccgtgattgcgctcggtacggttattcgtggtggcactgcccactttgaatatgtcgctggtggtgcaagcaaacgctggcgcatgttgcccagacagcgaaattccgggtgcttttggggttctgacactgaaagcatgaacaaacgatgaacgtgctggcaccaaactgcacggggggtgggggggcaaatgcttgacagcctgcaggtcggctttatgggcagaccttcagataaggccgtacgaccataaaaaccgtggtagcaatgtacacaaccgggtgcctgccagtggggcagcggcgatggccatacattgtctggaatgtggatgggctccccttgctgccggcgacaatgtgggcaaagtttgcgtaccagacgctgggctattaccagcgtaagcgccgatgatagcatccagcgggcgacccccatttgctgtaaacgtaccagcgtttcgcaggtggaattagtgtgtagggtagacaacaccaggtgaccagtttgcgccgctttaatagcgatctctgctgtttcgccatcgcggatctctccgatcatgatgacgtcaggatcaaatgaaacggcgtttcttccattcacagtgaattcccgtcctcggcagccgatgttccggggggttggggggcaatgcttgcaagcctcgtaggtcgcctgttggaacagccctggatccgcgttttcagacctatcgctatttgcgtacgccggaagaaccggtaaaacgcgatagcccacgtcgtgccttccgtacatttgacggggcatctgcgatgtatcacttttcttcaaccgaaacttcccgcaaaactttcttcgtaaaaacgttgcggatacccgatcttcataccgggatacatcatttatgctgacgatatcgatcacttcatcgagttggtcatcagcaatcgccacatcaatttttacttttggcaggaaattgacgctgtattccgccccccggtacagctcggcatgccctttctgacgcccgaaacctttcacttcggtgacggtcaggccctgaataccaatggaagataacgcttcacgaacgtcttccagcttgaatggtttgattatcacggtcaccagcttcatagatcccctccggtcagaattcggtaatggttctgctacacgaagaaggtattgcaagcggtgtgccagaaatgaaaaacgagaaagagagcaggaagttaagaagtttgaaaatgaaaacgcagctggctgccagctcttcgcccgcaagttgcagttgatacatctgccagtagcgtccctgggccgccagcagttgctggtgagtgccctgctccacggcttgcccacgatgaagcacagaatggtgtcggcatcaacaatggtcgataagcggtgagcaatcactaccagcgtggtatgttcacgcaccgccgccagagcatgttgaatcgcctgttcagtaccggagtcaatgctggcgggtgcctcatcaaggatcaggatttgcggcgtctcgaacagcacgcgcgccagtgccagcagttgcttttgcccagggccgaggatcggcgcaacattgagcaatccttctttcgcctgatcgtcaggcagtacgcttaaatactccagatacagcggtagataatcgggcagttcccgacaatccagctgcaggccgaccttttcatactccgccagcaggtccaccattgcctggccgcgatcgcgggactcggcatgaacatgttcgaacagcagcagcgacgtggtgcgcccgcggtcaaacacttcgcaccattcggcctgtttatccagcagcggcgcgttaagcaggttgtgggtgaaatccgtaagcatcggcgcgtcgcggcggatcaacgccagcgcgtcctccttgcattcccacaacagctcgtccggatactccatcaacaggccgatcactttgaggatttcggtgatgttgatggcatcgatacggctactgttgaacaggttgaatttactgtccgaaccgtggcaaccgtcgccaaaggtaaaaccgcagccgttgcgttctgcgaaggcatcgcccgccatttcccgatggctggtcgggataacaaaacgatcttcatagttggcaatggcgagatagcgatacatctcttcgacctgggcgacgctcagggctacttcgtcgatggcacgagtatcagtaacgcccttcacggtttgtgaacgcatatagtggcgcatcgccatcatccgtttcagcgcccgcagtaccggaccggtatcgccggcactcacatattcaaggggctgacggctcctaccgcaaaactgcaataccgtattccggaccagccttcgcttgacggtaataccgtcgatatggatcgcgaacgcacccagtttgccgataacagccgatccgacaaataccggcgtcagtaacaccagcagtagttcgctcacgggcagcaacgccgcagatttacaaagcagttttctgactttgctggtggcgcagatgccgggtaaaaagtcttttgtctcggtacgacgctggaccagaattttgcccatgccatcatgcacgacgatgtaagttgcacgatgacgcagacactgtgcccgcatttgttcccggctggcttgtgcaatgacttcgttctcttcattgacaatatccacccattcagtacttgccaaacgacgctgttccattatcaggaaaccttctttttctggcgctggattaatcgcgacctgcgcaatgatactttgatcattgagtgcgattacactaagtacgtcattatccagcatgccataactcgccggattaccgcctttcggaatactcaccgagccggggttgaagtggaaaatctccccccgctgttctgccactggcagatgggtatgaccgtacaccagcacatcgttctggtttaaagcaggcagattttccgggccaaaaagatgaccatgcgtcaaaaacagacgttgtttttccagtaatacctgttgccacggcgcggttatcgggaaatgcagcagcatttgatccacttcgctgtcgcagttgccgcgcacagcgataaccttatgtgccacttcattaagccgttcagcgactttggctggcgcgtaaccctccggtaaagcattacgcgggccgtgattcaacacgtcgccaaggatcaccagccactgggcaccgctttgggcaaacaactccagaacacggtccgtcgccggtaaggaaggtgggcggcatagttggcatgcgctaggtcgacataaatgacgcctgcgaaggaccaacatgtcatcgctgcgtccgctgatgcgatccatgcggcgcatagtccgcgccgttcctggtaacagtcgggttaaatcacgcgtgcggtaacgaatgaccggcaatgcttctttggtcagcgtggtgaataacagttcgccatgttcaccatcggcaagcggtgtgccgtcatgaggattaacaatttcaggatagaaatgatcttcccaaatggttgggccgtcggtagtttccagacactccatcgccacccccggccccatcacttctgacaggccataaatatccagtgcggtgatccccaggcgacgctcaatctctttacgcatggcctgtgtccacggctcagcaccaaatactccaacccgcagcgagcaaccgctggcatcaccgcccaactgccgctccagctcttcaatcaggttaaggcaataagatggcgtaaccatgatcatatctggttgaaaatcacggatcagttgcgcttgtttttccgtctgcccgccagacat

SEQ ID NO: 139062 - DNA, 628 bp, Homo sapiens
tgtacggatcccatgtccgtacctgtacaacgccacgattggaatattctggggattctcaacttaatccgtttgtacaacatgaattgtacctgtccgcaatgaccatcaacggcataaatagcgacccattttgcgtttattccgccgataacgcgcgcgtaaaggcatttaagctgatggcagaattttgatacctgcggaggagatatgctcgataagctcgacgccgccttacgttttcaacaagaggcgctcaatctgcgcgcccagcgtcaggaagtgctggcagcaaacatcgccaatgccgatacccctggttatcaggcgcgcgatatcgattttgccagtgaacttaaaaaagtcatgcaacgtggacgggatgcaaccagtgtggttgcactgacgatgacctcaacgcaacacattccggcgcaggcgctgacgccttctaccgcagaactgcaataccggatttccggccaacccttcgcttgacggtaataccgtcgatatggatcgcgaacgcacccagtttgccgataacagcctgcaataccagatgagccttagcgcgttgagcgggcaaatcaaaggcatgatgaacgttttacagagcggaaattaa

SEQ ID NO: 139063 - DNA, 414 bp, Homo sapiens
atgctagcaaaattgaccgccagagtggcacagctttatggcgaacggctggatgattttccggagtatatctgcttcccgacgctcagctggctggcagcagcagacccgcaggcattaaaagcgttaggtatgccgttgaaacgggcagaggcgctgattcatctggcaaatgcggcgctggagggcaccttaccaatgacaataccgggcgatgtggagcaggcgatgaaaacgctgcaaacttttccgggcgaaagatgttttctgccggatgattatctgattaaacagcgatttccgggaatgacaccggcgcaaatccgccgttatgccgagcgctggaagccctggcgttcttatgcgctgttgcatatctggtatacggaaggctggcaaccagacgaagcatga

SEQ ID NO: 139064 - DNA, 1395 bp, Homo sapiens
ttagttcttcttttcggatccggcacttctgggggggaaatccagcgatggctggattatgtcgtcaattaaaaatgcggcgagtagattagcaaatatccacgctttcgcgagttcaggttcctttgcacgcaaagcatccaggtgcagcaaacttttgagccgcttaaaagccagttcaatttgccatcgcagacggtaacaatcagccacttgctctgctgaatattcatcttccggtaatgatgttagcaatagcacatggcccgctgcttccagcgtttccgcctgaactactcgtccttttcgacgattctcgctgagcagtcgggttttactgattaatgctttttcgggaggaagtgatacggcaatgagacgtgccggaaagggagctccggcttttttattacctgaattgcctatcattacagtggtttcaccgttcttaccgcaatccagcccgcgcagaaaacccatcatgtcaaagcgcattccttctgcagttaaccagcgcaatcctcgccagtgaacccggacgatataatcagcttctccaaaagcaagtgagcggatacattcgggacgcgaaccgaatccccggtcagcaatgcgtatctcgtctgccgtttgcgcaaatcggtccagccgttcagcgtctctgctgtcggttagctcaaaatcagtgaactgacaggtatgaggatcatatcccatatgtagtcgccattcagcgctgccgcccccgggcgcactgattgctgttccatcgacaagacgcaatctctttccgcttgtacaacccgtaactgcggcgcgtacagcaagtgtttgtgcggcaagtatgccaaaccagtcggcggcattccgcagccgcttcaggagagccacgtcagataatgttgcaacgtcatggagctgagcccatgcagtgacttcacgtaatgacatccccccggggccgtaagccagccccagacgtagcagagttgcagcatcacgaatttcgcggcggcgggttagagccccggcattacgtgccgaagtatccagttcttcgggcacatggtcaggctccaaattttccaaacttttatgctctgcttcccttgtaaatataagttccgatttcaggtcatttctttgctcacaaatataaacaaaggctactagaagcaaccaggccacatcgtgaatgctttgctgcttagaaatttcttccaccagatacactaaatcatcactctcaagttcaaagtcctttactccagctcccaataagttcattatttccatctgatacccccttagcctggacttcatgtccatatcactattggcattttggtcacaacaatttaacaagtctctaggaagttccaaactttccctcat

SEQ ID NO: 139065 - DNA, 651 bp, Homo sapiens
gaaatagacgcagctgcgtggatcgccttctccaccccacatactgaagccagaataagccacgacttcgtgtgctccacgcgagggccgcctgacgccagagtttctcccgcatctgccatcagaggaccgtcgccctcaggagcccgagctcccgcggatgcccacgatgggcgcttgttcacctcagtctcggtacccaaaagtatccaagcggcattcaaattctgcccctactgtggaaattctttgcctgtagaggagcatgtagggtcccagacctttgtcaatccacatgtgtcatccttccaagaacttgcacagaaaacacaagacataatcatttaccataacacccgcatagagaacgaacgagcacagacgaacaacgcatgcccaacccatataaaccgggagcatcatagcaataaagtggccgtcgacattcgcttgatcaactgtgatctgcctgcttctgacaacggtagcggaatgccggtgatgattgtggatgatcatccacttatgcgacgcggtgttcgtcagttactggagcttgatcctggctctgaagtggtcgccgaagcgggcgacggcgcgagcgctatcgatctggcgaatagactggatatcgacgtgccaacatggtga

SEQ ID NO: 139066 - DNA, 648 bp, Homo sapiens; identical to SEQ ID NO: 114120

SEQ ID NO: 139067 - DNA, 693 bp, Homo sapiens
atgaagccgcggaccctcgcactgagtgttacagttcttaaaggtggcgtgtccggagtttcttccttctggtgggttcgtggtctcgctggctcaggagtgaagctgcagaccttcacggtgagtgttacagctcttaaggcagcgcgtctggatttgatcgttcctcccggtgggctggtggtctcactggcttcaggagtgaagctgcagaccttcgcggtgagtgttacagctcttaaggaagcgcgtctggatttgttcgttcctcccggtgggctcgtggtctcgctggcttcaggagtgaagctgcagacctttgcggtgagtgttacagctcataaaagcagtgtggacccaaagaactcaggagcccagctggcttcacccagtggatcccgcaatggggctgcaggtggagctgccttccagtcccctgccgtgcacccacactcctcagcccttgggtggtcgatgggactgggcgccctggagcggggggcggcggtcatcggggaggctcgggctgcccaggagcccacggagggggtgggaggctcaggcatggcgggctgcaggtcccgagccctgccccgcgagaaggcagctaaggcccagcgagaaatcgagcgcagcaccggtgggctggcactgctgggggacccagtacaccctccgcagccgctggcccgg

SEQ ID NO: 139068 - DNA, 1134 bp, Homo sapiens; identical to SEQ ID NO: 129122

SEQ ID NO: 139069 - DNA, 849 bp, Homo sapiens
ttaacacttctcccttccttttctttctttccttcctttttctttctttttcattctttctttctttttctttctttctttctttttcgtttctcttttttcttttttccgttttctctttccttctttttcttctctttttctttttcctttccttccttcctttctttcttctttctttcctttctttctttttctttctttgcgtgcgttgctcggttcgttgaaggcgatagtatgcttgcgagtgttggcggaagtccgcttactgtttcccagaactcctggttctgtaaagagcaagaacacggagtaatactgctccaatgacaataccgggcgatgtggagcaggcgatgaaaacgctgcaaacttttccgggtatcgggcgctggacggcgaattattttgctttgcgtggctggcaggcgaaagatgttttcctgccggatgattatcggggtacgcgagcccacaacaggtctcgagcgtgatttccagcatttccagtgcttgcgtcagcttgaggtcgtgatcaaatgactcttcttttaagcctatgtaaccgaaaccgcagacatcgaggatctcacgaacacgcgcgtaccccagtaaggtcgggttaagtttcacaaaggtgttgagccctttttcttccagcatgtagcggcaaatggcttcgatttcattctcactgggataaaatgttttaaaacaaggcaaaaacctaacaggatccatgtccactcctgcgtccgcagcacctctgtgctgctgtggcttgctggatgtaagtcctggatccactggaccctgcatctcttcataggctgccttgaatgtcctcat

SEQ ID NO: 139070 - DNA, 652 bp, Homo sapiens
ccaacgcttcccaataattgctctgattattacgttccatcgccacgatggcctcgcgtatatgttgtttattgttttcatctgacaacattaacttttcccacgcttcatctgataatgacgcctgtggcgtgcaaattttacgtaaatcttgtaataccgtggttttctcttttgcggactgcagtgagctaaaaggcgactcggcgtatacgatgctgattgctgttccatcgacaagacgcaatctctttccgcttgtacaacccgtaactgcggcgcgtacagcaagtgtttgtgcggcaagtatgccaaaccagtcggcggcattccgcagccgcttcaggagagccacgtcagataatgttgcaacgtcatggagctgagcccatgcagtgacttcacgtaatgacatccccccggggccgtaagccagccccagacgtagcagagttgcagcatcacgaatttcgcggcggcgggttagagccccggcattacgtgccgaagtatccagttcttcgggttcaaccagtgtatcttccatctcctggatcatcagacgaaccagtttctgtggatcttccgctttctctaacagagcgttgatgttggcattcacgatgtcggcaaagcgagaaaaaatacccat

SEQ ID NO: 139071 - DNA, 2259 bp, Homo sapiens
atgaaactcatggaaacacttaaccagtgcataaacgctggtcatgaaatgacgaaggctatcgccattgcacagtttaatgatgacagcccggaagcgaggaaaataacccggcgctggagaataggtgaagcagcggatttagttggggtttcttctcaggctatcagagatgccgagaaagcagggcgactaccgcacccggatatggaaattcgaggacgggttgagcaacgtgttggttatacaattgaacaaattaatcatatgcgtgatgtgtttggtacgcgattgcgacgtgctgaagacgtatttccaccggtgatcggggttgctgcccataaaggtggcgtttacaaaacctcagtttctgttcatcttgctcaggatctggctctgaaggggctacgtgttttgctcgtggaaggtaacgacccccagggaacagcctcaatgtatcacggatgggtaccagatcttcatattcatgcagaagacactctcctgcctttctatcttggggaaaaggacgatgtcacttatgcaataaagcccacttgctggccggggcttgacattattccttcctgtctggctctgcaccgtattgaaactgagttaatgggcaaatttgatgaaggtaaactgcccaccgatccacacctgatgctccgactggccattgaaactgttgctcatgactatgatgtcatagttattgacagcgcgcctaacctgggtatcggcacgattaatgtcgtatgtgctgctgatgtgctgattgttcccacgcctgctgagttgtttgactacacctccgcactgcagtttttcgatatgcttcgtgatctgctcaagaacgttgatcttaaagggttcgagcctgatagtgacctaaggtacctgcagtcctgcgagtggggagacactggaatttttctgaagtggtcctgcattcctgccgagaaggggctgcagacctctggggcctgggtagaggcagcagatatacccctgctccctggctccccacgccggctgagccctcaggcagggtccagagggggccagggccccaaacatggacagcagtgtctcaagatgccaggtccccgggccccaggtctgcagggcggttccaacagagatcctggccagccctgcggtggagagagcacccgcagcagctctgtcatcaacaactatctggatgccaatgagcctgtgtccttggaggcccgtcttagccgcatgcacttccatgacagtcagaggaaggtcgactatgtacttgcctaccactaccggaaacgcggggtgcacctggcccaaggcttccctggccactcgctggctatcgtctccaatggggagacaggcaaggagcctcatgctgggggcccaggtgacattgagctgggaccgctcgatgccctggaggaggagaggaaggagcagcgggaggaatttgagcacaatctgatggaggctggactggagcttgagaaggacttggaggtctggcagagcctggatgtctggcatctcaacctgaattgcagcactgagtcaaagggggatatcttggatgctggggtccagcaggagtggacacgggaacccccaaaggcttcagagtggaagccccagggtcctcggagctggtgtgggtttgctgctggctccctgcacacgctgcccgtgcgtggttacgagtttgtgtataaggatggggaaaagggaaaggaagcagaagcagggtcagagctaaggagccacgtgaagctgattccacataaacaattttttcttcaaatcatcaataatcagcagatgaagccgcaggcaggagtgaagctgcagaccttcgcggtgagtgttacagctcttaaggcggcgcgtctggagttgttctttcctcccggtgggttcgtggtctcactggcttcaggagtgaagctgcagaccttcgcggtgagcgttacagctcataaaaacagtgtggacccaaaaactcctgctgtggtgagaagaggcaaaggtacagctcaggtcagtgcttcagagggtgcaagccccaagacatggcttccacgtggtgttgggcctgcaggtgcacaaaaggcaagagttaagatttgggaacctccacctggatttcaaaggatgtatggaaatgcctgcatgtccaggcagaagtctgctgcagggacagagacctcatggaggacctctactagggcaatgcagaggggaaat

SEQ ID NO: 139072 - DNA, 1173 bp, Homo sapiens
atggtgagtgttacagctcttaaggcggcgtttctggagttgttcattcctcccagtgggctcgtggtctcactggcttcaggagtgaagctgcagaccttcgcggtgagtgttacagctcttaaggtggcgcatctggagttttctccttctgatgttcggatgtgtttggagtttcttccttctggtgggttcgtggtctcgctggcttcaggagtgaagccgcagaccttcgcggtgagtgttacagttcttaaggcggcgcgtctggagttgttcattcctccccgtgggctcgtggtctctctggcttcaggagtgaagctgcagaccttcgcggtgagtgttacagctcataaaagcagcgtggacccaaagaactcaggagcccagctggcttcacctagtggatcccgcaccagggcagcaggtggagctgcctgccagtgccacgctgtgcgctcgcactcctcagcccttgggtggtcgatgggactgggtgccgtggagcagggggtggtgctcgtcggggaggctcgggccgcacaggagcccatggagtgggtgggaggctcaggcatggcgggctgcatgtcccgagccctgccccatggaaaggcagctaaggcctggcgagaaatcgagcacagcgccggtgggccggcactgctgggggacctagtacaccctctgcagccgctggcccgggtgccaagtccctcactgccttgtgcgagcagggctggccggctgctccgagtgcaggcccgccaaacccacgcccacccggaactccagctggcccccaagcgtgcacgcagccccggttcccgctcgcgcctctccctccacacatccctgcaagctgagggagccagctgtggccttggccagcacagaaaggggctcccacagtgcagcggtgggctgaagggctcctcaagtgccgccaaagtgggagcccaggcagaggaggcactgagagcgagcgagggctgtgaggactgccagcacgctgtcacctctcaactcagtctcccacatggcgtggccacccttgtgtctgttaaactctttctctacaaaaatgccatggtctttctttgtgcagtggtcaggaaaaaccccttgggcagatacaaaagttctttcaggcatctgtttccagaatag
